United States Patent Application Publication US 2008/0050393 A1 - sequence listing, part 23

SEQ ID NO: 80789 - DNA, 1667 bp, Homo sapiens
  sig_peptide (735)...(870): this location contains the signal peptide sequence, MVGLGGMSQLLLASLLPPVPQGSPTRRKLPASLLVSTALISPVCV, Run with SignalP
  misc_feature (526)...(1387): similar to gi1334836 in the genepept database release 114, Run with FASTXY 3.3t00, default parameters
gtcgacccacgcgtccggcagtgtaggggtggcgtgtcggagccccacactacaccacagggatgagcgtgtatccccttcagaggtgtgcctggggactccgtgtgcgcgactaggtgctctcctggggctggcaggggcatctgtccctttaccggagcaatggggagggtgcacacggttcaccagctttcgggctagctgggtaggaggtgatgctgccccggtctggcacccacttccccgggcctctcctaacccataggacagtagtgctcctggcttgtgctgcccagaggctacctggctttccctaattcaccgaccccaggattaaccccatggtggttggtatcaggggatgaggccagagccctttgagctgtgcccctcacaggggtagggtcatggcctcagccatcccggtaccatctgtgcccagccggggactgggaacctggtttctccatgaggagccatcccagggcctgcaggagggactagaagccagaggactctgaggctccgcttcctggggactgcagggggatcagaatgtcccaagcttgggacagtctgggaaggcagtggccatcccatccagatgagtacatccctctctccttgcctacttccctcctaccagccgtcgcggaggccactgatcctgtgtggtgttcaccccaggacgtgggaggctgctctgtccctctggccttagtttccacatctgtatggtggggttggggggcatgagtcagcttctgttggccagcttactgccccctgtgccccaaggcagccccacccggaggaagctccctgcttccctcctggtctccacagccctcatcagccctgtttgtgtcaggggctggatgtggcaaaacttgcaaaaccgcattcatggcagtcacacatctgcacgcagggttccctccctgcctggggctgggcaggtaggtgtccggtgggaagcgggccctgcctgcaggactcagcccagccctcaaaacctggcacccaggccacatccctcagcggcacagttaattgaaaatgcagctttgaggagtgcaatgtctggggaaagactgttcccagaggggcaggagcatctggggcctctggtggctcccagggtccccatgggaggagccctgtgccctccactcccaagtctcagttgtgccatctgtaaagtgggggccgccagggaggctggaggaaggtgacgggacttcaggccttggaatggggctgagtgaggggttcacatggccaccccatccctctccacgctccacccgctgggttgataccaccaggcggtggtttctgggtcacatttgctgcaattcaggtgctaatgggggcaggaggctgcagggggaggggccggtgtctagtggggcagatgtttctcaatggagaatgctcacagcggcctgcagagggggtctggtgtggcctggggctcatggggttgggatttacacagtgagcctgggctttggggcacagctgctgctgacagagggtcttggggtctgggaaggtgcttaaagcccggcccccatgcctgagctcccacacccctgtttagggacacccagatagggtgtctcctgcaggaaattccccacataattcatttatttaaaaaa

SEQ ID NO: 80790 - DNA, 1040 bp, Homo sapiens
  sig_peptide (968)...(833): this location contains the signal peptide sequence, MANLLLLIVPILIAMAFLMLTERKILGYIQLRKGPNVVGPYGLLQ, Run with SignalP
  misc_feature (976)...(14): similar to gi13004 in the genepept database release 114, Run with FASTXY 3.3t00, default parameters
ttttttttttttaggtttgagggggaatgctggagattgtaatgggtatggagacatatcatataagtaatgctagggtgagtggtaggaagttttttcataggaggtgtatgagttggtcgtagcggaatcgggggtatgctgttcgaattcataagaacagggaggttagaagtagggtcttggtgacaaaatatgttgtgtagagttcaggggagagtgcgtcatatgttgttcctaggaagattgtagtggtgagggtgtttattataataatgtttgtgtattcggctatgaagaataaggcgaaggggcctgcggcgtattcgatgttgaagcctgagactagttcggactccccttcggcaaggtcgaagggggttcggttggtctctgctagtgtggagataaatcatattatggccaagggtcatgatggcaggagtaatcagaggtgttcttgtgttgtgaataagggtggagaggttaaaggagccaccttattagtaatgttgatagtagaatgatggctagggtgaccttcatatgagattgtttggggctacctgctccgcagtgcgccgatcagggcgtagtttgagtttgatgctcaccctgatcagaggattgagtaaacggctaggctagaggtggctagaataaataggaggcctaggttgaggttgaccagggggttgggtatggggaggggggttcatagtagaagagcgatggtgagagctaaggtcggggcggtgatgtagagggtgatggcagatgtggcgggttttaggggctctttggtgaagagttttatggcgtcagcgaagggttgtagtagcccgtaggggcctacaacgttggggcctttgcgtagttgtatgtagcctagaatttttcgttcggtaagcattaggaatgccattgcgattagaatgggtacaatgaggagtaggaggttggccatgggtatgttgttaagaagaggaattgaacctctgactgtaaagttttaagttttatgcgattaccgggctctg

SEQ ID NO: 80791 - DNA, 849 bp, Homo sapiens
  misc_feature (1)...(849): n = a,t,c or g
  sig_peptide (75)...(210): this location contains the signal peptide sequence, MKAWCFSNKFWLAVLPICCASAAYLGQVWLLIYAWRAETSLETEF, Run with SignalP
  misc_feature (78)...(277): similar to gi5531235 in the genepept database release 114, Run with FASTXY 3.3t00, default parameters
tgaattagtattgtactgcattggaggcttatatagaaagcctttcccctagaaactgggggaagaattaaataatgaaagcctggtgtttttctaataagttttggttggcagtcttgcctatctgctgtgcctcagctgcttatttgggacaggtatggttacttatatatgcctggcgtgctgaaacatctcttgaaactgagttctataccattcctttgtcttggctttactacttcactactacctactacttaatgtttctgccctcattgaaatttgctcaagattcaccacccagagcattttaaattaatcctttctgtttcattattcctcacttacacttaaaatgacagtatatggccaggtgtagtggttcatccctgtacacctagcactttgggaggctgaggcggaaggatcccttgagcccaggagttggagaccagcctgggcaatatggcgagaccctgtctctgcaaaaaaaaaaaaagggggcggcctttttgggggaccaagttttaggcccgggggggggcgaggttaaactttttttatggggcccccaaattccattccggggccggggtttaaaaagggggggagggggaaacccctgggggtcccccaattaaacccctgggggaaaaaacgggaantttcccccaatgaaacgcgttgaccggggggccccttcacggtccggcctctgcgcccgccggcgcggacgcgagctctgtcgcaccgatagaaccgacgcatggcgccgatacacagcaggaagggaacgcgcggacggcccccctcaaccctccggaacggagcggacgagtgcgacggacg

SEQ ID NO: 80792 - DNA, 860 bp, Homo sapiens
  misc_feature (1)...(860): n = a,t,c or g
  sig_peptide (101)...(236): this location contains the signal peptide sequence, MYGLKILSHLWVLLILSLLLFLRKSFKFYAVSFVCFAFVAFWNNL, Run with SignalP
  misc_feature (256)...(39): similar to gi182220 in the genepept database release 114, Run with FASTXY 3.3t00, default parameters
tctattctgattctttgcttattttttaataagcatagtttttttcttatttttgagtaggttgagttgcttatatattattatatgagccccttatctgatgtatggtttaaaaatattatcccatttgtgggttctcttaattctatcattgcttcttttcctgcggaaaagttttaagttttatgcagtctcatttgtgtgttttgcttttgttgccttttggaataatctacagaaaatcatagctcaggccaatgtcatacagtctccttctatatttccttgtagtagttctacatttaaactttaattttgatttgatgcttgtataaagagcaaaataaaagtcaaattttattcttctgtgcccaaaaacattattgaacaagaccaagaacacttaaaacggaaacaaatttttggggcgggccattttacgatttgggtggccgccctggctcaagcttataatcccacctcttttaaaggctgaagcgccccaatcccccggggctgggagataaaagatggggctggcccaacgcggagaacccccctctctactagnnnacccaaaaaanannnaaggggcgccccttctggaggatcaaactttacccgcccgccacaaccaaaccttatccctttcctaacggccccccaccttcaacgcccccgccggccctcaaccatccgccgggcgaaaacctcggcctcccccaattaatccctctgaacacgcccacccgaaacaccggacccgcgcaacggacccgccgccctcaccacacgaaccgcctccgacccccccgcacactgcaccgccccaactgccagcgccgaagcgcaccgccccc

SEQ ID NO: 80793 - DNA, 627 bp, Homo sapiens
  sig_peptide (161)...(296): this location contains the signal peptide sequence, MLVHFFKVCFFLLFSIPGNHALDKRNCSKSAFTNVVVRCGKRGNV, Run with SignalP
  misc_feature (35)...(228): similar to gi4886417 in the genepept database release 114, Run with FASTXY 3.3t00, default parameters
aatttttaaattatttctatctctctgcttacattacacatttattcttgcatgttggctactttctctattagaatctttagaatattaatcaaagttcttaaagaaaatttctggcttgataattccagcgttcctgccatatttgactctgattctgatgcttgtccatttcttcaaagtgtgtttttttttgctttttagtatacctggtaatcatgcattggataagagaaactgcagtaaatcggcctttactaatgtggtagtaaggtgtgggaagaggggaaatgttctatagccctatggttaggtctcagtgttttagccttggactgtgaacttgaaaagtgctttttagtctccttcaccaacctcctggcccctgggtgggacaggatgggtggaggggtctaaagttgggtatttaccttccccaggtcaaataggctctgatcacatacccttaagggtaggcttaataaaacaagtttttttggggccaagtttcctttaagaacccagcggctatggaattatttgccaaaggagtgttttccccctggtagaacattggaaaaggttgttttaaaagggagaccctacccctctcggaaaccctgaaat

SEQ ID NO: 80794 - DNA, 374 bp, Homo sapiens
  sig_peptide (132)...(267): this location contains the signal peptide sequence, MAVFIHPVTLSICLNLLRHRLPPCASGNTSLILSYNATGRHSLST, Run with SignalP
  misc_feature (336)...(162): similar to gi516535 in the genepept database release 114, Run with FASTXY 3.3t00, default parameters
aagaaattcattaaagaaaaaccacagatactgaaacatttgacacataaaagtaattaattgctggagactacaattcctggcaaacaccattattccagatgcaccatgctacccagcatgctacctgaatggcggtttttatccatcctgtcaccctgagcatctgtctcaacctgctgaggcacagacttccaccatgtgcatcaggaaacacctcactcatactgtcatataatgcaacagggaggcatagtctctctacaggtctctctctttacgttgtaccattctgttgggcaacaattgtcccaacaaccacacttaaatccagtggggaaaaaaaggttaacagtaaaaatttcttccacgta

SEQ ID NO: 80795 - DNA, 453 bp, Homo sapiens
  sig_peptide (168)...(303): this location contains the signal peptide sequence, MSLIKYKLFFSFFVSNLFFSPGVLECFLVFLGISQFHHNLLMCIY, Run with SignalP
  misc_feature (102)...(307): similar to gi471971 in the genepept database release 114, Run with FASTXY 3.3t00, default parameters
aggcgtgcaattttcccggcgagacccacgcgtccgtgcgcatttactttttaaaatttcttctgcatttctaattgtgtcactttactaatttcttatgaattttattacagtctttttttccttgattagactttctaaaggcttgtctatttttgagcaatttgatgagtttgattaaatataaactattcttttctttctttgtgagtaacctatttttttctccaggtgttcttgaatgctttttggtatttcttggtatttcacagtttcaccacaatttgcttatgtgtatctactttgcattttctcaggttctctttgcaacctgagaaactgtgcctttctaaagttctgaggcaatctatttatattatgtctttgattatatcttccctccattctttcttttaattaaaaacttctctttgatagatgttagaacatata

SEQ ID NO: 80796 - DNA, 407 bp, Homo sapiens
  sig_peptide (85)...(220): this location contains the signal peptide sequence, MIYSLSYTISWLLITSLSFVSQRVNENTTTHKGRPNEQVNQHKLI, Run with SignalP
  misc_feature (370)...(249): similar to gi157932 in the genepept database release 114, Run with FASTXY 3.3t00, default parameters
attgacctcattttacagatgagaaaacataggttttgtatcttgcacaatcagtgcaagtggtagagctaaatattaaagctcatgatttattcactatcatacactatttcgtggttactcattacgtctctaagttttgtcagccaacgtgtgaatgaaaatacaactactcacaaaggaaggccaaatgagcaagtgaatcagcacaaacttattttcttagttaaaagactcaaggaccatatgatttcccgagtaatcaaaggacctactcttaagttttgtcagcagcgtggctttaaggtttttttgggttttttggtgtttgcattatagtaggttaaactggctctatcaaagatatagtatttcaggctcacagctacagaaataatactaattat

SEQ ID NO: 80797 - DNA, 1120 bp, Homo sapiens
  misc_feature (1)...(1120): n = a,t,c or g
  sig_peptide (242)...(377): this location contains the signal peptide sequence, MKMLCGLLRTVQGVRFPQLTRIHGPSTQGHQLLLLWVGVLQVGXS, Run with SignalP
  misc_feature (1050)...(503): similar to gi510905 in the genepept database release 114, Run with FASTXY 3.3t00, default parameters
ttttttttttttagaagcagaggctcaggctgagcccaggtttattatccaaaatcaaaatgaaatgcagtgattaaaggacacaaggcctcagtgtgcatcattctcattgtggctttcaggcggctgtggaagacagggtggggatggtggcttcgggaggtgaggtgctctgggacttgggcaagtcttaagcaagccattcctgctttctgggcctggctcccatgggccattagaaatgaaaatgctttgtggactgctgaggacggtgcaaggggtgaggtttccccagctcacccggatccatgggcccagcacccaggggcatcagcttctgcttttatgggtgggggtcttgcaggttgggaantcgtccttgggccttcagaatgacctcatggggccctccctgggaagaggtcctcccccactggctgcctccacgcgctgccgccatgtggcccagcttggggtcggcctttcgaagacttggcagccgagcacccacgggattgcatcagctccgtgatggctaagaagttcagctaaggagatgtgaggagcagtaaagaaggcccttgttctggaggaacttgtcctcgagcaactgcagggtcacatccaactctgccaggggtggctgccagtgtctggggagatactggctcacccaggaaaacagggaacatcaccttatgcccacaaggcccggaggcagcttctccgcagagtcgtgtgctgccatgccaggtactcatccacacgggcacgggcctgcaggtcctgagggtaccagtagtcagggaccttatatttgcgcgtcaggtagagcaggatggccacactctccgtcaaggtgaagtccccgtccttcaaggctggcaccttcttgagggggttcacctgggcaaaggcatcgcttaagtgctgacctttaatcagatccacgatgcgcagctcgaagggaatgtcgttcttcttggcaaagatgtaaacagcgcggcagggctgggacagcaggtccaggtacagctccaggcccatagtggggaccgaccgacaaattccncgncnctggcctaaggtctcgatggnnntccattnnnnccggggggcg

SEQ ID NO: 80798 - DNA, 458 bp, Homo sapiens
  sig_peptide (50)...(185): this location contains the signal peptide sequence, MPKELSKCFTSLILMWHIPHFLLMPHSYVCMCSCVCIHTHTNYRG, Run with SignalP
  misc_feature (210)...(30): similar to gi603633 in the genepept database release 114, Run with FASTXY 3.3t00, default parameters
cccacgcgtccgcaaaaagaatggtttccatggaaaacaatgaatatttatgcccaaagagttgagcaaatgttttacatcactaatacttatgtggcatataccgcatttcctattgatgccacattcgtatgtgtgtatgtgtagttgtgtgtgtatacacacacacacaaattatagagggaatgtagcatggtggtcaagagcatagctagactgcttggggttaaattctcttagcgctacttaccagctttggtacctcaagcaagtcacttaacctctcatgtttcagtttccatgtataaaacggagatgtataaagtgggtactacctactctagggtcactttgcaggattactaggcaggttaaataggttaatgtgtgtaaagcatatagaaccgtttagcacatcttaagtactcattaagtaggataattttaatttttatgat

SEQ ID NO: 80799 - DNA, 630 bp, Homo sapiens
  sig_peptide (110)...(245): this location contains the signal peptide sequence, MLFSLLFVNCSIFNLFKFVSKALHFSSVLGRKLNTCEVGVKMSPL, Run with SignalP
  misc_feature (106)...(237): similar to gi1171594 in the genepept database release 114, Run with FASTXY 3.3t00, default parameters
cccacgcgtccgattgacaataccagtttaattttctcacaggcaatttagattattataaatactgctgccacctaatttaatataatatagtcttacgtaactaaaaatgttgttctcacttttatttgtgaattgcagtattttcaatttatttaaatttgtttccaaggctttgcacttcagttcagtgttagggcgaaagttaaatacatgtgaagtaggtgttaaaatgtcccctttatagagaaggaaacaggagtctctctgaaacctagatctgtgtgactccaaatcctgtgctctgaatcattttgtcatgttgacacgtttctcataaaaaccccagtgccacaatttggtttgggaacttaagggcaacccataaatcctctacagtggcagggagggattccccgctccctcctttcagagctgctcattttaatgggagtcagaattctctggccctaatacattttgcagtttggctccttaaaaagcatggaatgttttaacagttttacgttccttcgacgcaaagccacacgaccacagccgacgctttattggccctattaatgtaccaggaaatacttccccttactactggtgtccaactcacaggct

SEQ ID NO: 80800 - DNA, 417 bp, Homo sapiens
  misc_feature (1)...(417): n = a,t,c or g
  sig_peptide (34)...(169): this location contains the signal peptide sequence, MTLCSVLLILAPLQHVLMKTNQQAREINLIKTKIYFIYIDIPCQL, Run with SignalP
  misc_feature (370)...(170): similar to gi62179 in the genepept database release 114, Run with FASTXY 3.3t00, default parameters
aacagatcgaagcttttcttattccaagaacagatgactctttgttcagttctgttaattctcgccccactccaacatgtgctcatgaaaactaatcagcaggctagagagatcaatctcattaaaacgaaaatttactttatctacattgatatcccatgtcaattatttaaattgaaaggtgttgttagggtgatacaaagacaccatgttcaaagatgtaagacagacaacgtggaaaaatgaacgccttttcttgcagatagagttaatatttgcaatatattaaaagttcttgtagataagtaagtcaaataccccaatagaaaaataatagcttacatacactctttcatgtacatatatatatgtctggttagagatagaataaaagctaaccagtggttgtacctaaan

SEQ ID NO: 80801 - DNA, 398 bp, Homo sapiens
  sig_peptide (9)...(144): this location contains the signal peptide sequence, MRVCVPGLAAPCLLASCVTLTKLCWLAGREIPEAGLYGFLASFLQ, Run with SignalP
  misc_feature (342)...(356): similar to gi5104945 in the genepept database release 114, Run with FASTXY 3.3t00, default parameters
gattctgtatgcgtgtgtgtgtgcctgggttggctgccccctgcctactggctagttgtgtaacactgactaagctgtgttggttggcagggagagagatccctgaggctggcctctatggtttccttgcctccttcttgcaatcctgctatagatggagggcatccctctgttctcatccctgtgttggcatgagggatagaacacaagacaccctgatcctgccctctgggaggtgatactctatatgggaagaagaaacacattgttttagaacgatcattctgaattccacgctgaactttttgggagccagttgagcgggctagatcgtctgagcccgaggagtctctaaatggaaaaaagctctattgctggttcatctttaggcagtatgg

SEQ ID NO: 80802 - DNA, 489 bp, Homo sapiens
  misc_feature (1)...(489): n = a,t,c or g
  sig_peptide (64)...(199): this location contains the signal peptide sequence, MSLLILSRSWGCFTWFFLRLLCSFHYLCWLLLISLFHEVISFTAF, Run with SignalP
  misc_feature (458)...(343): similar to gi1334499 in the genepept database release 114, Run with FASTXY 3.3t00, default parameters
agagggtagaggactgatnccntngatagatgaccattaggccagngcggtggaattcacaagatgagtttgctcattttatcaagatcatggggttgttttacatggttttttttaagattactatgttcattccattatctttgttggctacttttaatttcccttttccatgaagttattagttttactgcatttgaaatctgcaccatgtcattaaaatcccaagtacctggagctttgtttttttggcgattgtgttgtgtacttggcattatagcgtacctttcaagtgatctcagatgtttcagaaattaaatacattttctgatcttttagataagatacagacattagaaagaatccataaaggatgtgaaagcattcagatgtggcttgaagtgtattaccccaatatttattgttttaggctgtgattagcactgaaaaccaatagacaggagctcttaacttttcatgataaaagtt

SEQ ID NO: 80803 - DNA, 476 bp, Homo sapiens
  misc_feature (1)...(476): n = a,t,c or g
  sig_peptide (239)...(374): this location contains the signal peptide sequence, MLLVVRMEPIKALLRGVLLLLSVTLEEGILSDCSVVSRLIFGSLV, Run with SignalP
  misc_feature (109)...(281): similar to gi1870223 in the genepept database release 114, Run with FASTXY 3.3t00, default parameters
gcgtgcctacaggtgcgatcgcacngcgngnacnnggagacatgagtgaagggggaagcttatattaactgaaaanccaaaagttttctatatcaatgcttgaagactgaaaactgccttggaacatatgagttctcttttgtagatggcttatactccaacctgaatgatgtttaaatttctagagatccaggggatcagattgcccaaaatacaatttgcttcaccttaagatgtaatgttactggtcgtaagaatggaaccaatcaaagctttactaaggggtgttctgctcctactttcagtgacactagaggaaggcattctgagtgactgttctgttgtatccaggctcatttttgggagtttggtgacacagtactatctaaaattgggtcaagattttcttgagttcccaaggacagggatttaataattattgatgaaaagatgatgagatgatcacacctgacagg

SEQ ID NO: 80804 - DNA, 1549 bp, Homo sapiens
  sig_peptide (604)...(739): this location contains the signal peptide sequence, MEAPLSHLESRYLPAHFSPLVFFLLLSIMMACCLVAFFVLQRQPR, Run with SignalP
  misc_feature (1477)...(1069): similar to gi5104510 in the genepept database release 114, Run with FASTXY 3.3t00, default parameters
atggccttcctgatgcacctgctggtctgcgtcttcggaatgggctcctgggtgaccatcaatgggctctgggtagagctgcccctgctggtgatggagctgcccgagggctggtacctgccctcctacctcacggtggtcatccagctggccaacatcgggcccctcctggtcaccctgctccatcacttccggcccagctgcctttccgaagtgcccatcatcttcaccctgctgggcgtgggaaccgtcacctgcatcatctttgccttcctctggaatatgacctcctgggtgctggacggccaccacagcatcgccttcttggtcctcaccttcttcctggccctggtggactgcacctcttcagtgaccttcctgccgttcatgagccggctgcccacctactacctcaccaccttctttgtgggtgaaggactcagcggcctcttgcccgccctggtggctcttgcccagggctccggtctcactacctgcgtcaatgtcactgagatatcagacagcgtaccaagccctgtacccacgagggagactgacatcgcacagggagttcccagagctttggtgtccgccctccccggaatggaagcacccttgtcccacctggagagccgctaccttcccgcccacttctcacccctggtcttcttcctcctcctatccatcatgatggcctgctgcctcgtggcgttctttgtcctccagcgtcaacccaggtgctgggaggcttccgtggaagacctcctcaatgaccaggtcaccctccactccatccggccgcgggaagagaatgacttgggccctgcaggcacggtggacagcagccagggccaggggtatctagaggagaaagcagccccctgctgcccggcgcacctggccttcatctataccctggtggccttcgtcaacgcgctcaccaacggcatgctgccctctgtgcagacctactcctgcctgtcctatgggccagttgcctaccacctggctgccaccctcagcattgtggccaaccctcttgcctcgttggtctccatgttcctgcctaacaggtctctgctgttcctgggggtcctctccgtgcttgggacctgctttgggggctacaacatggccatggcggtgatgagcccctgccccctcttgcagggccactggggtggggaagtcctcattgtgagtatccggccggtggcctcgtgggtgcttttcagcggctgcctcagctacgtcaaggtgatgctgggcgtggtcctgcgcgacctcagccgcagcgccctcttgtggtgcggggcggcggtgcagctgggctcgctgctcggagcgctgctcatgttccctctggtcaacgtgctgcggctcttctcgtccgcggacttctgcaatctgcactgtccagcctaggcaggccgccgaccccgcccccatcgctcacggacggaactggggtccagagaggccaggtcacagagcaaggggcaggaacagagagacagagcctgagtaattgaatcatgaacgcacgcgt

SEQ ID NO: 80805 - DNA, 3431 bp, Homo sapiens
  sig_peptide (1146)...(1281): this location contains the signal peptide sequence, MRICNLISMMLLLCHWDGCLQFLVPMLQDFPRNCWVSINGMVNHS, Run with SignalP
  misc_feature (54)...(2744): similar to gi4775349 in the genepept database release 114, Run with FASTXY 3.3t00, default parameters
ggccggcggcggcggcggcggctccgctccgcactgcccggcgccgcctcgccatggacgcgcgcgggggcggcgggcggcccggggagagcccgggcgcgacccccgcgccggggccgccgccgccgccgccgcccgcgcccccccaacagcagccgccgccgccgccgccgcccgcgccccccccgggccccgggcccgcgcccccccagcacccgccccgggccgaggcgttgcccccggaggcggcggatgagggcggcccgcggggccggctccgcagccgcgacagctcgtgcggccgccccggcaccccgggcgcggcgagcacggccaagggcagcccgaacggcgagtgcgggcgcggcgagccgcagtgcagccccgcggggcccgagggcccggcgcgggggcccaaggtgtcgttctcgtgccgcggggcggcctcggggcccgcgccggggccggggccggcggaggaggcgggcagcgaggaggcgggcccggcgggggagccgcgcggcagccaggccagcttcatgcagcgccagttcggcgcgctcctgcagccgggcgtcaacaagttctcgctgcggatgttcggcagccagaaggccgtggagcgcgagcaggagcgcgtcaagtcggcgggggcctggatcatccacccgtacagcgacttcaggttctactgggacttcaccatgctgctgttcatggtgggaaacctcatcatcatcccagtgggcatcaccttcttcaaggatgagaccactgccccgtggatcgtgttcaacgtggtctcggacaccttcttcctcatggacctggtgttgaacttccgcaccggcattgtgatcgaggacaacacggagatcatcctggaccccgagaagatcaagaagaagtatctgcgcacgtggttcgtggtggacttcgtgtcctccatccccgtggactacatcttccttatcgtggagaagggcattgactccgaggtctacaagacggcacgcgccctgcgcatcgtgcgcttcaccaagatcctcagcctcctgcggctgctgcgcctctcacgcctgatccgctacatccatcagtgggaggagatcttccacatgacctatgacctggccagcgcggtgatgaggatctgcaatctcatcagcatgatgctgctgctctgccactgggacggctgcctgcagttcctggtgcccatgctgcaggacttcccgcgcaactgctgggtgtccatcaatggcatggtgaaccactcgtggagtgaactgtactccttcgcactcttcaaggccatgagccacatgctgtgcatcgggtacggccggcaggcgcccgagagcatgacggacatctggctgaccatgctcagcatgattgtgggtgccacctgctacgccatgttcatcggccacgccactgccctcatccagtcgctggactcctcgcggcgccagtaccaggagaagtacaagcaggtggagcagtacatgtccttccacaagctgccagctgacttccgccagaagatccacgactactatgagcaccgttaccagggcaagatgtttgacgaggacagcatcctgggcgagctcaacgggcccctgcgggaggagatcgtcaacttcaactgccggaagctggtggcctccatgccgctgttcgccaacgccgaccccaacttcgtcacggccatgctgaccaagctcaagttcgaggtcttccagccgggtgactacatcatcccgcgaaggcaccatcgggaagaagatgtacttcatccagcacggcgtggtcagcgtgctcactaagggcaacaaggagatgaagctgtccgatggctcctacttcggggagatctgcctgctcacccggggccgccgcacggcgagccgtgcgggcttgacaaccttattgccggccttctattcgctgagcgtggacaacttcaacgaggtgcttggaggagtaaccccatgattgcggggcgcctttcgagacggttggcattcgaaccgcctggaccgcatttgggaaagaagaattccatccgtgcctgcacaaggtgcagcatgacctcaactcgggcgtattcaacaaccaggagaacgccatcatccaggagatcgtcaagtacgaccgcgagatggtgcagcaggccgagctgggtcagcgcgtgggcctcttacccgccgccgccgccgccgccgcaggtcacctcggccaatcgccgacgctgcgagcaggcggcggccatgagcttctgcccgcaggtggcgcggccgctcgtggggccgctggcgctcggctcgccgcgcctcgtgcgccgcccgcccccggggcccgcacctgccgccgcctcacccgggcccccgccccccgccagccccccgggcgcgcccgccagcccccgggcaccgcggacctcgccctacggcggcctgcccgccgccccccttgctgggcccgccctgcccgcgcgccgcctgagccgcgcgtcgcgcccactgtccgcctcgcagccctcgctgcctcacggcgcccccggccccgcggcctccacacgcccggccagcagctccacaccgcgcttggggcccacgcccgctgcccgggccgccgcgcccagcccggaccgcagggactcggcctcacccggcgccgccggcggcctggacccccaggactccgcgcgctcgcgcctctcgtccaacttgtgaccctcgccgaccgccccgcgggcccaggcgggccaggggcggggccgtcatccagaccaaagccatgccattgcgctgccccggccgccagtccgcccagaagccatagacgagacgtaggtagccgtagttggacggacgggcagggccggcggggcagccccctccgcgcccccggccgtcccccctcatcgccccgcgcccacccccatcgcccctgcccccggcggcggcctcgcgtgcgagggggctcccttcacctcggtgcctcagttcccccagctgtaagacagggacggggcggcccagtggctgagaggagccggctgtggagccccgcccgccccccaccctctaggtggcccccgtccgaaggaggatcgttttctaagtgcaatacttggcccgccggcttcccgctgcccccatcgcgctcacgcaaataaccggcccggcccccgtccgcgggggtcccccggtgacctcggggagcagcaccccgcctccctccagcactggcaccgaggggcaggcctggctgcgcagggcgcgggggggaggctggggtcccgccgccgtgttgaatgtactgacgagccgaggcagcagtgcccccacggtggccccccacgccccattaacccccacacccccattccgcgcaataaacgacagcattggcgccaa

SEQ ID NO: 80806 - DNA, 8849 bp, Homo sapiens
  sig_peptide (2657)...(2792): this location contains the signal peptide sequence, MAHFTWAHLRVLTLFLLQVGLLDDVHQLLGPQADEDSLSIFTVMP, Run with SignalP
  misc_feature (5991)...(5623): similar to gi1052549 in the genepept database release 114, Run with FASTXY 3.3t00, default parameters
ttttttttttttagatttctattaatttatttaaggcaattaacatattagttctcaggccaaaggatttgtaaaacattacaccaaaaggagaaaaacaagcggtcatgaaacagccacgcaagcgcagctcagcccttgttgcctgggcgtacaactcttccccaggaagcctgggaagaggcaggtcctgggagcaagatcgtccatcatggagtcaccaggccacctggagccatgccgggggtggcatggacacgacagtgaggtctgcactggctacagcagatctgaggcacggagggagctgcacagccatgggcagggctgagcacagcacccttgaaataagttaaataacaaagccctaaaatcactagtaacagcataactgccacctcccccagaggccggcagccgccaaaatgtagtgcttggagttaaaggggtgaccccactcttaactacccacaaggaggactacaaagagttgtcagttattgctttaaggaacaaaggtctctaggtaggatttatcttctgctaaggcattaaggtaaactgagtcccagtgaactttcaagtctttttaagggctctaagcaggactgtcagctctgaggctccccctccatgctcttcaaagcctgggtgggtgtcagggtgtctggcagagtgggagtggaggctggccagctggctgggccacccaacccgagggagggggcagtgttcttcccagtcgcagtctccagtgatgagcatcccctgttggggccttcggtggctctcctcagcggctaatgcagttctggacatccacaaagcctaggcgttgcctgcgtttccgctgctccgtcatctgctccttgagctcgttgagctgggcagtgaggtgggacaccagcttcatggtggagttgagcttgtcctggagaatccgaatctcattctgctccccctcgccctcattgctgacaagggacatggcccgcatccgggggaaccagtccaggttcttgttcttgatcatctgggccacgtagctctcagggcccgtgtagtcggtcttgttcttcacgcggaccagcacaatgaagtacaagtagttccacatgttgtgctccagcttgatgtgttcctcaaatgacactgtcttgttatcaaacttgtccctctccagaccacagatgaagcatgtcgtcttaagaatctcctccttcttctgcttctcactacgcaggtcagcgaaggtgtcgatgattaccccaaagatgaggttcagcacaatgatgatgacgatgaagaagaacaggaggtcatagaccactcgggctgggaagagagactcatctttggagggcttgcggagaatgtcgcccacgccaccaccgttgcgtagcccatggttcatgacagtgacgatgcacatcaacagagtgtcacaggcccgctctgtgctgtccagctccctgtcctcttccaggacctcaggcaccgagacccctgagacacagtccatcttgtccccactgcaggtgtccacaaatgcagcagctccatgtggcatccccagggggctggctgtggagtggttgttgggcagccggtcgacctcgagaatgaagtcatccttgaggaagaggaagccgacgatggagaagaggtagaccaggatgagggccagcagggctgtcagcaggatggagcggccattgcgggtcacactcttgatgacgttgaacagcgtctcctcgcggtagatgaggtcaaagagcaggatgctgtagaacagctcatgagcaaagaggcccaggacactggtcaggatgtagcccacgtggtagaggaattccatgtccatgaccatggccttatagccccggatgaaggtgccacggttgcccacgaagctcaccacaaacacgatcttgttggtcagattgagggcacccaggatgttgagtgtgggcccgatgcccagatagtagatggagcgcaggatgagcgccacgatgagggggcggatgctgtagcgcttggtgaacagggccgcgatggagaagcagatgaggatccagaagagcaatgagatgagaggggagtccagcacgcctgtggacgcgccctccatgtaagggtagaagaaggcaatgatgatgttgataaacacggccaggttgaaggagatgctgccccacagggtcatgcggcgggagaaccagtagatcagcggcatgctgcggacgttgcgctgccactccatctcgttgtgcaggaaggaggactggtcgaagaagtcgctcactttgctgccctgctcgtcctgctcagtagtggtgaagagccggtgcttggtttcctccgtcaggaactggcagatgccgggcactgggaacacgatctgctccatgctgcggtcctgccgcacaatctcgatctgggacgtgtggttctcatagtaggccagggggtcttcctcctcctcctgtgctggcgctgaggacttgagcatctgtgacagctgcttgttgttgaggctgagcatggaagagataccctcggcctcctcctcttgaatgcgcttcaccggcttcagcaggtgctgcagctgtttattgtgcctggagagctgcagcgccaggatatagatgttatggcccacttcacgtgggctcacctccgagttctcacgctcttcctcctgcaggtaggccttcttgatgacgtccaccagctcctggggccgcaggctgatgaggattcgctcagcattttcactgtcatgccggctctccatcagagccaggagcagcttggaggcattgtccttgagctgcagcaccagatccatgcggtacttgcacagggggctgatgtcattgaggatcagtgcggtgatgatgtctatgccattggactcgtgagtcacaatgcaagtctggttctcatggcaggggccctggcagtactcagtgagggtctccaaggtctggatgacgaggcccacgttgtcctcattgatgtagagccccagcagccccaggccgcccgtggtgctgccgcacatgatgtccaggaactgcagcgtctcgcataccaagttgtagttggttttgttgttctgacagcgcaggaagttctgcaggtcccggttgtggttctcacacagcagctgcagaaagcgcaggatgggctgcatgatgagcacggatgtgcccatctcactgctctgcacacgttcgctcacctcgtgcccccggcgcaggctggggcccagcgagtagcgggatgaggaaccaggtatcgagaaggaggccacgcggcctttggtggtggggtcgactggctcgcggtcctcatgtggctggctgcccaggtcattcatgttgactgccaccgtggacttggtctcctgctgggcccgcttcatgcggtcgtgcagcaccttgaagaagcgctctgacttcttgtcactcatcatcaggttgtggaaggatttctggatctctgtgttgccaccatccagcaggtggatggccaggccgatgctctcctggaagatcttctcgttcttggtgctggtgatgaggtcgcataccaacttggtggccccctccttgtccagccggcactgggtggctgcgattgccgaccagtctgggtccaggccagtgcctatggggtcgggaaggtccccccgcgaggtggacttccggttctggaggtagttttgcagcagcatcttgcgcagctggttgccccggtccccgtacttggtcttcttgagcagcatctgctgcagggtccgcagcaccttgatgcacagcttctcctccgactccatgaggtccttggtgtgctggatcagcttggacaggaagcccccactctcgcagcgctggtaggcctcactgccctccaggaagagcagctcaggccagtgcaggacatccaccagcacggacagctcagcctgtaccaggggcttcagccgctcctccagggctgtgatgatgtcctgcagcttctcaatgatgttcttgtagtcccactggttggcggtaggggtgacgcgggggaaggcccgcgtggttgccttgtagctggaggcgttccgctgggcggcagctgcacagctggctccactgctgagcatcgagctgatgtgggcatccaggtccatgggcagcaagatggcccggcccttggccaccatggcgagggtccggatgcaggcctccacggagcccttgtgctgctgctgtagccacggacactcgaggaggcgtgtggtagactgcagcagctgcaccacaatcgtctggtgtgtctgcagggaagtgctgttctcagagaatggggagctgaagaaggcgttgatggtgtccagcacaacgctcagcacgtacttctccaaggtggggtcagccacgcgcttctcacgcttgctgcagacccgagccatgtccagggtgaagttctcaaagagcgtccagatgtggttgctggtgtagatctccttcatctccacctccgtgtccacgtagcagtggttcacgaagttcacataggccattttcacctcagtgatgcagtcctcatgcgtcaccacagacaccacgtcctccagcggcagcagggaggtgcacttgatctcagtgtagacgtttttgccctcggcacaggcggccagcaggtccaccagggaaatgtggtacatgagggggctgtggtcctccacgccgtcgcgggcggccttcatcatgtccagcaggtgggccagcgatgccttatcattgtagaacacgaccacatcgtcacctgcattggtcagctcagtcatgatcatgtcctggcacttcttgacgtacttgccctcggccttaatgacggtgtgcaggaagtccaggtactgcacatggcgcccgtgcgtggccagcaggtgcacgaagtgctgcaacacaggctcgctgatctcggagcagagctgatagttgttcaggaagatgtgctgcatggtctctgcctccaggagccctggcgtgaggaagaggtgcaggtgtttgtgcagcagggcctggttgccggggttccctgcacagaacttctgcaggaactggtgcgtgtagcgcaggatctccatcatcttggcatcacccttgtcataggggatctgcagcaggtccagcatgaccttgtgggcatccatgttcttcagcagccgttgctgcttcttcctcatttgctccccaaccccgcacatcttgttcagcctttccaggatgcccttgacgatctggtagttctcactgcttttctcccctggtgggtgcagaaagccctcctcgtccgtgggacgctctttcttgtccttggcggcgcctgcctccacctcctcacccttgccactgcccttcttgtccacccacagctctgacttctccaccatggtccgcagccggtccagctccgacttgatcaccttgtagttctccacgtcctgcgctgagatcagcagctgaacctgcttgaaggtgtgcatggcctcctggcgctggctgaagtgcttgaagagcagctgcagggcacccgagaccagcggcgcatagtcgtgcatggtgaggtggatgagcacgcgcaggaacatgcggccgccctcgtcatccacctccagcatgctgcttgtcttccccactccaaacatggcctccgcctgctccccgatgcgatccaggttcatgttggcagtggtagagtcgaaggcaggggctgtgccatcagccccactgtcctgcatgggaaacacctccacaaactccttcttgaagacagacagcaggtaggatatgcggtaatccaggcggacgttgaggatgaactgaaggatttccaggatcttcagcttggtctccatcaccacaatgtcctcattctcctcaaacttgcttctgtccagcggctcagcagcactggccccagcagacaggctggggcaactgtaagacggactgcttgcggctcagcaccatggtggacatcatgtgccccacgccctggatggaccgccgcacattcttgacacaggggtcctcataggcctgcagcatggccgggggcccctgcacacaggtcgatgatgcccagcagtgtgcgagtgagccgcagcagctcgctgaagctgtagaagccgaagtagatgagattgtgcgccaggctgaccacctcaaaagtgagcttgttcttctcctcgttggcaaagggcacggcctcgctgactacattgttgaggtagtcctccacgaactccatggtgttggcaaacttgttcttcttgtcatctcgggacgcgttgaggttggaatcatagtccttgatggtgatggctgtggggatctcagtccagagacgggcaaacttgaccggcgtgaccagctcctgggggtcacggtccacgtgcacgtgcagcatcaggtggcagaaggaggcgcgcaggtcaaagggcagcatctcgtctgccatgcacaggaaaatcaggtccacacccagctgctgggagatctcgtcgatggccaagtactggcggtccaagcacatgcgggcaaagagcttcagctggtacctgtagtagctgagcacattctcgtcatgggcgttgccggcccgcgcctcctgggccagctgcctcacactcttctcatgatgctcgttattcttgtcagtccacgtgagccacacttcctcttctgagtactcgatgctcaggtactcgtgggattgggccatctccttcacgggccgaagctcggtccggatgagaatgtcactgttcttggggtccagcacacacttgcagatgagctcttgggtgacggggatggcgatgtggttggacacacacaggtcagagaggtagtccaggaacctgggctcccggttcttgcgcacaaggctgacgaaggtctccacctcggtcttggtgatgtgcttttccaggagcttgcggttgttgtgcagcagggcagtgatggtgtcctcggccaggatgtcgtagccaatctgggactgcatcatcccaaactgcttggcaatgtgctcctggttcttgcggtagtcctcctgggaatgccgcaacacgcggtagcacaggcggaacatgtgctggtagggggcgttcttctggtctgacagctcctccagccgcaccaggggaccttcaccccccttctcacggaacggggccttcagaatgccaaagacctgtttgaggatgttctgctccctcatcagcttctgccgttcccggttgggcttagtgaccatgatgtccaggacattctgcccattgttggggacatcgctgacaaagaacaccaggtcttccagcagctggatgacaaacctgcggtcattctggctgatgaagccctcgttgagtttctccacggcactggccagcatggagctggcgtcattggcaaagtccaggtctcggatctcagacacgggcactgacacgatggcaaaggcctccttgtcctccttggtggggcaggtgcccagcatgagccggatgggccgctcctcctcgatgtcaatgggcacattggtgctctgaatccacgtgttggtgcagaggtgccgcagccggacgtacgagttccggggcacgaaagagtcggttttctgcaaggtggtggggtccagctcaaagagagaggcgatgtcattgccatgaggcacagccaccaggcagtacttgatcttctccccagcattcctgcggcctgtgcggccctgtgcccccattcctgctgccttgggatctgaggcatcacctttgtaactggggttctcctcagcagccaggtagttgcctgtagccaggtgcttgaagcggtacaagccattccagtgcccagctcctccacggcaggggtcgtggtggaccacctccacctcccagagagcattggagctggtggccgaggtggcagactggcgcagtgtagttcgcaggaacacctgcagcttgcccttgtactcgtcacacgtcaggaacttctcctgctccgcatggaacagccgcaccacgtctccccctttcaacacctcctccaggtggtcccgaaactgcataaacaggttgatcttccagctggtgttgcagttcacagaattgacctccttgcagccggcgttgtcgatgagctagtaattgctggcatgcagaggctgcccggcattgacaggattcaggatcaccttgtcccccacgaccacgttgtccccgttgctccgcagcttccagaagggctggatgaagagccaggaaccctcgttgcctgtggcatccagagtcacccgcatggcgttcttctccagcaaggccggaagccgcttgttcactgtcaggtacttgttgctcttcatgtgcaggagctggatcacactgccatacttcacgacatccccatgcaccttcttgttctccgtgtcattttgcttctgctccatctgcgccgcatgctgcagctttctgcagcaacaccacatcagcgatcttctccttgtcctgcttagtctgcttggccttccagtactgcttctgggccgagtagcggttcatggggcacaccttgaagaaggcagtcacggaacttcttaggggggttgtccaggtccccggccgcgggctccaccacacagcggtcatccaccagccccaaagtgctgatgaagccattgacggagccctcggcgtacagggagacgatgtccccgatgtgaagaaagctggacatttcactcatggctgcggccctccggggcccagggcgtggggggcg

SEQ ID NO: 80807 - DNA, 1972 bp, Homo sapiens
  sig_peptide (317)...(182): this location contains the signal peptide sequence, MYSLVLTFLVSFCALSKTFLDHWFQMFIYYILFKDSEIGFCHPLL, Run with SignalP
  misc_feature (1961)...(805): similar to gi3901272 in the genepept database release 114, Run with FASTXY 3.3t00, default parameters
ttttttttttttaaatgtataaccttaaatatttatttgagaaaacaaataaagatccaaatacgtgagttgatcatctgataaaagtaagagttgacaaaaaaggtacatcttctccaatccgaaaacagaaagtgggaaagatcaaggtatcactagaggtcaatgaaacaaaacatacaatagtggatgacaaaagccaatctctgaatctttgaaaagaatataataaatgaacatctgaaaccagtgatcgagaaatgttttagataaggcacaaaaagataccaagaatgttaacactaggctgtacatcctaaaacagtcagatgagctcactgttataattctggttcaccgccaagaaccttagcacaaagaaaggactcaacaaacatttggatccatgaataaaattatcttcccacatataaccacctgcctaaaacattctcctcctccttgaattaaattcaccatgtctgcatcataggaggcccaaggccagtaccccctccccatctgcacaccctgtgttcaaaccagtcccagctcctgtcatgttattggcttctgagtatctgtattaatagttgttcctgccagcatatgaagatgaacaaatacacaactgagagagatccagggattttaatccacagatgccagagcttgctgggatgtagtcagaaatcaagctgaactcaggagttcacagtctttcctgtaatgatggttgggaggtgagggaagtcagaggccttttctaggatctttctccatgctgctgtcctccaggaagtcatggcaaatttacatctccagcaggttgtagaccaacagccttggagaacttgaaggacacaccagggtctctccccatggtgtctcctgtactctgctcctggggtcgagtcggctgctggggtttatcatctggaagattctctgcctcagcctcagcctcagggaacaacagcttaccctgcagggtatacagaagctggaggaaggtctgatacctctgcagcttgtcccactcctgttctgcctgctgcttcaggtttccaagtttctgaaacaccccgtcaagctcctgctgagtccctgtcttacgctccctcacctctgcagaaacctccgccagatgctgcagatgcttctcctgttgtagctgccactggttctggactgctctgcgtttctccatggccatttgtttcttggcctggagctgctcaaaggcttcccggagttgtgtccgtttcctctgggcttcctccatctgagtcagggccttggtgaggccaattttgatggcctctacgtgctccctgtaggtggccttcagctctttccattgttccttagctgcaattgccttctgtcctgagatgacccaccaggaatgagtacatgagtgagggtggcctgctagcctgcctccctgcaacactgggcctccttcccatcagccaaatgggagacctaactgaaatcctccttccttccccactcaggtcagctgctactacaatcccctgcctactcacggctcgtgtcttcagaagccaaggggtcgagacccttagcagtgtcctcctgagccaggatgttctgcaggaaatccgctacctgaagctggctgcagagcagcttgtctttcttctgagagtcctgctcagagggagggcagagacagggaacatccttacctccttacaggtttccttaagtctgctctctgccaatgctgccctgtatctcagtaagaggagccaggaccagaccctggcttctgaaaggctcgctctcatcttgtacataccaccacaaactcaaccaggatcttggctggcagttctgcctcctcctgcaggcctacaggttccaagatgcctgccacctcagccaggacctctagggctgcagcttccgcctctgtctccgctgcctccatctttccacgaaa

SEQ ID NO: 80808 - DNA, 4385 bp, Homo sapiens
  sig_peptide (3917)...(4052): this location contains the signal peptide sequence, MFRRLTFAQLLFATVLGIAGGVYIFQPVFEQYAKDQKELKEKMQL, Run with SignalP
  misc_feature (3522)...(1856): similar to gi1552169 in the genepept database release 114, Run with FASTXY 3.3t00, default parameters
agaaagtaacagtgacttctagatttctgggttgggtcatcttgttggatagtagtaccactgagatagggaattcaaggtttggggcaagggtaattggagatgagaattgtgtttggaggtaactactgacattcaagtggagagggttagttggcagttagttctatggtcatctcttttgccgagactgtatatttatcagactcctgggagaacaccaacatccatggggttgtagggaaggctaaggacaggagtggggagtggtaccttgaaaatccaaaagccatctcaagtaaaaggaataaatgtgtcatgctttttaaaaagttgatgtgcggaaaatgttttcttggcttggaaactgggcggcccaggggatgacagtatggacttccagtgaagtagtgacggaagcctgatcatagacattaaggaaagcggtgtaggtgttgtgagcttttgctgtaagaaaaagttgagacttttgttttgctttgtttgtgagagatgtgtatgtatttctgctgagtgataaagccagcggggagggactgatttttataggaaaggaggaaaaataatggaaacacatctcattattttattgtcacatttcttttctttgttatcttttgagtgtttcccttttttgccagtagagttattgtctattttttctttctataggacaaaaaaactaatacagactcctttatttttatatggatatactaggattgtaattcagatatttaatatcttttatcagtgttcagaatcatagattaatggagaaaacatttaaaattgttttaaatttaaatacattgaactctaacatagatgaaaaatgtgtttactgctttttatcaggtcgactgaaagcaacgtatggtaaatattgaaaactccaggcatcgaaaacaagagcagaagcaccttcagccacagccttataaaagggaaggtaaatggcataaatatggtcgcactaatggaagacaaatggcaaatcttgaaatagaattggggcaattaccttttgatcctcaatactgattcacaattgagttaaattagacaactgtaagagaaaaatttatgctttgtataatgtttggtattgaaactaatgaaattaccaagatgacaatgtcttttcttttgtttctaagtatcagtttgataactttatattattcctcagaagcattagttaaaagtctactaacctgcattttcctgtagtttagcttcgttgaattttttttgacactggaaatgttcaactgtagttttattaaggaagccaggcatgcaacagattttgtgcatgaaatgagacttcctttcagtgtaagagcttaaagcaagctcagtcatacatgacaaagtgtaattaacactgatgtttgtgttaaatttgcagcagagcttgagaaaagtacattgttctggaatttcatcattaacattttataatcttacactcacttcttgtctttttgtgggttcaagagccctctgacttgtgaagaatttgctgccctcttaagagcttgctgacttgttttcttgtgaaattttttgcacatctgaatatcgtggaagaaacaataaaactacaccatgaggaaaactaaaggtctttatttaaaatctggcattgtattaacatgtaattttatactatgtggtattttatacatttcctcagtagtgatatttggtaaagcagttcatacagcttttttctaagttccatgaatcttacccagtgtttaccgaagtatttaagcagcatctgaatatttccacccagcaatgttaatttatctaggaaagttcagaatttcatcttcatgttgaatttcccttttaacttccgttcatagacatatatgtgacttccaattcgaccctctggcaagtgagtgtggaagaaaacagcagttcttttataattgcttgaaattaggaaagcgcttatttcctcttccaaaatgctcgaaggtgatcaagtgaagtagggcaatgatgcatcatcatgaaactctctatgtaaccagtttaagggatttaggtaaaatacatctgcttcatcaagataatgactttttccagtcaggtctggcgggcactggagaaatctcatgggaagtgggcagtgaacatcgctgtaataatgagtagagtggcaacgcatcattataaatattgaagctgaagattaatcggggatgggtgaacaaactttttgaatatgactcatgacatcaagagtacctcgttgatgaactaaaccagtataaagggcgaggaacaaatttgataaaaacaggaaacttagagctggtttcttccatgttttcaggtgggttaatgagtatccacagaacaccatacagaatggtaaaactggataaataaacctgaattctttgtggctcaacatgctataaacaagcagtgtccacagcacagtcaccaaaagtatccggtatctctttggtgctagatagcagccatgaataaagaagggtaagtgagtacccaagataactggaaatccttgactgaagtaccagtgccatggatgagaaccataaaatgttccccagttctgcagcacgttaaatttcaaaaaattaaattgaaccagagtccattggccaaaaaaaaatacgatcaatcatcagagacaaactcaaagtaacaaagcctacaggtaaaaaatgatgtagaataagatcaagctttcttggttcttgacagaaatgtctgaagagcaaaggtgtccacagaatgacagctgtgggacgaattatgaaggcaagtgccaccagggatgagtatttgacactgttcatagactttgaaccttccaaaggatagtagaaaagagcaattatagtgagaacagtttccatggtgtttgtaagggttctggtacagcaataccatgtgaaccaggagcacaactggcaaaaaaacacccatcttgccacttcctgattttctagttgcttcattaatgagtaaagtctcacatctgctacagcagacagaagtgcttgggcaagtctaggaatccaaatcagcaactgaacactatctttccctaaaagatgaagaatcttgtaaatgcttgcaaagattaagggataagtgtaactcctcagtctctctgtccattcccaagtcaaataaccataattgaaaaccatgtgatgtgaaacttcaagagactgccagtattcatctggaacaaaacttgtctgcactaaaaagcagtttaatattcgtaaagctatggtaaacaagagcagataaatattttctccaagaagatccccgcggcgcctggcgctcttctcctgggtgttgaagtacaaggtagactttctctttcgcagctttatcttgccgtgggagcggttctggagaccatgcaaagtgaggctggcatctccgccccccggctccattccgcacttgcttaggggcctcctcatccctggccgccaccttcctaaggcggaagaaagctgcagtagcgcgctgctcgtccatccattaagtttggcctttgagagcagtcgtcgctcgcaagcccggaagtaaccgggaacgggcaacttcgtagctcccacccgacgtggtggcctccttgcggtttcctttcgccgtttccgaaccgagggattgctactcgcctttggcttggcggtctctgtgctcgggggtccgaaaactgctggaaggcccccggtctctggaggggagcaggcggtagcgagtttagtgacgtggagcaggcgcagaacagtcggagatttgaagagatttcctgggtgtggagtgtgactttccaaaaccagcttttccttgagctgtatttgttgcagcaatgtttaggagattgacttttgcacaactgctttttgccactgtccttggaattgctggaggagtatatatttttcaaccagtatttgaacagtatgccaaagatcagaaggaattaaaagaaaagatgcagttggtacaagaatcagaagagaagaaaagttaatactacatggagttaggcctggcacggtggctcacgcctgtaatcccagcactttgggaggccgaggcgggtggatcacgaggtcaggagttcaacaccagcctgaccaacatggtgaaaccctgtctgtactaaaaatgcaaaaattagccgggcatggtggcacatgcttgtaatcccagctactcgggaggctgaggcaggagaatcacttgaacccgggaggcggaggttgcagtgagccaagatcgtgccactgcactccagcctgggcgacagagcaagactccatctaaaaaaaaaa

SEQ ID NO: 80809 - DNA, 743 bp, Homo sapiens
  sig_peptide (39)...(174): this location contains the signal peptide sequence, MLVPLNLCLQSTLALVSLPLPGIGRAFCEWLSGTFKARRQGPKAK, Run with SignalP
  misc_feature (349)...(46): similar to gi190504 in the genepept database release 114, Run with FASTXY 3.3t00, default parameters
tttcgtggcgtctggagtgcgcaagttggagttctctaatgcttgtgcccttgaacttgtgccttcagagcacattagcgttggtttctctacccctgcccgggatcgggcgtgcgttctgtgagtggctctccgggacattcaaagctcgacgccagggtccgaaagctaagcgagagctctgggacgtcccttcacctgtcagagggtggccttggggcttccgcctaaggggagtccctggtccggtttcgccagcttttgggccatttggggagtttggcgaagaggtccccacagctcgccccggggacgtacgtggcgcggcactcaccttcatcgtcggcgtctcctcggaagtgagcgttcagagaaggagcgcaggcagaagtcaccgcgggcggcggagacgcgcgtcctgcaccgctgctccgggcggtggagtcactcgccgctggaaggaatactgtacacagagaataaataacttggtcaagccattcagctaggaagttgtggatcctaaattaagagatcaaggtcttaatggctactatatgcggcctctcatagtctttttaagggttttggataataattgtagatcagctatccggagatgattgtcgcttatacagtggtgccgaactgcgtttgtttgtactgagggaaaaaaaagctgttgactgaatgtggggggacccctggtcttcgagcaggaacctcggctttttattccgccc

SEQ ID NO: 80810 - DNA, 2923 bp, Homo sapiens
  sig_peptide (892)...(757): this location contains the signal peptide sequence, MNPYISIIVFIVFLCSENYPWNNMLRITGSSPYLHFLSVLGVLVN, Run with SignalP
  misc_feature (477)...(675): similar to gi4160365 in the genepept database release 114, Run with FASTXY 3.3t00, default parameters
ttttttttttttaatgttactcaaatttttctttaataaagacaaaggatttaacaatttttgcgcaactatacctaactggacaaagatgatttgtttaggatcttaaggataagccaaagatataatgcctaagagggtacccccccggaaaaaagacaaatacattcctatcactaggaaaatgccttcaaggacaaaaatattaattcaataaggaaaatatttcattttttttttttatcacaggggacaattaactcatttctgtaatccagttacgtggcatacattcctttttctagtttctcatgcaaaagtttggaaagtttttctcaaaacagagcaagttagcgctaatggtttcaagtcagggctgggagtcagcctagaagagcatgctcagaaggccatttacacttacctgaccccagcctgatgctctcccccatccaaaaggggtcagttaattcctattactaatgaattatctcttatacttactctatagacatataaattaccacaaatgtgcctataaattaacaagatatcattcaatgtggaggagagcagctggaacccaatgacaccctggaggtatcttggttactctttttagaaaacagaaaaaaacctgcctcattccaggtaatacataaaaataacactttaacacaaagtgtcatcctgcctgtattctttccctaaaatgctgtgtaaggaactcagaattaaataaaattaggacataagaattaacaagtacacctaaaacagacaagaagtgtaagtaaggactgcttcctgtaatcctaagcatattgttccatgggtaattttcagaacataaaaatacaataaatactataatggaaatatagggattcatttattactttttggtttacaaacaaaggcacccaataatgcttttatttcttataaaagattctcaatttacatttaaaacaaacaaaaacccacaaaacaatcccaagttaattcctatagacaacacaaaaaagggggaaaaggaaattcttttccctgctttcaagctttattacacaggttcaaaaatgattattttatgccatccttaagtcaaagaacgtactgccaagcttctctgcactaagtcttaggacatgttaatgttgccaagtcaaatataaatatagtctcaatgacatcacaatttacaaatgcatattccaagattaaaactgaatagggggaaaaaccccaaatgttttagaatacagtttaatcaaatgagttaagtgaaataagaaacatttaatttagtaggctatcctgttaaataagaagtttgtgtaggaaatataatcaaacagaactaaaaatcacgtctagtaaatgacacaaataatttctcaaatctttaagtctgacttaagttcaaagtctagctggtggggattaacaatctatatactctttatactaatcttagaactttaaattctagaatgacaaactaatttattcattagttttcttttgacaacagaactctaaacacacaaaattaatgcagtgagtggcctcagcaccctcccagttaacatttctttaagctagattacaagaacaataaaaccattcagaagacatacactccctatgcacttcataggcctgcccaagttgtccccaactcttttgcaagacacacagacaattcatctgattctaagtctattcggcagaagtataaaaatcatacaaatgttagcatgttttcaacacattatggaaatacatttggagagatggagtactcaatgtatattatgtgggccactttaaataaaaggcatcattatctattccattttcagacattgtcatggtctcttatacctttatataaggtatggtcctagaccagagactttagtatcattccaaagaatatagagatatttatatacatatttcttttaaaataatatttaaaagttttactacagaaaatctggcttcaacatggaagcatttttccttttcaagattatacacctgcatgaaagtaggtgatttcctttacatttagtttttcacaatagcaaaataaactttttatacattgcatttaaattgacaaagaaagttaagatgtaaagctccatgtaactttttgtattgcgaactgttctctttaaacatactccagatacactgctgattatctaatacagtacaacttgataaacttaattagaagtgttatgctgaacaatttgttaaatcaaatgtatgttaaaacagtaagtagagttaactattatgattaaaagggaattttaatgtatcattaaaatatacatcaattttcttgctattacttgtttctataacgcatttctttctaaagctaaaatcacatgcataaaaaataagtgataccttcaaactcattcaacagtttgctaccttatgtagtatgtaaataaagtcctttatttaatttcgtacacattatcttaagcattattttatttttcttgaaggaattcatctttcaaggtcaaaattagtatgtgtttacacacgagtatattttttaatgctattactacctgcaaatacattcttccataataatgcactttcagttttcactggaaagatagcacaagccttttaaaagtcctatgaataaaatttataaagggaggagaacacaagtatggtgaatccttcccaactcccacttccatcaaatctcaagaaatcctcctgcttcaaaacataaacaatctcacaagatttttatttgatcataatgtggaaaagaaaactgtattcctattctttttgatactaacagttttacggaatttgttttcactttctgtcaaaaaacacgtatgttgctgatatggattctcaa

SEQ ID NO: 80811 - DNA, 807 bp, Homo sapiens
  sig_peptide (395)...(530): this location contains the signal peptide sequence, MCSLKFWICFCQAVSMHLCATQLSVSLPAGISMFVSGLVCDICVW, Run with SignalP
  misc_feature (206)...(481): similar to gi1333929 in the genepept database release 114, Run with FASTXY 3.3t00, default parameters
gcccattgaggggtctcctggaggtgaagtcatcaaggagaaccaggccagaacagggatgtgatcagccatgtgtgattgggctgagaggtgaagatgaggccagaattttgcccactgccttggccgagatttgaagaccatcagcaatattgagtttctgtgggttgtattcctgtttcttcaaggggtgtatgtcagtgactgtttgcacaggtagcttatttatgtgcagcattgctgggagtgcatgagcatgtttaatgcctgccatccacgggaatatcgttgtgtgctacagcgtgcttgtatgactacgtgggttgtgtgcctcattgcctcaggtcatgtggcacagacctgtgtctgtgagagtccacatgtgtgctcctctatgtgcagtctaaaattttggatctgtttctgtcaagctgtttccatgcacctctgtgctacgcagctgtctgtatctctgcctgcaggcataagtatgtttgtgtctgggttggtatgtgacatatgtgtttggagtgggtcaggtatgactcacccctactggagcaggatgagggttgagatgatggttgctggttgcttcagagagagggacgcacattaaccagagtgctgtcttctccaggggcttgccgtggccaagccaggccaggtgggagaagcggcagccttgccctggagggttttgagaagcactgctcctggaggccctggggaaggtccctgaaacctttggccaatgtggctgtccccatggtccacatgcccttcccaccccctggctagctgctg

SEQ ID NO: 80812 - DNA, 339 bp, Homo sapiens
  sig_peptide (94)...(229): this location contains the signal peptide sequence, MPRVRHCMFISLWVPYVWGCFCFGCCFLYTKAKSKTHPVMFVDLV, Run with SignalP
  misc_feature (65)...(193): similar to gi1480863 in the genepept database release 114, Run with FASTXY 3.3t00, default parameters
cacaattcaactcaagaaatttagcacatcttcagaataaattattattgtcattagcacattaccacccaagaaaatctgtacaggaacagaatgcccagagtgagacactgcatgttcatcagcttgtgggtgccatatgtatggggatgtttttgtttcggctgttgctttttgtacaccaaagctaaaagcaagacacacccagtgatgtttgttgatcttgtgactaacagagttagcaaagagccaattaaagcagttcaaacagacagaaagataaagatgccagtgcagagaaaagtcacagcagcaataacccttgataaaagggcaaag

SEQ ID NO: 80813 - DNA, 1063 bp, Homo sapiens
  misc_feature (1)...(1063): n = a,t,c or g
  sig_peptide (284)...(419): this location contains the signal peptide sequence, MLSSFFKSCFCVSFWTLSIATSSNLLIFSSAISNLLLILSSVFSI, Run with SignalP
  misc_feature (37)...(317): similar to gi1771513 in the genepept database release 114, Run with FASTXY 3.3t00, default parameters
cgtccggcttgccaccacttggtatcttttatctttttatatatctggctgcttctaaatttttttctttcttaccaattctgaaccatttgatggtttcttcctttatgctccttgtgcttgaggttcattgagcatctgggatcagtgcacttattgttttcatcaaattcagaagattaggccattatttcttcaaacttttttgtcgttctctgtctacctttgagagctccaattatacatacattaggccacttgaagttgtcattacagttcactaatgctaagttctttttttaagtcttgtttctgtgtttcattttggacactttctattgctacatcttcaaatttactaattttttcttctgcaatatctaatctgctcctaatcctatccagtgtattttccatattagatattgtagttttcataactagaagcatgatttggttctgttttcacccatgtatctatataacatgtccagtctttcactcagcttcttaaacatttagaatatggtcagaataactttttttgctgttttgttttagagacagggtctcactttgttactcaggctggagcgcagtggcatgatcacagctcactgcagccccaacctcctcgtctcaaggaatcctcccacctcagcctcctatgtagctgggaccacaggtacacaccaccacacctggctaatttttaaattttttgaagagacgggtctcactttgttgcccagactggtctcaaactcctgggttcagacaatcctccagccttggcctcccaacgtgttgggattacaggcatgagccactgtacccagcccagaataactttttataaatgtcttgaggccgaggttgggaaataatctggggtcgggagttcgagaccagcctgaccaacatggagaaaccccgtctctgcaaaaaatacaaaattagccaggcacagtggcacatgcctgtagtcccagctgcttgngaggctgaggcaggagaattgcttgaacccgcgaggcggagggtgtggtgagccgagaacacc

SEQ ID NO: 80814 - DNA, 5199 bp, Homo sapiens
  sig_peptide (5035)...(4900): this location contains the signal peptide sequence, MILLFFTFPKLVSHDMLLNLTNEVYILVQYIMRLTCSDQVQLDYH, Run with SignalP
  misc_feature (230)...(4180): similar to gi1228045 in the genepept database release 114, Run with FASTXY 3.3t00, default parameters
gttcctgcagatagagtctgcctcccctgcccccttctcttctggattcctcgctgcccaccctcattctcccgggggaagcctcgcaacgaagggccggagccgcctttctgctcccggaatgcttcacctgtccgcagctccgcccgccccacccccggaagtgacggcgaccgcgcggccctgcctttgttccgttgggcgtcgcggcgacggcgggaagatggcggcggcgggagccctggaacggagcttcgtggagctaagcggagctgagcgcgaaaggccgaggcactttcgggaattcacagtctgcagcattgggactgcaaatgccgtggctggcgccgtaaaatacagtgaaagcgcgggaggcttttactacgtggagagtggcaagttgttctccgtaaccagaaacaggttcattcattggaagacctctggagatacattggagctgatggaggagtcactggacataaatctgttgaataatgccattcgcctaaaattccaaaattgcagtgttttacctggaggggtttatgtctctgagactcagaatcgtgtgataatcttgatgttaaccaatcaaacagtgcacaggttacttttaccacacccctcccggatgtataggagtgagttggtagttgacagtcagatgcagtcaatattcactgacattggaaaagttgatttcacagatccttgcaactatcagttaattccagcagtacctggaatatctcctaattccaccgcctctacagcctggctcagcagtgatggggaggccctgtttgccttaccatgtgcttctgggggaatctttgttcttaagctacctccttatgacatacctggtatggtgtcagtcgtggaactgaaacagagttcagtaatgcaacgattgcttacaggctggatgccaacagctatcaggggtgaccagtcgccttcagatcgtcccctcagtcttgctgttcattgtgtggagcatgatgccttcatctttgctttgtgtcaggatcataaactacgaatgtggtcttacaaggagcaaatgtgcctaatggtagctgacatgctggagtatgtccctgtgaagaaagaccttcggcttactgctggaactggacacaaattacggcttgcttattcccccaccatgggactctacctggggatattcaatgcatgcaccaaaacgaggacagttctgcattttccagttggtgagcactgagagtaatcgctatagtctcgatcatatttcttcactgttcacttctcaggagacactgattgactttgccttaacttccacggatatctgggccctgtggcatgatgctgagaaccaaacagtagtgaaatacatcaactttgaacataatgttgcaggtcagtggaatccagtttttatgcagcctctgccagaggaagagattgtcatcagagatgatcaagaccccagagagatgtatctgcaaagtctttttacaccaggacaattcacaaatgaagctttatgtaaggctttacagattttctgccgaggaactgagaggaatttggatctttcctggagtgaactgaagaaagaagttactttagctgttgaaaatgagcttcaaggaagtgtaacagagtatgaattctcccaggaggagtttcgaaatttacaacaagaattctggtgcaagttctatgcctgttgtcttcagtatcaagaagccctctctcaccctcttgccctacatttgaatccacacacaaacatggtgtgcctgctgaaaaaagggtacctgtctttccttattccctcatccttagtggatcatttgtatctcctgccttatgagaaccttttgacagaagatgagacaaccatatctgatgatgtggatatcgctcgggatgtcatatgtcttataaaatgcctccggctgattgaagagtcagtaactgtggatatgtcagttataatggaaatgagttgttataacctacagtctccggaaaaggctgcagagcagattctggaagatatgatcactattgatgtagaaaatgtgatggaggatatttgtagtaaactgcaagagattaggaacccaatccatgcaattggactacttatacgggaaatggattatgaaacagaagtggaaatggaaaagggattcaatccagctcagcctttgaatattcgaatgaatcttacccagctctatggtagtaacacagcagggtatattgtgtgcagaggggtgcataaaatcgccagtactcgtttcctgatctgcagagatcttttgatcttacagcagctgttaatgaggcttggagatgctgtgatttggggaactggtcagctctttcaagctcagcaagacctactacatcgaacagctcccctactcttatcttattacctcattaaatggggaagtgagtgcttggcaactgatgttccacttgacacactggagtctaatctccaacacttatcagtactggaattaacagactctggtgctttaatggcaaataggtttgtatctagtcctcagactattgtggagttattcttccaagaagttgcaagaaaacacattatatctcacctcttctctcagccaaaggcacctctgagccaaactggattgaattggcctgaaatgattactgcaattaccagttatttattgcagcttttatggcctagcaatcctggttgtctctttctagaatgtttgatgggaaattgccaatatgtacaattgcaggattatattcaactgctacatccctggtgtcaagtcaatgttggttcctgtcgatttatgctgggaaggtgttacctagttacaggagaaggacagaaggctctggaatgtttttgtcaggcagcatctgaagtaggcaaagaggaattcttggatcgcttgattcgctcagaggatggggagatcgtgtctacccccaggctgcagtattatgacaaggttttacgactactagatgtcattggtttgcctgaactggttattcagttggctacatcagccataactgaagcaagtgatgactgggaaaagtcaggctactcttaaggacatgtattttcaaacatcatttgggatttggggtcacaatagccaagcatatggaagcctttaaccccaaattcctgattccagcaggcaattagattgtttacggcagttggtggtagttctttgtgaacgctcacagctacaggatcttgtagagttttcctatgtgaatctgcataatgaggttgtgggaataattgagtcacgtgctagagctgtggaccttatgactcacaattactatgaacttctgtatgcctttcacatctatcgccacaattaccgcaaggctggcacagtgatgtttgagtatggaatgcggcttggcagagaagttcgaactctccggggacttgagaaacaaggcaactgttatctggctgctctcaattgtttacgacttattcgtccagaatatgcgtggattgtgcagccagtgtctggtgcagtgtatgatcgccctggagcatcccctaagaggaatcatgatggagaatgcacagctgcccccacaaatcgacaaattgaaatcctggaactggaagatctggagaaagagtgttccttggctcgcatccgcctcactttggctcagcatgatccatcagcggttgcagttgctggaagttcatcagcagaggaaatggtcactctcttggttcaggcgggcctctttgacactgccatatcactctgtcagacttttaagcttcccttaacgccagtctttgaagggcttgccttcaaatgcatcaaattgcaatttggaggagaggcagcacaagcagaagcctgggcctggctagcagccaatcagctctcatctgtcatcactactaaggagtctagtgctacagatgaagcatggcgactattatccacttacctggagaggtacaaagtccagaataacttgtatcaccactgtgtaatcaacaagctcttgtctcatggagtgcctctgcctaattggcttataaacagttacaacatcgcactgtcccaaaaagttgataaggcaacacgggatttattatatcgtcggaccttgtgatttggattgtcacctagcctttgtaaccgcttggtgcctcttaggacttaagactaccctacaggaaccctgtactcaaggccgatttttgtaactgtaaatgatgtgtacaacattcaagtctgcattctgcacaagataggagggcggaagagtcagaggaccctgtgcttgctggtggtgctaacacaatttctggtgttcaaccttggtctcaaatagctgcttttgtatatgattcaccgagcttttttagaagtttatatttttttaaactaccgaagacattcattatctgcaaattaagactcaccttcactttccaaaatagctgagggttgttggcttgttgtagctgaccacccaaaggcagtcactgcaaatcttttaattcttcccctatccacctttggtattttaatgcaattaattttggtccagaactgacctggtattttctgtattgtacacaaaagctaataattttgtggtactttttatttattttggaggttttatatgatcttccaatggagtattaaataattggcctagattaagcctaaaatgatgaccagctaattaaagaagatattttgaatctggttctgagcctaaagttgagtaaaatccttagcctaagaaaaaatttggaaatcccatcatcctatattagcaacagattcctcagagtaaattgttaacttcctatgatttatgataatcaagctggacttgatcactacaagttagtctcataatgtattggaccaaaatgtaaacttcattggtcagatttagaagcatgtcatggctcacaagttttgggaaagtgaaaaataataaaatcatcttggattttattctgtatattaaaatttatcttttaaggaaacaatctgtatactacttgcttgtatagccttttgacccttcttgagtttttcagaagcctttaatttttatactttccatacccatatttacattatataccttaattaaccatgggaggtt

SEQ ID NO: 80815 - DNA, 848 bp, Homo sapiens
  sig_peptide (179)...(44): this location contains the signal peptide sequence, MSFAFSLWYPFLRDLRSCFKLSKLSCHSPISFVQYTTMSTRVSCL, Run with SignalP
  misc_feature (326)...(173): similar to gi167020 in the genepept database release 114, Run with FASTXY 3.3t00, default parameters
cagaatggatagagacgactcgtaggtgtgggtaaagcaagttgaggcaactcacccgtgtgctcatggttgtgtactgaacaaatgagatgggactgtgacatgagagcttcgaaagtttaaaacagcttctgaggtccctgagaaaaggataccaaagagagaaagcaaaggacatgtctagtgggatgtcattgatgggggtggggggtgctgagttgtgtgattttttttttcttcatctgcaccctgggattgggggtaaatgcaaaggacatgtggtactcaaacaaaagggaaggtcagtggctgcttcaagtagtcagccaagggcttcagtttcagtaaaaaaaaaaagcgttaggaagttgttaggaataaacaactattcctaagggggtaggattgaggaactggagatcttgagaaagtgaacgaacaggaggctgcgtccaaaaaataggctattaaatggacttcaaaaatggggcaatccgctcattctcactgggaagaattggctccagcctctgcaagatagtaaaaccctatgggtacatgccttggtataaagaatgggaccctgcgttcccccttgtgggtctacctaatgggaaccgttggacagcttgggcccctgagttttggctagaatcgcctgcaaaacaccctgggggatttctcctggaaccttgagtcattgccccccgactatatgcccctactagacctttgctcccgcagccccagactgcatttgcgcggtcttatagcctttttttaagatccccctcggtgcatagcgccacactgtttgcctccccttcgctccacgactcctaacctcc

SEQ ID NO: 80816 - DNA, 1270 bp, Homo sapiens
  sig_peptide (1137)...(1002): this location contains the signal peptide sequence, MHLLCSGHKLCLCIVYISFFLFFKVYGFCFLHANIVNYTEDTTDS, Run with SignalP
  misc_feature (1055)...(903): similar to gi4049664 in the genepept database release 114, Run with FASTXY 3.3t00, default parameters
aaaaaacctaaagtgggccctcccagtcccatttttgggcccagatccccccagtttgctccccagtttggtcagtcaaaacaaagtgggtgccctggggtggacgtgtcaacccttagcccccggcctccagggtgcaggaaaattaaccagggttttccctttggtcgggtagttttaaacccgagcgggggccccttttttttttttttatagcaaaaagacaattttaatgctgccgtagaaaaaagggttatatgaagagtcacataatggtgcttcattgtcaacaaccaaacagggcacagagtgtgttacggtgtctgtgctgtttacatgccaatattttatacaaaggttctcatatggtgtcagctgtcagttacttctgcaaattaactgccaaaaatggagaagaacagaatcacttggagagccggtaaccacgggttacctttcataagcctaaagataaagctgcagtgtgggatcttgggagaataattaggaagaacaaaacagaaagttaccaattgaaatagaaaggcatcctacaatatggaatagcaaccaagagggcttataaataagtgaaagaggttggatcacagaatgcctcatgacttttaagcaaagtattacagtacaaacattttaaaggctttatcaatgtttaggaaatacagtacaagttcttttttttttgttgttcttttttttaaccttttcaaatagacttaaccctttgagcactgagtttattttgagtgttctttgatttctaataaatacctttaaaaatcatgtgcaaaatagttctgatgcctgccagggatgtctttcccggtctcgtttattcagactgctcaaaacaaatgacaatatgatgctaataaatatgtataatttaaacatgaacctctatcaatatagatgtactgtatagcaaaacaaactatcatactttgctttcagataatgtttctgtatactttataaatgctatctgtggtatcttctgtataatttacaatgtttgcatgtaaaaaacaaaacccatagaccttaaaaaaaagaaaaaaagaaatatacactatacataggcacagcttatgcccagagcatagcaggtgcataaaacactgttgctataaatgcaagaaaaaggtcatttaaccacaatcacattttttttcataagagagtctgaaatctatacaatatatacatctatgtttcaatgtgaaaataatattcttttaaatttcaa

SEQ ID NO: 80817 - DNA, 789 bp, Homo sapiens
  sig_peptide (111)...(246): this location contains the signal peptide sequence, MLLRTLLLFHLSFKHSIVPTIFNSDSFLLSCRHFPICVHSLCLHS, Run with SignalP
  misc_feature (74)...(235): similar to gi159430 in the genepept database release 114, Run with FASTXY 3.3t00, default parameters
gggtgctgagtgggggagtttttggaagcttgtgcctggactgtctcgggagctcccagtgacggggacaatgcactgcttccatttgtaaatgccatgtgctttccagaatgcttttgaggaccttattgctatttcatctaagcttcaaacatagcatcgttcctaccatatttaattcagactcttttctcctttcctgtcggcacttccccatctgtgtgcacagcctgtgtttacacagcaggtttgccgcagctactcacttgtccagggttaccatgcatattcccataataatctgcgtttcacccatttagctcactgtagaaacttagccagttccatggaggaaaagtcccacaattctcctaatctcataggcatcaacaacgccattaaaatgatggcatcatttttccatagacatattcctggcttttatcaacagtgcccagcacatagaagatatccaataaatatttgctaaattaatgaatgcatcagtgaatgagtgttcttttgtgtgacaaatctgttttatggccccattgtgagacaagacatgttaaagaaatatccagagtgacctttgcatgtttcgaggagcacatagtctggtcaccaaacacaagtgtccacagcctgtgctctccaagatggtaaccactcataacatgtggctttttaaattcaaatgaactaaagttgactaaaattaaaaattcagttcctcagtcacaccagacacatttcaagtcctcaatagcctcacaaggcgagttgctt

SEQ ID NO: 80818 - DNA, 1714 bp, Homo sapiens
  sig_peptide (1283)...(1418): this location contains the signal peptide sequence, MLSMLLRAVFCCCRRLHLVSSILFCCSRNRTLSMKEANLLLRVLI, Run with SignalP
  misc_feature (1089)...(252): similar to gi1419564 in the genepept database release 114, Run with FASTXY 3.3t00, default parameters
ttttttttttttggcagagactatctgaggttttattttggaccaaaaaaaaaaagcaattgaattgttttgtagctggaggcatgggcaaggggggtccccaggtagtaaactccccaggtgggctgagggctagggctgagcctcaggtgggtctcctgttcccagtgctaccctgcatagcggcctccttcccaggctctggggcagcgcaggaggggtaggctgggaggggctgccgcagctgttcacttgggcaggacgtcagaggactcagacaccagcttcccatcacgtgtctcgatcttcttcacaaccacggccctggaggagctggtgcggctgaaggagctggagcccgcgccagagccaaagctggagcccaggctgtagctgaggccggggcttgtgaggcccccataggccgagctcagaccacctgcatagccgctggtggtcttcgtatgaatactcatgttctgcatcccagactccagccggctctcctcgccctccagcagcttcctgtaggtggcgatctcgatgtccagggccagcttgacgttcatcagctcctggtactcacgcagctgccgcgccatgtcctgcttggcccgctgcagggcggcctccagctcagacagcttggtgttggcatctttaatggccagctccccccactgctcggcatctgcgatggcggcctccagggaagccccctggcctttgaggccctcagtctcagcctggagcctgctgatgttctggttcatctcggagatctgtctttgcacaacgcaggtcatccccatgcttcccagccagcgtctgcagctcctcatacttgatctggtacgtgctttcagcctcagcccgactgtggatggtgatctcttcctactgcaccttgacctcagcaatgatgctgtccatgtccagggagcggctgttgtccatggacagcaccacagatgtgtccgagatctgggactgcagctcccggatctcctcttcatacagctgcctgaggaagttgatctcgtcggtcagcccttccaggcgagactccagctctaccttgttcatgtaagcttcatccacatccttcttgatgaggacaaattcgttctccatctctgtacgcttattgatctcatcctcatacttgttcttgaagtcctccaccagcccctgcatgttgccaagctccgcctccagcttcagcttctcctggcccagagtctccagctgccgcctaaggttgttgatgtagctctcgaacatgttgtccatgttgcttcgagccgtcttctgctgctgcaggaggctccacttggtctccagcatcttgttctgctgctccaggaaccgtaccttgtctatgaaggaggcaaacttgttgttgagggtcttgatctgctccttctcctgggtgcgcacggcctggatgttggggtccacctccaggacaagggggctcagcaggctctggttgaccgtaactgcggtgatgcctcccatgccgctggccccaccatagccgccgcccaggccaccgcgaaagttgctgctgcccactcgggagaagctcgaggagctgatgcgggaaccgggcccactcgtgtaggagcggctgctgaaggcccgggggccagaggtggacaccttgtaggacttctgggtcaccctgatggacatggtggaggcaggagtg

SEQ ID NO: 80819 - DNA, 5273 bp, Homo sapiens
  sig_peptide (1669)...(1804): this location contains the signal peptide sequence, MMPLLSLIFSALFILFGTVIVQAFSDSNDERESSPPEKEEAQEKT, Run with SignalP
  misc_feature (519)...(2415): similar to gi4589568 in the genepept database release 114, Run with FASTXY 3.3t00, default parameters
ggggagcacggagctgcagccggttgggccggtgtactttcccgctctggaaaggaagagaaatggaagtgagaaagttgagcatttcctggcagttcttgatagttctggttctgatcctgcaaattctgtctgcgttggattttgacccatacagagtcctaggggtcagccgaacagccagtcaggctgatattaaaaaggcttataagaagctcgcccgggaatggcatcctgacaaaaacaaagatcctggagcagaagacaagttcattcaaatcagtaaggcttacgagattctttcaaatgaagaaaagagatcaaattatgatcaatatggagacgctggagagaaccagggctaccagaagcagcaacagcagcgagagtatcgcttccgccatttccatgaaaatttttattttgatgaatccttttttcacttcccttttaattctgaacggcgggactcaattgacgaaaagtatttattgcacttttcacattatgtgaatgaagtggctccagatagcttcaagaaaccctacctcatcaagatcacctccgattggtgctttagctgcattcatatcgagcctgtgtggaaagaagtcattcaagaactggaagaattgggtgtaggaattggcgtggtccatgctgggtatgagagacgcctggcccatcacctaggggcacacagcacgccctctatcctaggaatcattaacgggaaaatctccttcttccacaatgcagttgtccgtgaaaatctgcgacaatttgtagaaagtcttcttccagggaacttggtggagaaagttacaaataaaaattacgtcagattcctctctggctggcagcaagagaataagcctcatgtccttctgtttgaccaaacgcccattgtgccactgttatacaagttgactgcctttgcatacaaagattatttatcatttggatatgtatatgtgggtttgagagggacggaagagatgacaaggcggtacaacatcaatatctacgcccctaccctcttggtctttaaagaacatataaacaggcctgccgatgttatccaggcccgaggtatgaagaagcaaatcattgacgacttcatcacccgaaacaaatatctattggcagccaggctcaccagccagaagttgttccatgaactctgccctgtgaaacggtcgcatcgacagaggaagtactgtgtggttttattgactgctgagactaccaagttgagcaaaccctttgaggctttcctgtcctttgccctggcaaacactcaagacacagtgagatttgtgcatgtctacagcaatcggcagcaggagtttgccgacaccttactaccagacagtgaggcgtttcaagggaaatcagcggtgtctattttagaaaggcgcaacacagcaggaagggtggtgtataaaaccctggaagacccttggattgggagtgagagtgacaaatttatcctcttgggctatctcgaccagctgcgtaaagatccagctcttctgtcctctgaagcagtgcttcctgacctgaccgatgaacttgcccctgtttttctccttcgatggttctactctgcttctgactacatctcagactgctgggatagcatttttcacaacaactggtagggaaatgatgcccctgctgtccctgatcttctctgccctcttcatcctcttcggcactgtcatcgttcaggctttcagcgactctaatgatgagcgagagtcaagccctccagaaaaagaggaagcccaagagaagactgggaaaactgagccaagcttcaccaaagaaaacagcagcaagattcctaaaaaaggctttgtggaggtaactgaactcacagatgtaacatacaccagtaacttggtacgtctgaggccaggccacatgaatgtggtcctcatcctgtcgaattctaccaagaccagcctactacagaaatttgctttggaggtctacacatttactgggagcagctgcctacacttctccttcctgagtctagataaacacagagaatggctagaatacttactagaatttgctcaagatgcagctccaatcccaaaccaatatgataagcatttcatggagcgtgactacactggttatgtactggctctgaatggccacaagaaatacttctgcctcttcaagccccaaaagacagtcgaagagggagggaagccataggggtcgtgcagtgatgttgactcttccctctacctgggtgaatctcgagggaaaccttcctgtggccttggatccaggcccatcaaaggaaagttgagcaagctctctttatggatggaacgcctgctggagggctccttacagaggttttatatcccatcatggcctgaactagactgagaggattttccaaagagatttgaactcttcagactttttaacatgcccctgtgaacaggtattttcaggactcaaactaccacaatgaacagagtatagattttagattgctcttctagaaccatggctagaagaatctttcctttgtcctgttctaacctaggaatgaaaaacaccaccagtttgaatcgcctaaatgaaaatcttttcctctgggtgttatttttccccactgaatgccacaccattgaaaatagactgctcatcccctcttcctttcttgtccttgtcccatgctcaccccaccctcctgtcctgtgtcttggagaagcacagggctccaccctggcaagcggcatctggcggaccctcatgagcctgttcgtgcaggccaggtcattggcccctttcccaattccggccctgctgtgctgctgccatggcgcatgctcctaactctgaacaacccacggcagcttctagccccgcatctggaaaaaggcccctttccaagcaatctcacgtttactggttgttctgggagtaagtggctaaatgtatattttgggggtatcccccaacaacagtttgttggccacaggttgaaaaggaaaggaataaacgggagttctgcatgtgagttctcaagaaaaggaaagggaggctgagcagtggctgaagcgatgcagccttgagacacgctgtgagcatcccatccgccgccccagcgctgctggtagccaggggaggggtctgcacagcgagaagtactgtgatgactttgagccgttgacatgtatgtcttcagatgcctttctgcctctgtcgattttagggtatggatattaggagccataacttgtaatcttgttctctgaacgtagagataagctgctataaagccagtagatgttaaactgaagagaaattattcccacctgctatgagtcaggcttaaggaatctcttcaatagtgtctctttagtaaaataccaaacatgtctttgtatcaaggaacttaaaatttctcaacaattgtattttgaacactgttaccctaaaagtgctgtctcttcaagtcatcttttgcaggaagtgagccaagatttgttctagactcccattttgcaaaaggcttactttccacttctgggctgtattttgatgtctcatcttcattgttttcactcttaacttagagctgcttcaccagtattggggtcagactggccatcagcacctgagcgtgctgagctccaggtatagtggaccccagggtgcctcataccagccagttagagagcataccttttatttttcagggcagaatgaccagtggttctgagtttgagtttggacagcttcaaagagtggtccgttcaaatgtcaaagcaaggtgcctttggtggctttgtgaagggtgaaaatcagtgatgggacatttactaagtatttctttttttttttttttttttttagttgttgagacagagtttcactcttgttgcccaggctggagtgaaatggtgcgatctcggttcaccgcaacctccacatcccaggttcaagtgattctcctgcctcagcctcctgagtagctaggattacaggcatgtgccaccatgtaattagcccggctaattttgtatttttagtagagacgggatttctccatgttgatcaggctggtcatgaactcctgacctcaggtgatctgcctgcctcagcctcccaaagtgctgctgggatcacaggcgtgagccaccactcccggctaagttagtatttctttaatcttaatgctttaaactaagccacttggatcctgaataatttaaatcttgagctacattggtaagtaataaattatttaaggccaggaattcctgtagttttcatggagtctgtagctttattaaaaaataaatcactgccaggcttcattcttccatatgatcctctaaaaatggacacttcctctgaatgctgtatctcatggcacctggtccaactagaaatggtcaaggaattcatttggctccttgatacatcagtcctcaatattactttctaggtattttatggccagattgcttatatgagtggtcttttggtttggtagtaggtttttatttttaatttctgtactaatgaaattcctgactttaatttctgaaaaccaaaaactctccaagtgtatttatttatattttttttaatagagacgaggtcttgctatgttgcccaggctggtcccaaactcctggcctcaagcagtccttccaccttggcctcccaaagtgctgggattatcagtatgagccaccatgccagatttgttcatttttaaacatttttatctcttcaagtcatcttttgatcttttaaaaagcaccttcaaacagctgcaccttccatttgcactaggaaatgaaggtagtgatgggattggcaatgttcctggcagatgtttcagcccaaaagctcttctacagaccggtttagagctggtgccctatgagaatattagggagcttttattttaaattgaactttacccttgtccatgcaaggcattcctcctgaatgcatccatgaatttgtttacttttgcgtcaaacatatgagccattgtcatgctcagcctgtgccaccattggctctgtctgatgtaagtaatcatacaagacctgattttgggttctaacacagtgggtctttggactattcaacattggatggtttttagagatgggttcttctggttgatacagactactgcattgcgtttagcagatggggtaaaactggcctaaaacaagtctttgcagaatacatgccaatttccaaaaaaaaaa

SEQ ID NO: 80820 - DNA, 771 bp, Homo sapiens
  sig_peptide (314)...(449): this location contains the signal peptide sequence, MGKVGFHGIVLFRLLVRLSEALLHVLVARYGFLLCERHACSCLLY, Run with SignalP
  misc_feature (426)...(77): similar to gi182221 in the genepept database release 114, Run with FASTXY 3.3t00, default parameters
ctacccaatacagatgatctgttggtggacatttgagtagtttctagttttaagttttttttctgttacaaactgctgtaaattcttgtacatatctcagtatatacatgactttgagtatacttgtttctgtagcatatatatctaaaagtggaaatactgaattgtggggtgtgggcatgatcagtttcacaagatagtgccaaattattttgcaaagggataactgctcccacattaatgtggtatagtttcactttcacaacatcttcattaatgcttgttttttcactttttaatttttgtcagtctgatgggtaaggtgggatttcatggtattgttcttttccgattgctagtgaggttaagcgaagcacttcttcatgtgcttgttgctcggtatggtttcctcttgtgtgaaagacatgcctgttcatgtcttttgtacatttttaaaatttcttatttattcatagacttccctcttacgttctgaatacaaattctttgttggttatgtgtgatttaacaaagtaccttttttggcttatatttttgtgcttaagaattttttcttacctctcattcataaggataattcacccaaatttccctataaaagtggaataattttgccttttagaagcctggagttgattctgtggatttttggagaagggatttaattatatttattttccatgtggggaaccctctgtcccacagcgacttcataagaagtctttcctggacaggcacggtggctcgcgc

SEQ ID NO: 80821 - DNA, 677 bp, Homo sapiens
  misc_feature (1)...(677): n = a,t,c or g
  sig_peptide (363)...(228): this location contains the signal peptide sequence, MVYLMSSMLLIRNLSQFSSFHYRNYWNSNIGYVSLFTNEEYISIL, Run with SignalP
  misc_feature (283)...(367): similar to gi1573994 in the genepept database release 114, Run with FASTXY 3.3t00, default parameters
attttttgaacctttacaaattgcattttcaaatattaactttaaaaaaaacattcccttcagtatttatgaagatgaattttcttaaaacattacattaataggctcttttgaaaatacatggctatttaacttgtaaagcataatataatttcattgttagatactgaatcttttacaccttttaattaagtagtaatcctgttgtttgagttttctgacaagaaggatagaaatatactcttcgtttgtaaacagtgatacatagccaatattggaattccagtaattcctgtaatgaaatgaagaaaactgggataggtttcgtattaaaagcatggagctcattaaataaaccatgcatgatggcagttttgtgtcagagattgaccggattggtcatctgttcaagtatattggtaacacaacattatttaaataattaaataaaaccaaggaaaatgtatctacacctgtcagangcaaaggaaggaaaacacttttctacccccacccaaaaataacaggtcttcgtggggggcccccccctctttgaaagaatacatcgccttcaatccccccccggtcgcgggccacaaaacaaaaacttttttttttagggggggnggttaatttttaaagcggcgggggccccccccctttctanaaccagnggc

SEQ ID NO: 80822 - DNA, 802 bp, Homo sapiens
  sig_peptide (140)...(275): this location contains the signal peptide sequence, MHFHCTVFFGSCVNSSCLLVIFYFSLRIIFFNLPGYLIVFKNYFF, Run with SignalP
  misc_feature (53)...(436): similar to gi501027 in the genepept database release 114, Run with FASTXY 3.3t00, default parameters
ctcagtgaaccatagggtgagaatgtcaaaagtaaatataattgcttttttcttcactttctttctggagtctgttaatcaaatgttagaagtttttaactgattccatgattttttaaaaaatcttctcttattttgcatgcattttcattgtactgtgttttttggaagttgtgttaattcatcctgtctactggtcatattttattttagtttgagaattatattttttaatcttccaggatatttaattgtgtttaaaaactattttttttggtagaattctcttctctctggggttattatttgtaacgattttgttttgtttcttgacatttttgtgcagttactgcatggctctttttaaatgttatgttatttgcttgtttcggattctcattttggaggttttcttcaattatctggggatccttggtgcatacggaagacggagacgctgaaaagattattgaatgtcatggccagccttgctaattggagggcttcactgtgcatacactgtgtagcaatctgtactttcacatttcaccatttataaggagctttcttttgccatttgacatttgatgtctcttgaggaagtattatggcctgaagaaaacatacctgcctgcctgtctaggacgcaagcgagaaaaaggacagggcattttgccctttattgggcagactgtcactcactccccacccctccagctattgggcacctcagtctggccctagccccccctctaccttggctgcatttctaagccctgcagtttctgctcaagttctcgac

SEQ ID NO: 80823 - DNA, 1660 bp, Homo sapiens
  misc_feature (1)...(1660): n = a,t,c or g
  sig_peptide (365)...(230): this location contains the signal peptide sequence, MAFLLSTLLNHYLACKHSSELWLQSSLNNLGKKKDKAYIFTVLAL, Run with SignalP
  misc_feature (673)...(1192): similar to gi1177607 in the genepept database release 114, Run with FASTXY 3.3t00, default parameters
cctcccattattttgggcataaaaccccattaaatgcttttaaaccaaataaacttttttttttttttggtagagacagggtcttgctatgttgcccaggctagtctcaaactcctgggctcaagcagttcttgcctcagcctcccaaattgctgggattacaggcatgagccaccatgactggcctaaaacaaaataaattcttaatggcatttgtggaatgtgtttaagagccaaaactgtgaaaatgtaagctttatctttcttttttcctagattatttaaagaggattgtagccacaattcagatgaatgtttacaagccaaataatgatttaagagtgtgctcaataaaaaggccataggtttaagaattaaatggaataatataaattactaggtcaacaagaatatttcatgtatagtacactgtctaaggaatgcagagaaattttacaagaaacccaagactaaatacttcattaagaacactggttactaagtaaatagatggctcatgtaggaaaaagctaatatatgtagatgtaatgtcaactaagtgcatgtgacagaaatgaagaactaggaataagaatccagattttctggccaggcatttttaagtgctattggtattcactttatttcaaactgagcaaaacaatacaaccttttacttttttatacattttaaaatttctctcatattaacattccttcctaccccaatccatcccatcaccaaacaggaatgagataaggagtgaaaaaaagatgtatgtttctcattttccttcttttcccttgaagtaaaccagtaatttattaaaatattttataggtcagaggataacaaaagactcaatgtagtaaataagtaaataggcattcaaatatcagtaacctaacaggccctaatacagctttaagattttcttctttttttttttttgagagggagtctcgctctattgcttaggctggaatgcagtggtgcgatcttggttcactgcaacctccacctcccactattattgtgcataaaaacacattaaatgactctaaaacaaaataaacttttttttttttggtagagacagggncttgctatgttgcccaggctggtctcaaactcctgacctcaggtgatccacccgctatggcctcccaaagcgctgggattacagatgtgagccaccgtgcctggccagaaaatctggattcttattcctagttcttcatttctgtcacatgcacttagttgacattacatctacatatattagctttttcctacatgagccatctatttacttagtaaccagggttcttaatgaagtatttactcttgggtttcttgtaatatttcatgtatagtacactgtctaaggaatgcagagaaatattcttgttgacctagtaatttatattattccatttaattcttaaacctatggcctttttattgagcacactcttaaatcattatttggcttgtaaacattcatctgaattgtggctacaatcctctttaaataatctaggaaaaaagaaagataaagcttacattttcacagttttggctcttaaacacattccacaaatgccattaagaatttattttgttttaggccagtcatggtggctcatgcctgtatct

SEQ ID NO: 80824 - DNA, 4001 bp, Homo sapiens
  sig_peptide (1991)...(2126): this location contains the signal peptide sequence, MDEVHVLGLALLTVLIELVSPLDSLRRHSCYITHTFSCNHTNSHF, Run with SignalP
  misc_feature (233)...(110): similar to gi557242 in the genepept database release 114, Run with FASTXY 3.3t00, default parameters
aatattatatttgtagtttgtgccaacaagattgattgtaccaaacatcgctgtgtagatgaaagtgaaggacgtctttgggctgaaagcaaagggttcctgtactttgaaacttcagcacaaactggagaaggcattaatgagatgttccagatacatcttggatagaactaatggataaattagtctgtttaaaaaaaaaaagctaacaagaagagaataattacagtattctataaaccttttatatatccatagttgatttatgtgaaaatggcgggaaacgccctaccaccaatagcagtgctagtttcaccaaagaacaagcagatgccattcgcagaattcgaaatagtaaagacagttgggacatgctgggagtcaaacctggggcctcaagggatgaagtcaataaagcgtatcggaaacttgctgtgcttcttcaccctgacaaatgtgtagcacctggcagtgaagatgccttcaaagcagttgtgaatgctcggacagccctcctgaaaaacatcaagtagaaagtacagaaaaaagccacatgtgggactcaaatgcaaacagactttccctagaggtgaaataaccaacgtggagttttccttcccagaatctcactgctcttttcattcatgtgttgtcatttgtatatcagtaattcaggtacccatttcatagacattttactgagaaatgacctgcatttgtatgaagtgaactgagcgtcacaccctgtacttcatttcatatttctagataattctgaatttttttctcattcgtcagctctgtaattatagtatcacttagacatttcacttggggaaatccacaaggttcctggaggagggaagagaggacaagaggaccctttcactttttcttttttacggaattcatcatcagagaagaaaataacaaaaatggaagcaaacaacatcagaacccctgtaagtttggtgtgaccttacagacaagttgctgcttttacaatgagttccttaggtggtattttaacccatcgatctataatgatgactcttggcagccctttgggagtttgtaaaatgaggtgatacagttctgaattgagcattcctttatgatattcactctgttcctcttctgcagccaccagtgggagagacaagccagtcctaagagaaaaggtggtggcagccacaaattctaggtacactggctgctgcctatcctgtccctggatctgaggcctttcccttgccatagaaatggttgctggtagcagtagagagcactgtgcacctgggaatgaggaatcaggccccaagacagaagtacttggaggagccagctgcagtagtatccgcctgtagtcccagctactcaggaggctgagacaggaggattgcttaagcccaggagctcaagtcccacctgggcaacatagtaagatcttgtctcttaaagaaaaaaaaaaaaggtacttagaggtcgcacttaaagattatgcacatcagcagaggaaaggccagccaagcttggggcaagcttgatgcagtaggagagactccttatgaggcttagcccttgtcttactgccagcctttgccacaggcaggtgagaaaggcagggccactcctcagcaaagttggcctcttctacacttcctcaccagtgttgtttcttccttttttcccctcttccccttcccgtcttgtgttttttctgaaccccacatctgccatcatttctctcctctagagtccctggcttctggccactgcctcctccctcttctaagccttggcctgaatctggttgatcagaggcaagtgtggatcctttgggtggcagtcaggggagatctcagggcctctgttgggaggaatctctgtaattcctgcttgggctccaaatttctgaagagtaatatttttaaactatagcttacaaaatacattctctgaccacagtctcctccttgatatacaagggatggatgaagttcatgtattaggactggcactccttacggtgcttatagaactagtctcaccacttgactcattacgtcgtcattcttgttacatcactcatacttttagctgcaaccacactaattcacatttttatatactttcaattagctgtactaattggggcttgaaagtatataaaatcttcctgtcctgtgaattttaaaaagctatcccatatcgattgccaaagagcatctaccttacctcctaagaagaaaagccactttcttccaatccaagcccactgcagccttgtggattttccacacagcagcttttcactgtatgcctgtacttgggctgcactgagcttgtcttcaggaaaccagagcgttgctttatcatcgcacttttcatcttggtaatatcaaaacaactttttaaatgaactgattgatatatgttatttcttgcgaggttttcctctggcctttaactggcttctgaggctacagaactccaacccagagttcttcgggacctaaattttgcttaaggaaggcctttatcatgctgaaagcactcagacatgtctgtcctcacagcagaatgtagaagtcatatgaatgagggatcgtgcacggtagcgtcagcccgaattgacacgacaactctgaatgtgtggccctctatgaaagctggtgccagttttcatcactgttattaaatactagattgggaacctcattcagccgtattgcacagatgagcaattacagcagagaaaattcattagtgctcccactcatatccttatgtgtgagttggtgaaatttagcctgagcttgattcttaggtcttgagactcagtttccaacaccttcattattaatgttaagaatggccatataccacttcatttacgtaaaaggaataaaataagcaagttaagcttcagggtcctagaatttttctgatttctataatccttcagcagaatattaagaaataaagcatgatctgcaatggaaaggtttttttggcactaacttcatgcagaatttcacagacatctatgcattaatttaaattcttggtgcaaatgtgtgctttgtagttcaaccttattaaaaattcttcagccagttaggatttcaaaatacattagtgagagtaacagctagcagaataattacaatggctaaaacgtttttatagagaatcttgtttttcaaaaaagaataaaaagtttgaatagctattattaaagaaaagccatgtcttcaacatctgagtcaccaagaagtaacactttttaaacttgttagaaatccctggaggcatttcaaattcatcttctaacctacctaagcactttaaaatacagcctccttctgttcctctgttccccttcatgcctccttttgaattgatatctcagctgtcaatatttctttgacttcagcattgttattttatttctctatatcaatgtgtccttagttttcttagcctgttaatttaaaaatccagacttgggggtcattgtgttgctacccaagagaaaatgctacagttttatagattgcacatcattctttaaggcatacttttacctcaggaaacttactctagtatgttctcatatattgaattctcaactaagtaactatttctttatacctataaactagtacctaattcactgttagttaaatgagctatagataaggcagctaaatttctgaaagatagccagagtaagtaagcagccactgcaagctctgaatcagttttttaaaaaaaagaaaaaaaaaaaaagggggctgggccccattgaacaatgacaacatcacagggggaagggagggattttgccaaaagttaaaaggggggagctgaaacccatgggcttgttgcctttgacaggaacagggcccgttttacacctaatcccactaggcagggaatggcaccctctttggccactggcccccatcaagctttattttgaataaagggttgtg

SEQ ID NO: 80825 - DNA, 744 bp, Homo sapiens
  misc_feature (1)...(744): n = a,t,c or g
  sig_peptide (58)...(193): this location contains the signal peptide sequence, MLSCKYFFNVAEHLFLVTTGIMLCSTVPSEFSELVWSQEGDRSGA, Run with SignalP
  misc_feature (208)...(353): similar to gi208351 in the genepept database release 114, Run with FASTXY 3.3t00, default parameters
gttttatgtatgtatagtacacatgctccactcttctcatttagcataactttataaatgttgtcttgtaaatacttttttaatgtggctgaacacttatttttagtgacaacaggaattatgttgtgctccacagtgccctcagaattctcagagttggtttggagccaggagggagacaggtcaggagcacaaacaggccggtcttggttcttaactctaccctcttgctttgtctagagcaattgctctttaaataataaagtatttaaaatcaatttgcatatttagtgtatgcatactattcattaaagaaaggatctcatagtcaaatagtttaaatatcacgagttagattgtaatttacacttcttctaatgaacagttaggttagttccattttttattgttatagaaaatatcgctatgggcagcttcatacacacactatttttgtttttcctctcaattgtttccttactttaaatttccaggcactgatttatgcccacagggtagtaacgtttataagcatgttaagcagcattgacaaattgccctggctaaggcaatttacaattgcaaaggcacgcggtcttggctgttataccgcaccccaacagtggatgcttttgaaaaaacaaacacaacctttccccccattaaggacccgaggtaanccctttttaagaccctaaaggggtgnaattagaggttttgtgggtattctttattttaaggggg

SEQ ID NO: 80826 - DNA, 3054 bp, Homo sapiens
  sig_peptide (1765)...(1900): this location contains the signal peptide sequence, MITKTPAQLRSVATILKTLCLASPTVANVKAPPQVAVAAGTPNTS, Run with SignalP
  misc_feature (1163)...(1988): similar to gi5102812 in the genepept database release 114, Run with FASTXY 3.3t00, default parameters
ggcgctggccgcccgctgtgaccttgacctgcaggccgactgcaactgtgccctggagtcctggcacgacatccgccgagacaactgctctggccagaagcctctgctctgctgggacacaaccagctcccagcacaacctctctgccttcctggaggtcagctgcgcccctggcctggcctctgcaactatcggggcagtggtggtcagcgggtgcctgcttcttggacttgccatcgctggccctgtgctggcctggagactctggcgatgccgagtggccagaagccgggagctgaacaaaccctgggctgctcaggatgggcccaagcccggtttaggcttgcagccacggtacggcagccggagcgcccccaagccccaagtggccgtgccatcctgcccctccactcccgactatgagaacatgtttgtgggccagccagcagccgagcaccagtgggatgaacaaggaacaggtcccttctgtgctgtcaacgagctaaacacaaactgggagttctcagggcaattggagaccgtaggagcccacccaggttctatcctggacaaagagatccctagtgggacaagatccagcccgcagacctgtagccagccctgccctgggaacccctctctgggtcccgtgcagtggggccagagtggaggagacggggtcatgcctctccctgaggcaggagacccaatgggggcgcttatggcctccgcaaaacggtttccccccgattgggccgcccagccctacgagagacttgcgcgctttcacacaggacaccttcttacacgccacaagctcgtggaaaaagaaaccgagcccgaagaagggaaaaaacccttatcacgccccacagcagaccccagtcgtcccccctcctgcagcccccagcagctcagggtaccccagagccctgtgtgcagggtcctcatgctgccagagtccgggggctggccttcctgccacaccagacggtcaccatcagatttccctgcccagtgagtctggacgcaaaatgccagccatgcctgctgaccagaaccatcagaagcacctgcctcgtccacatagagggtgactcagtgaagaccaaacgtgtaagtgcccggaccaacaaagccagggctccggagacaccattgtccagaaggtatgaccaggcagttacgagaccatccagagcccaaacccagggccctgtgaaagcagagacccccaaagcccccttccagatatgtccagggcccatgatcaccaagactctactccagacatatccagtggtctccgtgaccctgccacagacatatccagcgtccacgatgaccaccaccccacccaagactagcccagttcccaaagtaacaataatcaagaccccagcccagatgtatccggggcccacagtgaccaaaactgcacctcacacatgccccatgcccacaatgaccaagatccaggtacaccccacagcctccagaactggcaccccacggcagacatgccctgcgaccatcacggcaaagaaccgacctcaggtttcccttctggcttccatcatgaagagcctgccccaggtatgcccggggcctgcgatggcaaagaccccaccccagatgcacccggtcaccaccccagccaaaaacccattgcaaacatgtctgtcagccacaatgtccaagacttcatcccagaggagcccagttggggtgaccaagccctcaccccagacccgcctgccagccatgataaccaagaccccagcccagttacgctcggtggccaccatcctcaagactctgtgtctggcctctccaacagtggcaaatgtcaaggctccaccccaagtggcggtagcagccggaactcccaacacctcaggctccatccatgagaacccacccaaggccaaggccaccgtgaatgtgaagcaggctgcaaaggtggtgaaagcctcatccccctcctatttggctgaggggaagatcaggtgcctggctcaaccacatccgggaactggggtccccagggctgcagctgagcttcctttggaagccgagaaaatcaagactggcacccagaaacaggcgaaaacagacatggcatttaagaccagtgtggcagtggaaatggctggggctccatcctggacaaaagttgctgaggaaggggacaagccacctcacggtccaaggtgtccaaaccacgcctgccagcgcctcggtggcctcagcgccccaccctgggccaagccagaggacagacagacccagccacagccccacggacacgtgccggggaagaccactcaggggggaccatgcccggcagcctgtgaggtccagggtatgctggtgccgccgatggcacccaccggccattccacatgcaacgttgagtcctggggagacaacggagccacacgtgcccagccatcaatgcccggccaggcggtgccctgccaggaggacacggtaggctccctgctggcctccttgtgtgctgaagtagctggtgtgctggcatcccaggaggatctccgcactctgttggccaaagccctctcccagggagaagtctgggcagctctgaaccaggccctgtccaaggaggtcctgggtgccactgtcaccaaagccctgccccagagcatgctgagcatggcgctggtgaaggcgctgtcctggagtgagctgcgcctgaccctgtcccgagccctgtcccggggcgagctgcgggcggaactcaccaaggtcatgcagggtaaattggccgaggtgcttagcaaggctttgacggaggaggagtgggtggctctgagccaggccctgtgtcagggtgagctgggtgctctcctgagccagtcttggtgtcgggtggccctgaggactggaaccatcctccccaaggccgcctcgaaatcaacaggaagcggggtgactaagacgccggccctggtgaaggtggcctgcaggaggagtccatcggccgcatgggggccctccctgggccccgtgagaccacagaccagcaag

SEQ ID NO: 80827 - DNA, 421 bp, Homo sapiens
  sig_peptide (420)...(285): this location contains the signal peptide sequence, MVQFIGCQTSKISLVVICLLKVVGGMCVLQQCSHISLISHRTSLK, Run with SignalP
  misc_feature (90)...(296): similar to gi2924468 in the genepept database release 114, Run with FASTXY 3.3t00, default parameters
accacgcgtgcgatgtaagtaagccagagctatttattattgttgtgaatctaataagcctactatataatcaagtgaatatgagcttccttgacccgaatgattgcttttctcatccatatgcgctgctatctttgtaacctaagaggggatatctttggagcaaccaacgctattatggccattaaaaatgagcacaaactccatgggtcaaacagagtaagccctatcaacatgtctctagggatggataatgtgaaaacatgtcagaccacagccctgattttcagtgaagttctgtggcttatcagagatatgtgggagcactgttgcagcacacacatgcctcccaccactttgaggagacagattacaaccaatgaaatcttacttgtttggcaaccaataaactgtaccatag

SEQ ID NO: 80828 - DNA, 1184 bp, Homo sapiens
  sig_peptide (1026)...(891): this location contains the signal peptide sequence, MTFILSRPPFFFLFSKRSCSGARWSRWPQFGYSTSPPGSMFFSSP, Run with SignalP
  misc_feature (12)...(150): similar to gi5104668 in the genepept database release 114, Run with FASTXY 3.3t00, default parameters
caatgaccttcagatcctctgcttctccagttcttttagccccagtggcgccccagccactcaggtacgttctagaagcagggccagcacctttgagccccagtcatcttggcaacctctgcacacagctggctctccattggcaattgaggatgctgttgacagtagggagaaggagaccctctggtttccctatggtgactcactcctcctggacacagcttcaaccctagggagggaatatctaagccggggggcagtgccattcagctgccccatggaggaccagcccctaaacccaggcattaactcttcacagtgcagcacggcctggggaagccgaccagccttcctccaagaaattgagatgcaataggtctgaaatgagagccaggaattcctaagccttgtccacaaagtggatatcacctggcagctggttagaattgcaggatcccagccccacaaagaccaactaaaatagaatcatctgcatcataaccgagtcccagtggtgtgtgtgcattgcagtatttgtgagacactgttggaatcaaagatgctgtaaagtgggtgcaactctgaggctgatttcactaaagggggaaggagatgagaaatggtgtcagttggcgggtttctgaagcaaaccctacttctcactggatccacagctgcattggaagaaagattccttttaagaagtaattaatgggccgggcgcgggggctcatgcccgtaatcctagcacttttgcgaggcctaagtaggtggatcacctgaggtcaaggagtccagaccagcctggccaacatggggaaaactcttctttactatatacaaaaaattatctgggcgtgatggctatgccggaatccccctactgggaggtgaggagaagaacattgaacccggaggggaggtgctatagccgaattggggccatcgactccacctggcgccagaacaactccttttggaaaaaagaaaaaaaaaaggcgggcggcttaagataaatgtcatggcctgtggagagaaagttttcagtggtacaagcacgctgggccgggaagcgggaggggaaggtatgagtggactgttgtcgaagcaatcggaaggtagaaatgtgacggtcctgattggacgacgatcgtgtggtatcgtttgagaggcggctgggagcg

SEQ ID NO: 80829 - DNA, 6920 bp, Homo sapiens
  sig_peptide (5692)...(5827): this location contains the signal peptide sequence, MSMLHWIHFILHVSIVLKFLSVKCSIIYKKSFASSAFFLVQASFF, Run with SignalP
  misc_feature (258)...(4384): similar to gi2224647 in the genepept database release 114, Run with FASTXY 3.3t00, default parameters
gcggccgcctggacgccgagctgggtgcgcagcagcgcgagctgcaggaggcgctgggcgcgcgcgccgccctcgaggcgctgctgggccggctgcaggccgagcgccgaggcctcgacgcggcccacgaacgcgacgtgagggagctgcgcgcgcgcgccgccagccttaccatgcatttccgcgcccgcgccaccggccccgccgcgccgccgccacgcctgcgggaggtgcacgacagctacgcactgctggtggccgagtcgtggcgggagacggtgcagctgtactaggacgaggtgcgcgagctggaggaggcgctgcggcgcggccaggagagcagactccaggcggaggaagagacgcggctgtgcgcgcaggaggcagaggcgctgcggcacgaggcgctcgggttggagcagctgcgctcgcggctggaggacgcgctgctgcggatgcgcgaggagtacgggatacaggccgaggagcggcagagagtgattgactgcctggaggatgagaaggcaaccctcaccttggccatggctgactggctgcgggactatcaggacctcctgcaggtgaagaccggcctcagtctggaggtggcgacctaccgggccttattggaaggagaaagtaatccagagatagtgatctgggctgagcacgttgaaaacatgccgtcagaattcagaaacaaatcctatcactataccgactcactactacagagggaaaatgaaaggaatctattttcaaggcagaaagcacctttggcaagtttcaatcacagctcggcactgtattctaacctgtcagggcaccgtggatctcagacgggcacatctattggaggtgatgccagaagaggcttcttgggctcgggatattcttcctcggccactacccagcaggaaaactcatacggaaaagccgtcagcagtcaaaccaacgtcagaactttctctccaacctatggccttttaagaaatactgaggctcaagtgaaaacattccctgacagaccaaaagccggagatacaagggaggtccccgtttacataggtgaagattccacaattgcccgcgagtcgtaccgggatcgccgagacaaggtggcagcaggtgcttcggaaagcacacggtcaaatgagaggaccgtcattctgggaaagaaaacagaagtgaaagccacgagggagcaagaaagaaacagaccagaaaccatccgaacaaagccagaagagaaaatgttcgattctaaagagaaggcttccgaggagagaaacctaagatgggaagaattgacaaagttagataaggaagcgagacagagagaaagccagcagatgaaggagaaggctaaggagaaggactcaccgaaggagaagagcgtgcgagagagagaggtgccgattagtctagaagtatcccaggacagaagagcagaggtgtccccgaaaggtttgcagacgcctgtgaaggatgctggtggtgggaccggtagagaggcagaagcaagagagctacggttcaggttgggcaccagtgatgccactggttctctgcaaggcgattccatgacagaaaccgtagcagaaaacatcgttaccagtatcctgaagcagttcactcagtctccagagacagaagcatctgctgattcttttccagacacaaaagtcacttacgtggacaggaaagagcttcctggggaaaggaaaacaaagactgaaatagttgtggagtcttaaactgactgaggatgttgatgtttccgatgaagctggcctggactaccttttaagcaaggatattaaggaagtggggctgaaaggcaagtcagccgagcagatgataggagacatcatcaacctcggcctgaaagggagggaggggagagcaaaggtcgtcaacgtggagatcgtggaggagcccgtgagttatgtcagcggggagaagccggaggagttttccgtcccattcaaagtggaggaggtcgaagatgtgtcgccaggcccctgggggttggttaaggaggaggaaggttatggagaaagcgatgtcacattctcagttaatcagcatcgaaggaccaagcagccccaggagaacacgactcacgtggaagaagtgacagaggcaggtgattcagagggcgagcagagttattttgtgtccactccagatgaacaccccggggggcacgacagagatgacggctcggtgtacgggcagatccacatcgaggaggaatccaccatcaggtactcttggcaggatgaaatcgtgcaggggactcgaaggaggacacagaaggacggtgcagtgggcgagaaggttgtgaagcccttggatgtcccagcgccctctctggagggggacctgggttccactcactggaaagaacaagctagaagcggtgaatttcatgccgaacccacagtcattgaaaaagaaattaaaataccccacgaattccacacctccatgaagggcatctcctccaaggagccccggcagcagctggtggaggtcatcgggcagctggaggaaacccttcccgagcgcatgagggaggagctgtccgccctcaccagagaggggcagggtgggccggggagcgtttccgtggatgtcaagaaggtccagggtgctggtggcagttccgtgaccctggttgctgaagtcaacgtctcacaaactgtggatgccgatcggttagacctggaggagctgagcaaagatgaggccagtgagatggagaaggctgtggagtcggtggttcgggagagcctgagcaggcaacgcagcccagcgcctggcagcccagatgaggaaggtggagcggaggccccggctgctggcattcgcttcaggcgttgggccacccgggagctgtacatcccttcaggcgagagcgaggttgctggtggggcctctcacagctcgggacagcgcactccccagggcccagtgtcggccactgtggaggtcagcagccccacaggctttgcccagtcacaggtgctggaggatgtgagccaggctgcaaggcacataaaactcggcccctctgaagtctggaggactgagcgaatgtcatatgaaggacccactgcagaagtggtggaggtaagtgcgggaggtgacctaagtcaggcagcgagcccgaccggagccagccggtctgtgaggcatgtcacgctgggtcccggtcaaagtccactgtccagagaagtcatcttcctaggccctgcccctgcctgtccagaggcatggggctcgccagaacctggcccagcagagtcttctgcagatatggacggatcagggaggcacagcacatttggctgcagacaatttcatgctgaaaaggagattatttttcagggccccatttctgctgcagggaaggttggtgattattttgcaacagaagagtcagtgggtacccagacttctgtcaggcaactccagttaggccctaaagaagggttcagtgggcaaatccagttcacagctccactttcagacaaggtggagttgggtgtcataggagattctgtacacatggaagggttgccagggagcagcacatccatcaggcacatcagcattgggcctcagaggcatcagaccacccagcagatagtttaccatgggctggttccccaactgggggaatctggtgactcagagagcactgtgcacggagagggctcagcagatgtgcaccaggccactcacagtcatacctcgggtagacaaaccgttatgactgaaaagagcaccttccaaagtgtcgtttctgaatctccccaggaggatagtgcagaggacacatcaggggcagaaatgacatcgggtgttagcagatcctttaggcacattcgactaggtcctacagaaacggaaacctctgaacacattgccatccgtggacccgtgtccagaacatttgtgcttgctggttcagcggactcccctgagctaggcaagttagcagacagcagcagaacgctaaggcacattgcaccagggcccaaagaaacttcgtttacctttcagatggatgtgagtaacgtagaggcgatccgcagccggacacaggaagcgggagctctcggtgtgtctgaccgtggttcctggagagacgcggacagtaggaatgaccaggcagttggtgtgagctttaaggcctctgctggggaaggagaccaggcccacagagaacagggcaaggagcaggccatgtttgataagaaggtgcagctccagagaatggtagaccaaaggtcggtgatttcagatgaaaagaaagttgccctcctctatctagacaatggaggaggaggagaatgatgggcattggttttaataagcagaaacattttgttttaatggcagcctgttggcgacgtgccaacatccaaaggccttaacttattttaagaggccgagggagtctatgaaaaatctccccttttttacttttttaaagagtactccccgcatggtcaatttcctttatagttaatccgtaaaggtttccagttaattcatgccttaaaaggcactgcaattttatttttgagttgggacttttacaaaacacttttttccctggagtcttctctccacttctggagatgaatttctatgttttgcacctggtcacagacatggcttgcatctgtttgaaactacaattaattatagatgtcaaaacattaaccagattaaagtaatatatttaagagtaaattttgcttgcatgtgctaatatgaaataacagactaacattttaggggaaaaataaatacaatttaaactctaaaaagtcttttcaaaaagaaatgggaaataggcagactgtttatgttaaaaaaattcttgctaaatgatttcatctttaggaaaaaattacttgccatatagagctaaattcatcttaagacttgaatgaattgctttctatgtacagaactttaaacaatatagtatttatggcgaggacagctgtagtctgttgtgatatttcacattctatttgcacaggttccctggcactggtagggtagatgattattgggaatcgcttacagtaccatttcattttttggcactaggtcattaagtagcacacagtctgaatgcccttttctggagtggccagttcctatcagactgtgcagacttgcgcttctctgcaccttatcccttagcacccaaacatttaatttcactggtgggaggtagaccttgaagacaatgaagagaatgccgatactcagactgcagctggaccggcaagctggctgtgtacaggaaaattggaagcacacagtggactgtgcctcttaaagatgcctttcccaaccctccattcatgggatgcaggtctttctgagctcaagggtgaaagatgaatacaataacaaccatgaacccacctcacggaagctttttttgcactttgaacagaagtcattgcagttggggtgttttgtccagggaaacagtttattaaatagaaggatgttttggggaaggaactggatatctctcctgcagcccagcaccgagatacccaggacgggcctggggggcgagaaaggcccccatgctcatgggccgcggagtgtggacctgtagataggcaccaccgagtttaagatactgggatgagcatgcttcattggattcattttattttacacgtcagtattgttttaaagtttctgtctgtaaagtgtagcatcatatataaaaagagtttcgctagcagcgcattttttttagttcaggctagcttctttcacataatgctgtctcagctgtatttccagtaacacagcatcatcgcactgactgtggcgcactggggaataacagtctgagctagcaccaccctcagccaggctacaacgacagcactggagggtcttccctctcagattcacctggaggccctcagacccccagggtgcacgtctccccaggtcctgggagtggctaccgcaggtagtttctggagagcacgttttcttcattgataagtggaggagaaatgcagcacagctttcaagatactattttaaaaacaccatgaatcagatagggaaagaaagttgattggaatggcaagtttaaacctttgttgtccatctgccaaatgaactagtgattgtcagactggtatggaggtgactgctttgtaaggttttgtcgtttctaatacagacagagatgtgctgattttgttttaactgtaacaggtaatggtttttggatagatgattgactggtgagaatttggtcaaggtgacagcctcctgtctgatgacaggacagactggtggtgaggagtctaagtgggctcagtttgatgtcagtgtctgggctcatgacttgtaaatggaagctgatgtgaacaggtaattaatattatgacccacttctatttactttgggaaatatcttggatcttaattatcatctgcaagtttcaagaagtattctgccaaaagtatttacaagtatggactcatgagctattgttggttgctaaatgtgaatcacgcgggagtgagtgtgcccttcacactgtgacattgtgacattgtgacaagctccatgtcctttaaaatcagtcactctgcacacaagagaaatcaacttcgtggttggatggggccggaacacaaccagtctttttgtatttattgttactgagacaaaacagtactcactgagtgtttttcagtttcctactggtggttttgatattgtttgtttaagatgtatatttagaatgacatcatctaagaagctgattttgctaaactcctgttccctacaatgggaaatgtcacaagaatgtgcaaaaataaaaatctgaggaaaaaaaaaa

SEQ ID NO: 80830 - DNA, 3272 bp, Homo sapiens
  sig_peptide (2962)...(2827): this location contains the signal peptide sequence, MPYVTEATRVQLVLPLLVAEAAAAPAFLEAFAANVLEPREHALLT, Run with SignalP
  misc_feature (181)...(1656): similar to gi1549247 in the genepept database release 114, Run with FASTXY 3.3t00, default parameters
gaattccggcgcaggcgcccgagccgagcgccgagcagggagcgggcggccgcgctccgggccggggtcccgggggagcagatcctcagaatggcccttggtgctgcaggcgcggtgggctccgggcccaggcaccgagggggcactggatgactctccaggtgcaggaccctgccatctatgactccaggtcttcagcacccacccaccgtggtacagcgccccgggatgccgtctggagcccggatgccccaccagggggcgcccatgggccccccgggctccccgtacatgggcagccccgccgtgcgacccggcctggcccccgcgggcatggagcccgcccgcaagcgagcagcgcccccgcccgggcagagccaggcacagagccagggccagccggtgcccaccgcccccgcgcggagccgcaggtgagtgggaggcccggcgaggagggggcgtgcaggggcgggcctgggggaaccgcagggaccagattcgggagctggtccccgagtcccaggcttacatggacctcttggcatttgagaggaaactggatcaaaccatcatgcggaagcgggtggacatccaggaggctctgaagaggcccatgaagcaaaagcggaagctgcgactctatatctccaacacttttaaccctgcgaagcctgatgctgaggattccgacggcagcattgcctcctgggagctacgggtggaggggaagctcctggatgatgtacgtcccggcccagcccagcaaacagaagcggaagttctcttctttcttcaagagtttggtcatcgagctggacaaagatctttatggccctgacaaccacctcgttgagtggcatcggacacccacgacccaggagacggacggcttccaggtgaaacggcctggggacctgagtgtgcgctgcacgctgctcctcatgctggactaccagcctccccagttcaaactggatccccgcctagcccggctgctggggctgcacacacagagccgctcagccattgtccaggccctgtggcagtatgtgaagaccaacaggctgcaggactcccatgacaaggaatacatcaatggggacaagtatttccagcagatttttgattgtccccggctgaagttttctgagattccccagcgcctcacagccctgctattgccccctgacccaattgtcatcaaccatgtcatcagcgtggacccttcagacccagaagaagacggtcgtgctatgacattgacgtgaaggtggaggagcccattaaaggggccagatgagcagcttccttcctattccacggccaaaccagccaggagaatcagtgcttctggacagtaagatcccatgagccgattgagtcccataaacccagctccaagatcccagagggacttcaatgctaaagtttcttccagagacccccaaaggctatgtccaagacctgctccgctcccagagccgggaccttcaaggttgatgacagatgtagccggcaaccctgaagaggagcgccgggcttgagttctaccaccaagccctggtcccaggaggccgtcagtctgctacttctacttgcaagatccagcagcgcaggcaggagctggagcagtcgctggttgtgcgcaacacctaggagcccaaaaataagcagcacgacggaactttcagccgtgtcccgggccccagcattttgccccgggctccagcatcactcctctgccaccttggggtgtggggctggattaaaagtcattcatctgacagcagccgtgtggtcattggaaactggggaggggagggggagagaaggggaagggaagaaggtggggaggcagtgggtccctcgggacgactccccattcccttcccttggattcttctccttactcaattttccctagacctaaaaacagtttggcagaagacatgtttaataacattttcatatttaaaaaatacagcaacaattctctatctgtccaccatcttgccttgcccttcctggggctgaggcagacaaaggaaaggtaatgaggttagggcccccaggcgggctaagtgctattggcctgctcctgctcaaagagagccatagccagctgggcacggccccctagcccctccaggttgctgaggcggcagcggtggtagagttcttcactgagccgtgggctgcagtctcgcagggagaacttctgcaccagccctggctctacggcccgaaagaggtggagccctgagaaccggaggaaaacatccatcacctccagcccctccagggcttcctcctcttcctggcctgccagttcacctgccagccgggctcgggccgccaggtagtcagcgttgtagaagcagccctccgcagaagcctgccggtcaaatctcccccctataggagccccccgggaggggtcagcaccaggaggggagggggggtcagggccagcccccgggggccctgggggtgatctctgtggtgacagggcaggattgaactcctggaaatggactggaaagaaggcctgccagccagagatggcattcatgcgacagcggttgaggacttcgggcccaggccttgtccacacggtggtaaggaagaagagagtgtccacagggtgcttcttcgagaccacgtccatgagtcgcacctgggaaggggcctctgctcgcacagcgagccaggccagcctcgtcccagggtaccgtcgctctaactccgctgctgcagccttcaccccaagaaatgggtctggagctccacggccaccttctcgtggcccgtagaccagcaacagggtgagcaatgcatgttctcgtggctccaggacattggctgcaaacgcctcgaggaaagccggggctgcagcagcttcagccaccaggagtggcagcaccagctgcactcgggtggcctcagtgacatagggcataggtaggatttccacccggctcagtggccgcagcaggctgaccctgcgagccagggcccgccggtgcccacgctgtgtcacacattccaacagcaggtccagggtgtactccatgccccgtgctgggtcgaagcgccgatagccgttgagcagtcgctgcttctggaagcgcaggcggggctgatagcgccgattgagctgctccagggcagtctccaacgcatcacccacgtccgccctgctagccccctgtagtgggcacttgggagccccatctgcacaggagaaggtgtgctctagttctagatcacga

SEQ ID NO: 80831 - DNA, 978 bp, Homo sapiens
  sig_peptide (775)...(910): this location contains the signal peptide sequence, MMYILLVFLTLWLLIEMIHCLQNGDHRRTRPPTETGWLPLRFHLR, Run with SignalP
  misc_feature (322)...(930): similar to gi206865 in the genepept database release 114, Run with FASTXY 3.3t00, default parameters
tttcgtggcgactgtccgtggtgctgagcgccggcgagagcgggcgcggagcggctgatcggctccctcgaactggggaggtccagtggggtcgcttagggcccaaagcccccacccggctccaaaagctcccagggcctccccaggcaccggtgctcggcccttccttcggtcagaaagtcgccccctgggggcagttcgtcccaaagggtttcctcgaaagaatctgagagggcgcagtccttgaccgagggaatctctctgtgtagccttggaagccgccagccccagaagatgcctgccttcaatagattgtttcccctggcttctctcgtgcttatctactgggtcagtgtctgcttccctgtgtgtgtggaagtgccctcggagacggaggccgtgcagggcaaccccatgaagctgcgctgcatctcctgcatgaagagagaggaggtggaggccaccacggtggtggaatggttctacaggcccgagggcggtaaagatttccttatttacgagtatcggaatggccaccaggaggtggagagcccctttcaggggcgcctgcagtggaatggcagcaaggacctgcaggacgtgtccatcactgtgctcaacgtcactctgaacgactctggcctctacacctgcaatgtgtcccgggagtttgagtttgaggcgcatcggccctttgtgaagacgacgcggctgatccccctaagagtcaccgaggaggctggagaggacttcacctctgtggtctcagaaatcatgatgtacatccttctggtcttcctcaccttgtggctgctcatcgagatgatacattgcctacagaacggtgatcacagacgaaccaggcccccaacagaaaccggatggctacctttgcgattccatttgagaacagggaaaattcttcggtacctgcggggggaataatacaggccctctgcttaccttgaggcccccccc

SEQ ID NO: 80832 - DNA, 436 bp, Homo sapiens
  sig_peptide (413)...(278): this location contains the signal peptide sequence, MWIFLLLRQPVPPMLSHSLLSLHSHATRRLCTTTHARAHAAASSV, Run with SignalP
  misc_feature (308)...(156): similar to gi4775290 in the genepept database release 114, Run with FASTXY 3.3t00, default parameters
tttcgttggagatcctgtgctggagctcagcttggctcatctcctggcattgggccactgcttagcaccttcaggctggaggcatgaatggtcaacaatgaagggaagagggggaggttcagagcatcttgaatcccaagctctatcctgtagaaatgggaaccttgggaagcttcgggcttaggaggatttcggtgggcttggttttaaggacagtgacttggatagcagtgagtagagtggaggccagaagggaggtccaaggtgcagagaacagacagaagaggctgcagcatgagcccgggcatgggtggtggtgcacagtcggcgggtggcatgagagtgcaaggaaagcaagctgtgagagagcatcggtggcactggctggcgaaggaggaggaaaatccacatcacggtgcggagcctggaaggcaac

SEQ ID NO: 80833 - DNA, 575 bp, Homo sapiens
  sig_peptide (193)...(58): this location contains the signal peptide sequence, MVMLTLAIRLMQFEFRQFFIKVNFRMRGLSKMAMLLLCRARPYSY, Run with SignalP
  misc_feature (235)...(436): similar to gi258834 in the genepept database release 114, Run with FASTXY 3.3t00, default parameters
taaaagtttcctgcagtgaggaaatagccagaaagaacactccacccctcctcctttttataactatagggtctggctcgacagagcaggagcatcgccatcttggacaagcccctcattctaaagttcaccttaataaaaaactgcctaaattcaaactgcatcagcctaatggctaaggtcagcatgaccataaaccacaaataacatctccaaccggaaacattcgaaactcctcctcgaccagagacatgctagtcccgagataacccccctccagcagggaagatgccagtctcgggataacctctctctggccggaaagatgcctgccccaagataaacttgcctcctcccagagatattccaaccctgccataaaacttctccctcaaacaggaacattccaaaattctgataatctccctcaccctaaaaccaatatatactcctagtctgtaagagaaagcgctcttgaccaaaattcaccaggagtgcctcccaggttttaactaaagaaaacctctctttaactgccaaaaaaaaaaggaaaaaaaaaaagctttctgcagtgg

SEQ ID NO: 80834 - DNA, 6607 bp, Homo sapiens
  sig_peptide (858)...(993): this location contains the signal peptide sequence, MDLDNAKYSLLGFALFWVVVGFFFVCLFWFLVFLPWCKTVESCLF, Run with SignalP
  misc_feature (3506)...(3653): similar to gi1785641 in the genepept database release 114, Run with FASTXY 3.3t00, default parameters
ataaccatttattagtcgaaagtgtttttaagcacagtcagggtgtaaacagtgcagcattcctgctcccctccgtgggagcagcgtctccttttcaattcatgtgactacagaaggcacttggtgaactgtgcgtgtctgaggtgtggaaaccaggagacgctgctcccacagtcagggtgtaaacagtgcagcattcctgctcccctccgtgggagcagcgtctccttttcaattcatgtgactacagaaggcacttggtgaactgtgcgtgtctgaggtgtggaaaccaggagagggggaaagaattctcaaaggcctgacgtgagaagttggaaaggtttgcaggttagggaatgaattgggagtgggggccggcggcacccatttcggtgactttctccccatttcatgtaaacagaattgccagggaccggttaccgtggatatgtttttctaaaaactcagtgtctgcacaatccattgatagaactggaggatgtgtctgtgtttcctgttgggtttttctcatctcttacatcatacaaacttcaatttttaccttgaatacaggggtagtaggggtggtggtggtggtggtggttgagacagggtctctgttgcccaggctggagtgcaatgatgcaattatagctcattgcagcctcgaagtcctgggctggagcgttcttcctggctcagcctccctagtagctgggaccacaggtgtgtaccaccacgcccagcttatttttaaattcttgtatagatgaggttttactacgttgcccaggctggagggtggtggtttttatattccttgtgtgaggggtgtctgtgatatttggaatttgagaatggatttagacaatgctaagtacagtctgctgggttttgctttgttctgggttgttgttgggtttttttttgtttgtttgttttggtttttggttttcttgccgtggtgcaaaactgtagaaagttgcttattcactggccttggttccattgaagtctgcgtctcgagtgtccgtttcctcctcagaaccatctgcattttcaataactctacgtcctccagaccttctagaaggaacgaaagaggtctcgtttcctcgcctgagcttgctcttgagtgcgttcacctcgcggcccatggcctcgttgctctccgtggcctcatccagctcccgctgcagcttcctgcggttggcgttgatgcgctgggactcctcctctgcctcctccagctgcctcttgagctgcttgaccctggcattgcctttctctgcctgctccttgtactgctcggccatcttgcgctcgtcctccacctgcagcaagatttccttcagcttcttgtctttctgcttcagcgacttggtggccgcctgtttctctctggcctcctgctcgacctgctcctctagctgtgcaatcttggcctccagcgccgcgatggtggatttgaacttggacttgacggccccctccatctcgtggagcttgctccggagctccttgttctgccgctcaagctgctgccgggaactctcattcttctgggccgtgctgcgctctgtggccagctcgttgctgagctgctcggcctgctgtgtggctttgcggacccggtcgctcatggcctccatgttgccctgctcctcctccagctcctcctccagctgggcgatccgggcctccaggcggcgcttctcgtcctggagtgcgttccttcccgacaggctactggccagctcctctgccagttcctccttctcgaggtccgcttgtttgcgagccctctcagcggcggcgaggtcctcttgtagctgcatgaggtctgcttccaagctcttggctttcttctcattctctttggctgtggcaaagatctcatctctggaggcacgggcatcttccagctctctttgaaagtccttcatctgagcctgcagtttgcgtagctgcttgatggcttcctccctccccttgatggcagagtcggcctgaagctccaggtctttcaggtccccttccagcttcttctttgctgcagctgccagggcacgttgctttcgctcgtcttccagttccgtctcatactcgtgaagctgtctctgcagttgcctcctcttctcctcattctgctcgtcccgggcttggagatccctttcgaactggcccttgagcgcctgcatgttgacttccagccgcagtttggcgtcctccgtggcttgcagctcgtcctccagctcttccagctgcgtcttcatctcctccatctgggtctccagggcccgcttggacttctccagctcatggacgttcttgcccacgtcatccttggagctgaccaggtcttccatttcggctttgagcattttgttggtccgctcgagttcctctttggcttccaaggcctcttcaagggcccgagccagggacagggccttggtttccttctccctggcttctgcctcagctctgtccctctcatccgcgtatttggaagagatgtttttctcctcggctaacaactgatcaaatttcctctgcttcttttccaggttggacacgagttgccgctggttgtccaaatcaacaaccaggtcgtccagctcctgctgaagcctgttcttggtcttttccagtttatcatacgcggccgccttctcctcgtactgctgggtgaggttctcgatctccttctggaacctcttcttcccctcttccagagcttccacggtgctggcaaagtcctgcagcttcttcttcgagtcggagagctggatgttgagagtggagatgtggcgctccaggttctgcttggcctccatctcctcgtccagctggtcttgcaggctgttccgctcctcctccagctggcgcagcttcgtagacacgttgagcttctgccgggtttcttcttgaagcagctcctgggtgtcctggagctgggaactgagggacgccacgtccttggccagcttaatggccttcccctcggcctcgttaagcatccctgtgacgctctcaacttcattctgcagcttgtggactttgtcattgagctccgcccgggcccgctccccatcgctgcacttggactgcagctcctgcacctgcgcctccagcttcttcttcttatgttccacctcctgcttgggcctggcccaggacccgcagctccccggccaggtctgcgttctctttctccagcgtctgcttattcttgtctaggttcgccttggccctcttttgactgctcaagctgctctgtgagctcctccaccgcctgtgcgtgtttctgcctcatctcctggacctgagcctcatgggaccgcgtctcttcatccagggccttcttcagcaccgtcacctcctgctccctcttggccctgagctcctgctgagtggctgtgctgtccagtgtgtcttccagctctgtctttagggcctccagctcctcgccgaggtctcgcttctgcttttcagccttgttcctggcggcccgctctgagtccaggtcctcctggaggtctgagatgtggccctccagctcccggatcttcttcagggcattgttcttctgagcgatttcatcgtcaagcctggccagggccgcctgcagctcctcctccttcttggccagctgcatcttgagctctgcgatctgcgcctggaggtcagcgatctgctcgtggaagtcgctggcatcaccctccagcttccgtttcagcttctccagctcctgtcggctcttctcttccttctttagccgcacttccagttctgaaatcatagattcatgcttgtttttcagcttggtaagattcttggccttttcttcctcttctgcaagatttgtcgttaagtcactaatcctctcctcaaggagttttcgttcttttgatagtttattgttctgatcatccatgaccaggatctcatcctccagtttcttgatcttggcctcagccgtgaccttctcaagttgcagcttctgcctggcagcttcctcctcctccagctgttcttcaaggtccagcatctgctgggccatcttcttcctttcagcctgtagctgctggcccctgtcttcctcctcctccaggcgggcctccatctcatgcagtatctcctccagctcctgcttcttggccgccagccgcacccgcatctcctcagcctctgcatacagcctctgtctctgcctgcagctgttcctgtagcaggttcttctcctcggtcagctgcgagtgcttctgttccagctccttaagctcattctctgccttctgctgccgctccttggtcttctgcagttcatcctccttggcctgcatctcctcctcctgccgtgtcacctgcagcagtggcttcactttggtgaaaagcctccaccactgccagttccgcagcttgaggtaggcggcgcagttcctctgaatcaccttcatggcggtcagctgctgctgcctcttggcaaaagcctttctggccaagtagccacgacacatcgcctggaaggccatgatgacatcggtgatcttcaaatctcgctcctcctctaggtgggccaggacgccagttcggaagaagattttgctctgccctatcctgtataagttggggtcaagttccagggctttgatcatgagaatgcaggcctgcttcccgtccatgaagcctttggggatggcattcgccgccaggatctcgtagcgttggcggaactcctggaagacgatccggttggggaagccctgccggcagatgcgaatgccttccagcaccccattgcaccgcagctgctccagcaccaggaacgcatccagcttgccggacctcttctcgtggttggggatgatgcagcgcacgaagttgggcgtggtgttgcgtagcgtggtcatcagcttgcccagctgctccttgtacagctgccccactgtgcggaacatgcccttcttggtcttggaggcgctgggcagcgagctctccgtcatcttggccatctggtccaggcccacgatgcggtccacgtccttccacaggtcggccacaaacttgtcggaggaggcattgagcagggaagtcacgttgtcattcagcgggtccatattcttggtcagccaggcactcgcattatagtccaccttcccagcataatggatgatggagaactcagtcttgtccttgagctgcttgggcttctggaacttggggtggctgccctgctccgtgcacagcttctccacgaaagacttgtccgtggctttggggaaccagcattcctcgtccagcagggccagcacacctggagggttgttcggtcgctcgatgagctcgatgcagggctgtaggtccagcccaaagtcgatgaagttccactcgatgccctcgcgctggtactcctcctgctccaggatgaacatggtgtggttgaagagctgctgcagcttctcgttggtgtagttgatgcacagctgctcgaaggagttcacctcaaagatctcaaatccagctatatccaggatccccaggaaggaagccccttgccgatgggtcttgtccagggctttgttcacgcgggtgagtatccagcggaaaaggcgctcatatgttgccttggccaaagcctctacagcaaagtcagcctgttcttttgtctgagctttctgtaccacatctcgcccaaccttgatacgaggagtgaggatggatctggtgaaatctgtcacattaattcccatgaggtggcaaactttctgagcagctgtgttatctggcatggacgcctggtctgtgtttctttccttcttgaagacgatatttccaagctgcaggaccgatgataccaccttcaatatggatagctgctcctcctcgctgaaacccatgattgccatggcctccacagtttcctggaacatctcatcatcctgggctgctgggatgggcacaaagccattggagaggaaggtgtagttgttgaagccctccaaaagcaagtcacttctcatcttctccttggctccagcaatcatgtagtaaaagatgtggaatgtcctctcgtctctggcttggcgaattgcccgtgatttttctagcagataggtctcaatgttggctcccacgatgtaacccgtgacgtcgaagttgatgcggatgaatttgccgaatcgtgaggagttgtcgttcttcactgttttggcgttgccgaaagcctccagaatcgggtttgcttgtagaagctgcttttccagctctcccgtgatacttgtgtctttcttgcccttgtgggaggaggccaccacggccaggtactgaatgaccttcttggtgttttcggttttcccggctccagactcgcctgtgcatagaatggactggtcctcccgatcttgaagcatgctccggtaggccgtgtctgcgatggcgtagatgtgaggcggcatctcgtgcctcttcttgcccttgtacatgtcgacgatcttctccgagtagatgggcaggtgtttataggggttgaccaccacgcagaagaggccagagtacgtatatattagccctgagaagtaccgctccctcaggttgtgtagca

SEQ ID NO: 80835 - DNA, 740 bp, Homo sapiens
  sig_peptide (331)...(466): this location contains the signal peptide sequence, MLFTQLWTLLERHFNIFAIYIFLLLKNNRNQCLSWFNNSTKLFSK, Run with SignalP
  misc_feature (676)...(229): similar to gi3643925 in the genepept database release 114, Run with FASTXY 3.3t00, default parameters
cgtaagtactggggcgacccacgcgttcgatttgccacgttgtttattcatgcttttatcacagctttgtctgtaactacattgacttgattactcatattctatggcaattcctgacatttggcttatttttccactagcctccttacttttaaaaaccactccatctcatttttcaacaacctctgattatctcaaagttacctcggattatcctgacacgtccttcggcttctgaggatattgacccagtatttcaagactgaggtgactctgagacagaagacggagccagtggtgatgtgctcccttattcagactctttgaataatgctttttactcagctatggactctgctagaaagacactttaatatttttgccatttatatttttctgttgttgaaaaataatagaaaccagtgccttagttggtttaacaattcaacaaagttgttttcaaaagaagaaagaaaatgtaactccatttaggttgtctttcatttgcaaacactaactgaaacttgagttagggattgtataacttggaaacagtattaataaaatgaagtcattgtcatattaaaaatgtcctaatgttcactttaagtgtatttttaaaaacctcacaggcaatggtgtgaaagaaaccaaggagatgtttacattcattagttccactggaaaaaactggttaatgtaattgtatagaattttcccttcttgttttgggtgctgaa

SEQ ID NO: 80836 - DNA, 1387 bp, Homo sapiens
  sig_peptide (1371)...(1236): this location contains the signal peptide sequence, MSPPLLLLPLLLLLPLLNVEPAGATLIRIPLRQVHPGRRTLNLLR, Run with SignalP
  misc_feature (1375)...(0): similar to gi4154287 in the genepept database release 114, Run with FASTXY 3.3t00, default parameters
ttttttttttttcaatggaaatattggatttttactgagtagcgctagctctgctacccggtgcgcatgcgcatcacctgggcggcacccgcggtactgcgcctgcgcggtctccccatatcgccaggtccgctccgcgagggcgagcgcgcgccaagtcccactccgtgcgccgctctctgatgtccccgcggtcgaagacggtcacatacgcccccaagaaaacgtcgccggaggatccacacaggtactggaggcgaagcgatgtccaaggccccggaagccggacaaggcagagggcgggacgtcaccctgagcaaactggatgacgtaatcctgggccgtgagattaaaccagacccccccaatgaggagtgagactgcggggagctttgggatttctgagcaccggatgatgtactccccagccagcaaggggattcccccaatggctgcatgcagggcccggatctcctcagtgggtcctacgatgacaggtgtgcctgtatccaggatggcagcacagccctgggcacagagagtcagcggttgagcgcaccttcacactgctccattgtggatctgccagtagtcgggggactgtgactggcacgaaagttgagggggtgggatgtagtgtgtcaggtcttgagccccccaggaccagctctcctccatcagccacttcagggtccctgttgaagtaaaaggagaagacaggcttatccaatagcccctgctccaccagtacatccagcgggggccgaaattccttcccacaagacaagaatgggaaaaccgaggccccaatatcccatcggggcgggaaacagtgaagacccaggctggattccccacagagcttccccgaaaatcacggatgcacccttgattccaccaatagtcagcttgtcctcactcaggattccatctacccgcccagttccatactgaatggcaaacttggtcccactgggcttgaaggagctggaggcattgggattgaagcggtggtggaaccagcagggcacactgaagaagtggcatctcctggacgggacccagagattggaggagccagtgtcaaaggcaacagtgaagttttgtggaggcgttcccagcccaatttccccaaaatactgggcatccaggaatttggagagaggtaccgaggcaggcttgtccccaggggatggggcccccaacttggggagctctgctggttttccccatcccctcagtaggttcagggtcctgcgtccagggtggacttgacgaagagggatccggatcagtgtggccccagcaggctccacattcagcagaggcagcagcagcagcaagggtagcagcagcagtggtggagacattgctggggggcggccgc

SEQ ID NO: 80837 - DNA, 395 bp, Homo sapiens
  sig_peptide (30)...(165): this location contains the signal peptide sequence, MFLYCCLLKLLYMFPKNEKFEFHVVRELSPLASQMFLTLLTLDFE, Run with SignalP
  misc_feature (9)...(78): similar to gi53861 in the genepept database release 114, Run with FASTXY 3.3t00, default parameters
actaaatggaaactaatctatgtaacaacatgtttttgtattgctgtctgctgaagttactgtatatgtttcctaaaaatgaaaagtttgagtttcatgtagtgagagaactaagtccattggccagtcagatgtttctcacccttcttactctggactttgagttgttccaggatcacttttgaataaggagcttacttttgttaaaacttgctgccttactaaagattataagttatagtttaaatttgtaattaattctgccatcttgcaataaagtgacaattgaaacaaggttttccaagttgcataattttatgaagtactattcaacttttgtcatgtgggtgaaagttaaagatgccattgaactacaaaacaaacaaacaaacaaa

SEQ ID NO: 80838 - DNA, 1725 bp, Homo sapiens
  misc_feature (1)...(1725): n = a,t,c or g
  sig_peptide (480)...(615): this location contains the signal peptide sequence, MALRGALQSQSGLLSLLLLGLGDKDPVVRCSASFAVGNAAYQAGP, Run with SignalP
  misc_feature (1496)...(1389): similar to gi53861 in the genepept database release 114, Run with FASTXY 3.3t00, default parameters
gggagtggcactccgtgcgcgggcagtccncctgagcgctggacatggatgctgacctccttataggtgtcttggccgacctnnnggactcagaagttgcagcccatctgctgcaggtctgctgctaccatcttccgttgatgcaagtggagctgcccatcagccttctcacacgcctggccctcatggatcccacctctctcaaccagtttgtgaacacagtgtctgcctcccctagaaccatcgtctcgtttctctcagttgccctcctgagtgaccagccactgttgacctccgaccttctctctctgctggcccatactgccagggtcctgtctcccagccacttgtcctttatccaagagcttctggctggctctgatgaatcctatcggcccctgcgcagcctcctgggccacccagagaattctgtgcgggcacacacttataggctcctgggacacttgctccaacacagcatggccctgcgtggggcactgcagagccagtctggactgctcagccttctgctgcttgggcttggagacaaggatcctgttgtgcggtgcagtgccagctttgctgtgggcaatgcagcctaccaggctggtcctctgggacctgccctggcagctgcagtgcccagtatgacccagctgcttggagatcctcaggctggtatccggcgcaatgttgcatcagctctgggcaacttgggacctgaaggtttgggagaggagctgttacagtgcgaagtaccccagcggctcctagaaatggcatgtggagacccccagccaaatgtgaaggaggctgccctcattgccctccggagcctgcaacaggagcctggcatccatcaggtactggtgtccctgggtgccagtgagaaactatccttgctctctctggggaatcagtcactgccacacagcagtcctaggcctgcctctgccaaacactgcaggaaactcattcacctcctgaggccagcccatagcatgtgattccagattcctgcggtccagcctccaactttggttgccagctctttcttattctactacacaagccgccaactcaactgagagctaaagagactagaaaagagataagctgccaactcaactgagaacaagaaactagaagagatttatatataaagcttcttccttctcccagatgcaggatgttttcaaccagtaaattttattgctgttggtgccagagaagagtcctttcttctctacatccaggggccttttctccaataatgtgcctttaactctagggacctgcctcacggaccttagggaaaaacctcaacctgaaagatctcttcctttctggagctcctttaatcttccccagcaggtttttgccttagacgtgctggccccaggacagtgatgaagacagagcctgtctcagctctaggcttgtggggatcaatgccatcagtccctgttattgagggattatcccttagccaacattcctatctgtgggtgggcgtggagagtgtatctttttttggggtgtgtgtgtatatgtgtgtgtgtatgtgtgtgtgtgtttaatagttctgtttgtaaactcttttaataaaagttgtgcctcaccatacttgaagctcccaggacaagggttgagaggctcaacccctctttcagcttctatgtggtgttggaggtgctggtatcgtgttcacacaaaaaaaaaaaa

SEQ ID NO: 80839 - DNA, 953 bp, Homo sapiens
  sig_peptide (76)...(211): this location contains the signal peptide sequence, MALFFCKIICTMKKVLLLTKFSISHSTNTRLSFLHIRLCCSRCCG, Run with SignalP
  misc_feature (353)...(215): similar to gi496166 in the genepept database release 114, Run with FASTXY 3.3t00, default parameters
aggtaaagtaacgtttcaaattctagcaaagagataaaataacttgtgatatggtaaatatgataattttaaactatggcattattcttctgcaagataatttgtacaatgaagaaagttctgttattaactaaattttccattagtcattcaacgaatactagactgagttttctccatatacggttgtgctgttctagatgttgtgggagctacaaagacgtacaaagaagtgggagctacaaagaagtatgaagatctctttgaacacatgcagattatgttaatgatatgtgataaagtaatgtaacactgccacatagtaatcattagctatgtgtttttgaatcccaaaatataattttatttaaaatcagcttaaagataaggcagtaagaactagaacactgctaatatacaaaaatgtaattataaatatgaagtcactgacactctatgaaggattatatactatattttagtttgtagcatccagatattttcaggagtctattcttctattaacttctgtggttaatatatcctctcatagttcacttcactagttggtaaacataatggtaatagctaatgttttgaacacttgccacgactaataattccaacatctgaagtctgcaagacccacagacttgtttgacatctgtgagtcttgttcgttattcctactgattttcattcttgggggctttgtttctttgtttacccaattgtgtgtacttgaaaattatttgtaggaataatttgaggcctagaattaaggtgcctttctacagaaataatttgcacttgcttctgctgggcgcttgggaggtccatcaatgtgggactacgttatacaaagtttaaaacttggggtttttggacaaagcaggctactttgggcttgggttgctagctcttggaaaccgggagaatttgtgttcaccttg

SEQ ID NO: 80840 - DNA, 753 bp, Homo sapiens
  sig_peptide (278)...(413): this location contains the signal peptide sequence, MAGTAQLLGLKQLIGLELLTAQCGQITGYRDRREELLPPRFLATG, Run with SignalP
  misc_feature (285)...(565): similar to gi330019 in the genepept database release 114, Run with FASTXY 3.3t00, default parameters
caacctctgcctcctgggttcaagcgattctcctgcctcagcctcccgagtaggtgggattacaggcgtgcgccaccacacctggctaatttttgaggaatacattttttaagccatctggtctgtggtagttcatgacagtggcctgagcaacctcagccccacctgaggtggccccagggagagcacctggcagtctttgccctttgctgcccccagcactaggctaccatcatgacgtttctgggtttctgacatttgccagtttgcccacaagatggcaggcaccgcccagctgttggggttgaagcagctcataggccttgagttgctgacggcccagtgcggtcagatcactggctacagggacagaagggaggagttactacccccaaggtttctggctacagggcccccatcctgtcacccgccttcccaaacagtaccctgattcctcaaccatggccacatcttaagccacctggggccagtgctggggccatcctagggccaggtgaccttggtggatgtggcctcctggctttggtggttcctgggctcccaggtgatcgtagtgagcccttggggttgaagagcaatgctctcccaccccggggacacacatgcctcctgagggaaggaccgtcccttggaatcgaggaaaaccccaccggtcctaaaactaccgttagggcaccgtcttgcacattgctgtagttaaccttccaggcctcttggtttccattgaaactg

SEQ ID NO: 80841 - DNA, 1420 bp, Homo sapiens
  sig_peptide (252)...(387): this location contains the signal peptide sequence, MFQPRPLPPALFFMLRFAPPLWWSPTGISPWCTFASLGPSAWNAL, Run with SignalP
  misc_feature (816)...(261): similar to gi3880303 in the genepept database release 114, Run with FASTXY 3.3t00, default parameters
attccagctactcaggaggctgaggcattagaatcccttggccttgagtgattgcagtgagcagagatcgcccccctgcattacagcctgggtaacagagtgaagtgagtctttaaattaataaataaataaacctgaaatcctagaaatttgtttaatggctcaagatgttatctttctcaaaacttgaatttggccctgtccctccccggctcaaacattttcaatggctcccccctggtatcctggccatgtttcagcccaggcccctccctccagccttatttttcatgctgaggtttgcccctcccctgtggtggagcccaacgggcatttctccctggtgcacctttgcttctttgggcccctctgcctggaatgccctttctgttcctgtccagacccactcgagacactcctgccctgagcacctcctgcctctccctcctcactccagacactcctgccctgagcacctcctgcctctccctcctctctgccgctccccccaccctcatgctctcaccctagctcctcctgttactgggtccctctgggagcaccgtcctgaccagtgcccaacctgggcctgggggacagaggggtcggcacatgtaggctgagctgagctttcgggagcgaggaggccaggcgctgggagtggtggccttgctgcaggctgaagacacagctcgcagctcagcctgccctccacctgaccccccgggcccagccttccctagtgggccacgaccttcccaccagggccctcggccctgctcctgctggcccctgcagacctcagctgagtccaagctcctggagggcagggagggtgagcatctcgtgtgtccccagcgcacagctgctgtgccagctcccggtagggatttgttacaggaataaatggggtgggagttggaggacatggaggcaagccctgacgccgggtggtgcggcacctacccggcccttttccatcgagattgcgaggttcccgatctgtacccctgccaggcttcccctgcctggcggcaacctggggaccttgtggcccctaaagaccgttaataggtctcggctctgccctccatcttggtagaccataccagccggacctacgggtgtggcggctttcacgcccggattggacccctctcctgcctcattgagccgcgtacttccccgggtcgtcaaaaacacttgagacgcgcccgttacgacccctcttccgccgcagtgtccccaggttctttttgccacccatgatagttggccccttacactgccgggggaaaaccatctactccaaaactggaacccaaactgaaatctcgacaccctcccccttgacgcccgctaacgccccgctcgacacttgctctttaatcttgctcctctaaaacgcctgagtctttcc

SEQ ID NO: 80842 - DNA, 1620 bp, Homo sapiens
  sig_peptide (824)...(689): this location contains the signal peptide sequence, MGICLTWKPPTGVSVILILLSELHMKSPGRLKPKSSPHFSTVLTP, Run with SignalP
  misc_feature (1289)...(1543): similar to gi501027 in the genepept database release 114, Run with FASTXY 3.3t00, default parameters
tttttcaaaagagagggagaatgtgccagtccttgcaaggtgaactgacctggcactgtttcagtgggagcctcactgcctgccttttccatgctaggagacaaagcatcctctaccccatctgtgaatcggtgctgtggccactgcgagaagcatgattcatgaggtatgatgctcttgagctcccagacaatgtgctgagttaataggttcacttgagatgtataaaccaaggctgtttctttttttaaatctagtccccaatttggagtatttttgcatgtttttgtacagagtaatccattcctctcattgtgtatcttaatctcctctgacttttccattgtctttctcaatcccaccctttgctcttcggatctcaccaaccccccttaaaaaataaatcatgtttgagcaagaaggtagaacacgccctccctcatcttggttttaattgctttggaaacgtgttctaccctgtccagggtttgcataacgtgaattaagtgaatgagatgttctagtattatatcttaacctgataagactatctaagatttctagtatatggtgcatttgctttcctgtgcaaactttggttcagctgccctgcagagaatctcaccattttcctgccagtgccagtataaagaatgcaggagagctaaacctgggtacatgaaggtcagaggggtgaggacggtcgagaaatggggagaagacttgggcttgagacgacctgggcttttcatgtgtagctcactcagcagtatgaggatgactgacacaccagtgggtggtttccaagtgaggcaaatgcccatttcccctctcccctcacaccttgcctggcttcttccatgaagtccttgctgcttttctgcctccccaaaggtgaggggaaggggctggttggggatctgggaaagccagttctctgttctctcctgctggtgatggactaggccttttagaactagcaagatccctcacacagctgggagaacacacacctttcttactccagacccattggtgtgtctccagtaacaaaattattggactcagcctccatatttgacagcaaaagtggccagagggagttgaaatatcttgaagaaaaggaattttcactaagatatgtcctctccctctcccagagtttagctgtttattccttttttttgtttatattgttctcatctgcataaaaccagtctcttgcaataagcctgccgcagaatcaaagtctgtacttcaaaaggtaactgcaccaagggatgggacagtgtgcatcaccctgatctaatcattgtgacggttggtagcttcctaaatactgtatgtaccttgaacaagggttttattttttgttttgttctgttttgctttttgtttttattggtaggctaaggtaattaaattttttaatttgctgttactttggttgtattttctgtactataaatgcctacagtatgtcttttgcataaaatgcataagggtttggggatgtaaatggaattttattcatattttgtccaaaaacctcttgtaatttgtatcaaaattcttgtacaatttttatattaaagatttatcagtcactgaaaaaaaaaa

SEQ ID NO: 80843 - DNA, 1298 bp, Homo sapiens
  sig_peptide (56)...(191): this location contains the signal peptide sequence, MVCLRLPGGSCMAVLTVTLMVLSSPLALAGDTRPRFLEYSTSECH, Run with SignalP
  misc_feature (56)...(897): similar to gi1877199 in the genepept database release 114, Run with FASTXY 3.3t00, default parameters
cggacgcgtgggcttgcctgctgctctggcccctggtcctgtcctgttctccagcatggtgtgtctgaggctccctggaggctcctgcatggcagttctgacagtgacactgatggtgctgagctccccactggctttggctggggacaccagaccacgtttcttggagtactctacgtctgagtgtcatttcttcaatgggacggagcgggtgcggtacctggacagatacttccataaccaggaggagaacgtgcgcttcgacagcgacgtgggggagttccgggcggtgacggagctggggcggcctgatgccgagtactggaacagccagaaggacctccttggaacagccagaaggacctcctggagcagaagcggggccgggtggacaactactgcagacacaactacggggttgtggagagcttcacagtgcagcggcgagtccatcctaaggtgactgtgtatccttcaaagacccagcccctgcagcaccacaacctcctggtctgttctgtgagtggtttctatccaggcagcattgaagtcaggtggttccggaatggccaggaagagaagactggggtggtgtccacaaggcctgatccacaatggagactggaccttcaagacccctggtgagtgctggaaacagttccttcggagtgaagaggtttacacctgcccaagtggaagcacccagggcgtgacaagcccctctcacagtggaattggagagcacggtctgaatctgcacagagcaaagatgctggagtggaagtcggggggctttgtgctgggcctgctcttccttgggggccggggctgttcatctacttcagggaatcagaaagggacactctggacttcagcccaagaggattcctgagctgaagtgcagatgacacattcaaagaagaactttctgccccagctttgcaggatgaaaagctttccctcctggctgttattcttccacaagagagggctttctcaggacctggttgctactggttcagcaactgcagaaaatgtcctcccttgtggcttcctcagctcctgttcttggcctgaagccccacagctttgatggcagtgcctcatcttcaacttttgtgctcccctttgcctaaaccctatggcctcctgtgcatctgtactcaccctgtaccacaaacacattacattattaaatgtttctcaaagatggaaaaaaaaaaaaaaggggggccccttttaagggaccaagttttactaccccgggctggcaaggaaaaactttttttttggggccc

SEQ ID NO: 80844 - DNA, 797 bp, Homo sapiens
  sig_peptide (184)...(319): this location contains the signal peptide sequence, MLASRQACCPPVSSLFLPLSPTLSGFFTVCSVSHLHVPRGPARLC, Run with SignalP
  misc_feature (245)...(633): similar to gi5106111 in the genepept database release 114, Run with FASTXY 3.3t00, default parameters
tgaacacagacgtacggttacttgcgcggactgttcaaggaatagttataggtgaggaaatggaaacgacgcaaggtgcttccctgggattttgcctagggaggagcggggcagtggccgagcagctgccaggcacgtggcccggaacgggctttgctgttggtttgtggaaggttgtagagaatgctggcctccaggcaggcctgctgtcctccagtgtcatccctgttcctgcctctgtctcccactctcagtggcttcttcacggtatgttctgtctctcaccttcacgttccccggggccctgcacgtctctgcccccgtatgagccacgggagtccctctgggcttcccgcagagccgtcggaacacggctgcttgttggttgtggggctgcaacagaattgcacacgcttgacctctcccatcctctcctcccgggggctcagagtccagaggagagtgaatcttgctgactgatttccaaatgggattggccagagcggtgcaggtagtgggaactccaggtctttgtccagtggtccatgttgcccttcatcattaagtcaaattccaaagccccgggaggttgtgaaggttcactcgcccctgacgggaacgagacccagggacttctgccccaccaggcatcctcggtgtgggttgtatttagagatgggcctggacaggggccactttgggcagccttggttgcaagtcccttcgcttctgggtttctcttcgttgccctgaagcttcaggttcatccttggtgggagatgatggtgccccggcgc

SEQ ID NO: 80845 - DNA, 1735 bp, Homo sapiens
  sig_peptide (486)...(621): this location contains the signal peptide sequence, MFSPSFQGIITKVRCVCVSLSLCVCVCVCVCVCVYKEPGMRAGRG, Run with SignalP
  misc_feature (898)...(560): similar to gi3002527 in the genepept database release 114, Run with FASTXY 3.3t00, default parameters
ccgaccatcattacgccaagcttggcacgagggtagtacatgtttttaattttaaaataaggcatatatattatggatgcatgctcatttttgactggtgagctatgggaccaaaatcattttggaaggtactggcttggacggctgctgggtgagtcctttggagtgatgatgtcatgatgtgggaaacgggccttatggcttgtggaaacagatgccctgtgttctgaccaaacaaggggtctcctccaatacggacaggcatgaggtcacgctggcctgcttggttctttctaaattcattctgctgtgcagaccaccttttaaaagtgatcacaaaccatttgctgaatacttgtggaacttgaatcctcaccaatgtctccattttctggaatccatcccaacccccaccttggtcttttggaaaattgggctgtttgctctttttttcccctcctctctgacttcttggatatgcattgatgttttccccttccttccaaggaattataaccaaagtaaggtgtgtgtgtgtctctctctctctctgtgtgtgtgtgtgtgtgtgtgtgtgtgtgtgtgtgtataaagaacctggaatgcgggctgggcgcggtggctcacgcctgtaatcccagcactttgggaggctgaggcaggcagatcacgaagtcaggagattgagaccatcctggctaacatggtgaaaccccatctctactaaaaatacaaaaaattagctgggcatggtggcaggcccctgtagtcctacctacttgggaggccgaggcaggagaattgcttgaattcaggaggtggagcctgtagtgagccgaggttgtgccactgcactccagcctgggcgacagagcgagactccgtctcaaaaaaagagaacctgggatgcaattttcctgagccttgacatttgaactgaaaataactaacaagatccgaggagtgaggggcaggaaaaagagtgaggccctgagacaggttgacctgccttctaattctgactctgctctttatagctgtgtgcctctgggcaagttgcttaacctctctgatttccagttttattttaaagttgaagaggtgctaatctatctggtgaggttgtgggaaaaattaatgaaacacatgaaagtcccttaaacttgctaggacttactaaatgccagttctgtctccttcctaacaccttcccccaacccccaatctcttcacgctcactcttgtacatttccaccctgctggaaaacaaagatgagaacaaaatgtgcattgctgagacttactgttagactgttttttaaggtgtccttgattttggttagcctggtcttttctctgtgatctctctcatgagttctttactccagtctttattctgctttaaggagagttttgggcattcttagttaagtgtggtgtttggctgatgttgaaataactcattcattatgagcctccccatccccattaaatgccttaatttcataggagacaaaaaatttaagaaataatgccattgtatacctcctaccccattgcatatattaagtaaaaggaaatgagtcttgagaacattgagaaatggaaacgtttgagtaggcccaggtgcggggggctcatgtctggaaatccccatcatggtgggagggcccagcgtgggaggattgctttcagccccagaggttccagacccagcctgggcaacatagggaga

SEQ ID NO: 80846 - DNA, 620 bp, Homo sapiens
  sig_peptide (170)...(305): this location contains the signal peptide sequence, MWLGWVLKPRQFIFKAFALCILLRHIALHICFLKALCRCVKLFVK, Run with SignalP
  misc_feature (206)...(411): similar to gi1657707 in the genepept database release 114, Run with FASTXY 3.3t00, default parameters
agaaaactaacatttttttggtgactcaggaactgtgccaggtacttccatgcttattagctcaattacacaaaaatcttgggaccaggtattatttttcaagtcttcccacatgaagtaactgaagtttggagatgttaagtgattcacccaaagttgtacagctaatatgtggttaggctgggtcctgaaaccgaggcagtttattttcaaagcctttgctttgtgcatcttactgcgccacattgcactgcacatctgcttcctgaaagcactttgtaggtgtgtaaaacttttcgttaaatgctttaagctgtttgggttaaaaatatatgttcatgttataagaaaaccaagacactcctaattataatcaaatagtacttgttacatatcaatatgtgtgtgtgtgtgtgcgtgtgtgtgtgtggtatatatatatatatcgcagtgtgcactatgtttaaaagtacctacatacactagtttttgcttttcagggtcccattatctataccaggacacctccgcttgggataaatctatagaaccgaaccttggagtagacttccccccccctaaaagaatgggagttgaccctgcagaattccatggctatt

SEQ ID NO: 80847 - DNA, 863 bp, Homo sapiens
  misc_feature (1)...(863): n = a,t,c or g
  sig_peptide (85)...(220): this location contains the signal peptide sequence, MFLGIIGYTVWAWIWHTSLGVFKKANQIGLTWPPAKPPDSCGSGN, Run with SignalP
  misc_feature (490)...(0): similar to gi3979986 in the genepept database release 114, Run with FASTXY 3.3t00, default parameters
ttttttttttttgaaaaggaaaggtttcccatcataggggattgcttaagcacgttctccacgtatggcggggggctaagcctgatgtttttgggcataattggttacaccgtttgggcatggatatggcacaccagtttgggtgtcttcaaaaaggccaaccaaataggcctcacttggcctcctgcaaagccaccagatagctgcggctctggaaactgcagatctgttttaaaagtcctgagcaatttctcgcactagatcgctggaaggggaagntttgcgaatcatgacgttcagtggacttctgataaccgtctaatttcacggagcgccacagtaccaggccctgtaacgatgaggtttcttcacccctccagttagagggccgcactcttgcgaagccggctttttgtaagcccagttggcttccttgggtgctttaccaccggtccgatttgcgggcagtctgcttttgtacgatcatatgttacagagacctccttacttacctaccagcattgaaaaatcaaaaatcaccatatgcaactaacaaacatacaacttttcctgccacgatcaccccctccccaaatctggaaattatgatcagtataaaaaataatgttcgtattgttatataatttgaaaggtgaagattacgtctacccaaaatctcttcttgaaacaaactagagtactagaaaattgttagcagtatcaatcacctctcaaaatgccaattctgagcgacaaacggcaaaacaaaaatacctcgaacggcctttgatccaatttatttaattaaagcagtaattagaaatgtctgtaaacattccatccacaaacaagtcaaaagaaaa

SEQ ID NO: 80848 - DNA, 669 bp, Homo sapiens
  misc_feature (1)...(669): n = a,t,c or g
  sig_peptide (319)...(454): this location contains the signal peptide sequence, MQGVRVSFGWAMGLAWGSCALEAFSGTLLLSAAWTLSLSPPICGH, Run with SignalP
  misc_feature (255)...(518): similar to gi3818471 in the genepept database release 114, Run with FASTXY 3.3t00, default parameters
gattacgccaagcttggcacgaggggcagcgcctggcccgggcgcgcaaagctgctcttctcgcactcggggctctggcgcatctgcgaagtgctgcaccgtgcagtcattgtggtcctgcccctgagcctggtccttctcgtgtgtggctggatctgcggcctgctcagctccctggcccagagcgtgtctctgctgcttttcaccggctgctacttcctgctggggagtgtcctgacactggcgggggtcagcatctacatcagctactcgcacctggcctttgcggagacggtgcagcagtatggcccgcagcacatgcagggcgtccgcgtcagcttcggctgggccatgggcctggcctggggctcctgtgccttggaggcattcagcggaaccctcctgctctcagctgcctggaccctcagcctgagccccccaatctgtggtcatctgagtccccagcaggtgggagggagagggggagactgaggcccagagcggcagagggacccacccagatcgcctggcgccagagagatgccgtctcaggccaaggcctccctggcctctgttctgtccactctccccgaagggcaggcttggtggagaagaggctgatgagagggcccgagagccccttcgatttgcannnnnnnnnnncaaggg

SEQ ID NO: 80849 - DNA, 1804 bp, Homo sapiens
  sig_peptide (399)...(264): this location contains the signal peptide sequence, MLPNSSSLWLVMRILIFCVIPAGGVLGAPTAAGLRPTGDVALRRP, Run with SignalP
  misc_feature (1169)...(460): similar to gi5420389 in the genepept database release 114, Run with FASTXY 3.3t00, default parameters
tttcgtggaccgcgcgccgtggtctgaggtccgcggcagggtcccgcatggcggcgcacaggaagcacgtgtttgtggagaaggtgctgcagagactttttcctcctgttccaagtggccaaggaaagagggaaccccagacgctggccgtccaaaatccaccaaagaaagtgacctctgagaaagtgagccagaaacatgctgagcctttgacagacactggctctgagaccccgactgcccgacggctctacactgccagcgggcctcctgagggctacgtcccctgttggccggagcccagcagctgtgggagccccgagaacgcctccagcggggatgacacagaagatcaggatcctcatgaccagccaaagagaagaagaattaggaagcataaatcaaagaaaaaatttaaaaatcccaataatgttcttatagaacaagcagaattagagaaacagcagagtctgttacaggagaaatctcagcgacagcacacagatggcaccacaataagcaaaaataaaaaaaggaaactgaaaaagaaacagcaaattaaaaggaagaaagcagccggcttggcagcaaaggctgctggtgtcagtttcatgtaccagcccgaggacagcagcaatgaaggggaaggcgtgggagaggcttgtgaggaggatggtgtggacaccagcgaggaagacccgacactggccggggaggaagacgttaaagataccagggaggaagatggtgcggacgctagcgaggaagacctgacacgggccaggcaggaagagggtgcggacgctagtgaggaagatccgacaccggccggggaggaagacgttaaagacgccagggaggaggacggtgtggacaccattgaggaagacctgacacgggccggggaggaagacggtaaagacaccagggaggaggacggtgcggacgccagcgaggaagacccgacatgggctggggaggaagagggtgcagactccggggaggaggacggtgcagacgccagcgaggaagatgatacaattaccaatgaaaaggcacacagtattctaaattttttgaagtcaacacaggaaatgtatttttatgacggtgtctccagagatgcagcttcagctgccctcgcagatgccgctgaggagctgctggaccgcctcgcgtcacacagcatgctgccctcagacgtgtccatcctgtaccacatgaaaacgctgctgctcctgcaagatactgagagattgaagcatgctctggaaatgttcccagaacattgcacgatgcctcctgaccatgccagagtaatctcagctttctttagttactggatcacacatatccttcctgagaagagcagtgactaaaatggaatatctctttaagaacagctcctctttaacaaaaaaacttaaaagacaaatgtgagatgggcttagagttagttctctgggaacttgaaagacatttatgccatattatttattcacgtgtttgttcctggtgggcaagatgccatctgaggcttcagatgagaaattggggtaaaatggaaatttttcacttatttgcaattatatatatcttgaattactacataaaacttgattctgtttctctacttattgtaaaaattgaaaatggacattctgttaagttaaatgtatagtttgaagctcatatatttttatgaagttttgaatcaccttgtatctgaaagtctctgctttaagaatgctttctgggtattaaaatgttctagtttaagtagtttgaaaaaaaaaaaaaaggg

SEQ ID NO: 80850 - DNA, 610 bp, Homo sapiens
  sig_peptide (202)...(337): this location contains the signal peptide sequence, MGVVWSLLWFGQCSCFSLCSHMMWGGLVFPMIHHSHKVPSSDAGV, Run with SignalP
  misc_feature (208)...(322): similar to gi5305306 in the genepept database release 114, Run with FASTXY 3.3t00, default parameters
cccacgcgtccgggcttgtgttaggggatttgggaggagggtttatagactttggcctctgctctggatgagacactgctaggaaggtgtgggcaggttaattctatgagtgagaaccttaatcaatcttatctaggaagaaagagaccagggtgagactaaagctgtaattgatgaagggacagcaatccctcattgctgatgggggttgtttggtcactgctgtggtttggacaatgttcatgtttttctctgtgctcacacatgatgtggggtggtcttgtttttcccatgatccatcatagtcacaaagtgccatcatctgatgctggagttctgtgaaattgcttttgttcaacaggaggacactgagtcctgttgctgcttccagataaagggactgctcttttctttcttagggcaatgcttttccctgtggcttctgtttaagggtttggtcagcagggatctgtagcagacgatgaagggagggagagaaaagagagatctgggtgcttagtccctggcttccttcctgacagttaacctcaggctgggctgcattgccttgctggagggcaattggcccccttttaaggaaaagtcccta

SEQ ID NO: 80851 - DNA, 1070 bp, Homo sapiens
  sig_peptide (262)...(397): this location contains the signal peptide sequence, MPYLILFFAVYILYKILVKVHLFIAEIALYDFLKFFELYGICMFK, Run with SignalP
  misc_feature (138)...(285): similar to gi454432 in the genepept database release 114, Run with FASTXY 3.3t00, default parameters
cacatttttcctttgataatccagaatggctgtcttgattctagaataagccaataaacttgtgactcaggattttaaaaatctggtggacttatgccgtaagggagcattttcctttaacatttgtttcgacatagtttgccctggcgttgttcagttttttttggagtaccactaatttctcccatacctatgagcaggtagtatgaattttccattctgggagagactctattgtagctaaactgcctgtattcaaggatgccttacctcattttattctttgctgtgtacatattgtataagattcttgtcaaagtccatcttttcatagcagaaattgccctttatgattttttaaaattctttgagttatatggaatctgcatgtttaaaacacttacctgtctggtagtgactactctgatatttattaatctacttagtttgtaagtaaagtaaacatttacatctggttaaaatttactataccccccccaaaaaaaaactacctgtttgtttacctcataactgattctgtttacatatacccacacatacacaacccaccaatactattaagcttttaatgtggacattccaataagaaaacagatcattctcattgactcttactttttgagatgtatggccaaattgtaatttatcctggctacaaaaagaagaatctaggcaaagactaaagaaagccaattgtcatgacacagttacactaggattagactttgttaaaaaataactccacaaggatttgcaatggaatttcaaacattatcttggggaattctggagaaaagaccattttacttagacctttatgtttttgatggtgctgtgcaagagagaagccaggattttttcagaaacactcaaatactggccagacgcagtgggcgcatgcctgcaatcacaacactctgggaagccaaggcagaaagatcgcttgagcccaggagtttgagactagcctgggcaacatagggagaccccgtttcttattaaaaaaaaacctgggggttgggggccctgcctgtgggcccatttaataa

SEQ ID NO: 80852 - DNA, 756 bp, Homo sapiens
  misc_feature (1)...(756): n = a,t,c or g
  sig_peptide (105)...(240): this location contains the signal peptide sequence, MRQLVFVVILSGPVCCSYHSSAGKLMQKDMWILRVLCGLWGCCLT, Run with SignalP
  misc_feature (210)...(82): similar to gi192526 in the genepept database release 114, Run with FASTXY 3.3t00, default parameters
tttcgtctaccgaagctggaagatggatagaacgactctcttttccgttggagggatcgtggcactgtcaacacagttcacttcaggcttctagccatagaactatgagacaattagtttttgttgtaattttaagtggcccagtttgttgtagctatcacagtagcgctgggaaactgatgcagaaggacatgtggattttgagagtactttgtggtctttggggctgttgtcttacatcattacattttgtacagattaccagaatggataaaccacaaattcctaaaccgtgttgtgcatggtgttcaccttcacatgtttcagaaatattaaggtacttaatattactcaagtttgagaaagattgagttaaaatgtatttatgtctttattgtgatataagtaagttccttggaaagcaaaacattaagatattattcattaacattttgttatattaggttgttcagcctgtcacctacctggctttaaggaacgaaatatacttggtggcggtgagggttggggaggtagcatagaaaacttggaatataagtctggttgaaaagggccaggggcctccgtgatggtaaaatgccggggaaaagattttaggttaaggggaagggggcaccagaaccccttcagggccccacgttattttggggttgtggggggtttttagatttggaaccaccccccctccctcgnaagaaatcgggggggggggggtgttttttctacccccccccc

SEQ ID NO: 80853 - DNA, 777 bp, Homo sapiens
  sig_peptide (291)...(426): this location contains the signal peptide sequence, MWKLLFYGAILWLWRSVPGDSMVLKMRQPDGFCMSTTLEFTNSLC, Run with SignalP
  misc_feature (377)...(507): similar to gi56076 in the genepept database release 114, Run with FASTXY 3.3t00, default parameters
ttcccggctcgacgatttcgtagaaagtattagctggaggtagggaggccgagacacgccggcaggactttgaaaatgtggtgttccctcactattcaaatgtgctattcagttttagactgctttggtatacggtgtagattgaccacctttactctgagatcacatctcccgttggctttgagtacttgggagtttgacaaaacagtcgcactaaaagtgagtagcacttttcataggggactgcaccattttcctttatcttcatccttgaacgttctcaaacatgaatgtggaagttgcttttctatggagccattctctggctgtggagaagtgtccctggtgattccatggttttaaagatgagacaaccagatggtttctgcatgagcaccacgttggagtttaccaacagcctgtgctgcagctgagctgagggcctcttcgtttgacctctgccatggctcttttatcattcagagtgaccgaagcacagagagctgatacagagtttggcataaagctttggactcgtgtccacgttttctggaacgatcattgtaccgtgcgcctataatgggctttggattcgattggccgcgggtcgcatgccctgtccctctggctttaacaaaggtttgtgtgggatttccctgggggggaaacgattagcttggggcgccacgggggcccccccgatttggcgggcgtgtttgggccaccaacctctcgcgggtggggtatactttaagaggcaccgcacccccccccccc

SEQ ID NO: 80854 - DNA, 2398 bp, Homo sapiens
  misc_feature (1)...(2398): n = a,t,c or g
  sig_peptide (420)...(285): this location contains the signal peptide sequence, MRKLIAELIFLKIWTFTVRTSTDLPQTEDCSQCIHQVTEIGQKVA, Run with SignalP
  misc_feature (982)...(428): similar to gi2150144 in the genepept database release 114, Run with FASTXY 3.3t00, default parameters
cttggcacgaggcagcacaggcatcaaattttaaggtgacttctttgggcacccctttttcttctgttttggctaacactttactcatatagtttatgagcccccaccagtcctcagtccttagtcttattttaaaaactgtggtcatgggaggctcagatgggtcataacacatcaggttggtcatttcctgggctatataccttgtatagaataacattatacaaacaagttctttttagagttccagtatacttataataaccataaaataataggactgtagcaaccttttgtcctatctcagtgacttgatgtatacactgggaacagtcctcagtctgaggaaggtcagttgaagtccttactgtaaaagtccaaattttaaggaaaatgagttccgcaatgagttttctcatgcttcggccgtgcgtggaccagtcagcttctgggtgtgactggagcagagcttgtcgtcttcttcagagtcactttgcaggggttggcgaagctactcccgtccacgtacccctcacagtctactgatgttcaaggatagtctcggaggttgggcctgctagaataaactgagtccaacacctctacacagttatgttcaactgggctctctgataccaggagcaaggtggtggggtttagggtgttgcaaacttcagtggttatgtggggattttcacatagcaagctttggtacttggttaatctagcatttgtgaactaatgatgtcctttggtagtcattaaagttaccacagcatgggggcctttatattcgggttttgcctaagggttagtttatctgcttcttgtgctaacagggccatttctgctagggcccttagacctgggggccagcctttggaaaccctgtctagttgttttgagagataggccactggccttggccagtgccccccagtttgagttaaaactcccactgcccttttttttttttttgacccccagacttcccaaagtcaggtcaggtaacctcagggctggggccgacatgagttttttttttttttaactcatgaaaagctctttgctgttggttgtaatagatgtagtttatctaatctacatttttattcactgtcatctaccaaaatattgacttaaatcctgtagctatttgatttcaagctttaaattgatctggtattccttgcggggctctaattgcatctaaatagatatgagagttggaagacctataaggagcttctctcgctttatgatgtcttattttttttttttcctctggttgatgaaatgccagggtaaaagggatagccaaatggactaaagcacaagtgccactctagttattcagcagagtgcccagtaaaggtccaccacaataccaccatacatccactcggggatgaacagaggctgactgattgataagctcttgaaaattcttaagctcactgcatcccttcaggtctccaaggaatgctaagttttctccctgttgttagagacatgaagtgaacttagtgttcgggagatggaagctggatggccctcgggggctgactcgcagggtgccagacttcaggatatagcaggagagagcttggcatcgacttattactccaggctatagaatcctggaaaagagctaccatgcagcccacacctggtcgactggaggacccaccttagtggaaaggggacattctgagcctctgccctgccatgtgcacaagcataacaattgcttttgtttaacgtgcagatggaatatttgatccatttcatccaggcatttgcatcttggtatcctgtcttaattgccaaagtttgttttaagtctttaacttctatgatcctttagtaaaatgaatgcttcctttagcacctatttttgttagtttttagaccaaagaaagctaaacaccattttatatttaataatgcttcttgtatgatttttataccagagaagctaaattttatctttatattagtgtgttattaatgttaaacttaattttaataaaatcttgtagatatatttattcaatttttcatgtttgaccataatgtaagattttatagactctttttaaccttttatattttttgttaaagagcagattgatgctttaagaaaaacctgttgcatttttaatgtccagttcacagaaaaactggatgatacctttttaactttagctaatatgtttacacacagaattttctttacaattaacgttttaaaacttgcttaaacttttaaaacaataatttttttaacctcttaatgtaggtaaaaatttacatttttatgtcttcttataattntggtttttttgaagataaccatttcttttttttaaagcgaactttatgtctttgaactaga

SEQ ID NO: 80855 - DNA, 1223 bp, Homo sapiens
  sig_peptide (26)...(161): this location contains the signal peptide sequence, MSLLGFLLSRLGLLLKVLLDWPVEVLYGAAALNGLFGGFSAFWSG, Run with SignalP
  misc_feature (212)...(1102): similar to gi498983 in the genepept database release 114, Run with FASTXY 3.3t00, default parameters
tttcgtccgaaagatctccatctgcatgtcgctgctgggcttcctgctctcccgcctcgggctgctgctcaaggtgctgctggactggccagtggaggtgctgtacggggcggcggcgctgaacgggctattcggcggcttctccgccttctggtccggggtcatggcgctgggatcgctgggctcctccgagggccgccgctctgtgcgcctcatcctcattgacctgatgctgggcttggcggggttctgcgggagcatggcttccgggcatctcttcaagcagatggctgggcactctgggcagggcctgatactgacggcctgcagcgtgagctgtgcctcgtttgccctgctctacagccttttggtgctaaaggtccctgagtcggtggccaaacccagccaggagctccccgccgtggataccgtgtctggcacggttggcacataccgcactctggatcctgatcagttggaccaacagtatgcagtggggcaccctccatctcctggaaaagcaaaaccccataaaaccaccattgccttgctctttgtgggtgctatcatatatgacctggcggtggtgggcacagtggacgtgatccctctttttgtgctgagggagcctctcggttggaaccaagtgcaggtgggctatggtatggctgcagggtacaccatcttcatcaccagcttcctgggtgtcctggtcttctcccgctgctttcgggacaccaccatgatcatgattgggatggtctcctttgggtcaggagccctcctcttggcttttgtgaaagagacatacatgttctatattgctcgagccgtcatgctgtttgctctcatccccgtcacaaccatccgatcagctatgtccaaactcataaagggctcctcttatggaaaggtgttcgtcatactgcagctgtccttggctctgaccggcgtggtgacatccaccttgtacaacaagatctaccagctcaccatggacatgtttgggggctcctgctttgctctctcctcctttctctccttcctggccatcattccaattagcatcgtggcctataaacaagtcccattgtcaccatatggagacatcatagagaaatgaagatgcttacctgcaggaactgaaaacatcagccatggccaggcccccagaagacaaaagaagggaccagggaactggtgacctaagcaacccactgctt

SEQ ID NO: 80856 - DNA, 387 bp, Homo sapiens
  sig_peptide (129)...(264): this location contains the signal peptide sequence, MISSCLEARFHPALLMSACCQLCLCCSLHITVVTLVPPPRDDAAC, Run with SignalP
  misc_feature (163)...(345): similar to gi64892 in the genepept database release 114, Run with FASTXY 3.3t00, default parameters
tttcgtctgagccagcccgagctcaccctgctgggctggttctggtggctttgagctctgtgtctgtcttggagccacctcctggcaatgacactgacaggccagggctgtgaagagcagtgcttggcatgatcagctcctgcctcgaggccaggtttcacccagccctgctcatgtcggcctgctgtcagctgtgcctgtgttgttccttgcacatcactgttgtgacactggtgccgcctccaagagatgatgctgcctgctcttgttccccagccaggaagcagtacatctttagtgtgctgtccagagccagccatgcacaggagggcgggcggaggtgggagcggcaccgcgtgtgtttgggattggttgtgtgtctcatgt

SEQ ID NO: 80857 - DNA, 399 bp, Homo sapiens
  sig_peptide (10)...(145): this location contains the signal peptide sequence, MLWAPCDVTLGFWCLALPIFLLVATNSVSSDCVPKWPHPRVPSSR, Run with SignalP
  misc_feature (291)...(124): similar to gi179629 in the genepept database release 114, Run with FASTXY 3.3t00, default parameters
tttcgtgggatgctgtgggcgccttgtgacgtgacacttggtttctggtgcttggctttgcccattttcctcctagttgccactaattctgtgtcttccgactgtgtgccaaaatggcctcaccccagggtgcccagcagtagggcagtgcccctggatccagcaatggcctgtgacccacgctcctcctggctcagatggggcctgtagacctgccgggaggccccaaggcaccttggtttcatgggtgctggggagcatggggccgtcccatgttattaggaccccaggtttggtgccagtatagtggctggaggtgaaagacacggagcgacgtgggtgtgttgctgtgtcttatgggtgaggtgcttaagaatgtgagattaagggatgagtctt

SEQ ID NO: 80858 - DNA, 1009 bp, Homo sapiens
  sig_peptide (74)...(209): this location contains the signal peptide sequence, MKPHFLLFAPFSSLKLPVLFPRPPLFSVLKAPMCLKGAEEEGNWV, Run with SignalP
  misc_feature (774)...(960): similar to gi4467884 in the genepept database release 114, Run with FASTXY 3.3t00, default parameters
acgatttcgtctctgcccttttcttgctgaggttggcctcttgggaccccttccagctcccagagtttggggaatgaagccacatttcctcctctttgctcccttcagtagcttgaagctgcctgtcctgtttcccaggcctcctttgttttctgtcctgaaagcccccatgtgcctcaagggagctgaggaggaggggaactgggtggaggggcagcttggcactaactgtgcttcccgattctggctcatgttggtgatgcctgcagtgtccatctggtggctgggtagcacagtgctctaggtgtgagcctgccactatggccccctagaggcagatcctccctctccctcccttcccccagcctcctggctcccccagcaccagctctcacaaatgcttccctccctgggcttcagtcagccaatctacaccttcctctggcctctgcagacacaggagcagaggggataagtggtgacatggcagctcagggcttggggggcttggcaatccatagttaacagtcactgttcctggcccaggctggccctgctcatctgaagcggcccgggtggttcttgctctcagtctggacagtggcctcacctgcacctgggctctgcgcctgctctcatgcctttgcaggtgtgtgggccagaagcctgcaactgggtcctgaggcctgcacgcctgtcctggtgttgggtacagagccggctaacttgcgacactctctgtttttacccagcttgcgatctactcctgttatccaggggacagcacctgaccgaacgggtagacgcccccttctccctgagcgcccccttccgcctcgccagggaccttcgcctcctgacctcctccgcacacgccacccacacttcgccccgcgccgggggcccccccccgcacccggaccctcccagcctgcgcctatagccgcgtcccaggccggaatcgtcactcgatatcggcgcatccgaccacccggccaccgctacatcg

SEQ ID NO: 80859 - DNA, 863 bp, Homo sapiens
  sig_peptide (526)...(661): this location contains the signal peptide sequence, MLGPPEARLSLCILLWISILCPWYRFTLYCSSWPYPIFDSGYRPL, Run with SignalP
  misc_feature (552)...(206): similar to gi2317967 in the genepept database release 114, Run with FASTXY 3.3t00, default parameters
cggcccgtaattaccggctcgacgatttcgtcgctgactagggacagggctgtcacactgccccaggaggaatggaagctttcccgccaacctgcctccttcctctggactccctgtgttggtttatgtacttcaatgtgatacatcagcagtctctttggtctgggctgaccttccacattggttggtctgtctgcccctcccttgggatggcgcttggtgtcagagtgtggggaccacctccaggacaagcgccactgttgtgcgcagctcagccacactgctctggcctcagtttcccctgtgcggaatggggatgagaatgcagtcgagggaggcgaggagctgcagtgctgagggctgaggagtgagctgagggcttaacccccggcgccatccttggagggagggagggagcaatgcgaccggggggccttggctaatcatctaaccgcagatgtcaccccccacactgatatgtgatcacgtcagctggccctgggacggtcagataccttgcacatgatgctgggtccgccagaggcaagactctctctctgcattttactttggatctccatcctttgtccatggtacaggttcaccctgtattgttcatcctggccctatcctatctttgactcgggataccgacccttgtttggcacaacactccttttttaaacctaactttctgtgccggattccagtttaagcaaccggaacctaagctgaaaccgaaccaccctaactggggggccaaagcccgaactaataaaccggttacggtaccgccccttgcgataatacaaaaaccgttttgtgctgcgccctgaaagaacgtgccccagttaggccttcac

SEQ ID NO: 80860 - DNA, 420 bp, Homo sapiens
  sig_peptide (68)...(203): this location contains the signal peptide sequence, MTPLCPRPALCYHFLTSLLRFSLQAQSAGLWGWHTWVRAAWLEVQ, Run with SignalP
  misc_feature (68)...(31): similar to gi2735294 in the genepept database release 114, Run with FASTXY 3.3t00, default parameters
tttcgtgtggaagcctggcgcacgtccggaggtgccgaggacccaaccagcccaaactctgggggaaatgactcccctctgccctcgccccgcgctctgctaccatttccttacgtctctgcttcgcttttcactgcaggcgcagagtgcaggcttgtggggttggcacacatgggtgagggcagcgtggttggaggttcagggcactgcaagacatttagattcattccagggcaactggaagccactgggggagtagcatggtctgattatttgtccccgtcactttggtggtgtcacatgggatagactgtggatgccaagagatgagcgtgtgttttggaggtgggctggacaggaccgacagacggatagggtgtgggaggtaaggggacaggaagaattaagactccagtgctt

SEQ ID NO: 80861 - DNA, 2276 bp, Homo sapiens
  sig_peptide (1541)...(1406): this location contains the signal peptide sequence, MPSLISIFFLNFLSFFLSFFFLETGSGSVTQAGVQWFDLGSLQPL, Run with SignalP
  misc_feature (2177)...(1255): similar to gi3002527 in the genepept database release 114, Run with FASTXY 3.3t00, default parameters
tttcgtgcggggcgaggaggagggtgggtatgaggcggtagcggaccgcggagtcgagacctacccgaacgacgcgggcgagcggggctttggacgccggtggagacgcaggcgagactccagcgggaggaagaagaggcctttgccagcagtcagagcagccaaggggcccaatccctcatattctccaagtttgaaggaaagaaaaccaacaagaagacccgcaaggttaccacagtgaagaaatcttcagtacgtcttccagggtcggatcaaagaagggctggagtgcaatggcgcgatctcggctcactgcaacctccacctatcgggttcaagtgattctcctgcctcagcctcccaatagctgggattacagacatgcgccaccatgcccagctaattttttagtatttttggtagagacagggtttcactatattgcccagactggccttgaattcctgagtaataaaaattcttattgtgctaaaacactaagcaatttttcctgcagatttttaatttaccacagtacatagttttaatttagaaaaaaagcaattagtagcatgcttctttaagggtggaaataagctttttaaaaatacagtggttatccctctatggtttggaagtatttacttttgggattctcatgtatgatcatttcaaattttatacttattcatactgatttcatgtttgagaaaatttatggttcaaattgtaatgtttacaaatctcaacttttaatcatggcaaagtggacattcacaacagcttcagaagagaaaagaaaatcagtgatataacaaacatttaagtatcatttacggcagccctataagaaggctagccataattccctatttcattctgaaagtgatatcctattagctttcattccataagcctaggagaaaagtataaaacctaaaattacctatgtcttaaacaatattacacctaaaaagatgattgtcgtagtagacagactggaattgtccaccaaaataggaaattgatacccaatttatagtctatgatgaaatttaggcttgaataagtgagtttgtagttttaatataatgtacttcaaactattaaaaaaactgagtctattgtccaagtatgtttaaacatggcactggttaaagtagtctgataactattaaaaagaattttttttaggccggccacagtggctcacacctgtaatcccagcactttgggaggccgaggcgggtggatcacttgaggtcaggagttcgagaccaacctggccaacatggtgaaaccccatctctactaaaaatacaaaattagctggtcgtggtggcacacgcctgtactcccagctacttgggaggctgaggtaggaggattgcttgggccccaggggcagaggttgcagtgagcccagatcgaaccactgcactccagcctgggtaacagagccagaccctgtctcaagaaaaaagaaagaaagaaagaaagaaagaaaatttaaaaaaaaaatggaaatcaggctgggcatggtggctcacacctgtaatcccagcactttgggaggccaaggcaggtggatcacttggatcacttgagcccaggagttcaagaccagcctggccaacatggtgaaaccctgtctctactaaaaatacaaaaattaggctgggcatggtggcatgtacctgtaatcccagctacttgggaggctgaggcaggaaaatctcttgaacctgggaggcggaggttgcagggagccaagatcacaccactgcactccagcctgggtgacagagtgagactctgtctcaaaaaaaaaaaaggatactcacaaattcagtacctccatcctatttcattaaagctctgattaaacatatatgtttatgggctgggtgtggtggctcacacctgtcatcccagcactttgggaggctgaggcgggcggatcacttgagcccaggagttcgagaccagcctggccaacatggagaaaccatgtctctacaaaaaaaaaatacagaaatttgctagatgggggggcacacgtctgtaataccacctgctggggagactgaggcacgaaaattgcttgaacctggaaaatggaggttgcagggagccatgattgctgccactgcactgcaatctgggcaagagagtgagaccctgtctcgaaattaaaaaaaaaagtttgaaaatcccactatgcaattagcatgaagggtagggaagcccaaaagaaaacacctgcttttgctgaa

SEQ ID NO: 80862 - DNA, 810 bp, Homo sapiens
  sig_peptide (283)...(418): this location contains the signal peptide sequence, MLQTFGIGAVTLFSFTSFSLSWPLLSTRVGCRSVFLQFAKHFMQT, Run with SignalP
  misc_feature (729)...(586): similar to gi158443 in the genepept database release 114, Run with FASTXY 3.3t00, default parameters
cccacgcgtccggtaagtcatccacctcctccaggtggccttgatggccctccctcctctgagactaaagagaggccacaatgcccagagcagcctccttcctgtctcaagaaaggaaaggatctcaggaacccatttcatgtggtagcagcttttagttgtgggttgtaaacaaccctctgttgccaggaaagtcaaattgcaaccataatcactgatcctgagcagtaaatgtgacattggttaattcttctgtgagggcctgaacgctggttccctggaatgttgcagacctttggaatcggggcagttacactgttctcattcacaagcttttctctgagttggcctcttctgagcactagagttggttgcagaagtgtctttctacagtttgccaagcactttatgcagacagcaagaattaccgtttttttagtactgtcctatcagtgtggcctgactttttacctcataagaccaagttggctgaagcataggacatcactgagtgctttgaaacaaagctgtttgattcctgttcactgaatgccatttctttcagggtagatttaaggactttccccttaaagtacagtgctactgactctagattgagggttcaagccaccccgtgggttaactccaacagatgaaaatttttccttggctacagcaacatccctaatcctgaccagccatggagaggttcggtcttacaagaaaatgagtgaatggggaatgcctcacacattgtgaaacaaaatcccatctgctgagggtggctgagactgtatggccacatccaca

SEQ ID NO: 80863 - DNA, 2653 bp, Homo sapiens
  misc_feature (1)...(2653): n = a,t,c or g
  sig_peptide (706)...(841): this location contains the signal peptide sequence, MRCGWGPLGCLGTGAPAGWMVLGSPRSQLQRARWSRASLSAFGWE, Run with SignalP
  misc_feature (938)...(71): similar to gi567232 in the genepept database release 114, Run with FASTXY 3.3t00, default parameters
gttccccttcctttcctctgtccaattccctgagaaagtggctgacagagcccccccagaagtagctggagggacctcaggcccccgaatgcctggagacagaggggtcccccagtcctcagcctcactggcaggcccggaaagtgctgaattcgggggtctcaggcgaggaggacgtggaagtgggcctcttccgggtcctggagttgctgggggtggcagtggtgcctgagtgatcatccaaggtggccgggtcttcttctggcatcgttttcgcggagacggtaaacagggagttatcgaaggacatgtctgtgctgtcgaagttaatctgggcccagcaggattctcgatctcttttcttctgtaaatttctgagtttaacttttctgaccaccagggcaacagccaccagcccagcaaggaggaagagggcaccagccaggctcagggagagcaccaagatccaagtgggcactgggaaggagacgttcacgggctcgctgaggtctgacagctgggactggttgagctcacctaacactccatactggcagtggaagggtccccctggagccttgctgctgccgccgctcaggttaaatgtcaccccgcgctggtccgtgggggcctgcaggagctggaccacctgcccccctcgatacagtgtgaaattcgcccccgggaagttcccaggggccatgcatgcgatgtggatggggtcctcttggctgcttgggtacgggggcaccagccggatggatggtgctgggatcgccaaggagccagctgcaaagagcaagatggtccagggcatctctctctgcgtttggctgggaaatccggctgaggccagaggggcccaaggctccccgccaactcctcctggtggcccttgagtctgagacccttggggtgcatggtggggccacgcccctccactgtctataagccaggaaagctgagcactcaatatgaaccaagcctcatctcaattctcacagccgcactacagggtggtcgttccatcactcccgacttacgaggaaactgatacgctgatgcctctaaggcgcaaaaggcgtcgaacctggaccacgctcacagagcaagcaaaacacgacgccacagaccagagggtgacccggatgatggcggccggcgcggccctagccctggccttgtggctactaatgccaccagtggaggtgggaggggcggggcccccgccaatccaggacggtgagttcacgttcctgttgccggcggggaggaagcagtgtttctaccagtccgcgccggccaacgcaagcctcgagaccgaataccaggtgatcggaggtgctggactggacgtggacttcacgctggagagccctcagggcgtgctgttggtcagcgagtcccgcaaggctgatggggtacacacggtggagccaacggaggccggggactacaagctgtgctttgacaactccttcagcaccatctccgagaagctggtgttctttgaactgatctttgacagcctccaggatgacgaggaggtcgaaggatgggcagaggctgtggagcccgaggagatgctggatgttaaaatggaggacatcaaggagtccattgagaccatgcggacccggctggagcgcagcatccagatgctcacgctactgcgggccttcgaggcacgtgaccgcaacctgcaagagggcaacttggagcgggtcaacttctggtcagctgtcaacgtggcggtgctgctgctggtggctgtgctgcaggtctgcacgctcaagcgcttcttccaggacaagcgcccggtgcccacgtagcccctgccatggaaggaagaacgggacaaaggaggggcagcagggtgtgtgcatatgagacttgggggtccctccccaattttagtttcctgccaaaacgggagtgtgcagtcagggcctgcggtctggccccatgagtctccttccgtcctcagcgggcagggaacacctctggcttgtagaagggacggctcagtggctgcaccgacggtcctggaaatctcacatggtgggcactgcagcgttggaacgtgagcctcggatttcctggcccctctactgtaaatgtgccttagcctaagcctcccatcctgtgttagcgttgcctggtgtggggcagggcctaacaaggaaacctgggccctccaagccaggttgaggtctggtaacagaatgccaggaagggggcctggaagaccacctgccccggcccctctcctgcaggggccccacacaggcatgagggatggcccggccaaagtctaggcagaagcctcctataacaaagggtggtgtggcctgggcattggagtcaataaattatggtcagaaaatcacaagagcctgctgattggggctcagggacaccagccaggacagaccggcccccgagggggcagccagacaggtgggaggggcctcccacgaagctcagaagaaaggtcgtgcgggagccgatggaggtggtcgcctgggcactcctgggggaatccctggggggatccgaactggccgagatgggatctgaggcggggctgggaagaggaattccaccacatggactagtgtnctcgatnnanggnnntcaactggctgtccct

SEQ ID NO: 80864 - DNA, 424 bp, Homo sapiens
  sig_peptide (44)...(179): this location contains the signal peptide sequence, MVSRHTWLHSTVLCVHLQRCLLLRKRDRRSESRRRHRISPVGCGP, Run with SignalP
  misc_feature (415)...(268): similar to gi4029221 in the genepept database release 114, Run with FASTXY 3.3t00, default parameters
gcaggaagaggctgtgatatttacatggcctctatctgtgtttatggtaagcagacacacctggcttcatagcaccgttttatgtgtgcacctgcaaagatgtttacttttaagaaagagagacaggagaagtgaaagcaggcgcaggcataggatctctcctgtcggctgtggcccagtagagaggtgttatgcctacagttgtctaagtgtctaagtggatgggagttccctgagacctccccctcccacctcccccacccaggagttaaaagagctttgctgcttcactgactttattaactttgtgaccttggacaggccactccctctctttcatcctcagtgttcttatcaataaaacgatgggattatgcaacagtatctctgttacacctgaaaatggagccaagagctaaagttg

SEQ ID NO: 80865 - DNA, 988 bp, Homo sapiens
  sig_peptide (568)...(703): this location contains the signal peptide sequence, MGWSCLAILSSAIGHLICLWPFAMVVALFPYLGYFSGSLSTQIGS, Run with SignalP
  misc_feature (803)...(650): similar to gi532595 in the genepept database release 114, Run with FASTXY 3.3t00, default parameters
gctggcgatttctacactgttgcccgggctggagtgcaatggcacgatttctgctcactgcaacctccgcctttcatgttcacacaattctcctgcctcctgagtagctgggattacaggcgcacaccaccacacctggctaatttttttgtatttttagtagagacagtttcactatgttggccagactagtcttgaactcctgacctcatgatccgcctgcctcagcctcccaaagtgctgggattacagttgtgagccaccgtgcccggcctcagttatttttaaagcaaatctagatatgttttgttaagggatttttaaattttcctaaaaaaagataacctgcaatttcttgccccaagtcattccctactgacaaattgcccatcttcctgattctctgatcccctcctttctcctcattttccaaattcagacaagtctgtgcatggggtgatatcaccgcaccagctctgtccctggctcattttctgtaaccctatactccaggcgtttctccacatttctctgaagcctgaaaacgatccttcttaatgaccatgaatgggctggagttgcttggcaatcctgtcctctgcaataggacatttaatctgcttgtggcctttcgccatggtggtggcgctcttcccttatttgggttatttttctggatccctttccactcaaatcgggtcagaccttccctgacactccttgtacactgcaaattcacattaagcatattatgtttcacatagtccaaatgaaacagtgatttggctactcatttattaactgtccgggagttccagcagggtcacaatcacggctgtctgtaccgtccgtgagtgctcaacatcacccagcacagggcctggcactcagtaggtgctcagtaaccatgcgctgaatgaatgagtaaatgaagggagggatggaatgaattgcaacccttgataactgggacaattattcatggagg

SEQ ID NO: 80866 - DNA, 757 bp, Homo sapiens
  misc_feature (1)...(757): n = a,t,c or g
  sig_peptide (271)...(406): this location contains the signal peptide sequence, MSAQPWPGLQSASRPLLLLLGHAAQGEGPRLGGSPWTPCLSLPIM, Run with SignalP
  misc_feature (733)...(699): similar to gi1335031 in the genepept database release 114, Run with FASTXY 3.3t00, default parameters
gcgctggaattcgtcactggcctgggaaaaggctgaatttggagccctgtgggccgtgcacttggtgaggactggtgggtggggtgtgtcccggctgccaagggaggaaggcacaccgtcctcttttcctcttttcctgaggcctcgtggtggtcatgacagtagcagggccgatgacagctcacacggccagcagtgtgggctcctcactcaaagctcaaacatgaggcacaggcgagcttggtcacctggcaacttgctcagggtcacatgtctgctcagccatggccgggactccaatctgcctcgcgtcctctcctgctccttctgggccacgctgcgcagggagaaggaccccggctgggtggaagcccttggactccctgcctcagtttacccatcatgtcttttgacctaaccatagcgacctttggcgcttatgtataaagctcgctctcttggctgcgtcaccaggcctgggttccagagagccctccctccccatgggcccaaggaagggcctggagtgaggtggccagccgcagcttggctgggatggtatgtggtccataaggcctcgtgggctgtccagctccagccagccagcctcggtgaagccagccgacttggcggcagtctccagcactttgagacgttgtccccctcctgcccccgtccagctatgacaagtggcccttcagtagatatgacagcctctggngggagggcctgggccctgtccatggctctacacttg

SEQ ID NO: 80867 - DNA, 967 bp, Homo sapiens
  sig_peptide (203)...(338): this location contains the signal peptide sequence, MWAGYVIYTLFCRFSFSLISIRIRKLGSIGFELPLGNNSQLGCPL, Run with SignalP
  misc_feature (922)...(159): similar to gi2944015 in the genepept database release 114, Run with FASTXY 3.3t00, default parameters
gggtggaattcggaaagtgatacaaaagattactagccatactcattgcagatttcatgaagagagggtgagcatttgaagcatttcagtttgctattctttgggggttggagaatgcattccaatctacctaaaagtgccctttccctggctgtttgggtgataacattttttgagctttggcagaggttttaaactctgtatgtgggctggatatgtgatctacacactgttttgtaggttttctttttctctgatttcaattagaatcagaaaacttggcagtattgggtttgaattgccacttggcaataatagtcagctgggttgccccctttaaaatagataagcattctctagtttgccacaggtgacactacccccattgcctcttcagctcactcattcacatttcctgatgggcatctgcaggtgtatctttgaccgctgtctggatgttggaatgagtggttcgctgagcagacagcctgactcctgtgtatctcccatgattgtccaagcatcacttattgctccttgaccctgtctttttactgacgtagttgagtgttgtgcagccttttattttagaggcagggtctcgctctgtcacccaggctggagtacaggcgcggcacaatcacagctcactgcagccttgaactcctgggctcaagtgatcctcctgcctcagcctcccaaggattataggcgattgccaccatgccctgctaattttttatttttagtaaagataaggacttgctgtgttgcccaggctggactctaacccctgggctcaagcagtcttctcaatgtgggcatccccaaagcgttgcgattatgggtatgagccattgcgccctgcaagttggcatacttctaaattttttgggagggtcctgcccaaggcagaagggaaaattgggttgtagggcttgatgtgcccaggggacgttaagcgcct

SEQ ID NO: 80868 - DNA, 867 bp, Homo sapiens
  sig_peptide (145)...(280): this location contains the signal peptide sequence, MAMSVRHLTIFLLSLAWASALPDSAFIKGVWEGICPSASQLASCL, Run with SignalP
  misc_feature (291)...(475): similar to gi1296427 in the genepept database release 114, Run with FASTXY 3.3t00, default parameters
gcgcggtggaattcgtcagaagggatcgtgagtgatgcttggccaataagaatgtattgatttgatttactaattaatttcatttccagacaccaatatatgcatagccttgtttgaagaaaattaaggagaaccattttgtaaatggcaatgagtgtaagacacttaactatcttcctgctctccctggcgtgggcttccgcgctccctgactctgcttttattaaaggtgtctgggaaggcatttgtccttcggcttcccagctggcttcttgccttctcactcactgcctcccgtagcctgtgggcagaatccctcaccgtgcccaccttgccctgctctcgtctgacctcacctctgtttccaggatttgctatggctgtcccctgccagtcatgctctgtgcttgctactctgagtgtgtccctggtcccactctcttgcagcctctgtgtcttagcacatgctgccctgatggcccaagggcccttcccctttgtttctgtctggggaatgttctgtctcctctttcttgaacctccttatattccctcaagaagacttaaggcaaaaacaaacctgaacttactatgtgtggtatttttgtgttataagtgtaggacctagtcatagtaacacatttcaaaaatatggaaccgtataaagaaaatgagcatcactcataaatcactatttagacacaagcattggttacgtttctaatattctttctttaggggggcctttcatgaatttatgtgcatttgcattttactgactaaatattactattacaaccattttcatatcttgccactttaccctaccaaatacagcacaaggcagctttcttctgggcattaaag

SEQ ID NO: 80869 - DNA, 2238 bp, Homo sapiens; identical to SEQ ID NO: 61581
  sig_peptide (2187)...(2052): this location contains the signal peptide sequence, MPLPWSLALPLLLSWVAGGFGNAASARHHGLLASARQPGVCHYGT, Run with SignalP
  misc_feature (2205)...(506): similar to gi5912186 in the genepept database release 114, Run with FASTXY 3.3t00, default parameters

SEQ ID NO: 80870 - DNA, 668 bp, Homo sapiens
  sig_peptide (63)...(198): this location contains the signal peptide sequence, MIGRISFWNLFSPLCILSLFLKGTDVKMNCEKDYPEEGAKDRKLR, Run with SignalP
  misc_feature (235)...(118): similar to gi1280145 in the genepept database release 114, Run with FASTXY 3.3t00, default parameters
cgctgacgcaccggtccggaattcccggggtttcttttaatgaaagcattcaattccaccctatgattggcagaattagcttctggaatttattctcccctttatgtattctatctctgtttctgaaaggaacagatgtaaaaatgaattgtgagaaagattacccagaggagggtgcaaaagatagaaagctaagagctggacagagaacttttagactcctcatccataccaaatttctaaaagactatgaatgtagttgataagatttgtagagaggatttctctgtagaaagagcctactcagaaaggcttcagtggggtcatacacatcttagtatgtgtatactggagttgggacacatagttgattgactaatgcctaactcctgtctgaattgtcagagcatgacagcagctgttatgtctagctgctgacagggaagtcggagcagaggtcactgcactggagtcagcctgcatccccagagattgttagaatgcatgtgttttcccaggattggcatgggtactcaaaagcaagagccagtgtgaggtcatgtcagggcctgtccttatggattactggaagtgagtggctgcctctgcagagaatgcagaagatctctgtaattcttaagaactgaggcagtgggatgcattcactt

SEQ ID NO: 80871 - DNA, 622 bp, Homo sapiens
  sig_peptide (188)...(323): this location contains the signal peptide sequence, MKKAFARLVRVLVSFNSVVLLHSSLDNLLLVSPFGTDLSGLLYRE, Run with SignalP
  misc_feature (303)...(61): similar to gi3860416 in the genepept database release 114, Run with FASTXY 3.3t00, default parameters
atgttatcattatcatcaatgtagtatattgttacacttaggactggtctcaagtccacgctttcctaatcaaattgtaatagtaagctagtgaattcaaataacctgtgagaatacagtagatataaattgggattgtcccctcatgaaggcaaactatggttgtctctttcccaagattgggataatgaaaaaagcatttgcaagattagtcagagtactggtgtcctttaattcggtggtactacttcattcaagcctcgacaatctactgttagtctccccctttggcacagacctatcagggttattgtatagagaattggttggtaccagcactctagcttctaacatgttattaatgaagtggtaatctcttgtatctaccagggattctatacagcttcaaattaacaacctacataggctgggtgtggtggctcatgcctgtaatcccagcactttgagaggccaaggcgggtggatcacctgaggtcatgagttcaagaccagcctggtcaacgtagtgaaaccctgtctctactgaggataccatgaaaatgactaggggagccctttttgagagtgccattttgtgcccggggatggcaaggaaaggtta

SEQ ID NO: 80872 - DNA, 625 bp, Homo sapiens
  misc_feature (1)...(625): n = a,t,c or g
  sig_peptide (20)...(155): this location contains the signal peptide sequence, MSVLFWRSASFLTLCSNSPGFDHWLFPYLLYPFLPDCLENACSLF, Run with SignalP
  misc_feature (366)...(249): similar to gi2826285 in the genepept database release 114, Run with FASTXY 3.3t00, default parameters
atttgatcttcagaacctcatgtctgttttattctggagatctgcctctttcctcacactctgttctaactctccaggctttgaccactggcttttcccttacctattatatcctttcctcccagattgtcttgaaaatgcctgttcactttttaggactcagcttcagcttcatctctaccatgaagaggagacttaatgatttcatctttgtatctctgttgggcaccatgcataagttagtctcagcacctctctgtccttattacttttacttgaccatggctgggcaaaggaagtttctagtttacctctgattccccagatcctggtctagcacctggcatatattaaatgcattttaaaatggtggactattcaaagaacacttgaatgtgtaactacatttcttttttcttctggtaaaataaaaaagggttgaatatgggattagttcttttctttagntcttcttatctcttaaggacttaatacccaattcttgagcttattattttttttccaaaataaaaacttcttgtcctttgaaaatttatagcatgttatgaatttattgtccattacttctactctgtgacaggtgtatacatcaaccctcctatca

SEQ ID NO: 80873 - DNA, 583 bp, Homo sapiens
  sig_peptide (4)...(139): this location contains the signal peptide sequence, MAAWLSLYLLQLSASLPPSLGAFSGQLRTVCSLPCHSPTPRPACS, Run with SignalP
  misc_feature (270)...(174): similar to gi563259 in the genepept database release 114, Run with FASTXY 3.3t00, default parameters
cagatggcagcatggctcagtctttatctccttcagctctctgcttctctgccaccttccctaggagctttctcagggcagctacgtacagtgtgcagcctgccctgtcactcccccaccccccgacccgcttgctccttgtcttttctccctctctgccccgcgcctaggagtataataagcttcacagtggcagggtctgggcctgctgtgttcactgctggagcctgagcagggcatgtattttgagctcggtgactatatatcaagtcatgggaagatgcatatcagagtgatttcaaaagtggaattgttgggaaagttgcagttaactttgtgtgagagacttgggtactacagatctttttatgaccaaagtgtctgctctacccaaaaaagaaaattacttgtggtccctccatttttgaattttggtttatttattgaatgcatactgggagcaaaatattaaatattggattattctggcttttcccaacatttctggatttgtaaaaaatgaagcaggtggggaactcctgaaaaaagaaaaggcccagccacggtgggaaaactcccaaga

SEQ ID NO: 80874 - DNA, 568 bp, Homo sapiens
  sig_peptide (74)...(209): this location contains the signal peptide sequence, MSDSLWLGVIYWLLFLEGERCFPGTSLHLLPVHMGLRQSTHLRPP, Run with SignalP
  misc_feature (151)...(164): similar to gi4467884 in the genepept database release 114, Run with FASTXY 3.3t00, default parameters
atgtggttcatagtaaatcaatcaaatggacatgcgttaaacaggtcatgggctaatttctgttgtgtgtcatatgtcagacagtctctggcttggagtgatttactggttactcttcctggaaggagaacgttgcttccctggcacttccctccatctcctcccagtccacatggggctgagacagagcacccacctcaggcctcctcccccagtatcttcctcttgctctaggctatcctctcctctttctccaccaggaccttttttaggtaatcgccaaactggaaatggtttgataacctcatatctatatgttattatttctgtgaaaaggaagacgtatattaaagtaacagtaatagttaacacttatttttaactctgtgctagtcctttttacagtacttaacatgtaattttacatttaatcatcacaataaccatgtgaagatgtgcatgcttatatacctactatatattaatagatgaagaatgaaaaagcattaagccgattttcctagaatcacaggataagtgaaggcaatctgatttgagaccttgtgtg

SEQ ID NO: 80875 - DNA, 3326 bp, Homo sapiens
  misc_feature (1)...(3326): n = a,t,c or g
  sig_peptide (438)...(573): this location contains the signal peptide sequence, MARLGNCSLTWAALIILLLPGSLEECGHISVSAPIVHLGDPITAS, Run with SignalP
  misc_feature (2059)...(2370): similar to gi5306259 in the genepept database release 114, Run with FASTXY 3.3t00, default parameters
atctctctgagtttctctgtctcgcatatttcctgctatctcttgaatcttaaactctcggtaacagacgcttcccgggctccaggcctccgagtgcccccccccgcccactctctgggtcggcgtacattgggccctttttctctgtctctcgatatctctctggcctcaatcgtcctcttggcgagtctctctgtcgtttcagtctgtgtggatttcagtcaccgcctcactctgtcactcttcctggtgctctctctttttctttatctgcagcatatctggaaatgcctctcccctctgtttattcccagccccctcctgcctgcccacccttcccacagaaagaatctcgagatggggaaactgaggctcggctcggaaaggtgaagtaatttgtccaagatcacaaagctggtgaacatcaagttggtgctatggcaaggctgggaaactgcagcctgacttgggctgccctgatcatcctgctgctccccggaagtctggaggagtgcgggcacatcagtgtctcagcccccatcgtccacctgggggatcccatcacagcctcctgcatcatcaagcagaactgcagccatctggacccggagccacagattctgtggagactgggagcagagcttcagcccgggggcaggcagcagcgtctgtctgatgggacccaggaatctatcatcaccctgccccacctcaaccacactcaggcctttctctcctgctgcctgaactggggcaacagcctgcagatcctggaccaggttgagctgcgcgcaggctaccctccagccataccccacaacctctcctgcctcatgaacctcacaaccagcagcctcatctgccagtgggagccaggacctgagacccacctacccaccagcttcactctgaagagtttcaagagccggggcaactgtcagacccaaggggactccatcctggactgcgtgcccaaggacgggcagagccactgctgcatcccacgcaaacacctgctgttgtaccagaatatgggcatctgggtgcaggcagagaatgcgctggggaccagcatgtccccacaactgtgtcttgatcccatggatgttgtgaaactggagccccccatgctgcggaccatggaccccagccctgaagcggcccctccccaggcaggctgcctacagctgtgctgggagccatggcagccaggcctgcacataaatcagaagtgtgagctgcgccacaagccgcagcgtggagaagccagctgggcactggtgggccccctccccttggaggcccttcagtatgagctctgcgggctcctcccagccacggcctacaccctgcagatacgctgcatccgctggcccctgcctggccactggagcgactggagccccagcctggagctgagaactaccgaacgggcccccactgtcagactggacacatggtggcggcagaggcagctggaccccaggacagtgcagctgttctggaagccagtgcccctggaggaagacagcggacggatccaaggttatgtggtttcttggagaccctcaggccaggctggggccatcctgcccctctgcaacaccacagagctcagctgcaccttccacctgccttcagaagcccaggaggtggcccttgtggcctataactcagccgggacctctcgccccaccccggtggtcttctcagaaagcagaggcccagctctgaccagactccatgccatggcccgagaccctcacagcctctgggtaggctgggagccccccaatccatggcctcagggctatgtgattgagtggggcctgggcccccccagcgcgagcaatagcaacaagacctggaggatggaacagaatgggagagccacggggtttctgctgaaggagaacatcaggccctttcagctctatgagatcatcgtgactcccttgtaccaggacaccatgggaccctcccagcatgtctatgcctactctcaagaaatggctccctcccatgccccagagctgcatctaaagcacattggcaagacctgggcacagctggagtgggtgcctgagccccctgagctggggaagagcccccttacccactacaccatcttctggaccaacgctcagaaccagtccttctccgccatcctgaatgcctcctcccgtggctttgtcctccatggcctggagcccgccagtctgtatcacatccacctcatggctgccagccaggctggggccaccaacagtacagtcctcaccctgatgaccttgaccccagccccaacaggaagaatcccctctggccaagtgtcccagacccagctcacagcagcctgggctcctgggtgcccacaatcatggaggaggatgccttccagctgcccggccttggcacgccacccatcaccaagctcacagtgctggaggaggatgaaaagaagccggtgccctgggagtcccataacagctcagagacctgtggcctccccactctggtccagacctatgtgctccagggggacccaagagcagtttccacccagccccaatcccagtctggcaccagcgatcaggtcctttatgggcagctgctgggcagccccacaagcccagggccagggcactatctccgctgtgactccactcagcccctcttggcgggcctcacccccagccccaagtcctatgagaacctctggttccaggccagccccttggggacccctggtaaccccaagccccaaaagccaggaggacgactgtgtctttgggccactgctcaactttcccccctcctgcaggggatccgggtccatgggatggaggcgctggggagcttctagggcttccctggggttcccttcttgggcctgcctcttaaaggcctgagctagctggagaagaggggagggtccataagcccatgactaaaaactaccccagcccaggctctcaccatctccagtcaccagcatctccctctcctcccaatctccataggctgggcctcccaggcgatctgcatactttaaggaccagatcatgctccatccagccccacccaatggccttttgtgcttgtttcctataacttcagtattgtaaactagtttttggtttgcagtttttgttgttgtttatagacactcttgggtgtacctgagtctctgttatttatttttcagggcccagcagtcagggggaaacttctcagagttggncctttcttcctccctcccttccttcctccctcccttccttccccccttccttcctcccttacttactttccacaggggaaag

SEQ ID NO: 80876 - DNA, 461 bp, Homo sapiens
  sig_peptide (82)...(217): this location contains the signal peptide sequence, MLLFSSRFIMFLWPPVSGVCLSFIRDRSFLPMCHFIYVLILCNSI, Run with SignalP
  misc_feature (66)...(42): similar to gi220579 in the genepept database release 114, Run with FASTXY 3.3t00, default parameters
ttcaaaatggctatggaaaacacgtaagttttaaaatatgccctctttctcgttttaaaaaattattactattgtccatacatgttactcttttcatctagatttatcatgtttctttggcctccagtctctggtgtttgcctaagctttattagagacaggtcatttctacctatgtgtcattttatctatgtcttgatcttatgtaattcaattgctctttaagattatgttctcttctcatgtttggtttatccattatccaaattttccatttctttaacctgttatcccttgactctttacagttctacctttttattcacttagtcttttaccctttttttattcgttcacccctttttgttgtttcaggtactccttacttatctccttagccttttcttcctcatcttctttcttaattttctcctacttctcattttacataatacttactg

SEQ ID NO: 80877 - DNA, 354 bp, Homo sapiens
  sig_peptide (112)...(247): this location contains the signal peptide sequence, MLMFVFPLRHLEIIILCFLISVVATDVSVFSEIGLLGCLSDFSLY, Run with SignalP
  misc_feature (15)...(224): similar to gi854025 in the genepept database release 114, Run with FASTXY 3.3t00, default parameters
gaaagttctttctgaaaaagtctaagaggcagactgcctcaatcagcttgtctgaaatctttttacttctctttcactcttgaatgatagattcacttgatacagaattctatgctgatgtttgttttcccccttcggcaccttgaaataattattctttgttttctgatttctgtagttgctactgatgtatctgttttcagtgaaattggtcttctgggttgcctttctgatttttctttatatctgaggtattttgcaacgtccatattttctcaaggattccttaagagtttctttcttttttaggaattttgtagtatcactgagatgtgtttggacatacatacatca

SEQ ID NO: 80878 - DNA, 873 bp, Homo sapiens
  sig_peptide (345)...(480): this location contains the signal peptide sequence, MASLKLRVNVFIITLSFFNGPGTVLGTLQIQISITGRPCGRRILG, Run with SignalP
  misc_feature (458)...(589): similar to gi414131 in the genepept database release 114, Run with FASTXY 3.3t00, default parameters
agtgccgggattacaggcgcgagccaccacgcccggtctaacttcattttacatttctaaaaaccaaagattgcaaaggttacgtaacttatcaatatcacaaagtccataaatggtagagttaccagttcagtctgatttactaaaccattttatgatttgggaggcagaagaattttcacctttccaaaccttttacttactcaatgataacattgttgggatcaaggtctttcccagtcccttgattgacaaccttcatggagagggatacttttattctatcatttttcatctgaaagagaccaaaaaaagtcaccaaaaactttaaatacatcatttagatggccagtctaaaattaagagtcaacgttttcatcataacattgagcttctttaatggaccaggtactgtgctaggaacattgcagatacaaataagcataacaggtagaccctgtggcagaagaattttaggaaacagtcttaatctcattcttgtccctctgagggaaagacaaaaatggtagctcaaaaaatccatggcttgtggaagtaaccaggcagaaaataaaagtttttcttccaggtaagttcagcatagtgatttgttgagatatccctaagtccagaataggtttttgaatacttcaagagactagatctccttctggacttggtctagagcttctttaagcatgaagacatttgtcacattggtcttcttttgcttcccgcagcacatgaagcacttcttcacttcaggggctttgcatcagttattctctctgcctgaatgttcctatcccaagcttccatgaactagttcttttcttaaggcccaagccatattaatcccccccagagaccttt

SEQ ID NO: 80879 - DNA, 404 bp, Homo sapiens
  sig_peptide (14)...(149): this location contains the signal peptide sequence, MFSSQLFKFRQVLVLCVPFDAQIYGHVCAWEAQSSCLHKTDGCIF, Run with SignalP
  misc_feature (242)...(33): similar to gi1843583 in the genepept database release 114, Run with FASTXY 3.3t00, default parameters
gggaaacacagtgatgttctcaagtcagcttttcaaattccgacaagtcctcgttctatgcgtaccatttgatgcacagatctatggacatgtgtgcgcatgggaggcccagagctcctgcctccacaaaactgatggctgcatctttggaaagatcgggaaggggcccctcttgcctcatgtgatttcctcactggtggggctaccatgggagtttggagccattggtaaggattccaacacattttcaacgcacaagcttcatgctgacccgccccagccctttgtccttctctcctccactgggcgaggttgccaggcgctcaagcttacttatgacaccctcagtctgagccaaatgtaagaacatgtgctgctgtagcttcccaattttcactgctggc

SEQ ID NO: 80880 - DNA, 853 bp, Homo sapiens
  sig_peptide (180)...(315): this location contains the signal peptide sequence, MPSLTILLSLIELTCLISVLAQQVVQVKPSCRRKYGPFEDLKEVC, Run with SignalP
  misc_feature (347)...(213): similar to gi1620190 in the genepept database release 114, Run with FASTXY 3.3t00, default parameters
atttctctcctctcctttctctctcctctctctctgtcttcctctctctctcaaatgaactgctccgtgaccagagcccaggtgagaaccaggagacgttttttgattgtctgtagtcatatatctttgggttgaaaaggagctactcaaagatgccacttctgtcatcttctaggtgaatgccctctctcactatactgctttctctaattgaactcacatgtcttatttctgtgttggcccagcaagtagtacaagtaaaaccctcttgcaggaggaaatatggtccatttgaggacttaaaggaagtgtgttgtacctggaattattcccaaattaatacagttttttttgtttgttgtactgcttttttgttttcatgcattcttcactgaattcaaatgcccactcctagtaacacctgttacctttttattttcttggttaaactcaaaggattggagaactgaatactcaaaacagccacatttatctatgtgcttattgtacacctacctctatctgcttgtctgttttccatctatgatctaatttagctcatctatctaatttatctacctgtctctatctggcttctatctctatttcatctgtcaatcaatcaatctaaatgtcacactgcactgacccactgctgaatgtcgtaaccctgaagcttctgatgccttattatgaagcctaggtcagcattaacctggacagaatgacctctaaaggctttctcctccctggaagctggaccctggtttagggaagctatcatttatccaaactttccaggcttgatggacttcccaccaaacggcacggggactggcttcctaacatccct

SEQ ID NO: 80881 - DNA, 854 bp, Homo sapiens
  sig_peptide (250)...(385): this location contains the signal peptide sequence, MLQFIFSTLKPLLLFFNSFWLTNIEFKIQWCWLSISIWLSLSENC, Run with SignalP
  misc_feature (408)...(38): similar to gi58117 in the genepept database release 114, Run with FASTXY 3.3t00, default parameters
ctaaggtgcaattgtgatgtggcacaaggtgatcacttgaaagccatctgttatctttcttggcagatttacttcctgggaaatggcacttcctttctcgatcactgccaactaattgaaaacacgttgttgttaggtgtgtgatatagttcaagtttctagtagtggcagccaatggggcagaagtcatatcttattaagagcagcaacaagttgaccgccgtggttttaattctgagaactcagcaaatgctacagtttatttttagtaccctcaaaccactgctgctgtttttcaattcattttggttgactaacattgaatttaaaatacagtggtgttggctttctattagcatatggctatccctctcagaaaactgcccactagaaaatgaactggtggggcaaaagaaaagacgaatggagaaaggacaaggaactggtggtgtcacatgatttactggtggcatgaattacagctgctgtggcatctgaatttccagatcttgatgcagcttaagaaacctgattgagaatcctaagtcagccttcggaagaatacgttggtttgaaacaacacagtatgagatttaaatgatggtaattgctttcagataggttagaaatgcccatgatagttctttttcctgctttatttacccctatttttaatcctaagggacaatgcgaaattatggggaaaactgaaactcaaaagtgggcatggatggatggttggcatgaattacccagtcccagagttttacaggctaatccccacttatcagggccttggcttgaacataaaccattttgtgctcctcaactcaatctaccctttgggctaatgc

SEQ ID NO: 80882 - DNA, 854 bp, Homo sapiens
  sig_peptide (447)...(312): this location contains the signal peptide sequence, MDWNLQFSLLLWATADISDQLFQPPQKFSWDPLESALCLYSSGSA, Run with SignalP
  misc_feature (404)...(142): similar to gi4884162 in the genepept database release 114, Run with FASTXY 3.3t00, default parameters
aaatggctaaatgcaggtagacactcatgcagagatcctgacccctaagatgaggggaccacactagtctcatcttggtgtgacttttcacattaaggcagtattcagtcgtgtggatgcagacatggcacacaccagatgttcacagtggcctggagggtgggagggtggagcctgggacaaccagagcaggtaaaaatttacatgggagctccccaaaataaaagagctgcagagcggggagatggagtggtggggatttgcgggctgggtaccaaaagctctgcatttctcccttcaaatccttggctgaccctgaactgtacaagcacagggcactctccagaggatcccaggaaaacttctgtggaggttgaaagagctgatcagagatgtcagcagttgcccacagtagcaaagagaattgcaagttccagtccatcaagttagaagaccttggtaaacttgtatatttccactgaaataccataaggatcatattttaggagtaagcactgcatctcaacactgagagacttgccctataaagaatagcaaattttagccaacccttgctaaagatgtctaaaattaagccttcccaagggcaaagcgatccaccagtacttttagtggcccggttgatcaaccgtcatattttcgcgtagaatataaaatcccaggcctttaccacatgtaacctacatatccttttacttaataaaattctttttttcgagctttacgttttcggtgtacaatgccttcttgggtgtttatcgatatcacacctcttatcttttgtcattggagtaactttatgtttcgccacgtttcctgtccgatcctatgac

SEQ ID NO: 80883 - DNA, 1131 bp, Homo sapiens
  misc_feature (1)...(1131): n = a,t,c or g
  sig_peptide (185)...(50): this location contains the signal peptide sequence, MFNKVHLITVLWLHKRMVLWKCTFVSFLLSNRLGETQDRERKRKC, Run with SignalP
  misc_feature (200)...(433): similar to gi537348 in the genepept database release 114, Run with FASTXY 3.3t00, default parameters
tttcgtaggaaaatgaaccagtttcacctgaactctacacacacacacttcctctttctctctctgtcctgtgtttctcctaaacgatttgagagtaggaatgacacgaacgtgcatttccaaagaaccattctcttatgtaaccacaggacagttatcaaatgcaccttgttgaacattgattgatacaacaccattaatgcagccactctccgtattctggctctgtcagttctactaacgtccctcagagccgtatcctccccaccccgatgtaggatgaggtttggaatcacgccagttgcatttacttgtctggtctctttcagtcccttcattctggagggtttcctcagcctttctttgtgtttcatgacgttgacattttagaagggtccaggccagttattgtgtagaacgtctctcattttcagtttgttggatgtttcctctcagtgagatccaggctacgcatcgctggttggaatttccaaagcctgtgntcttaaccaccctgaggttctgcctttgaaaaggacattctggctcctttacaaagggctggtcatcatcatagacttgggctggcaggggcgctttcaactggacaacccgttgcttttgtaaaagtggcccccttaaaatttaaggaaagagtttggaacaatgcgccattaacatggcaacgttgaaatgaccctaacaccgtgccaagaggaaaggggagggatcaaaaaaaaaatggaatatcccagttccaaaccgcagataaccaaagtggcttgtatccgggcattctggggaaaaacatctgttaagcccggccaaatgcctcggatattcttttgaaagggtttcctttgcctcgagcctcaccggccagttaaacgagattaaacgcccttcttcaagaccaggtacgaaccggcatccaaaaatcttttattgtgccccgcgtccgctcaggccggttacaaataaaggtgaaacatcgtccccccgcccgcgcgccagctcactatcccccccgcctgatccggctggcgctcgtaccgcgcccctcgccgcgccggcggagtgccgggccgggggctcacgagctacacgtgcgacattgcgccggccgggccg

SEQ ID NO: 80884 - DNA, 772 bp, Homo sapiens
  sig_peptide (210)...(345): this location contains the signal peptide sequence, MGSFSFILVLFIDCLCMFPSVLVQLLCTYSSLMKTPLWLQARSSH, Run with SignalP
  misc_feature (223)...(400): similar to gi4574386 in the genepept database release 114, Run with FASTXY 3.3t00, default parameters
tttcgttgatttggtgaggatcaaatatgataatgcatgtgaagacactttgtgaatggtgaagtacaatcattatcttctaggatatttagtcattttctcctcccagttgtaaagcatctgttttcctaattttcaatttcttctccactccaactaatttcccaattttcaatttcttctccattccaactccatttccacaactaatgggttcattttcttttattcttgttctgtttattgactgtctatgcatgtttccttctgttcttgttcaattgctttgtacatattcctctcttatgaaaactccactgtggcttcaggctagatctagtcattaatgcctttcacagtctgatctccaccttcctctgatcatattccttcttctcttcttcactaatcttcagcgctagccagtggtgtgatgtaactttaaacaattccttctctgaggtagaaaacaaaaagccctgacttatggaatttgccagttttcattgtgtcaatattcccgccatgatcccaccagcttcaagaatggatctgttggcagagtttgatagctcacgccgtgtaatcccagcactttgggaggctgagttgggaggaccatttgagtccaggagttcgagagcagcatgggcaacatggtgaagcccagtctgtactaaaaatacaaatattagctgggcttggtggcacgcccctgtaatagcagttgtaggggagcctgaggcaggagagtcacttgagcccctgtatt

SEQ ID NO: 80885 - DNA, 1154 bp, Homo sapiens
  misc_feature (1)...(1154): n = a,t,c or g
  sig_peptide (134)...(269): this location contains the signal peptide sequence, MSEFLCFFTQRAIVTTFSLSTTEGNSCATWLCVPFPGCSVLWSVL, Run with SignalP
  misc_feature (342)...(1136): similar to gi3413401 in the genepept database release 114, Run with FASTXY 3.3t00, default parameters
gaattcccgggtcgacgatttcgttggaggcctgaccctacatgactaatatttctgtcctcatttccttatgggcctccctgtaatgttatgtttccctctaacatgagtatgtgctgcttactggaagcacatgagtgaatttctttgtttcttcacccaaagagccatagtaacaactttttctctatccactacggagggtaacagctgtgccacatggctctgtgtccctttccctgggtgctcagttttgtggtcagtacttgaccgcaaataaatgaacctcttacccaaggttgagatggagaatgaggagggataaagagctggcaaaatattgtgtagaaacaggaattgatgagatcagaatagattttgatctttcacagagagtaaaacatttcatcctctgtttctaaggtggtgtccttaaggttgtgatgcagaattcagaagagtgtttgatggaccatgtttgtgttgggcttgatttcatatttagtgagataaatggctacataaaaacattgacttaaaactgacgtgagcagatggtagagaatattctattatttcaaattttaaaatagtgaaacagattaataaggtctagggtttcttccctgagaatcttaacaaacaagtatcagtgacaaacagaatgttaagtgtagtgaaagaggtatatgaactgtctatcttagaaacagaagatggttcaactgtttggcctatatcatgaaaactgggatcaagggagaaaatgagctgataactttttggcagaaggtgagcctacttctggacccgggcttttccaagctaactcagtgacccacacattacaagaatcacttcgcaccgcccctcccggggnatcacatgtccccagacacgtccgcggggccgcgaacgagccacgatgtaaacacatcaccggtgggcgcctcctccgactccgagaccagaaccatcctcggcccctgcggcgggccatgtacagaataacaacaccgttctccacgaccgcgtggggcacacgttcgcgtcacattaaccaacttcgcgcggcggcgccaggcgcgaaccatcgtcctagcgaacctcgccgccggctcattttcacgccgaccccgcgccccagctcgccc

SEQ ID NO: 80886 - DNA, 884 bp, Homo sapiens
  sig_peptide (39)...(174): this location contains the signal peptide sequence, MFLFLFFLVAILPVNTEGGEIIWGTESKPHSRPYMAFIKFYDSNS, Run with SignalP
  misc_feature (39)...(216): similar to gi296176 in the genepept database release 114, Run with FASTXY 3.3t00, default parameters
catgctgctgacgaattcggcacgagaccctgaagaggatgttcctgttcctgttcttcctggtggccatcctaccagtcaacactgaaggaggagagatcatatggggtacagagtccaaaccccactcccggccctacatggcattcataaagttttatgatagtaattcagaaccccatcactgtggcggtttcctggtggcaaaagacatcgtaatgacagcagctcactgtaatggaagaaatataaaagtaaccttaggtgctcacaatatcaagaaacaagaaaacacccaggttatctctgttgtaaaagccaaacctcacgagaactatgacagagattcacattttaatgacatcatgctcctgaagttggaacgcaaagctcaactcaatgggtgttgtgaagactattgcccttcctaggagccaggactgggtgaaacctgggcaggtgtgcacagtggcaggttggggacgcttggccaattgtacttcgtctaacacacttcaagaagtgaatctagaagttcagaaaggccagaagtgccaagacatgtccgaagactacaacgactccatccagctttgtgtgggaaaccccagccgaggggaaggctactggtaagggagacttcagggggtccctttgtgtggcgagggagtggccccagggcattgtcagttatcggcttgggtactgggacactttcttcgagtattcacccagaatctccacttttttaccggggatttagaaaaccaatgaaaggcctttcaacaatcctagaaccacaaaccctgtgtcttgcgcccaaggtccaccaaccctggggattgggtattttagggcctcaaaaaaaaaacccttgccccccg

SEQ ID NO: 80887 - DNA, 970 bp, Homo sapiens
  sig_peptide (958)...(823): this location contains the signal peptide sequence, MKPFTVLKGFHFSVFCLLPLITHNINLQTTWQIPSLISRAPSSFS, Run with SignalP
  misc_feature (441)...(183): similar to gi3256637 in the genepept database release 114, Run with FASTXY 3.3t00, default parameters
acattagcatgattacccagcttggcacgaggcctcagcatatgctctgcctcacttgcttcctcactgttaaaatgacaacggacgccgtcttcggtgcttccaacaccctcggttccctctcgcggcccggccttcctacgctgctacgttgtgcattacccacaacagcaaaaatgttccactggtggtttcaagattcctaaaaaaatagattcaaaacatctttaatactctctgaagaagcaatacatcacaggaaaagctgtaacctttcctgttgctgatactatccagactgcgggctgatgaggacggtaactgcagccaattcgtattctgcgtggctgccgctggaggtgcacaggagctggtccacccaccctccacactcccaaccaaggaagctgctgaatttctgagtgtttgcctaatgcccttttatataacctgaaaagagtcacagtacttgaaggcagtattttccaagaaacagccttcccctattaacgcaacatccctgaaaataatactgctgtttctacggcagtgacaggccctgcatggaacgcatttttccttccttttttccccatcacagagccacgggcaagaagctgcggcggcagagcctctgtcaaagccagctggacagagggatggctacttgcattgttaagtaggagcgcttcacagtgaccatgggccagcctggaactgccttctcccagggaaggggggagcaggcgtgagtgggtgtgaagcacagggaagcttctctgcctggtgatcccaagagggccttcaacaggtgccctgcctggctgaaggaggaaggtgcccgggaaatcaaactcggtatttgccaggttgtttgaaggttaatgttatgggtaatcaaagggaggagacaaaagacagaaaaatggaaacccttcagaacagtgaaaggtttcatttacctttggta

SEQ ID NO: 80888 - DNA, 413 bp, Homo sapiens
  sig_peptide (23)...(158): this location contains the signal peptide sequence, MPPTSTRWRWVVFLYHASSVYEVVGGHPSDWLWAVGHASNIYQEV, Run with SignalP
  misc_feature (313)...(85): similar to gi1345538 in the genepept database release 114, Run with FASTXY 3.3t00, default parameters
cacggtgaacaagcgcgccaccatgcctccaacatctacaaggtggaggtgggttgtttttttgtatcatgcctccagtgtctacgaggtggtgggggggcaccccagtgactggctgtgggcagtgggacacgcctccaatatctaccaggaggtggggggtcaccccattggccggatgtgggcagtgagaccacacctctaatatctaccaggaagtgggtgggcagcccactggctggctgagctgttggtggcctggctgcctaagtgctaggggtgggtttggccacaccctggaggctggaggcagtatgggccagtgggaggtgccccctgggcccgcctttacacccatccgcgccccgcagggcggctgcatcaccaagttggagacctttatccaggagcag

SEQ ID NO: 80889 - DNA, 413 bp, Homo sapiens
  sig_peptide (19)...(154): this location contains the signal peptide sequence, MAEFFVLLLLIVFCLLKHFNLHFLSDWHIFCNKPHFGITFVKVAQ, Run with SignalP
  misc_feature (176)...(407): similar to gi58925 in the genepept database release 114, Run with FASTXY 3.3t00, default parameters
ttacgccttgcgttgacgatggcggagttttttgttttgttgttgttgattgttttttgtcttttaaagcattttaatcttcattttcttagtgactggcatatattctgcaataaaccacactttggaattacgtttgtgaaagtggctcagtggtttaatcctgctccccaaattcattgatgtcattaataaccaccctcagagtgcattttcctgggctttctgtgtaatctttatgttcttccttttgaatagcccagaatttgcatgaatgaggcccagaagagtactctgtctgagttttaatgatgttcatgaactgggtagaacttgggaggaaaagataaagattttaaaaacccaacctaatccaaaacacagagccattcccaaaaagagtgtgcagactg

SEQ ID NO: 80890 - DNA, 1258 bp, Homo sapiens
  misc_feature (1)...(1258): n = a,t,c or g
  sig_peptide (242)...(377): this location contains the signal peptide sequence, MSVCYTKILCSCLCSCLMWLRDEQFHNSSFNDFYIFTYFCCICCL, Run with SignalP
  misc_feature (209)...(366): similar to gi1480863 in the genepept database release 114, Run with FASTXY 3.3t00, default parameters
cacgagcttcctttctcatcagacctaaaaagcaggcaattaatagaacaagaaattgaaggtcaaagatgtttacattttttgttcaaggacataagcatttaaatggcaaaataaattctacagtcttctgatacctattccaatatttcccagtcacatattactttgaaatattatataacactaaagaatccaaaaaacaaactgcaaaatactgtaggagaaagtccaagtggtaatgagtgtatgttacaccaagattctgtgtagttgtctttgctcctgcttgatgtggttgcgagatgagcaatttcacaattcttcttttaatgacttttacattttcacctacttttgctgtatttgctgtctgaatgactgcacactaaccccagtgagatttttcttaaatctgtgcaagtgggccagaaaataaagcttaaatgatgaagataaaatctatgactactgctgaggacatattaaaaacgaaaccacacactacactcaagatgaacttgctgaattatctttactggaaaaaggcaatttggtttgcacaactcctttgcaactgtgacatcaaactttttggaattaccacaccaatttttttttaatgtaccagagaggagctttcagcttctggacatcacttattgccaggaatttcacaagtgtacaaagggggggcccgggacccaattcgggctatagcgaggccgattaccatgcacttggcggcggtttatcacggccgggcgcggggaatatttgtggtcggggccggcggggagtcgtgtcncggggcngcctggtccgcgcacaccggatatcggcgagggggggnggggggcaccccccacattcgccgctgcgggggccccggcctccgggggctgccggcgccggcgcccggcgggatgccggcgtcgcgggcgggcgaggtgcgggtcccccgcgcgttcgcggcgacgggcgccccgcgccccncgtgggcctgccggaacgctggggggttgtgtgggtcgcgatctgacagcggcctctggcgggctaaccgggagaggggcggcacatatacgagtgtggcgggcactgccccaggattcggcgacctattggcttccgcggcgggatccgccgaagagggccggcgcggggcgcggcatcggcgcggaacgggcccgacatggggcgtgactcagcgacagagatgcgtgtgtctccgcgcgctgtcgggacgaaaacaccc

SEQ ID NO: 80891 - DNA, 1408 bp, Homo sapiens
  sig_peptide (1365)...(1230): this location contains the signal peptide sequence, MQWCNLTATSAFQIEAILLPQLSPVAGITGTCYHAWLIFVFLVET, Run with SignalP
  misc_feature (1388)...(1346): similar to gi3002527 in the genepept database release 114, Run with FASTXY 3.3t00, default parameters
tggtggaattcgctgcacctgtccccgcccccgcccccaccacaggccccagcggagggaccttcagtccagcccggtcccctcaggcccatggaggaagagctgccacctcccccggcagaacctgttgagaaaggggcatccacagacatctgtgccttctgccacaagaccgtgttcccccgagagctggctgtggaggccatgaagaggcagtaccatgcccagtgcttcacgtgccgcacctgccgccgccagctggctgggcagagcttctaccagaaggaggggcgacccctctgcgaaccctgctaccaggacacactggagaggtgcggcaagtgtggcgaggtggtccgggaccacatcatcagggccctgggccaggccttccacccctcctgcttcacgtgtgtgacctgcgcccggtgcattggggatgagagctttgccctgggcagccagaacgaggtgtactgcctggacgacttctacaggaaattcgcccccgtctgcagcatctgtgaaaatcccatcatccctcgggatgggaaagatgccttcaaaatcgaatgcatgggaagaaacttccatgaaaattgctacaggtgtgaggactgcaggatcctcctgtctgtcgagcccacggaccaaggctgctaccccctgaacaaccatctcttctgcaagccatgccatgtgaagcggagtgctgcggggtgctgctgagagtgcccgctgggcagtgaacagaccactagccccggctggggcccttccctgacttggtttcccttcctaacctgctcttgcacactttccttctgagcctccatggagaccagcctgcaagccggcccagcctgtccaggatacagtggggctgagcacccccaggccttccactcctctaccctctgggcaccagaaggctcctggaccatgagcttcacccccagaattccctgctgaccctgccccacttccagggaaaagctgggggaggttggacccctctcactgactagctgtctggtaggggtgctaggaccagcctcgcctgtggggttgagctgtttgaggacaaactccaaggtcccttaaaaagtgccttttagaggctgggcatggtggctcacgcttgtaatcccagcactttgggaggccaaggtgggtggatcacctgaggtcaggagttcaagaccagcctggccaacatggtgaaaccctgtctctactaaaaatacaaaaattagccaggcatggtagcaggtgcctgtaatcccagctactggggaaagctgaggcaggagaattgcttcaatctggaaggcagaggttgcagtgagattgcaccattgcattccagcctgggcaacaagagggaaactccgtctcaaaaaaaaaa

SEQ ID NO: 80892 - DNA, 977 bp, Homo sapiens
  sig_peptide (56)...(191): this location contains the signal peptide sequence, MILNKALMLGALALTTVMSPCGGEDIVADHVASYGVNLYQSYGPS, Run with SignalP
  misc_feature (56)...(977): similar to gi386923 in the genepept database release 114, Run with FASTXY 3.3t00, default parameters
agtgtgcgtggaattcgctcagaacagcaactgctgaggctgccttgggaagaggatgatcctaaacaaagctctgatgctgggggccctcgccctgaccaccgtgatgagcccttgtggaggtgaagacattgtggctgaccatgttgcctcttacggtgtaaacttgtaccagtcttatggtccctctgggcagtacagccatgaatttgatggagacgaggagttctatgtggacctggagaggaaggagactgtctggcagttgcctctgttccgcagatttagaagatttgacccgcaatttgcactgacaaacatcgctgtgctaaaacataacttgaacatcgtgattaaacgctccaactctaccgctgctaccaatgaggttcctgaggtcacagtgttttccaagtctcccgtgacactgggtcagcccaacaccctcatctgtcttgtggacaacatctttcctcctgtggtcaacatcacctggctgagcaatgggcactcagtcacagaaggtgtttctgagaccaggccttcctctccaaagagtgatcatttccttcttcaagatcaggttacctccccttccttcccttttgaatgatgagatttatgaactgcaaaggtggagcaactgggggcctggtttgagcctcttctgaaacactggggagctgagattccaacaaccttagtcagagctcacagagacgtgtggtctgcgccctggggttgtctgtgggcctcgtgggcattgtggtggggaccgtcttgatcatccgaggcctgcgttcagttggtgcttccagacgaccaagggcccttgtgaatcccatcctgaaaaggaaggtgtttacctactaagagatgcctggggtaaagccgcccagctacctaattcctcagtaacatcggatctaaaatctccatggaagcaataaattccctttaagagatctatgtcaaat

SEQ ID NO: 80893 - DNA, 1169 bp, Homo sapiens; identical to SEQ ID NO: 67131
  misc_feature (1)...(1169): n = a,t,c or g
  sig_peptide (407)...(272): this location contains the signal peptide sequence, MANFLHPVAFLVHPYILPFCLHLSLLHPDTYVLHLEQRYHRKPCK, Run with SignalP
  misc_feature (961)...(793): similar to gi1171596 in the genepept database release 114, Run with FASTXY 3.3t00, default parameters

SEQ ID NO: 80894 - DNA, 787 bp, Homo sapiens
  sig_peptide (31)...(166): this location contains the signal peptide sequence, MPEFWPHVLLGNSTLLLSTCHLPGLHHIPRIISDSSPRKDIVTSS, Run with SignalP
  misc_feature (240)...(773): similar to gi1827454 in the genepept database release 114, Run with FASTXY 3.3t00, default parameters
cagttctgcagccccctcttctcattcttaatgccggaattctggccacacgttcttttggggaactccacactgcttctctccacgtgccaccttcctggccttcatcacattccacggatcatctctgactcatcccccaggaaagacatcgtgacaagcagcgagcagaacaaaaccgtcgggcgtgcagacacaagcagcacaggctttgggatcacagcaacagggcccggaatcccagctccatcactttctagctgtgaggctttagggaagtcttttaggtcatgttctttagccgtaaagcccgaataacagtgcctgtctcacgggtgattgagagaactagaacatggtgttacattgacttctgctttctgtcaagcttgagcaactttacgaatgcatttcctctgagaaacctgcccagcccctgaggctgtctgtggctctgtcccagcctccctctgtgctcgcctaacccctgtcccgtggtcctcccaggacgcctgggtctcattccccagccacttctctgagaatgtcccatgggctccctgggccaggcaggctccagaggcacccatgaaacccagttgtcctaaaatccaagcagcggggccccttgaggctgggaacaagtataaaagaggccctctggggccccctaaacctcaccccctttgaaggggaaggcaaaacaaaacagggcttttttggtggagggagaattcaagggctgccttttcacaagcctcttacccgggaaaacgggcggttgaac

SEQ ID NO: 80895 - DNA, 1912 bp, Homo sapiens
  sig_peptide (828)...(963): this location contains the signal peptide sequence, MNPHLGVFLVLVSFFLSLLDSQLHSWIVLHNSPSSRMWKSIIFFL, Run with SignalP
  misc_feature (586)...(1409): similar to gi2792016 in the genepept database release 114, Run with FASTXY 3.3t00, default parameters
cccttgccaaaacggtgaggcagcggtgtgttacctgccgacagcatgatgcgaggcaaggtccagccgttccacacggcatacgagcttatggagcagccccctttgaaggtctccaggtggacttcaaagagatgccaaagtgtggaggtaacaagtatgtactatttcttgggcgtacctactctgggtgggtggaggcctatccaacacgaactgagaaagctcgtgaagtaacccctgtgcttcttcgggatctgattcctagatttcgactgcccttacggatcggctcacataacgggcctgcgtttttggctgccatggtacagaaaacggcaaaggtattggggatcacacggaaactgcatgccgcctcccagcctcagagttccggaaaggtgtccaagtcacacagagccacggaatctcacaggagcctgagaactcctcctcctgggactctcagaggatccagaactgcagcccatcctcgctgggctgtccctgtccatgtacctggtcacggtgctgaggaacctgctcatcatcctggctgtcagctctgactcccacctccacacccccatgtgcttcttcctctccaacctgtgctgggctgacatcggtttcacctcggccatggttcccaagatgattgtggacatgcagtcgcatagcagagtcatctcttatgcgggctgcctgacacagatgtctttctttgtcctttttgcatgtatagaagacatgctcctgacagtgatggcctatgaccgatttgtggccatctgcccatctgtcaccccctgcactacccagtcatcatgaatcctcaccttggtgtcttcttagttttggtgtcctttttccttagcctgttggattcccagctgcacagctggattgtgttacacaactcaccttcttcaagaatgtggaaatctataattttttttctgtgacccatctcaacttctcaaccttgcctgttctgacagcatcatcaatagcatattcatatatttccatagtactatgtttggttttcttcccatttcagggatccttttgtcttactataaaattgtcccctccattctaaggatttcatcgtcagatgggtagtataaagccttctccgcctgtggctctcacctgccagttgtttgcttattttatggaacaggcattggcgtgtacctgacttcagctgtggcaccacccctcaggaatggtgtggtggcgtcagtgacgtatgctgtggtcacccccatgctgaaccctttcatctacagcctgagaaacagggacattcaaagcgccctgtggaggctgctcagcagaacagtcgaatctcatgatctgttatctcatgatctgttccatcctttttcttgtgtgggtaagaaagggcaaccacattaaatctctacatctgcaaatcctgcctgttagtcacattatttttgtggcttgatggcttttattcctttccgcatttcctttgtgaatattgctttcttcgttatgcctttaactggaatgggtgaggattctgggatcctttgtttagcaaaaacctcatgactgaatcctctatacctaggcggcctcttttagtttcttgagcaataaccctgtcatccaggtggaatcacaaccatctttttatatacacgaagtccgtcacttcgttttggaattccctgaaaactgactttatggaaacaacgtacaggaggtcctccaacagcattggttgttcacagttgtgtagttatactgttgatgaaaaataagcggtttcactatatattattttgcttcaagttgaagtttccaagagactttcaaagatgttaagtgaggacatactgtacatcaaattcatatcctcttccagagttcc

SEQ ID NO: 80896 - DNA, 4791 bp, Homo sapiens
  misc_feature (1)...(4791): n = a,t,c or g
  sig_peptide (970)...(1105): this location contains the signal peptide sequence, MLVLLVLRVSLAALVKMELLVRWAPVACLVREVALEPLALLVLVE, Run with SignalP
  misc_feature (198)...(4552): similar to gi309181 in the genepept database release 114, Run with FASTXY 3.3t00, default parameters
ggggcagcagacgggagtttctcctcggggtcggagcaggaggcacgcggagtgtgaggccacgcatgagcggacgctaaccccctccccagccacaaagagtctacatgtctagggtctagacatgttcagctttgtggacctccggctcctgctcctcttaagcggccaccgccctcctgacgcacggccaagaggaaggccaagtcgagggccaagacgaagacatcccaccaatcacctgcgtacagaacggcctcaggtaccatgaccgagacgtgtggaaacccgagccctgccgtatctgcgtctgcgacaacggcaaggtgttgtgcgatgacgtgatctgtgacgaagaccaagaactgccccggcgccgaagtccccgagggcgagtgctgtcccgtctgccccgacggctcaagagtcacccaccgaccaaagaaaccaccgggcgtcgagggacccaagggagacactgggcccccgaggcccaagggggacccgcaggcccccctggccgagatggcatccctggacagcctggacttcccggaccccccggaccccccggacctcccggaccccctggcctcggagggaaacttttgctccccaagctgtcttatggctatgatgagaaatcaaccggaggaatttccgtgcctggccccatgggtccctctggtcctcgtggtctccctggcccccctggtgcacctggtccccaaggcttccaaggtccccctggtgagcctggcgagcctggagcttcaggtcccatgggtccccgaggtcccccaggtccccctggaaagaatggagatgatggggaagctggaaaacctggtcgtcctggtgagcgtgggcctcctgggcctcagggtgctcgaggattgcccggaacagctggcctccctggaatgaagggacacagaggtttcagtggtttggatggtgccaagggagatgctggtcctgctggtcctaagggtgagcctggcagccctggtgaaaatggagctcctggtcagatgggcccccgtggcctgcctggtgagagaggtcgccctggagcccctggccctgctggtgctcgtggaaatgatggtgctactggtgctgccgggccccctggtcccaccggccccgctggtcctcctggcttccctggtgctgttggtgctaagggtgaagctggtccccaagggccccgaggctctgaaggtccccagggtgtgcgtggtgagcctggcccccctggccctgctggtgctgctggccctgctggagacactggtgctaagggagagcctggtgctaaaggtgccaatggtgctcctggtattgctggtgctcctggcttccctggtgcccgaggcccctctggaccccagggccccggcggccctcctggtcccaagggtaacagcggtgaacctggtgctcctggcagcaaaggagacactggtgctaagggagagcctggccctgttggtgttcaaggaccccctggccctgctggagaggaaggaaagcgaggagctcgaggtgaacccggacccactggcctgcccggaccccctggcgagcgtggtggacctggtagccgtggtttccctggcgcagatggtgttgctggtcccaagggtcccgctggtgaacgtggttctcctggccctgctggccccaaaggatctcctggtgaagctggtcgtcccggtgaagctggtctgcctggtgccaagggtctgactggaagccctggcagcccttggtcctgatggcaaaactggccccccttggttcccgcccggtcaagatggtcgccccggacccccaggcccacctggtgcccgtggtcaggctggtgtgatgggattccctggacctaaaggtgctgctnggaaaagcccggcaaggctggagagcgaggttgttcccggaccccctgggcgctgtcggtcctgctggcaaagatggagaggctggagctcagggaccccctggccctgctggtcccgctggcgagagaggtgaacaaggccctgctggctcccccggattccagggtctccctggtcctgctggtcctccaggtgaagcaggcaaacctggtgaacagggtgttcctggagacctttgcgcccctggcccctctggagcaagaggcggagagaggtttccctggcgagcgtggtgtgcaaggtccccctggtcctgctggtccccgaggggccaacggtgctcccggcaacgatggtgctaagggtgatgctggtgcccctggagctcccggtagccagggcgcccctggccttcagggaatgcctggtgaacgtggtgcagctggtcttccagggcctaagggtgacagaggtgatgctggtcccaaaggtgctgatggctctcctggcaaagatggcgtccgtggtctgaccggccccattggtcctcctggccctgctggtgcccctggtgacaagggtgaaagtggtcccagcggccctgctggtcccactggagctcgtggtgcccccggagaccgtggtgagcctggtccccccggccctgctggctttgctggcccccctggtgctgacggccaacctggtgctaaaggcgaacctggtgatgctggtgctaaaggcgatgctggtccccctggccctgccgggacccgctggaccccctggccccattggtaatgttggtgctcctggagccaaaaggtgctcgccggcagcgcttggtcccccttggtgcttacttggtttcccttggtgctgctggccgagtcggtcctccttggcccctctggaaatgctggaccccctggccctcctggtcctgctggcaaagaaggcggcaaaggtccccgtggtgaaactggccctgctggacgtcctggtgaagttggtccccctggtccccctggccctgctggcgagaaaggatcccctggtgctgatggccctgctggcgctcctggcactcccgggccctcatagtattggctggacagcgtggtgtggtcggcctgcctggtcagagaggagagagaggcttccctggtcttcctggcccctctggtgaacctgggcaaacaaggtccctctggagcaagtggtgaacgtggtccccctggttcccatgggcccccctggattggctggaccccctgggtgaatctggacgtgagggggctcctggtgccgaaggttcccctggacgagacggttctcctggcgccaagggtgaccgtggtgagaccggccccgctggaccccctggtgctcctggtgctcctggtgcccctggccccgttggccctgctggcaagagtggtgatcgtggtgagactggtcctgctggtcccgccggtcctgtcggccctgttggcgcccgtggccccgccggaccccaaggcccccgtggtgacaagggtgagacaggcgaacagggcgacagaggcataaagggtcaccgtggcttctctggcctccagggtccccctgcccatcctggcatctcctggtgaacaaggtccctctggagcctctggtcctgctggtccccgaggtccccctggcttctgctggtgctcctggcaaagatggactcaacggtctccctggccccattgggccccctggtcctcgcggtcgcactggtgatgctggtcctgttggtccccccggccctcctggacctcctggtccccctggtcctcccagcgctggtttcgacttcagcttcctgccccagccacctcaagagaaggctcacgatggtggccgctactaccgggctgatgatgccaatgtggttcgtgaccgtgacctcgaggtggacaccaccctcaagagcctgagccagcagatcgagaacatccggagcccagagggcagccgcaagaaccccgcccgcacctgccgtgacctcaagatgtgccactctgactggaagagtggagagtactggattgaccccaaccaaggctgcaacctggatgccatcaaagtcttctgcaacatggagactggtgagacctgcgtgtaccccactcagcccagtgtggcccagaagaactggtacatcagcaagaaccccaaggacaagaggcatgtctggttcggcgagagcatgaccgatggattccagttcgagtatggcggccagggctccgaccctgccgatgtggccatccagctgaccttcctgcgcctgatgtccaccgaggcctcccagaacatcacctaccactgcaagaacagcgtggcctacatggaccagcagactggcaacctcaagaaggccctgctcctccagggctccaacgagatcgagatccgcgccgagggcaacagccgcttcacctacagcgtcactgtcgatggctgcacgagtcacaccggagcctggggcaagacagtgattgaatacaaaaccaccaagacctcccgcctgcccatcatcgatgtggcccccttggacgttggtgccccagaccaggaattcggcttcgacgttggccctgtctgcttcctgtaaactccctccatcccaacctggctccctcccacccaaccaactttccccccaacccggaaacagacaagcaacccaaactgaaccccctcaaaagccaaaaaatgggagacaatttcacatggactttggaaaatatttttttcctttgcattcatctctcaaacttagtttttatctttgaccaaccgaacatgaccaaaaaccaaaagtgcattcaaccttaccaaaaaaaaaaaa

SEQ ID NO: 80897 - DNA, 378 bp, Homo sapiens
  sig_peptide (34)...(169): this location contains the signal peptide sequence, MMHAPRGRAPSLVWWATEPALAALVLFRSVELGSRNVTTWPVGKK, Run with SignalP
  misc_feature (309)...(86): similar to gi2435526 in the genepept database release 114, Run with FASTXY 3.3t00, default parameters
cccttgtctatacctaggctaatgatgatgatgatgatgcatgcacccagggggcgggcccccagcctggtctggtgggccacagagccagccttggcggccttggtcttatttagatcagtagagctgggcagcagaaatgtcaccacttggcccgtggggaagaaaaggctgagaagattaaaggcatctctgatgagatgctaatttgtttcgggaagcaggcggggatggcagcaacctggggcctctggagctttgtgaagctgaggcaggaatggaaaaagcagcattggtggaggctgggctggatccctctgtgatcttttcccttctttaacctatctcctgggctctgtgcagcctcagttttgaggg

SEQ ID NO: 80898 - DNA, 5467 bp, Homo sapiens
  sig_peptide (3216)...(3351): this location contains the signal peptide sequence, MALLVPLALLVIQAHLVLSVQLERVVTEEKVALLALLVLPVLLVP, Run with SignalP
  misc_feature (103)...(4506): similar to gi30058 in the genepept database release 114, Run with FASTXY 3.3t00, default parameters
cgggcccggtgctgaagggcagggaacaacttgatggtgctactttgaactgcttttcttttctcctttttgcacaaagagtctcatgtctgatatttagacatgatgagctttgtgcaaaaggggagctggctacttctcgctctgcttcatcccactattattttggcacaacaggaagctgttgaaggaggatgttcccatcttggtcagtcctatgcggatagagatgtctggaagccagaaccatgccaaatatgtgtctgtgactcaggatccgttctctgcgatgacataatatgtgacgatcaagaattagactgccccaacccagaaattccatttggagaatgttgtgcagtttgcccacagcctccaactgctcctactcgccctcctaatggtcaaggacctcaaggccccaagggagatccaggccctcctggtattcctgggagaaatggtgaccctggtattccaggacaaccagggtcccctggttctcctggcccccctggaatctgtgaatcatgccctactggtcctcagaactattctccccagtatgattcatatgatgtcaagtcgggcggagtagcagtaggaggactcgcaggctatcctggaccagctggccccccaggcccccccggcccccctggtacatctggtcatcctggttcccctggatctccaggataccaaggaccccctggtgaacctgggcaagctggtccttcaggccctccaggacctcctggtgctataggtccatctggtcctgctggaaaagatggagaatcaggtagacccggacgacctggagaccgaggattgcctggacctccaggtatcaaaggtccagctgggatacctggattccctggtatgaaaggacacagaggcttcgatggacgaaatggagaaaagggtgaaacaggtgctcctggattaaagggtgaaaatggtcttccaggcgaaaatggagctcctggacccatgggtccaagaggggctcctggtgagcgaggacggccaggacttcctggggctgcaggtgctcggggtaatgacggtgctcgaggcagtgatggtcaaccaggccctcctggtcctcctggaactgccggattccctggatcccctggtgctaagggtgaagttggacctgcagggtctcctggttcaaatggtgcccctggacaaagaggagaacctggacctcagggacacgctggtgctcaaggtcctcctggccctcctgggattaatggtagtcctggtggtaaaggcgaaatgggtcccgctggcattcctggagctcctggactgatgggagcccggggtcctccaggaccagccggtgctaatggtgctcctggactgcgaggtggtgcaggtgagcctggtaagaatggtgccaaaggagagcccggaccacgtggtgaacgcggtgaggctggtattccaggtgttccaggagctaaaggcgaagatggcaaggatggatcacctggagaccctggtgcaaatgggcttccaggagctgcaggagaaaggggcgcccctgggttcccgaggacctgctggaccaaatggcatcccaggggagaaaggccctgctggagagcgcggtgctccaggccctgcaggccccagaggagctgctggagaacctggcagagatggcgtccctggaggtccaggaatgaggggcatgcccggaagtccaggaggaccaggaagtgatgggaaaccagggcctcccggaagtcaaggagaaagtggtcgaccaggacctcctgggccatctggtccccgaggtcagcctggtgtcatgggctttcccggtcctaaaggaaatgatggtgctcctggtaagaatggagaacgaggtggccctggaggacctggccctcaaggtcctcctggaaagaatggagaatacggacctcagggacccccagggcctactgggcccggtggtgacaaaggagacacaggaccccgtggtccacaaggattacaaggcttacctggtacaggtggtcctccaggagaaaatggaaaacctggagaaccaggcccaaagggtgaagccggtgcacctggagctccaggaggcaagggtgatgctggtgcccctggtgaacgtggacctcctggattggcaggggccccaggacttagaggtggagctggtccccctggtcccgaaggaggaaagggtgctgctggtcctcctgggccacctggtgctgctggtactcctggtctgcaaggaatgcctggagaaagaggaggtcttggaagtcctggtccaaagggtgacaagggtgaaccaggcggtccaggtgctgatggtgtcccagggaaagatggcccaaggggtcctactggtcctattggtcctcctggcccagctggccagcctggagataagggtgaaggtggtgcccccggacttccaggaatagctggccctcgtggtagccctggggagagaggtgaaactggccctccaggacctgctggtttccctggtgctcctggacagaatggtgaacctggtggtaaaggagaaagaggggctccgggtgagaaaggtgaaggaggccctcctggagttgcaggaccccctggaggttctggacctgctggtcctcctggtccccaaggtgtcaaaggtgaacgtggcagtcctggtggacctggtgctgctggcttccctggtgctcgtggtcttcctggtcctcctggtagtaatggtaacccaggccccccaggtcccagcggttctccaggcaaggatgggcccccaggtcctgcgggtaacactggtgctcctggcagccctggagtgtctggaccaaaaggtgatgctggccaaccaggagagaagggatcgcctggtgcccagggcccaccaggagctccaggcccacttgggattgctgggatcactggagcacggggtcttgcaggaccaccaggcatgccaggtcctaggggaagccctggccctcagggtgtcaagggtgaaagtgggaaaccaggagctaacggtctcagtggagaacgtggtccccctggaccccagggtcttcctggtctggctggtacagctggtgaacctggaagagatggaaaccctggatcagatggtcttccaggccgagatggatctcctggtggcaagggtgatcgtggtgaaaatggctctcctggtgcccctggcgctcctggtcatccaggcccacctggtcctgtcggtccagctggaaagagtggtgacagaggagaaagtggccctgctggccctgctggtgctcccggtcctgctggttcccgaggtgctcctggtcctcaaggcccacgtggtgacaaaggtgaaacaggtgaacgtggagctgctggcatcaaaggacatcgaggattccctggtaatccaggtgccccaggttctccaggccctgctggtcagcagggtgcaatcggcagtccaggacctgcaggccccagaggacctgttggacccagtggacctcctggcaaagatggaaccagtggacatccaggtcccattggaccaccagggcctcgaggtaacagaggtgaaagaggatctgagggctccccaggccacccagggcaaccaggccctcctggacctcctggtgcccctggtccttgctgtggtggtgttggagccgctgccattgctgggattggaggtgaaaaagctggcggttttgccccgtattatggagatgaaccaatggatttcaaaatcaacaccgatgagattatgacttcactcaagtctgttaatggacaaatagaaagcctcattagtcctgatggttctcgtaaaaaccccgctagaaactgcagagacctgaaattctgccatcctgaactcaagagtggagaatactgggttgaccctaaccaaggatgcaaattggatgctatcaaggtattctgtaatatggaaactggggaaacatgcataagtgccaatcctttgaatgttccacggaaacactggtggacagattctagtgctgagaagaaacacgtttggtttggagagtccatggatggtggttttcagtttagctacggcaatcctgaacttcctgaagatgtccttgatgtgcagctggcattccttcgacttctctccagccgagcttcccagaacatcacatatcactgcaaaaatagcattgcatacatggatcaggccagtggaaatgtaaagaaggccctgaagctgatggggtcaaatgaaggtgaattcaaggctgaaggaaatagcaaattcacctacacagttctggaggatggttgcacgaaacacactggggaatggagcaaaacagtctttgaatatcgaacacgcaaggctgtgagactacctattgtagatattgcaccctatgacattggtggtcctgatcaagaatttggtgtggacgttggccctgtttgctttttataaaccaaactctatctgaaatcccaacaaaaaaaatttaactccatatgtgttcctcttgttctaatcttgtcaacagtgcaaggtggaccgacaaaattccagttatttatttccaaaatgtttggaaacagtataatttgacaaagaaaaatgatacttctctttttttgctgttccaccaaatacaattcaaatgctttttgttttatttttttaccaattccaatttcaaaatgtctcaatggtgctataataaataaacttcaacactctttatgataacaacactgtgttatattctttgaatcctagcccatctgcagagcaatgactgtgctcaccagtaaaagataacctttctttctgaaatagtcaaatacgaaattagaaaagccctccctattttaactacctcaactggtcagaaacacagattgtattctatgagtcccagaagatgaaaaaaattttatacgttgataaaacttataaatttcattgattaatctcctggaagattggtttaaaaagaaaagtgtaatgcaagaatttaaagaaatatttttaaagccacaattattttaatattggatatcaactgcttgtaaaggtgctcctcttttttcttgtcattgctggtcaagattactaatatttgggaaggctttaaagacgcatgttatggtgctaatgtactttcacttttaaactctagatcagaattgttgacttgcattcagaacataaatgcacaaaatctgtacatgtctcccatcagaaagattcattggcatgccacaggggattctcctccttcatcctgtaaaggtcaacaataaaaaccaaattatggggctgcttttgtcacactagcataggagaatgtgttgaaatttaactttgtaagcttgtatgtggttgttgatcttttttttccttacagacaaccataataaaata

SEQ ID NO: 80899 - DNA, 1969 bp, Homo sapiens
  sig_peptide (614)...(749): this location contains the signal peptide sequence, MLVTRPSGNTWIPFFCWLLFCVVELLSPGNLGPSVLEVVLPDVFK, Run with SignalP
  misc_feature (750)...(37): similar to gi1658504 in the genepept database release 114, Run with FASTXY 3.3t00, default parameters
ttttttttttttagaaggcttgctgagcagggttgtagttgaaggtggatggcaggtgaggccgttcttctaatttgtcatattccagatggaactccttagctactttcctccagttaagacagtcaaagaagtaatatgttcccctctcataggtattggttttcattgttggctccatgcctggtgccctggtaatccatactcgttcttctttgtggtatctccaatcacggttaaaaagctccactgcagctaaaagttgtaatacgtctcctccattcatgtaatagagatagaagagaaggtcttcaccatatcggccaagttttattgcagccagctgaaaaagaaaaataacttatccctaatgtgaatgttcgttaagtactcagatggaacatggaagtctatgtcttgaggtcgacaaggtgaagatgcccagggtgacgcaaatttggggtagagattttcaggagagttcagattgaggcctaatgttgttaagtcacttcctaatgcaagatgtaccattcctgggtctgtctctgctgccctgataaatgttaacaggccaatcattccaaattggtccgtcaccatcccttgaggaatgttagtaacccgaccatcaggtaacacctggatcccttttttctgctggttattattttgtgttgttgaacttttatctccagggaatttgggtccatctgtacttgaagttgtcttgccagatgtattcaaattagatttactgtcatcattacttgatgttggatctttatagctggagcctggtaatgctggaaaatcttcattgtgtattgagaagtcctgggattgttcatttgctggttttgttaccattccaacataaggagctcttccagccaaggggtttattaatggagttgggttaccacttccttccctcctgtttcggtctgctaatgctgggaaatctgaaaggtccaatcctgtcacattttcacttccgtctgttccattaaaaatgttacttgataaggagttattcattccaaatgcctgattcctgttcattccaaatccagacatactgttcacagtaaaaggctgtcgagaaggctgctgctttggcatacatattatgcttggcgagcttctgttggggctacctaaccctgaactgctcatgctatttgtcctgctaggaattccaatgccctgaccaacctgggagtggttcatcatattcctaggattcataggcaaaatacccctgcttggagatggaggcggtgtgaaatgaacattgttggtacccctgttgttggcgtgaacgtggcctcggtaactgagtgccttgtgataagctgcgatttaactgaggggtattgttgctcatccccctcattggaaggcctagtgcactttgttgcccgtataaacttgccccaaactgagacagctgacctgatgtagatggtgatgccagcatatctttttctgaccgatgtggaaacatagaagactggctgtagtacatgttttcgtcatggtagtcactgtcgaccccctctacaaacttctttcttgaagcaccaaacatgctgtttgtcacctggtagtttcttttctcagataatgtatgtccatcagtcctcaccatagagtcgtgtcctttcctcacagtaccggaggcaatcaaatagaactgtcactcaagggtcgtgtcacaggaaggaccgcccaccacgtctccctcgcatgaattttcttgtcccgcggatccaagatggcgacgtatccaccgcggaggctgctgggagcaagacctttaccctctgaccgccgccgtgacccccgtcgctccggcttccctccaggcggcagcggaaggtgggagcgacgactgcaaaacggcagcgatggggtgggtaggcaggccgctttcagcgcgcttctaacaaggtggagagaggcg

SEQ ID NO: 80900 - DNA, 1424 bp, Homo sapiens
  sig_peptide (343)...(478): this location contains the signal peptide sequence, MWSLRARAIWMSFCLWSELGLDGSEDLAEPGRNGRKRAQAKQGCE, Run with SignalP
  misc_feature (458)...(176): similar to gi3925198 in the genepept database release 114, Run with FASTXY 3.3t00, default parameters
gggattacaggtgtgagccactgtgcctggccttcgctaatctttgattgctttttgatgcttcaagctgaaaaaattattccttcatagacatgaaaaatattttattcattatattatgtgaaatatatatcaaaaaggtatcaaactgctgggccacatggcgtgattgccgacaagaatagcaactgtgttgggccttggtcctgagggaacacatgacaatgagaagtggctcttttcccctggctggagaagtgacaaataacaggatccaggagcagatgttaagtgctgatgatgaggtagagcagatagtcatttgtggcaggaattgatggcatgtggtccctgagagccagggccatctggatgtctttctgtttgtggagtgagctgggtctggatggaagtgaagacttggctgagccagggaggaatggcaggaagagggcacaggccaagcaggggtgtgaactgcgagagcatgaagcagttgctggagcaggagctgaggcctccttatggatgaatgggaggtgcgtttggaagcaagatgccactattggagtgacgtgggccttgaatgccagactgagcattgccagccagacggaatatcaccatcatcataatctaatcatagtcatccagttgtgaggtcatctgatactggcaatgggtacacaaaatattaaataggatatttatttctaagccaaatttcagaaaacaatttacaaactttttttaaagtataaacatagtgcacgcttactataaaaggaaaagtataaaacattactcaagtatatatagaaaatgagtgggctgctgacccccctctatattatctattgctgtgtgacagtattaccacaaatacagtagctgaaacaacacatttgttttctcacagtttctgtgggtgaggagttcaagcatagcttggtcctctgcaagcttacaatccaagggttggctcaggctgtattctcatctgagcactctactggggagggtttcaggcttacctgatggttggcggcattcagtccttctagactgtcagactgagggccttggtttttgctggtgcactcagttccttgcttcatatagagtagctcacaatgtagcagcttgtttcactaagacagcaaggaagagtgtttcctagtaagacagacactgtagtcttacctaatacaatcatgaaagtgacatactgtctccttcgccatattctgttagagacaggttacagctttgcccagtggcagtatcctagccaatgaggtttatctgaggcatgattattaaaataattgaaaattttcccaatacaccaaagtgacaacttacaacataggttggcaatggcaatttttgacatgtctacaaagactgaattaaaaaaaaaa

SEQ ID NO: 80901 - DNA, 3690 bp, Homo sapiens
  sig_peptide (3062)...(2927): this location contains the signal peptide sequence, MMLLVSLHILFPFMPFSYGLESNNSKPQCLMKLTLQNLQKQVAFE, Run with SignalP
  misc_feature (1007)...(1932): similar to gi534876 in the genepept database release 114, Run with FASTXY 3.3t00, default parameters
gatataaaccaggcattcgagctggcaacggcaaccccatttgggttccctccctttgtatgggagctctgttttcactctattaaatcttggaactgcactcttctggtctgtgtttgttatggctcgagctgagctttcgctcaccgtccaccactgctgtttgccaccgttgcagacccatcgctgacttccacccctccagatatggcagggtgtccgctgcgtttctgatatagcaaggcgcccattgccgctcccaatcgggctaaaggctcgccattgttcctgcatggctaagtgcccgggttcgtcctaatccagctgaacactagtcagtgggttccacggttctcttccatgacccacggcttctaatagagctataacactcaccatgtggcccaaggttccattccttggaatgtgtgaggccaagaaccccaggtgagagaacaaaaggcttgccaccaccttgggagcagcccgccaccatcttgggagctctaagaacaaagacccgccgggccttagaactgatgacccagtactttaacaactggaactgggtctacaacaacataacagatcaggatgaaagcgaattgactgggttgttaggaaatactcaagaactcagcccagctctagaactcacctctgagcatgaaggcaatgttgggcacgctggtaaaggaccactagaatccagcagctcggacccctttctttgtgctcgggaaaaggggtgcaggactgctacatcgcccatctcagtggtcgcggaaggtgacgtggacacggaagtggtcgtcgtcgcggcaccggtgggagctaggcgcgaggctcggagtgcggccagcgggcggaggcggtctcgcatcggcggcgacggagggctcaggcgtcgtcgtttgggtggggggccgctgaactgacaagcgacatttcagctcctttcacccgccggaaccccggagccggggcccgctcagccggcgttaccatgaccaaggccggtagcaagggcgggaacctccgcgacaagctggacggcaacgaactggacctgagcctcagcgacctgaatgaggtcccggtgaaggagctggctgcccttccaaaggccaccatcctggatctgtcttgtaataaactgactactctaccgtcggatttctgtggcctcacacacctggtgaagctagacctgagtaagaacaagctgcagcagctgccagcagactttggccgtctggtcaacctccagcacctggatctcctcaacaacaagctggtcaccttgcctgtcagctttgctcagctcaagaacctgaagtggttggacctgaaggataaccccctggatcctgtcctggccaaggtggcaggtgactgcttggatgagaagcagtgtaagcagtgtgcaaacaaggtgttacagcacatgaaggccgtgcaggcagatcaggagcgggagaggcagcggcggctggaagtagaacgtgaggcagagaagaagcgtgaggctaagcagcgagctaaggaagctcaggagcgggaactgcggaagcgggagaaggcggaagagaaggagcgccggagaaaggagtatgatgccctcaaagcagccaagcgggagcaggagaagaaacctaagaaggaagcaaatcaggccccgaaatctaagtctggctcccgtccccgcaagccaccaccccggaagcacactcgttcctgggctgtgctgaagctgctgctgctgctgctgctatttggtgtggcgggaggggctggttgcttgtcgggtgacagagctgcagcagcagcccctctgcaccagcgtgaacaccatctatgacaatgcggtccagggtctacgccgccatgagatcctccagtgggtcctccagaccgactctcagcagtgagcttgtccccagcacctgctgcctcccagccttggagtttggattcctatggaattgggttctgctggacacaacctctttttagcatcagacctacctgccatcatcaaatggctgcagattggtacatgagacctcctctttgtaggacttcttcattccttagtcagggttccctgaaggaatgaggagaaatgggaggtggcgggggggcgtggggggcagttacctgcatgcctaaaggagtaggcttgggggtggggagagagaaaacatagccttttctagttgttatataaagctgtgtaaaggcaaggctcgtttctactaaatggtcagctgtcactacatttatacttttgtatgccacaaaccctttcattcctccctgggaatcagggtagatcaggaggaactgggggggactagaacaccacgctcagtaaatccagtctaaactgggaggtaggggtattcctgttttctttaggacctcagagatgtaagcattttagcagccacacaaaatctctggctatgaaagggacttcatgaccatccagtccaatataacacttgcagacagagaaactgaggtcttccatgacttgcctagtctcccagctagtttgaggcaaaactggattcccactctggtattctttcttccctttacatcattttccctcctttataatgtcctgagagaccagaactcacaccagaatcgattattcctcaggtgaagcatagactctttcatggtagacagatttcacgactcagagatagaaatctcttgctatcatcaggtcacgggcagctcctgtggagtcctgcccaacttatgtggcttccataaaatggcaacagtccaggctccttgcctaattttagagcattaactccctaattgccagtaagcaaggaggtggatctctgcaaacctacactgtctatgacagctctagttgtacttggtgtgactaaatacctcaaaggcaacctgcttctgcaggttttgaagtgtcagcttcataagacactgaggtttagaattgtttgattctagaccataactgaagggcataaatggaaacaggatatgaagggaaacaagtagcatcatggagctgaaaagtggtgcatcacccaatggctagcacaaacaaggatcacactgtccattctcttgtctgctaaattaagcattttcttgcctcctttgcttcatcttttcacaacagctggatagagggatcagaaatgactgtgtcatggtgctcattcactgcaaactcccagttgcaagctccttggctcccccggagggagcaagaatctcatagttcagagacacagagggccttttagccctaatgaccttttggatgggactgcaactcatgactatcctgatattggaagaaaggactttgttaatcttctcccccatagctctgctgcgtaggtctacatcttactcagaatcactacacattcctttagtcttcctccaagctccagagccattggtacaaatgctttattgaaactaaatacataatacacacaatgagatgaagacaatatagaagtccgcatagtcatcataatcccgttccttggccggttgaggcagctcagtggctgagcccagtcaagccaacccgcagcttcactcacgacttcaagatttgatgctaattcttttggatttctacagttattaaataagtgtctgagtggaaaaaaaaaa

SEQ ID NO: 80902 - DNA, 366 bp, Homo sapiens
  sig_peptide (128)...(263): this location contains the signal peptide sequence, MGAADCLGVQSQSCGKWSSCLLSLLLGGATGLVGGSGWSHQLSEM, Run with SignalP
  misc_feature (244)...(104): similar to gi5917734 in the genepept database release 114, Run with FASTXY 3.3t00, default parameters
gagctttacatattcagaaccagttaaacaggagagcggagttttattattactcaaatcagcctccctaaaaatttggaggctagagtttttcaaaaatagttgggaggaggcaggtggctggggaatgggagctgctgattgtttgggggtacaatcacagagctgtggaaaatggtcttcctgtttgctgagtctgcttctaggtggggccacaggacttgttggtggatctgggtggagccatcagttgtcagaaatgcataaacctgacaagacatctcaaaagtccattcttaggttctaacaatagtggtgttatctgcaggagtggatggagaagctgcacatattgagacctctgcg

SEQ ID NO: 80903 - DNA, 363 bp, Homo sapiens
  sig_peptide (136)...(271): this location contains the signal peptide sequence, MDEASVLKGSSRGYLSVINLTYILTAVIIFVRLIWVFISDYYTMV, Run with SignalP
  misc_feature (175)...(330): similar to gi2760650 in the genepept database release 114, Run with FASTXY 3.3t00, default parameters
ctttcataagtgcacagaaaatggtggattgagcacaggagcaggtttagggtgatacgggcctccatgaacttttctttatactcatgagccttagcttttgctgtgtatataaatatcctttcaatgggaaacatggatgaggcttcagttttaaaaggtagctccagaggatacttgtcagtcataaatcttacttatattttgactgcagtcattatttttgttaggctaatatgggtatttatttcggattactatactatggttataatggaattgataaaacgtttaccaggttacctggcgttctttttctgagaagcaaaaatattccctcgttctttgaagcgctgtaaaggg

SEQ ID NO: 80904 - DNA, 533 bp, Homo sapiens
  misc_feature (1)...(533): n = a,t,c or g
  sig_peptide (257)...(392): this location contains the signal peptide sequence, MNDIPVVLVRELISLLWLLFSTCVFTKDILLGHILMLFLPWYLSA, Run with SignalP
  misc_feature (296)...(399): similar to gi5921471 in the genepept database release 114, Run with FASTXY 3.3t00, default parameters
ccccaagagggtcaaaagaatttgagacaaagttttctaactgcagcagtttaacctgtaaaggataatgtttagcgggggaaattatgtggtccactcaataacgtgtgactaagatataaataacgtgtgactaagatatgaacttaagtataaatacttaagtttatttaatcacattacctaagacatagttatgttgtgactcgaaggccaatgggccgctgctacatgaattcattaacaaaatttaacgatgaatgatattcccgttgttttggtcagggaactaatttctttattatggcttcttttctctacctgtgtcttcaccaaggacattttgttaggacatatccttatgctatttttaccttggtatctctctgccaacttggttcacgttgtgctttaataactataaaatgagcatctctaagtcactgcagtaaccaactataacctctcacttcngtcatttcttaataatgccatgctatgcatttgagaacgtttacatttacaacagctgt

SEQ ID NO: 80905 - DNA, 3878 bp, Homo sapiens
  misc_feature (1)...(3878): n = a,t,c or g
  sig_peptide (1712)...(1577): this location contains the signal peptide sequence, MASICSWRVMLAWAACWVRAHAALSGHPRSTFSLWLSGISLPXPI, Run with SignalP
  misc_feature (99)...(2537): similar to gi899298 in the genepept database release 114, Run with FASTXY 3.3t00, default parameters
tcttgcgagctcgtcgtactgaccgagcggggaggctgtcttgaggcggcaccgctcaccgacaccgaggcggactggcagccctgagcgtcgcagtcatgccggccggacccgtgcaggcggtgcccccgccgccgcccgtgcccacggagcccaaacagcccacagaagaagaagcatcttcaaaggaggattctgcaccttctaagccagttgtggggattatttaccctcctccagaggtcagaaatattgttgacaagactgccagctttgtggccagaaacgggcctgaatttgaagctaggatccgacagaacgagatcaacaaccccaagttcaactttctgaaccccaatgacccttaccatgcctactaccgccacaaggtcagcgagttcaaggaagggaaggctcaggagccgtccgccgccatccccaaggtcatgcagcagcagcagcagaccacccagcagcagctgccccagaaggtccaagcccaagtaatccaagagaccatcgtgcccaaagagcctcctcctgagtttgagttcattgctgatcctccctctatctcagccttcgacttggatgtggtgaagctgacggctcaatttgtggccaggaatgggcgccagtttctgacccagctgatgcagaaagagcagcgcaactaccagtttgactttctccgcccacagcacagcctcttcaactacttcacgaagctagtggaacagtacaccaagatctttgattccacccaaaggtttattttcaaagctcaagaaagaggctgaaaaacccccgagaagttttggatcaggtgtgtttaaccgagtggaatgggccaaattccaggaacgtgagaggaagaaggaagaagaggagaaggagaaggagcgggtggcctatgctcagatcgactggcatgattttgtggtggtggaaacagtggacttccaacccaatgagcaagggaactttccctcccccaaccacgccagaggagctgggggcccgaatcctcattcaggagcgctatgaaaagtttggggagagtgaggaagttgagatggaggtcgagtctgatgaggaggatgacaaacaggagaaggcggaggagcctccttcccagctggaccaggacacccaagtacaagatatggatgagggttcagatgatgaagaagaagggcagaaagtgcccccacccccaagagacacccatgcctccaactctgcccccaactccagaccaagtcattgtccgcaaggattatgatcccaaagcctccaagcccttgcctccagcccctgctccagatgagtatcttgtgtcccccattactggggagaagatccccgccagcaaaatgcaggaacacatgcgcattggacttcttgaccctcgctggctggagcagcgggatcgctccatccgtgagaagcagagcgatgatgaggtgtacggcaccagggtctgggatattgagagcagctttgaagcagttgggtgagcgggcgtacttgacatctttcggtgttaggagggaaacagccattggtaagaagatcggttnagggagggagatcccagaaagccagagggaaaaggttgacctgggatggccactcagggcagcatgggcccggacccagcaggctgcccaggccaacatcaccctccaggagcagattgaggccattcacaaggccaaaggcctggtgccagaggagtgacactaaagagaagattggccccagcaagcccaatgaaatccctcaacagccaccgccaccatcttcagccaccaacatccccagctcggctccacccatcacttcagtgccccgaccacccacaatgccacctccagttcgtactacagttgtctccgcagtacccgtcatgccccggcccccaatggcatctgtggtccggctgcccccagggttcagtgatcgcccccatgccgcccatcatccacgggcccagaattcaacgtgggtgcccatggccttccctgggcccttcctatttatgggccccccgtccaccccccatgattgtgccaacagccttttgtgcctgctcccaccttgtggcacctgtcccagctccagccccaatgccccctgtgcatcccccacctccaatggaagattgagcccacctccaaaaaactgaaggcaagaggacaggcttcagccagaaggagaagttcctggcgcagaaacaagggtccagtgtccatcaaagtccagggtgccccaacatgcaggataagacggaatggaaactgaatggggcaggtgctggtcttcaccctcccacttcacggaccagggtctttgttcatttaaggttgaagatttcatggaagccacaggcatgccgtcagggtaaacagaaggctacaggtatgaggggtatcttcatcaaagattccaactcactgagcttactacaaccatgggccaatggcgcagtcatccacctggccctcaaggagagaggcgggaggaagaagtagacaagaggaacctgctgtcaagtccctgccattttgcctctcctgtctcccaccccctgccccagacccaggagcccccctgaggctttgccttgcctgcatatttgtttcgctcttactcagtttgggaattcaaattgtcctgcagaggttcattcccctgaccctttccccacattggtaagagtagctgggttttctaagccactctctggaatctctttgtgttagggtctcgatttgaggacattcatttcttcagcagcccattagcaactgagagcccagggatgtcctacaggatagtttcatagtgacaggtggcacttggctaatagaatatggctgatattgtcattaatcattttgtaccttgacatgggttgtctaataaaactcggacccttcttgtgaaatcagttaaataagacttgtctcggtcacctgtgccctgtccagactcgaggcagtggtaacactgcacagtgctatgtggcttctctttgaggatttttgggttttgtaactaaattcttgctgccctcatactttttatgtattagaatcatattcgtattgcccttttaaaacattgggatcctccaaaggcctgccccatgtatttaacagtaatacaggaagcatggcaggcaccatgcaaaccaaggatggatggtgcagtccctgtgtcagtgggcggtggtttcctgctggcctggaatcactcatcacctgattgattggctctgtggtcctgggcaggtgcctcataggtgtgtggatatgatgacgtttctttaaaatgtatgtatttaacaaatacttaattgtattaaggtcatgtaccaaggatttgataaagtttaaataatttactctctacttttatccattttatccattttaactcatgtaatcctcatgtgagtattcctgtttaacacttgagtaaactgaggcacagagaacataagttgcatgccatagtcacacactgtgaaagtgaaaagagaatgtgtgcaaaacacgtcacagtcctggtttctgagtaaaggcaggctgttatctttagaatcaagctatcacagggagataggcaatgctgtgggtgttggaggaaggtgagagcctgttgctaacaatttcctggttttaaagctaaggctgattttattgggaagatctcacatgtgtgtggcccctgagagttcccagtgccttttatttgcagtccttccatttggacctcctagctgccccatcaggtcatctccagggctcagaggggtgagaccatttcccaaggttcacaggaaccagcttttttagttcaccaccctg

SEQ ID NO: 80906 - DNA, 2629 bp, Homo sapiens; identical to SEQ ID NO: 60269
  sig_peptide (1463)...(1328): this location contains the signal peptide sequence, MLLFVVLAEMVAAIQETVATHDPLLLDEALETNSGSAVGVHHQLH, Run with SignalP
  misc_feature (1171)...(1865): similar to gi3916230 in the genepept database release 114, Run with FASTXY 3.3t00, default parameters

SEQ ID NO: 80907 - DNA, 1587 bp, Homo sapiens
  sig_peptide (614)...(749): this location contains the signal peptide sequence, MCVSVRVCVCVCVCARVCARLCVCVHARLCVHVRVSARVSVYVCT, Run with SignalP
  misc_feature (392)...(771): similar to gi854065 in the genepept database release 114, Run with FASTXY 3.3t00, default parameters
gacaaagctgtgggcaagaggtcagcaggacccgcctgggggtgccggcgttggtgactgcgggtcggggctcctagaacataggagccggctgcctggcctcctttctcctccaggaagagtcattctttggcatttgtgtttagagccaggaggaaggcggaaggtagggagggagggctggtccccctctgagggggctctagtgcctgaccctgacctgtcctcattcgacagctgaaactgttaagcgctggcccagtccccccaccccacccagccgtgtactgcctgggctcccctcaaagggaaatttttacggaaacatcttggcagcaagtggaaaaagatctatggcccatgaaccaactgaaaactccaagaaccctctgtctgcctctgccagcagcgagtcctaagcgcagaatccagagctcgtagctgtcctcagctgtaactactgtttcagaatgttgctgctgcatacatttgtcatgtcagccagccagctccgtgggtgagagtgtgcgtgtgcgcgtgtctgtgtgtatgtgcgtctgtgtgtgcatgtctgtgtgtgtgcacgtctgtgcgtctgtgtgcgcgtctgtgcatgtgtgtgtctgtgcgtgtgtgcgtctgtgtgtgcgtctgtgcgcgtgtgtgtgcgcgtctgtgtgtatgtgtgcacgcgcgtctgtgtgtgcacgtgcgtgtctctgcacgcgtgtctgtgtatgtgtgcacgcgtgtgtctgtgtgtgtgcacgcgcgtgcacgtcaccaccggagcatttagggtttggtacaagatggttctaaaatggcaaaggtttttcgtgtttgtttgttttgtttctttggaaaaagaaaaggaaaggaaaatcatgcagaatcgcaagcattcagactggacgaccggctcgtattccgatcagtcgcttccattgttagcatcgtacacgattgtgatttttatgtcaaaagaagccaaaacttgcaatactatttttagcagacaaaaaaaagaactaagtataaaatgtataaatatttttgacttgaacatttggatggcactgggtgcaagtagagcatccatccttcggatggaatgtttggaaaaaagagacttttaaaaaggagacggttgttttaaagagtctgtttaggggttaaagtactgtaactcacgactgttaaaaaataaattttcctgtgctgtaaaggaaggtttcacagtaccactgagttagatttcagccacagatgcttagctttttttttttgccttttttttaaggaggaagcctttgttttgttttcctgagccctcactctgtttttgtgctgttactcggtagagtcaagactgttactttttagccatggctgacattgtatcaataactaaaactgaaacattcaaaagcgaacagggaaaccgagggcttcaagcgtgctcagagccgtttcagacagtggaaatccatgacaaacaaaaggatgtgatcattaattgtaaagcgctttgtaaaattcacatttacaaaataataaagtcagttcaaacctaaaaaaaaaaaa

SEQ ID NO: 80908 - DNA, 886 bp, Homo sapiens
  sig_peptide (70)...(205): this location contains the signal peptide sequence, MGWTMRLVTAALLLGLMMVVTGDEDENSPCAHEALLDEDTLFCQG, Run with SignalP
  misc_feature (304)...(700): similar to gi510339 in the genepept database release 114, Run with FASTXY 3.3t00, default parameters
gtggactggattagctgcggagccctggaagctgcctgtccttctccctgtgcttaaccagaggtgcccatgggttggacaatgaggctggtcacagcagcactgttactgggtctcatgatggtggtcactggagacgaggatgagaacagcccgtgtgcccatgaggccctcttggacgaggacaccctcttttgccagggccttgaagttttctacccagagttggggaacattggctgcaaggttgttcctgattgtaacaactacagacagaagatcacctcctggatggagccgatagtcaagttcccgggggccgtggacggcgcaacctatatcctggtgatggtggatccagatgcccctagcagagcagaacccagacagagattctggagacattggctggtaacagatatcaagggcgccgacctgaaggaagggaagattcagggccaggagttatcagccctaccaggctccctcccccaccggcacacagtggccttccatcgctaccaagttctttgtctatcttcaggaagggaaaagtcatctctctccttcccaaggaaaacaaaactcgaggctcttggaaaatggacagatttctgaaccgtttccacctgggcgaacctgaagcaagcacccagttcatgacccagaactaccaggactcaccaaccctccaggctcccagagaaagggccagcgagcccaagcacaaaaaccaggcggagatagctgcctgctagatagccggctttgccatccgggcatgtggccacactgcccaccaccgacgatgtgggtatggaaccccctctggatacagaaccccttcttttccaaataaaaaaaaaatcatccaggaaaaaaaaaa

SEQ ID NO: 80909 - DNA, 4195 bp, Homo sapiens
  sig_peptide (3917)...(4052): this location contains the signal peptide sequence, MFRRLTFAQLLFATVLGIAGGVYIFQPVFEQYAKDQKELKEKMQL, Run with SignalP
  misc_feature (716)...(835): similar to gi1171614 in the genepept database release 114, Run with FASTXY 3.3t00, default parameters
agaaagtaacagtgacttctagatttctgggttgggtcatcttgttggatagtagtaccactgagatagggaattcaaggtttggggcaagggtaattggagatgagaattgtgtttggaggtaactactgacattcaagtggagagggttagttggcagttagttctatggtcatctcttttgccgagactgtatatttatcagactcctgggagaacaccaacatccatggggttgtagggaaggctaaggacaggagtggggagtggtaccttgaaaatccaaaagccatctcaagtaaaaggaataaatgtgtcatgctttttaaaaagttgatgtgcggaaaatgttttcttggcttggaaactgggcggcccaggggatgacagtatggacttccagtgaagtagtgacggaagcctgatcatagacattaaggaaagcggtgtaggtgttgtgagcttttgctgtaagaaaaagttgagacttttgttttgctttgtttgtgagagatgtgtatgtatttctgctgagtgataaagccagcggggagggactgatttttataggaaaggaggaaaaataatggaaacacatctcattattttattgtcacatttcttttctttgttatcttttgagtgtttcccttttttgccagtagagttattgtctattttttctttctataggacaaaaaaactaatacagactcctttatttttatatggatatactaggattgtaattcagatatttaatatcttttatcagtgttcagaatcatagattaatggagaaaacatttaaaattgttttaaatttaaatacattgaactctaacatagatgaaaaatgtgtttactgctttttatcaggtcgactgaaagcaacgtatggtaaatattgaaaactccaggcatcgaaaacaagagcagaagcaccttcagccacagccttataaaagggaaggtaaatggcataaatatggtcgcactaatggaagacaaatggcaaatcttgaaatagaattggggcaattaccttttgatcctcaatactgattcacaattgagttaaattagacaactgtaagagaaaaatttatgctttgtataatgtttggtattgaaactaatgaaattaccaagatgacaatgtcttttcttttgtttctaagtatcagtttgataactttatattattcctcagaagcattagttaaaagtctactaacctgcattttcctgtagtttagcttcgttgaattttttttgacactggaaatgttcaactgtagttttattaaggaagccaggcatgcaacagattttgtgcatgaaatgagacttcctttcagtgtaagagcttaaagcaagctcagtcatacatgacaaagtgtaattaacactgatgtttgtgttaaatttgcagcagagcttgagaaaagtacattgttctggaatttcatcattaacattttataatcttacactcacttcttgtctttttgtgggttcaagagccctctgacttgtgaagaatttgctgccctcttaagagcttgctgacttgttttcttgtgaaattttttgcacatctgaatatcgtggaagaaacaataaaactacaccatgaggaaaactaaaggtctttatttaaaatctggcattgtattaacatgtaattttatactatgtggtattttatacatttcctcagtagtgatatttggtaaagcagttcatacagcttttttctaagttccatgaatcttacccagtgtttaccgaagtatttaagcagcatctgaatatttccacccagcaatgttaatttatctaggaaagttcagaatttcatcttcatgttgaatttcccttttaacttccgttcatagacatatatgtgacttccaattcgaccctctggcaagtgagtgtggaagaaaacagcagttcttttataattgcttgaaattaggaaagcgcttatttcctcttccaaaatgctcgaaggtgatcaagtgaagtagggcaatgatgcatcatcatgaaactctctatgtaaccagtttaagggatttaggtaaaatacatctgcttcatcaagataatgactttttccagtcaggtctggcgggcactggagaaatctcatgggaagtgggcagtgaacatcgctgtaataatgagtagagtggcaacgcatcattataaatattgaagctgaagattaatcggggatgggtgaacaaactttttgaatatgactcatgacatcaagagtacctcgttgatgaactaaaccagtataaagggcgaggaacaaatttgataaaaacaggaaacttagagctggtttcttccatgttttcaggtgggttaatgagtatccacagaacaccatacagaatggtaaaactggataaataaacctgaattctttgtggctcaacatgctataaacaagcagtgtccacagcacagtcaccaaaagtatccggtatctctttggtgctagatagcagccatgaataaagaagggtaagtgagtacccaagataactggaaatccttgactgaagtaccagtgccatggatgagaaccataaaatgttccccagttctgcagcacgttaaatttcaaaaaattaaattgaaccagagtccattggccaaaaaaaaatacgatcaatcatcagagacaaactcaaagtaacaaagcctacaggtaaaaaatgatgtagaataagatcaagctttcttggttcttgacagaaatgtctgaagagcaaaggtgtccacagaatgacagctgtgggacgaattatgaaggcaagtgccaccagggatgagtatttgacactgttcatagactttgaaccttccaaaggatagtagaaaagagcaattatagtgagaacagtttccatggtgtttgtaagggttctggtacagcaataccatgtgaaccaggagcacaactggcaaaaaaacacccatcttgccacttcctgattttctagttgcttcattaatgagtaaagtctcacatctgctacagcagacagaagtgcttgggcaagtctaggaatccaaatcagcaactgaacactatctttccctaaaagatgaagaatcttgtaaatgcttgcaaagattaagggataagtgtaactcctcagtctctctgtccattcccaagtcaaataaccataattgaaaaccatgtgatgtgaaacttcaagagactgccagtattcatctggaacaaaacttgtctgcactaaaaagcagtttaatattcgtaaagctatggtaaacaagagcagataaatattttctccaagaagatccccgcggcgcctggcgctcttctcctgggtgttgaagtacaaggtagactttctctttcgcagctttatcttgccgtgggagcggttctggagaccatgcaaagtgaggctggcatctccgccccccggctccattccgcacttgcttaggggcctcctcatccctggccgccaccttcctaaggcggaagaaagctgcagtagcgcgctgctcgtccatccattaagtttggcctttgagagcagtcgtcgctcgcaagcccggaagtaaccgggaacgggcaacttcgtagctcccacccgacgtggtggcctccttgcggtttcctttcgccgtttccgaaccgagggattgctactcgcctttggcttggcggtctctgtgctcgggggtccgaaaactgctggaaggcccccggtctctggaggggagcaggcggtagcgagtttagtgacgtggagcaggcgcagaacagtcggagatttgaagagatttcctgggtgtggagtgtgactttccaaaaccagcttttccttgagctgtatttgttgcagcaatgtttaggagattgacttttgcacaactgctttttgccactgtccttggaattgctggaggagtatatatttttcaaccagtatttgaacagtatgccaaagatcagaaggaattaaaagaaaagatgcagttggtacaagaatcagaagagaagaaaagttaatactacatggagttaggcctggcgcagtggctcacgcctgtaatcccagcactttgggaggccgaggcgggtggatcaagtggtcaggagttcaagaccagcctgaccaacatg

SEQ ID NO: 80910 - DNA, 387 bp, Homo sapiens
  sig_peptide (88)...(223): this location contains the signal peptide sequence, MQVSGPRPQLFLPSVFFVLLFSYTFTETTQWTVVILALNSKLSFK, Run with SignalP
  misc_feature (40)...(149): similar to gi289128 in the genepept database release 114, Run with FASTXY 3.3t00, default parameters
gatgattgctgtagggtttcaccacgggcaactctaacttgtcacagtcaatccacaccttgtcagcatttaaccgcctcacacagaatgcaggtatctggcccgaggccacagctgttcctgccctctgtgttctttgtgctgttattctcatatactttcacagaaaccacacaatggactgttgtgattttggctttaaacagtaagttatcttttaaagagattgaaacaattttttagtcttttagtcttttatccttccctctaccatttctgatgggcttcattcctttgtggggacctgagtttccacccggcatcatctttctcctgtgtgaataacttcctttagcagttgttatagaacagatgtcgacgcggccg

SEQ ID NO: 80911 - DNA, 525 bp, Homo sapiens
  sig_peptide (195)...(330): this location contains the signal peptide sequence, MCCWIQSVNILLMILILIPKFMSEISANLKIIYDNIYKYILFFFL, Run with SignalP
  misc_feature (303)...(377): similar to gi2696021 in the genepept database release 114, Run with FASTXY 3.3t00, default parameters
accacattaaggaatttactaagttttacattataaatgggtatgaattgtatcaaatgcaatctactgaaatgatttcatagtttttttcctttaatttggtgactcaaattttgcgttttcctagagttagaccattttcagtatttctgggataaacccaatttggtcaaggtatatctctttttaaagaaatgtgctgctggattcagtctgttaacattttgcttatgattttgattttgatacctaagttcatgagtgagattagtgctaacttaaaaattatatatgacaacatatataaatatatattatttttctttctcataatgtctggttttgttttaaagtttatacccgtctcaaggaattaactggtatgtcattccttattctaatgtctggaagtctgtttatattaggatgaggtatttctcaaaagtttgtagaattcacacttgcaaaatcaacagaccttgttgtaatctttgtgagaagatttttttaaaaactctcgtgccg

SEQ ID NO: 80912 - DNA, 4965 bp, Homo sapiens
  sig_peptide (221)...(356): this location contains the signal peptide sequence, MTMYLWLKLLAFGFAFLDTEVFVTGQSPTPSPTDAYLNASETTTL, Run with SignalP
  misc_feature (227)...(3663): similar to gi34276 in the genepept database release 114, Run with FASTXY 3.3t00, default parameters
ctgacttagaacaacttttttgacttcctgcagggaggacccttacagtatttttggagaagttagtaaaaccgaatctgacatcatcacctagcagttcatgcagctagcaagtggtttgttcttagggtaacagaggaggaaattgttcctcgtctgataagacaacagtggagaaaggacgcatgctgtttcttagggacacggctgacttccagatatgaccatgtatttgtggcttaaactcttggcatttggctttgcctttctggacacagaagtatttgtgacagggcaaagcccaacaccttcccccactgatgcctaccttaatgcctctgaaacaaccactctgagcccttctggaagcgctgtcatttcaaccacaacaatagctactactccatctaagccaacatgtgatgaaaaatatgcaaacatcactgtggattacttatataacaaggaaactaaattatttacagcaaagctaaatgttaatgagaatgtggaatgtggaaacaatacttgcacaaacaatgaggtgcataaccttacagaatgtaaaaatgcgtctgtttccatatctcataattcatgtactgctcctgataagacattaatattagatgtgccaccaggggttgaaaagtttcagttacatgattgtacacaagttgaaaaagcagatactactatttgtttaaaatggaaaaatattgaaacctttacttgtgatacacagaatattacctacagatttcagtgtggtaatatgatatttgataataaagaaattaaattagaaaaccttgaacccgaacatgagtataagtgtgactcagaaatactctataataaccacaagtttactaacgcaagtaaaattattaaaacagattttgggagtccaggagagcctcagattattttttgtagaagtgaagctgcacatcaaggagtaattacctggaatccccctcaaagatcatttcataattttaccctctgttatataaaagagacagaaaaagattgcctcaatctggataaaaacctgatcaaatatgatttgcaaaatttaaaaccttatacgaaatatgttttatcattacatgcctacatcattgcaaaagtgcaacgtaatggaagtgctgcaatgtgtcatttcacaactaaaagtgctcctccaagccaggtctggaacatgactgtctccatgacatcagataatagtatgcatgtcaagtgtaggcctcccagggaccgtaatggcccccatgaacgttaccatttggaagttgaagctggaaatactctggttagaaatgagtcgcataagaattgcgatttccgtgtaaaagatcttcaatattcaacagactacacttttaaggcctattttcacaatggagactatcctggagaaccctttattttacatcattcaacatcttataattctaaggcactgatagcatttctggcatttctgattattgtgacatcaatagccctgcttgttgttctctacaaaatctatgatctacataagaaaagatcctgcaatttagatgaacagcaggagcttgttgaaagggatgatgaaaaacaactgatgaatgtggagccaatccatgcagatattttgttggaaacttataagaggaagattgctgatgaaggaagactttttctggctgaatttcagagcatcccgcgggtgttcagcaagtttcctataaaggaagctcgaaagccctttaaccagaataaaaaccgttatgttgacattcttccttatgattataaccgtgttgaactctctgagataaacggagatgcagggtcaaactacataaatgccagctatattgatggtttcaaagaacccaggaaatacattgctgcacaaggtcccagggatgaaactgttgatgatttctggaggatgatttgggaacagaaagccacagttattgtcatggtcactcgatgtgaagaaggaaacaggaacaagtgtgcagaatactggccgtcaatggaagagggcactcgggcttttggagagtgttgttgtaaagatctaaccaagcacaaaagatgtcctagattacatcattcagaaattgaacattgtaaataaaaaagaaaaagcaactggaagagaggtgactcacattcagttcaccagctggccagaccacggggtgcctgaggatcctcacttgctcctcaaactgagaaggagagtgaatgccttcagcaatttcttcagtggtcccattgtggtgcactgcagtgctggtgttgggcgcacaggaacctatatcggaattgatgccatgctagaaggcctggaagccgagaacaaagtggatgtttatggttatgttgtcaagctaaggcgacagagatgcctgatggttcaagtagaggcccagtacatcttgatccatcaggctttggtggaatacaatcagtttggagaaacagaagtgaatttgtctgaattacatccatatctacataacatgaagaaaagggatccacccagtgagccgtctccactagaggctgaattccagagacttccttcatataggagctggaggacacagcacattggaaatcaagaagaaaataaaagtaaaaacaggaattctaatgtcatcccatatgactataacagagggccacttaaacatgagctggaaatgagtaaagagagtgagcatgattcagatgaatcctctgatgatgacagtgattcagaggaaccaagcaaatacatcaatgcatcttttataatgagctactggaaacctgaagtgatgattgctgctcagggaccactgaaggagaccattggtgacttttggcagatgatcttccaaagaaaagtcaaagttattgttatgctgacagaactgaaacatggagaccaggaaatctgtgctcagtactggggagaaggaaagcaaacatatggagatattgaagttgacctgaaagacacagacaaatcttcaacttatacccttcgtgtctttgaactgagacattccaagaggaaagactctcgaactgtgtaccagtaccaatatacaaactggagtgtggagcagcttcctgcagaacccaaggaattaatctctatgattcaggtcgtcaaacaaaaacttccccagaagaattcctctgaagggaacaagcatcacaagagtacacctctactcattcactgcagggatggatctcagcaaacgggaatattttgtgctttgttaaatctcttagaaagtgcggaaacagaagaggtagtggatatttttcaagtggtaaaagctctacgcaaagctaggccaggcatggtttccacattcgagcaatatcaattcctatatgacgtcattgccagcacctaccctgctcagaatggacaagtaaagaaaaacaaccatcaagaagataaaattgaatttgataatgaagtggacaaagtaaagcaggatgctaattgtgttaatccacttggtgccccagaaaagctccctgaagcaaaggaacaggctgaaggttctgaacccacgagtggcactgaggggccagaacattctgtcaatggtcctgcaagtccagctttaaatcaaggttcataggaaaagacataaatgaggaaactccaaacctcctgttagctgttatttctatttttgtagaagtaggaagtgaaaataggtatacagtggattaattaaatgcagcgaaccaatatttgtagaagggttatattttactactgtggaaaaatatttaagatagttttgccagaacagtttgtacagacgtatgcttattttaaaattttatctcttattcagtaaaaaacaacttctttgtaatcgttatgtgtgtatatgtatgtgtgtatgggtgtgtgtttgtgtgagagacagagaaagagagagaattctttcaagtgaatctaaaagcttttgcttttcctttgtttttatgaagaaaaaatacattttatattagaagtgttaacttagcttgaaggatctgtttttaaaaatcataaactgtgtgcagactcaataaaatcatgtacatttctgaaatgacctcaagatgtcctccttgttctactcatatatatctatcttatatagtttactattttacttctagagatagtacataaaggtggtatgtgtgtgtatgctactacaaaaaagttgttaactaaattaacattgggaaatcttatattccatatattagcatttagtccaatgtctttttaagcttatttaattaaaaaatttccagtgagcttatcatgctgtctttacatggggttttcaattttgcatgctcgattattccctgtacaatatttaaaatttattgcttgatacttttgacaacaaattaggttttgtacaattgaacttaaataaatgtcattaaaataaataaatgcaatatgtattaatattcattgtataaaaatagaagaatacaaacatatttgttaaatatttacatatgaaatttaatatagctatttttatggaatttttcattgatatgaaaaatatgatattgcatatgcatagttcccatgttaaatcccattcataactttcattaaagcatttactttgaatttctccaatgcttagaatgtttttaccaggaatggatgtcgctaatcataataaaattcaaccattatttttttcttgtttataatacattgtgttatatgttcaaatatgaaatgtgtatgcacctattgaaatatgtttaatgcatttattaacatttgcaggacacttttacaggccccaattatccaatagtctaataattgtttaagatctagaaaaaaaaaatcaagaatagtggtatttttcatgaagtaataaaaactcgttttggtgaaaaaaaaaa

SEQ ID NO: 80913 - DNA, 1179 bp, Homo sapiens
  sig_peptide (644)...(509): this location contains the signal peptide sequence, MLFLTLISFCGFLLLHRLTSMVRLFLGAAIQKILSKRLEFSLLPL, Run with SignalP
  misc_feature (439)...(886): similar to gi156221 in the genepept database release 114, Run with FASTXY 3.3t00, default parameters
ctttaattcccacggacggggctcctccagctacagcagccaaagcatattcaatctgaatgtagtcagcgaaaagctgtacccgcgctccgccatctttacccgaagagccaaagcacagccgcacacatgcgcactgtggccgatttcctttcatttccccgcccctcacctttcctttactctctatgattggaggagagtcagagctgctccaagagcatgcggggtgttgtagttctaagaagcgaggcttgcccgattctgtgcctgtgcgcatgctgaaagcaggggcgggaccggggcggtcttccagcagggaaaatggcgctggccatgctggtcttggtggtttcgccgtggtctgcggcccggggagtgcttcgaaactactgggagcgactgctacggaagcttccgcagagccggccgggctttcccagtcctccgtggggaccagcattagcagtacagggcccagccatgtttacagagccagcaaatgataccagtggaagtaaagagaattccagccttttggacagtatcttttggatggcagctcccaaaaatagacgcaccattgaagttaaccggtgtaggagaagaaatccgcagaagcttattaaagttaagaacaacatagacgtttgtcctgaatgtggtcacctgaaacagaaacatgtcctttgtgcctactgctatgaaaaggtgtgcaaggagactgcagaaatcagacgacagatagggaagcaagaagggggcccttttaaggctcccaccatagagactgtggtgctgtacacgggagagacaccgtctgaacaagatcagggcaagaggatcattgaacgagacagaaagcgaccatcctggttcacccagaattgacacccaaagatgttaaaaggataacttcacagtaaatcatttctcctgaaatagaggaagattctttacgttgttgtgcttgtttttaaatcatcagtatagtttaacacattctttctaagcagttttgtgtgggataatttgaagaatatattatgagtaaactccgaaaattttgtttatccaaaggcttcaatggattatgtttctattatatacaaggttttaagtaaacataaaatttccagaacaaaaataaaaaatttaaaattcataacaaaaaaaaaa

SEQ ID NO: 80914 - DNA, 401 bp, Homo sapiens
  sig_peptide (219)...(354): this location contains the signal peptide sequence, MCPALWICICYTLACFKTPTAYCVGMFQVLHLTDMKSLLRSATFL, Run with SignalP
  misc_feature (141)...(285): similar to gi30155 in the genepept database release 114, Run with FASTXY 3.3t00, default parameters
atctgatgaattggcttttgaatcccagaaagggtctgccatggagatggcagtcatcacggtagatggcgtatgattatgctgaattttaaataaaatgaaaaccataaacaaacaaaggatcacaacctatgaggacacaaagaaaccactataaggggggccctgttaaaaaattcccattgggggcccaaaacaagcgggccgtactaactaagatgtgtcccgcactttggatctgcatttgctacacccttgcttgttttaagacaccaactgcttattgcgtagggatgtttcaggtcctccatttaacagatatgaagagccttttaagaagtgcaacctttttgaagtggatcaggctagaactcatatgccatactagatatgtttgacaa

SEQ ID NO: 80915 - DNA, 1507 bp, Homo sapiens
  sig_peptide (16)...(151): this location contains the signal peptide sequence, MASVVLPSGSQCAAAAAAAAPPGLRLRLLLLLFSAAALIPTGDGQ, Run with SignalP
  misc_feature (16)...(1344): similar to gi4519602 in the genepept database release 114, Run with FASTXY 3.3t00, default parameters
tttcgtgtgcccgacatggcgagtgtagtgctgccgagcggatcccagtgtgcggcggcagcggcggcggcggcgcctcccgggctccggctccggcttctgctgttgctcttctccgccgcggcactgatccccacaggtgatgggcagaatctgtttacgaaagacgtgacagtgatcgagggagaggttgcgaccatcagttgccaagtcaataagagtgacgactctgtgattcagctactgaatcccaacaggcagaccatttatttcagggacttcaggcctttgaaggacagcaggtttcagttgctgaatttttctagcagtgaactcaaagtatcattgacaaacgtctcaatttctgatgaaggaagatacttttgccagctctataccgatcccccacaggaaagttacaccaccatcacagtcctggtcccaccacgtaatctgatgatcgatatccagaaagacactgcggtggaaggtgaggagattgaagtcaactgcactgctatggccagcaagccagccacgactatcaggtggttcaaagggaacacagagctaaaaggcaaatcggaggtggaagagtggtcagacatgtacactgtgaccagtcagctgatgctgaaggtgcacaaggaggacgatggggtcccagtgatctgccaggtggagcaccctgcggtcactggaaacctgcagacccagcggtatctagaagtacagtataagcctcaagtgcacattcagatgacttatcctctacaaggcttaacccgggaaggggacgcgcttgagttaacatgtgaagccatcgggaagccccagcctgtgatggtaacttgggtgagagtcgatgatgaaatgcctcaacacgccgtactgtctgggcccaacctgttcatcaataacctaaacaaaacagataatggtacataccgctgtgaagcttcaaacatagtggggaaagctcactcggattatatgctgtatgtatacgatccccccacaactatccctcctcccacaacaaccaccaccaccaccaccaccaccaccaccaccatccttaccatcatcacagattcccgagcaggtgaagaaggctcgatcagggcagtggatcatgccgtgatcggtggcgtcgtggcggtggtggtgttcgccatgctgtgcttgctcatcattctggggcgctattttgcccagacataaaggtacatacttcactcatgaagccaaaggagccgatgacgcagcagacgcagacacagctataatcaatgcagaaggaggacagaacaactccgaagaaaagaaagagtacttcatctagatcagccctttttgtttcgaatgaggtgtccaactggcccttatttagatgataaagataacagtgatattggaactttgcgagaaattcgtgtgtttttttatgaatgggtggaaaggtgtgagactgggaaggcttgggatttgctgtgtaaaaaaaaaa

SEQ ID NO: 80916 - DNA, 853 bp, Homo sapiens
  sig_peptide (79)...(214): this location contains the signal peptide sequence, MRRSFWTVMRTAWRCSCSSVDRALSHQAGLQGQCLSACLLGNLGY, Run with SignalP
  misc_feature (97)...(330): similar to gi3322915 in the genepept database release 114, Run with FASTXY 3.3t00, default parameters
ctcccttcccgctgtgtggctccagcaagtttcctcccacctcaggtttgggtttccaggcattaagtgacaaagtggatgcgacgctccttctggactgtaatgcgcactgcgtggagatgttcgtgttccagtgtagacagggcgttgtcacatcaggcaggactacagggacaatgtttgtcagcctgtcttctgggcaacttggggtatcctccctttatatcacctcctgcccaggtgctctgcgccgccagagcatcatgtcatttgggatccctgatggcacattttgagactttggttcacagtaaagattggtcctgtgtgatcttaaagtaatgtggcttaaaaacaaatggctgtcagggaattgtaaatcaaagcaaacaccgatgagaatggcccaaatccaggacactcagcaccaaatgcgagggaggatgtgaagccacaggaagcctcactcactgctggagggaacgcaaaacaggacagccaccttggaagacagtttgacaaatccttagaaagctaaacacacttttaccctgggatccaacaatcatgctccttgatatttacccagaggagttaaaaaaacttatggccacactaaatacctgcacatgggggtaaataagagactttatttaggataattcataaacagctggatccttaaaggcaaacaaaagttttactcttcgcaaccaaaaaccaaaaacttaccgtggggtgccccccaaacagttggaaaatttttaccccgccccttaaaaaaacagacgcccgcgattgattcccaatgaaaatgtatcttcgcggaaactttttttcacgactcgggagc

SEQ ID NO: 80917 - DNA, 417 bp, Homo sapiens
  sig_peptide (21)...(156): this location contains the signal peptide sequence, MGLDIIIFCHFIFNLYFWNILKFGFMLTILDWISLFKYNMTISAF, Run with SignalP
  misc_feature (157)...(306): similar to gi1181427 in the genepept database release 114, Run with FASTXY 3.3t00, default parameters
ccactctggatttcttttgaatgggacttgatattatcattttctgtcattttatttttaatttgtatttttggaatatattgaaatttggctttatgttgaccatattagattggatatcactttttaaatataatatgacaatctcagccttttatttggggatatttaattcatgtgcatttcatgtgattattgtattttgggtttacatcaaccattttgatcattgtgttatattttccccatctgtttcttattttcccccaaagtttctccattcttttggattaattgagttttcttttaaaggattacattatctccactattggcatattagtctagctctttcttttatttttacctaggaggtataggatttattgtgggtggctcatataaaatttactatgc

SEQ ID NO: 80918 - DNA, 4218 bp, Homo sapiens
  sig_peptide (885)...(1020): this location contains the signal peptide sequence, MRAWAWPFCTSVTSLSAMASPWRRWPRRPASRTASRAPSAGISGS, Run with SignalP
  misc_feature (342)...(3908): similar to gi37504 in the genepept database release 114, Run with FASTXY 3.3t00, default parameters
gttcgagcttgtgttcccccggaagggtgagtctggacgcgggcgcggaaggagcgcggccggaggtcctcaggaagaagccgcggggactggctgcgcttgacaggctgcacttggatgggagcacctggtgcctcgggactgctccgatgcccgggtctgtgctgaatgtgtaatatgcggaactatattgaaacattacaaccatcttttgatggcaacaccctgaggacctcccttttccagatggggaaactgaggcccagaattgctaagtggcttgcttgagttgacacagggagctccaggactcaccctcagctgagccacctgccgggagcatgcctctgcgccactgggggatggccaggggcagtaagcccgttggggatggagcccagcccatggctgccatgggaggcctgaaggtgcttctgcactgggctggtccaggcggcggggagccctgggtcactttcagtgagtcatcgctgacagctgaggaagtctgcatccacattgcacataaagttggtatcactcctccttgcttcaatctctttgccctcttcgatgctcaggcccaagtctggttgcccccaaaccacatcctagagatccccagagatgcaagcctgatgctatattttccgccataggttttattcccgggaactggcatggcatgaatcctcgggaaccggctgtgtaccgttgtgggcccccaggaaccgaggcatcctcagatcagacagcacaggggatgcaactcctggacccagcctcatttgagtacctctttgagcagggcaagcatgagtttgtgaatgacgtggcatcactgtgggagctgtcgaccgaggaggagatccaccactttaagaatgagagcctgggcatggcctttctgcacctctgtcacctcgctctccgccatggcatccccctggaggaggtggccaagaagaccagcttcaaggactgcatcccgcgctccttccgccggcatatccggcagcacagcgccctgacccggctgcgccttcggaacgtcttccgcaggttcctgcgggacttccagccgggccgactctcccagcagatggtcatggtcaaatacctagccacactcgagcggctggcaccccgcttcggcacagagcgtgtgcccgtgtgccacctgaggctgctggcccaggccgagggggagccctgctacatccgggacagtggggtggcccctacagaccctggccctgagtctgctgctgggcccccaacccacgaggtgctggtgacaggcactggtggcatccagtggtggccagtagaggaggaggtgaacaaggaggagggttctagtggcagcagtggcaggaacccccaagccagcctgtttgggaagaaggccaaggctcacaaggcagtcggccagccggcagacaggccgcgggagccactgggggcctacttctgtgacttccgggacatcacccacgtggggctgaaagagcactgtgtcagcatccaccggcaggacaacaagtgcctggagctgagcttgccttcccgggctgcggcgctgtccttcgtgtcgctggtggacggctatttccgcctgacggccgactccagccactacctgtgccacgaggtggctcccccacggctggtgatgagcatccgggatgggatccacggacccctgctggagccatttgtgcaggccaagctgcggcccgaggacggcctgtacctcattcactggagcaccagccacccctaccgcctgatcctcacagtggcccagcgtagccaggcaccagacggcatgcagagcttgcggctccgaaagttccccattgagcagcaggacggggccttcgtgctggagggctggggccggtccttccccagcgttcgggaacttggggctgccttgcagggctgcttgctgagggccggggatgactgcttctctctgcgtcgctgttgcctgccccaaccaggagaaacctccaatctcatcatcatgcggggggctcgggccagccccaggacactcaacctcagccagctcagcttccaccgggttgaccagaaggagatcacccagctgtcccacttgggccagggcacaaggaccaacgtgtatgagggccgcctgcgagtggagggcagcggggaccctgaggagggcaagatggatgacgaggaccccctcgtgcctggcagggaccgtgggcaggagctacgagtggtgctcaaagtgctggaccctagtcaccatgacatcgccctggccttctacgagacagccagcctcatgagccaggtctcccacacgcacctggccttcgtgcatggcgtctgtgtgcgcggccctgaaaatatcatggtgacagagtacgtggagcacggacccctggatgtgtggctgcggagggagcggggccatgtgcccatggcttggaagatggtggtggcccagcagctggccagcgccctcagctacctggagaacaagaacctggttcatggtaatgtgtgtggccggaacatcctgctggcccggctggggttggcagagggcaccagccccttcatcaagctgagtgatcctggcgtgggcctgggcgccctctccagggaggagcgggtggagaggatcccctggctggcccccgaatgcctaccaggtggggccaacagcctaagcaccgccatggacaagtgggggtttggcgccaccctcctggagatctgctttgacggagaggcccctctgcagagccgcagtccctccgagaaggagcatttctaccagaggcagcaccggctgcccgagccctcctgcccacagctggccacactcaccagccagtgtctgacctatgagccaacccagaggccatcattccgcaccatcctgcgtgacctcacccggctgcagccccacaatcttgctgacgtcttgactgtgaacccggactcaccggcgtcggaccctacggttttccacaagcgctatttgaaaaagatccgagatctgggcgagggtcacttcggcaaggtcagcttgtactgctacgatccgaccaacgacggcactggcgagatggtggcggtgaaagccctcaaggcagactgcggcccccagcaccgctcgggctggaagcaggagattgacattctgcgcacgctctaccacgagcacatcatcaagtacaagggctgctgcgaggaccaaggcgagaagtcgctgcagctggtcatggagtacgtgcccctgggcagcctccgagactacctgccccggcacagcatcgggctggcccagctgctgctcttcgcccagcagatctgcgagggcatggcctatctgcacgcgcagcactacatccaccgagacctagccgcgcgcaacgtgctgctggacaacgacaggctggtcaagatcggggactttggcctagccaaggccgtgcccgaaggccacgagtactaccgcgtgcgcgaggatggggacagccccgtgttctggtatgccccagagtgcctgaaggagtataagttctactatgcgtcagatgtctggtccttcggggtgaccctgtatgagctgctgacgcactgtgactccagccagagcccccccacgaaattccttgagctcataggcattgctcagggtcagatgacagttctgagactcactgagttgctggaacgaggggagaggctgccacggcccgacaaatgtccctgtgaggtctatcatctcatgaagaactgctgggagacagaggcgtcctttcgcccaaccttcgagaacctcatacccattctgaagacagtccatgagaagtaccaaggccaggccccttcagtgttcagcgtgtgctgaggcacaatggcagccctgcctgggaggactggaccaggcagtggctgcagagggagcctcctgctccctgctccaggatgaaaccaagagggggatgtcagcctcacccacaccgtgtgccttactcctgtctagagaccccacctctgtgaacttatttttctttcttggccgtgagcctaaccatgatcttgagggacccaacatttgtaggggcactaatccagcccttaaatcccccagcttccaaacttgaggcccaccatctccaccatctggtaataaactcatgttttctctgaaaaaaaaaa

SEQ ID NO: 80919 - DNA, 1416 bp, Homo sapiens
  sig_peptide (245)...(380): this location contains the signal peptide sequence, MARRSRHRLLLLLLRYLVVALGYHKAYGFSAPKDQQVVTAVEYQE, Run with SignalP
  misc_feature (123)...(307): similar to gi553165 in the genepept database release 114, Run with FASTXY 3.3t00, default parameters
ccacacccccaaaacagaacagacccccatccctgggctggaggacccgcctcttggcagccagctgagaaggcgccccggggagggggaaactgacatcccatctagagccgtccctcctcttcctcccctcccgactctctgctcctttcccgccccagaagttcaagggcccccggcctcctgcgctcctgccgccgggaccctcgacctcctcagagcagccggctgccgccccgggaagatggcgaggaggagccgccaccgcctcctcctgctgctgctgcgctacctggtggtcgccctgggctatcataaggcctatgggttttctgccccaaaagaccaacaagtagtcacagcagtagagtaccaagaggctattttagcctgcaaaaccccaaagaagactgtttcctccagattagagtggaagaaactgggtcggagtgtctcctttgtctactatcaacagactcttcaaggtgattttaaaaatcgagctgagatgatagatttcaatatccggatcaaaaatgtgacaagaagtgatgcggggaaatatcgttgtgaagttagtgccccatctgagcaaggccaaaacctggaagaggatacagtcactctggaagtattaggtgatgtgcatgtattggctccagcagttccatcatgtgaagtaccctcttctgctctgagtggaactgtggtagagctacgatgtcaagacaaagaagggaatccagctcctgaatacacatggtttaaggatggcatccgtttgctagaaaatcccagacttggctcccaaagcaccaacagctcatacacaatgaatacaaaaactggaactctgcaatttaatactgtttccaaactggacactggagaatattcctgtgaagcccgcaattctgttggatatcgcaggtgtcctgggaaacgaatgcaagtagatgatctcaacataagtggcatcatagcagccgtagtagttgtggccttagtgatttccgtttgtggccttggtgtatgctatgctcagaggaaaggctacttttcaaaagaaacctccttccagaagagtaattcttcatctaaagccacgacaatgagtgaaaatgatttcaagcacacaaaatcctttataatttaaagactccactttagagatacaccaaagccaccgttgttacacaagttattaaactattataaaactctgctttgtccgacatttgcaaagaggtacacgaggaaatggaattggtatttcattttaattttcatgactactaactcacctgaacttgctattttaaacaaatagttctgtcgacacctaaaatataatctggcttcttgtgtctggactaagttaaaagaattaaaatactttgtaatgtcaaaaaaaaa

SEQ ID NO: 80920 - DNA, 1756 bp, Homo sapiens
  sig_peptide (382)...(517): this location contains the signal peptide sequence, MLFWVLGLLILCGFLWTRKGKLKIEDITDKYIFITGCDSGFGNLA, Run with SignalP
  misc_feature (382)...(1341): similar to gi4894382 in the genepept database release 114, Run with FASTXY 3.3t00, default parameters
caagagtgacactggatatactccagaagttggacccaccacagcctgcacactggacttcttggcttttatgagctattcaagagatatttagtcatcacgttgtgtcacaatgggagtgactcacagagcaaggagagaacctgaggattcctcacacatgtagtactcagagctctacggaaacccaggcacctcgacctcaagaggatcagcctggccagggtggcacaactcttccttccccgtgcacagcaggaaagctgccatcagctgagcaagtccaccaacagtttctgtgtcccacttcatctttaataaggacaccatcttcttgtattatacaagaaaggagtgtacctatcacacacagggggaaaaatgctcttttgggtgctaggcctcctaatcctctgtggttttctgtggactcgtaaaggaaaactaaagattgaagacatcactgataagtacatttttatcactggatgtgactcgggctttggaaacttggcagccagaacttttgataaaaagggatttcatgtaatcgctgcctgtctgactgaatcaggatcaacagctttaaaggcagaaacctcagagagacttcgtactgtgcttctggatgtgaccgacccagagaatgtcaagaggactgcccagtgggtgaagaaccaagttggggagaaaggtctctggggtctgatcaataatgctggtgttcccggcgtgctggctcccactgactggctgacactagaggactacagagaacctattgaagtgaacctgtttggactcatcagtgtgacactaaatatgcttcctttggtcaagaaagctcaagggagagttattaatgtctccagtgttggaggtcgccttgcaatcgttggagggggctatactccatccaaatatgcagtggaaggtttcaatgacagcttaagacgggacatgaaagcttttggtgtgcacgtctcatgcattgaaccaggattgttcaaaacaaacttggcagatccagtaaaggtaattgaaaaaaaactcgccatttgggagcagctgtctccagacatcaaacaacaatatggagaaggttacattgaaaaaagtctagacaaactgaaaggcaataaatcctatgtgaacatggacctctctccggtggtagagtgcatggaccacgctctaacaagtctcttccctaagactcattatgccgctggaaaagatgccaaaattttctggatacctctgtctcacatgccagcagctttgcaagactttttattgttgaaacagaaagcaagagctggctaatcccaaggcagtgtgactcagctaaccacaaatgtctcctccaggctatgaaattggccgatttcaagaacacatctccttttcaaccccattccttatctgctccaacctcggactccatttagatcgtgcttatttggattgcaaaagggagtcccaccatcgctggtggtatcccagggtccctgctcaagttttctttgaaaaggagggctggaatggtacatccacataggcaagtcctgccctgtatttaggctttgcctgcttggtgtgatgtaagggaaattgaaagacttgcccattcaaaatgatctttaccgtggcctgccccatgcttatggtccccagcatttacagtaacttgtgaatgttaagtatcatctcttatctaaatattaaaagataagtcaaacattaaaaaaaaaaa

SEQ ID NO: 80921 - DNA, 4994 bp, Homo sapiens
  sig_peptide (1617)...(1752): this location contains the signal peptide sequence, MWFLFLCPNLWAMPVQIIMGVILLYNLLGSSALVGAAVIVLLAPI, Run with SignalP
  misc_feature (344)...(4994): similar to gi3127175 in the genepept database release 114, Run with FASTXY 3.3t00, default parameters
tttcgtggaaggtctccggccccaggcgcggcgcgcggggcttctgcccagtttcctgcttctcagccgcggtgtctgccccggcccaaagcagtctgtgcaatttagaaactcgataggaggcagcagctggtctcccaccaccctaaaaataatccgttccggcgcactgcgtgcttcgcctaggggaggaaaactgtcatcggagagttctgcgtccgggtttgaaatttacatcttaagacagtgtaggaagtcggtgttttgaaggtagctcaagtgcaccggcaggggtttgaagcagcgtgaagctattgcccaagagtaaaccatataagaagaaatgagcctttcattttgtggtaacaacatttcttcatataatatcaacgatggtgtactacaaaattcctgctttgtggatgccctcaacctggtccctcatgtctttctgttgtttatcacttttccaatattgtttattgggtgggggagccaaagctcaaaagtacaaattcaccacaacacatggcttcattttccgggacataacctgagatgggatccttacattcgctctcctgtttgtgcatgtctgtgaaatagcagaaggcattgtttcagactcgcggcgggaatcaaggcacctccacctctttatgccagccgtgatgggattcgttgccactacaacatcgatagtgtattatcataatatcgaaacatcaaattttcctaaattacttttagccctgttcctgtattgggtaatggcctttattacaaaaacaataaaattggttaagtactgtcagtctggcttggacatatcaaacctgcgtttctgcatcacaggcatgatggtcatcttgaatgggctcttgatggctgtggagatcaatgtcattcgagtcaggagatatgtatttttcatgaatcctcagaaagtaaagcctcctgaagacctccaggatctgggagtgagatttcttcaaccatttgtgaatttgctgtcaaaagcaacatactggtggatgaacacacttattatatctgctcacaaaaagcctattgatctgaaggcaattggaaaattgccaatagcaatgagagcagtaacaaattatgtttgcctgaaagatgcatatgaagaacaaaagaaaaaagttgcagatcatccaaatcggactccatctatatggcttgcaatgtacagagcttttgggcgaccaattctacttagtagcacattccgctatctggctgatttactgggttttgctggacctctttgtatttctggaatagttcagcgtgtgaatgaaacccagaatgggacaaataacacaactggaatttcagaaaccctctcatcaaaggaatttcttgaaaacgcttacgttctagcagttcttctcttcttggctcttattctgcaaaggacatttttgcaggcttcctactatgtaaccatagagactggcattaacctccgtggagctctgctggccatgatttataataaaatccttaggctctctacgtctaacttatccatgggggagatgactctggggcagatcaacaacttagtcgccattgaaactaatcaactcatgtggtttttgttcctgtgtcccaatctatgggctatgcctgttcagatcataatgggcgtgattctgctctataatttacttggatcaagtgcattggtcggtgcagctgtcattgtgctccttgcgccaattcagtactttattgctacaaagttggcagaggctcagaaaagtacacttgattattccactgagagactcaagaaaacaaatgaaatattgaaaggcatcaaacttctaaaattgtatgcctgggaacacattttctgcaaaagtgtggaggaaacaagaatgaaagaactatctagtctcaaaacctttgcactatatacatcactctccatcttcatgaatgcagcaattcccatagcagctgttcttgctacatttgtgacccatgcgtatgccagtggaaacaatctgaaacctgcagaggcctttgcttcactgtctctcttccatatcctggtcacaccactgttcctgctctccacggtggtcagatttgcagtcaaagccatcataagtgttcaaaagctgaatgagtttctcttgagtgatgagattggtgacgacagttggcgaactggtgaaagttcgcttccttttgagtcctgtaagaagcacactggagttcagccaaaaactataaacaggaaacagcctggaagatatcacctggacagctatgagcaatcaacacggcgtctacgtcccgcagaaacagaggacattgcaataaaggtcacaaatggatacttttcatggggcagtggtttagctacattatccaatatagatattcgaattccaacaggtcagttaaccatgattgtgggccaagtaggatgtgggaagtcctctcttctccttgccatcctcggtgagatgcagacattggaaggaaaagttcactggagcaatgtaaatgaatctgagccttcttttgaagcaaccagaagtaggaacaggtactctgtggcatatgcagctcaaaagccttggctattaaatgctacagtagaagaaaatattacttttggaagtccttttaacaaacagaggtacaaagctgtcacagatgcctgttctcttcagccagatattgacttattaccatttggagatcaaactgaaattggagagaggggcatcaacctgagtgggggacagaggcagagaatctgtgtggcacgagcgctgtatcaaaacaccaacattgtctttttggatgatccattctcagccctggacattcacttgagtgatcatttaatgcaggaggggattttgaaattcctgcaagatgacaaaaggacactcgttcttgtgactcacaaattacagtatctgacgcatgctgactggatcatagccatgaaagatggaagtgtcctaagagaaggaactttgaaggacattcaaaccaaagatgttgagctttatgaacactggaaaacacttatgaatcggcaagatcaagaattagaaaaggatatggaagctgaccaaactactttagagaggaaaactctccgacgggccatgtattcaagagaagccaaagcccagatggaggacgaagacgaagaggaagaagaggaggaagatgaggatgataacatgtccactgtaatgaggctcaggactaaaatgccatggaaaacctgctggcgctacctgacatctggaggattcttcctgctcatcctgatgattttctctaagcttttgaagcattcggtcattgtagctatagactattggctggccacatggacatcggagtacagtataaacaatactggaaaagctgatcagacctactatgtggctggctttagcatactctgtggagcaggcattttcctttgccttgttacatccctcactgtagaatggatgggtctcacagctgccaaaaatcttcaccacaaccttctcaataagataatccttggaccaataaggttttttgataccacacccctgggactgattctcaatcgcttttcagctgatactaatatcattgatcagcacatccctccaaccttggaatctctaactcgctcaacactgctctgcctgtctgccattgggatgatttcttatgctactcctgtgttcctggttgctctcctgccccttggtgttgccttttattttatccagaaatactttcgggttgcctctaaggacctccaggaactcgacgatagtacccagctccctctgctctgtcacttctcagaaacagcagaaggactcaccaccattcgggcctttaggcatgaaaccagatttaaacaacgtatgctggaactgacggatacaaacaacattgcctacttatttctctcagctgccaacagatggctggaggtcaggacggattatctgggagcttgcattgtcctcactgcatctatagcatccattagtgggtcttccaattctggattggtaggcttgggtcttctgtatgcacttacgataaccaattatttgaattgggttgtgaggaacttggctgacctggaggtccagatgggtgcagtgaagaaggtgaacagtttcctgactatggagtcagagaactatgaaggcacaatggatccttctcaagttccagaacattggccacaagaaggggagatcaagatacatgatctgtgtgtcagatatgaaaataatctgaaacctgttcttaagcacgtcaaggcttacatcaaacctggacaaaaggtgggcatatgtggtcgcactggcagtgggaaatcatcgttatctctggctttcttcagaatggttgatatatttgatggaaaaattgtcattgatgggatagacatttccaaattaccactgcacacactacgttctagactttcaatcattctgcaggatccaatactattcagtggttccattagatttaatttagatccagagtgcaaatgcacagatgacagactctgggaagccttagaaattgctcagctgaagaatatggtcaaatctctacctggaggtctagatgcggttgtcactgaaggtggggagaattttagcgtgggacagagacagctattttgccttgccagggcctttgtccgcaaaagcagcattcttattatggatgaggcaacagcttccattgacatggccacagagaatattttgcaaaaagtagtaatgacagcctttgcagaccggaccgtggtgacaatggctcaccgtgtctcttctattatggatgcaggccttgttttagtcttttctgagggtattttagtggagtgtgatactgtcccaaatttgttcgcccacaagaatggccccttttccactttggtgatgaccaacaagtag

SEQ ID NO: 80922 - DNA, 352 bp, Homo sapiens
  sig_peptide (192)...(327): this location contains the signal peptide sequence, MFMHLFMFMFMHFFCNLAPSTMDFLLAGLFYKCFIIYVILLRRYE, Run with SignalP
  misc_feature (138)...(287): similar to gi908907 in the genepept database release 114, Run with FASTXY 3.3t00, default parameters
atcagaccatcaggaaagctggaaaagtggtaatgatataccaacttctgaggattgttttatataacggaataattttaagactgtttgaaataattgagtaatataagttaaattatattaggtaactttgatccttaaaaactgattttaagaagataagaaatttccatgtttatatctttagatttatgttcatgcatttatttatgtttatgttcatgcattttttttgtaatcttgctccttctaccatggattttcttttggcaggtttattttataagtgttttattatatatgtaatacttttaagaagatatgaagaatgatgatgtttgaaaaatttaca

SEQ ID NO: 80923 - DNA, 6491 bp, Homo sapiens
  sig_peptide (4324)...(4189): this location contains the signal peptide sequence, MLILLLLEFGITIIKVTCRLRIVLCYRKYKTKRNKKLKLGNNSKF, Run with SignalP
  misc_feature (194)...(4099): similar to gi3327068 in the genepept database release 114, Run with FASTXY 3.3t00, default parameters
ctgcaggaattcggcacgagccggcacaaacctcagtggtggttctgtggttgtttctgtctttttttgatagaatctttgattagtatcgaatttactgtatttggccatgtgaactattgggagcctcctagggtgagggaaattaagagctttcagaggaatgaggcgactgatttgcaaacggatctgtgattataaaagcttcgatgatgaagaatcagtggatggaaataggccatcatcagctgcatcagccttcaaggttcctgcacctaaaacatccggaaatcctgccaacagtgcaaggaagcctggttcagcaggtggccctaaggttggagcaggtgcttctaaggaaggaggtgctggagcagttgatgaagatgattttataaaagcttttacagatgtcccttctattcagatttattctagtcgagaactcgaagaaacattacataaaatcagggaaattttgtcagatgataaacatgactgggatcagcgtgccaatgcactgaagaaaattcgatcactgcttgttgctggagctgcacagtatgattgcttttttcaacatttacgattgttggatggagcacttaaactttcagctaaggatcttagatcccaggtggttagagaagcttgtattactgtagcccacctttcaacagttttgggaaacaagtttgatcatggcgctgaagccattgtacctacactttttaatctcgtccccaatagtgcaaaagtcatggcaacttctggatgtgcagcaatcagatttatcattcggcatactcatgtacccagacttatacctttaataacaagcaattgcacatcaaaatcagttcccgtgaggagacgttcatttgaatttttagatttattgttgcaagagtggcagactcattcattggaaagacatgcagccgtcttggttgaaactattaaaaagggaattcatgatgctgacgctgaggccagagtggaggcaagaaagacatacatgggtcttagaaaccactttcctggtgaagctgaaacattatataattcccttgagccatcttatcagaagagtcttcaaacttacttaaagagttctggcagtgtagcatctcttccacaatcagacaggtcctcatccagctcacaggaaagtctcaatcgccctttttcttccaaatggtctacagcaaatccatcaactgtggctggaagagtatcagcaggcagcagcaaagccagttcccttccaggaagcctgcagcgttcacgaagtgacattgatgtgaatgctgctgcaggtgccaaggcacatcatgctgctggacagtctgtgcgaagcgggcgcttaggtgcaggtgccctgaatgcaggttcctatgcgtcactagaggatacttctgacaagctggatggaacagcatctgaagatggccgggtgagagcaaaactttcagcaccacttgctggcatgggaaatgccaaggcagattctagaggaagaagtcgaacaaaaatggtgtctcaatcacagcctggtagccggtctgggtctccaggaagagttctgaccacaacagccctgtccactgtgagctctggtgttcaaagagtcctggtcaattcagcctcagcacaaaaaagaagcaagataccacggagccagggctgtagcagagaggctagtccatctaggctttcagtggcccgaagcagtcgtattcctcgaccaagtgtgagtcaaggatgcagccgggaagctagtcgggagagcagcagagacacaagtcctgttcgctcttttcagcccctcgcctccagacaccattccagatcaactggtgccctctacgcccccgaagtgtatggggcctcaggtccaggttatgggatcagccaatcaagtcgactgtcgtcttctgttagtgccatgcgagtcctgaacacaggttctgatgtggaggaggcggtggcagatgccttgctcttaggagacatacggactaagaaaaaaccagctcgaagaagatatgaatcatatggaatgcattcagatgatgacgccaacagcgatgcatctagtgcttgttcagaacgctcctatagttctcgaaatggtagtattcctacatatatgaggcagacgggaagatgtgggcagaagtcctcaatagatgtgctagttccaattggtcagaaaggaaagaaggcctcctaggtctgcagaacttattaaaaaatcagagaacactaagtcgagttgaactgaaaagattatgtgaaattttcacaagaatgtttgctgaccctcatggcaagagagtattcagcatgtttttggagactctagtggatttcatacaagtccacaaagatgatcttcaagattggttgtttgtactgctgacacaactactaaaaaaaatgggtgctgatttgcttggatctgttcaggcaaaagttcagaaagcccttgatgttacaagagagtcttttccaaatgatcttcagttcaatattctaatgagatttacagttgatcagacccagacaccaagcttaaaggtgaaggttgctatccttaaatacatagaaactctggccaaacagatggatccaggagattttataaattccagtgaaactcgcctagcagtgtctcgggtcatcacttggacaacagaacccaaaagttctgatgttcggaaggcagcacagtcagtgctgatttcattatttgaactcaataccccagagtttacaatgttattaggagctttaccaaaaacttttcaggatggtgctaccaagcttcttcataatcaccttcgaaacactggcaatggaacccagagttccatggggagtcctttgacaagaccaacaccacgatcaccagctaactggtccagtcctcttacttctcctaccaatacatcacagaatactttatctccaagtgcatttgattatgacacagaaaatatgaactctgaagatatttatagctctcttagaggtgtcactgaagcaatccagaatttcagcttccgtagccaagaagatatgaatgagccattgaaaagggattctaaaaaagatgatggcgattcaatgtgtggtggtcctggggatgtctgacccaagagcaggaggtgatgctactgactcaagtcaaacagctctttgataataaagcttcattgctccattcaatgcctactcactcctctccacgctctcgagactataatccatataactattcagatagcatcagtcccttcaacaagtctgccctcaaggaagccatgtttgatgatgatgctgaccagtttcctgacgatctttccctagatcattctgacctagttgcagagttgttgaaggagctgtctaaccataatgagcgtgtagaagaaagaaaaattgccctctatgaacttatgaaactgacacaggaagaatcttttagtgtttgggatgaacacttcaaaacaatattgcttttattgcttgaaacgcttggagataaagagcctacaatcagggctttggcattaaaggttttaagagaaatcctaaggcatcaaccagcaagatttaaaaactatgcagaattgactgtcatgaaaacattggaagcacataaagatcctcataaggaggtggtgagatctgctgaggaagcggcatcagtgtttggccacttcaatttagtccagagcagtgcatcaaagtcctttgtcctatcattcaaactgcagactacccaattaatctggctgcaatcaaaatgcaaacaaaagtgatagagagagtgtccaaggaaaccctaaacctgcttttgccagagattatgccaggtctaatacagggttatgataattcagagagcagtgttcggaaagcttgtgtcttctgcctggtggctgttcatgcggtaattggtgatgaactaaaaccacatctcagtcaacttactggcagtaaaatgaagctactgaatctttacatcaaacgtgcacaaacaggttctggaggagctgatcccactactgatgtttctggacaaagttagtgaagctcatcacagcgaaccaggtctctcaaaagaaaggacagatagaccaccctcatcaatgaaaggaagttctcaaacacatcctttggaacttactattgtttcccagttttagttttttgtttcgtttcgttttgtattttctgtaacagaggactatcctcagtctgcatgtaacttttatgatagttattccaaattcaagaagaagcagtattaacatcaattgatcgacacaaagtaatttttaatttaattcatcatttcacatgtttgtactttgtcttcccattaacctttgccagtgttatgattgtataaatttttttaaatgctggttaaacaggaatgcttaaagctttaaaagtttaacagtctaaaacatttttgcttttattcaactgcagaataatatttttattgctactttgagttttgtttcgtatcatgtcctatgctagaaatatttaaatgatgtgaaacaaagcaggactaatttgaactacagctggactccgtttgtgtgatggtgatacatgtcattagttgcaacttctttggggtgatctatagtttgaaaactaaaacctcaaagacagatgttacagaatcagccagttctgtaaaactgatattgtctattggttattgatcttgccatctttatttaaaaccatgtcccttctatgatcccttaagaaagctgcaccaaatcatctgcctgttttttcttgatacttactgaaatagaaggttttattgcagggtttattttggtttgtttatatctttgttgtgaatgatgcttttttgtatttattaatatcaaattcacttatgaataaacttgataatggaaacggacaaaaaaaatcaagtgcgtgtgtgtccttgaccgtcttctgtttctcacgtaataaacaaattatcgagacatgggagtgaccagcaccttttctttaaatggtggaacctggtttccttttaccatgaaattgtcttacttgaaaatattgatcctgatgagagagaagatggtgccaaggctgtctttgtataatgggctcaaattctctacctcttcagggctaatacttttaactgagctgctgcctatagtgtcttttggaaaactacttaaagggtgattttctgttactttttagcaaatttttttaatcacctcttgctacacccattcttttcatgtgcagccgactcaaaaattaccagttttggtgaaaggctaaattagataatttggaaccaggatactaatgatttctcatctttacttttttttaatcctaatataaagtgaatttgattgaaaaggcaaatagctattagggaagcagtttgccattgttgcagagttatctgtactttgtttaactgaaaaaaatgtagaaatatatgtaaagaatttaagacaagagtactgaatggatgatttgtcataggctttcccctttctttctgttctagcagcaggaaaagtttctctatatcctctccctctacctgtaacaattttgttttctactgttaattacattgtgtatttatagttctatgcttactgttgtgcatatactggcaataaaactgtacataacattacttgaaaaagttaataatgtatatcagtttttctgtctcactgtgtaacaagtcactcagttttattttaactttagacggtcttgtatcagtggtggtctcttgaattttgtaagttcatctgaggagaaaagatttttcaggtgtagctaccacaatcaaaggtatatagctacatacgcatgtatatattacagcttatctgtaagaagaaaatgcattttaaacacaactcttctcagtagcattttatgacctttggatatgtttgtaatcatttcgaatcaaaatattgatttaattttgacctctggtttaagatactgctttaactactgttgacaaccaagtagagtgacttaagctgaacagtaactaactggaaaattcgataagcacctggcatctaatggcaggcaggcactcaagatatgaattaactacataatggaaaaatatggtttaacgtgtccaaatgaaagctagtagatgtaaacatggaaaaattgtgtttacaattttataatctcagttgataagactataagaaagctgattatttaaatcactatatacaatacacccttaatttgttcattccagaaacatactgagatgtcagctacttaaaaatggtcacaaaaagctactgtttatatttttcctcctgctattctctcccaaattaattattaataagtgttgttcatttactgcactgctgagaactaattaaaattatatattccagattgtaaaaaaaaaa

SEQ ID NO: 80924 - DNA, 3144 bp, Homo sapiens
  sig_peptide (2020)...(2155): this location contains the signal peptide sequence, MGCAIIAGFLHYLFLACFFWMLVEAVILFLMVRNLKVVNYFSSRN, Run with SignalP
  misc_feature (34)...(2696): similar to gi784994 in the genepept database release 114, Run with FASTXY 3.3t00, default parameters
tttcttttctttgaatgacagaactacagcataatgcgtggcttcaacctgctcctcttctggggatgttgtgttatgcacagctgggaagggcacataagacccacacggaaaccaaacacaaagggtaataactgtagagacagtaccttgtgcccagcttatgccacctgcaccaatacagtggacagttactattgcacttgcaaacaaggcttcctgtccagcaatgggcaaaatcacttcaaggatccaggagtgcgatgcaaagatattgatgaatgttctcaaagcccccagccctgtggtcctaactcatcctgcaaaaacctgtcagggaggtacaagtgcagctgtttagatggtttctcttctcccactggaaatgactgggtcccaggaaagccgggcaatttctcctgtactgatatcaatgagtgcctcaccagcagggtctgccctgagcattctgactgtgtcaactccatgggaagctacagttgcagctgtcaagttggattcatctctagaaactccacctgtgaagacgtggatgaatgtgcagatccaagagcttgcccagagcatgcaacttgtaataacactgttggaaactactcttgtttctgcaacccaggatttgaatccagcagtggccacttgagtttccagggtctcaaagcatcgtgtgaagatattgatgaatgcactgaaatgtgccccatcaattcaacatgcaccaacactcctgggagctacttttgcacctgccaccctggctttgcaccaagcaatggacagttgaatttcacagaccaaggagtggaatgtagagatattgatgagtgccgccaagatccatcaacctgtggtcctaattctatctgcaccaatgccctgggctcctacagctgtggctgcattgtaggctttcatcccaatccagaaggctcccagaaagatggcaacttcagctgccaaagggttctcttcaaatgtaaggaagatgtgatacccgataataagcagatccagcaatgccaacagggaaccgcagtgaaacctgcatatgtctccttttgtgcacaaataaataacatcttcagcgttctggacaaagtgtgtgaaaataaaacgaccgtagtttctctgaagaatacaactgagagctttgtccctgtgcttaaacaaatatccacgtggactaaattcaccaaggaagagacgtcctccctggccacagtcttcctggagagtgtggaaagcatgacactggcatctttttggaaaccctcagcaaatgtcactccggctgttcggacggaatacttagacattgagagcaaagttatcaacaaagaatgcagtgaagagaatgtgacgttggacttggtagccaagggggataagatgaagatcgggtgttccacaattgaggaatctgaatccacagagaccactggtgtggcttttgtctcctttgtgggcatggaatcggttttaaatgagcgcttcttccaagaccaccaggctcccttgaccacctctgagatcaagctgaagatgaattctcgagtcgttgggggcataatgactggagagaagaaagacggcttctcagatccaatcatctacactctggagaacgttcagccaaagcagaagtttgagaggcccatctgtgtttcctggagcactgatgtgaagggtggaagatggacatcctttggctgtgtgatcctggaagcttctgagacatataccatctgcagctgtaatcagatggcaaatcttgccgttatcatggcgtctggggagctcacgatggacttttccttgtacatcattagccatgtaggcattatcatctccttggtgtgcctcgtcttggccatcgccacctttctgctgtgtcgctccatccgaaatcacaacacctacctccacctgcacctctgcgtgtgtctcctcttggcgaagactctcttcctcgccggtatacacaagactgacaacaagatgggctgcgccatcatcgcgggcttcctgcactaccttttccttgcctgcttcttctggatgctggtggaggctgtgatactgttcttgatggtcagaaacctgaaggtggtgaattacttcagctctcgcaacatcaagatgctgcacatctgtgcctttggttatgggctgccgatgctggtggtggtgatctctgccagtgtgcagccacagggctatggaatgcataatcgctgctggctgaatacagagacagggttcatctggagtttcttggggccagtttgcacagttatagtgatcaactcccttctcctgacctggaccttgtggatcctgaggcagaggctttccagtgttaatgccgaagtctcaacgctaaaagacaccaggttactgaccttcaaggcctttgcccagctcttcatcctgggctgctcctgggtgctgggcatttttcagattggacctgtggcaggtgtcatggcttacctgtttcaccatcatcaacagcctgcagggggccttcatcttcctcatccactgtctgctcaacggccaggtacgagaagaatacaagaggtggatcactgggaagacgaagcccagctcccagtcccagacctcaaggatcttgctgtcctccatgccatccgcttccaagacgggttaaagtcctttcttgctttcaaatatgctatggagcccacagttggagggacaagtagttttccctgcagggagccctacccctgaaaatctccttcctcagcttaaacatgggaaatgagggatccccacccagcccccagaaccctctgggggaaggaatgttggggggccgtcttcctgtgggttgtattgcactgatggaggaaatcaggtgtttctgctccaaacggaccattttatcttcgtgctctgcaacttcttcaattccagagtttctgagaacagacccaaattcaatggcatgaccaagaacacctggctaccattttgttttctcctgcccttgttggtgcatggttctaagcgtgcccctccagcgcctatcatacgcctgacacagagaacctctcaataaatgatttgtcgcctgtctgactgatttaccctaaa

SEQ ID NO: 80925 - DNA, 894 bp, Homo sapiens
  sig_peptide (875)...(740): this location contains the signal peptide sequence, MSVPTMAWMMLLLGLLAYGSGVESQTVVTQEPSLSVSPGGTVTLT, Run with SignalP
  misc_feature (863)...(306): similar to gi998395 in the genepept database release 114, Run with FASTXY 3.3t00, default parameters
ttttttttttttctgattgacaatgagaatatttattgagggtttattgagtgcagggagaagggcttgatgccttggggtgggaggagagacccctcccctgggatcctgcagctctagtctcccgtggtggggggtgagggttgagaacctatgaacattctgtaggggccactgtcttctccacggtgctcccttcatgcgtgacctggcagctgtagcttttgtgggacttccactgctcaggcgtcaggctcaggtagctgctggccgcgtacttgttgttgctttgtttggagggtgtggtggtctccactcccgccttgacggggctgctatctgccttccaggccactgtcacggctcccgggtagaagtcacttatgagacacaccagtgtggccttgttggcttgaagctcctcagaggagggcgggaacagagtgaccgagggggcagccttgggctgacttaggacggtcagcttggtccctccgccgaacacccaagtgccactacctgcatatgagcacacagtaataatcagattcatcatctgcctgggcccccgtgatcgtgagggcagctttgctcccaaggatggatccagagaagcgaccagggaccccagaagagcgagtgtttgtgctgtagatgagagtacgtggagcctggcctggggtctgctggtaccagctggggtaaaaactagtggagactgagccagatgtcaagccacaagtgagagtgactgtccctccaggggacactgagagcgatggctcttgtgtcaccacagtctgagattccactcctgatccataagcaaggagtccgaggagaagcatcatccaggccatggtggggacactcatgaaggcgaaggaattccac

SEQ ID NO: 80926 - DNA, 414 bp, Homo sapiens
  misc_feature (1)...(414): n = a,t,c or g
  sig_peptide (171)...(306): this location contains the signal peptide sequence, MLARLFCFWLFFVFVWFESPFLYFNSMPPPTLLRELSPTFPCGKK, Run with SignalP
  misc_feature (152)...(280): similar to gi222341 in the genepept database release 114, Run with FASTXY 3.3t00, default parameters
tttcgttctgcctccacctcacaaccgtcagtttccaggttactgctttctgcaatccctcatctctcatctggaccatcttaattgatctccctgctctacaactcctccaaggcaacttccaaaatactgattttccacctgtagtttttggctctcatggttcttgtatgttggctcgtttgttttgcttttggttattttttgtttttgtttggttcgagagtcctttcctctacttcaactcaatgccccctcccaccttgctcagggagctgtccccgactttcccatgtgggaaaaagcacttgaatcttccatgtgcacacagtctttgatatgtgcctctgttatggagactgaccaaagtgttgtcattatttagttgataaagctgtctcttctagagtgcan

SEQ ID NO: 80927 - DNA, 3771 bp, Homo sapiens
  sig_peptide (595)...(730): this location contains the signal peptide sequence, MKMLTRLQVLTLALFSKGFLLSLGDHNFLRREIKIEGDLVLGGLF, Run with SignalP
  misc_feature (601)...(3236): similar to gi2300443 in the genepept database release 114, Run with FASTXY 3.3t00, default parameters
tttcgtaggaaagttgcttccgcgcctaggaagtgggtttgcctgataagagaaggaggaggggactcggctgggaagagctcccctcccctccgcggaagaccactgggtctcctctttccccaacctcctccctctcttctactccacccctccgttttcccactccccactgactcggatgcctggatgttctgccaccgggcagtggtccatcgtgcagccgggagggggcaggggcagggggcactgtgacaggaagctgcgcgcacaagttggccatttcgagggcaaaataagttctcccttggatttggaaaggacaaagccagtaagctacctcttttgtgtcggatgaggaggaccaaccatgagccagagcccgggtgcaggctcaccgccgccgctgccaccgcggtcagctccagttcctgccaggagttgtcggtgcgaggaattttgtgacaggctctgttagtctgttcctcccttatttgaaggacaggccaaagatccagtttggaaatgagagaggactagcatgacacattggctccaccattgatatctcccagaggtacagaaacaggattcatgaagatgttgacaagactgcaagttcttaccttagctttgttttcaaagggatttttactctctttaggggaccataactttctaaggagagagattaaaatagaaggtgaccttgttttagggggcctgtttcctattaacgaaaaaggcactggaactgaagaatgtgggcgaatcaatgaagaccgagggattcaacgcctggaagccatgttgtttgctattgatgaaatcaacaaagatgattacttgctaccaggagtgaagttgggtgttcacattttggatacatgttcaagggatacctatgcattggagcaatcactggagtttgtcagggcatctttgacaaaagtggatgaagctgagtatatgtgtcctgatggatcctatgccattcaagaaaacatcccacttctcattgcaggggtcattggtggctcttatagcagggtttccatacagggggcaaacctgctgcggctcttccagatccctcaaatcaggtacgcatccaccagcgccaaactcagtgataagtcgcgctatgattactttgccaggaccgtgccccccgacttctaccaggccaaagccatggctgagatcttgcgcttcttcaactggacctacgtgtccacagtagcctccgagggtgattacggggagacagggatcgaggccttcgagcaggaagcccgcctgcgcaacatctgcatcgctacggcggagaaggtgggccgctccaacatccgcaagtcctacgacagcgtgatccgagaactgttgcagaagcccaacgcgcgcgtcgtggtcctcttcatgcgcagcgacgactcgcgggagctcattgcagccgccagccgcgccaatgcctccttcacctgggtggccagcgacggctggggcgcgcaggagagcatcatcaagggcagcgagcatgtggcctacggcgccatcaccctggagctggcctcccagcctgtccgccagttcgaccgctacttccagagcctcaacccctacaacaaccaccgcaacccctggttccgggacttctgggagcaaaagtttcagtgcagcctccagaacaaacgcaaccacaggcgcgtctgcgacaagcacctggccatcgacagcagcaactacgagcaagagtccaagatcatgtttgtggtgaacgcggtgtatgccatggcccacgctttgcacaaaatgcagcgcaccctctgtcccaacactaccaagctttgtgatgctatgaagatcctggatgggaagaagttgtacaaggattacttgctgaaaatcaacttcacggctccattcaacccaaataaagatgcagatagcatagtcaagtttgacacttttggagatggaatggggcgatacaacgtgttcaatttccaaaatgtaggtggaaagtattcctacttgaaagttggtcactgggcagaaaccttatcgctagatgtcaactctatccactggtcccggaactcagtccccacttcccagtgcagcgacccctgtgcccccaatgaaatgaagaatatgcaaccaggggatgtctgctgctggatttgcatcccctgtgaaccctacgaatacctggctgatgagtttacctgtatggattgtgggtctggacagtggcccactgcagacctaactggatgctatgaccttcctgaggactacatcaggtgggaagacgcctgggccattggcccagtcaccattgcctgtctgggttttatgtgtacatgcatggttgtaactgtttttatcaagcacaacaacacacccttggtcaaagcatcgggccgagaactctgctacatcttattgtttggggttggcctgtcatactgcatgacattcttcttcattgccaagccatcaccagtcatctgtgcattgcgccgactcgggctggggagttccttcgctatctgttactcagccctgctgaccaagacaaactgcattgcccgcatcttcgatggggtcaagaatggcgctcagaggccaaaattcatcagccccagttctcaggttttcatctgcctgggtctgatcctggtgcaaattgtgatggtgtctgtgtggctcatcctggaggccccaggcaccaggaggtatacccttgcagagaagcgggaaacagtcatcctaaaatgcaatgtcaaagattccagcatgttgatctctcttacctacgatgtgatcctggtgatcttatgcactgtgtacgccttcaaaacgcggaagtgcccagaaaatttcaacgaagctaagttcataggttttaccatgtacaccacgtgcatcatctggttggccttcctccctatattttatgtgacatcaagtgactacagagtgcagacgacaaccatgtgcatctctgtcagcctgagtggctttgtggtcttgggctgtttgtttgcacccaaggttcacatcatcctgtttcaaccccagaagaatgttgtcacacacagactgcacctcaacaggttcagtgtcagtggaactgggacccacatactctcagtcctctgaaagcacgtatgtgccaacggtgtgcaatgggcgggaagtcctcgactccaccacctcatctctgtgattgtgaattgcagttcagttccttgtgtttttagactgttagacaaaagtgctcacgtgcagctccagaatatggaaacagagcaaaagaacaacccctagtacctttttttttagaaacagtacgataaattatttttgaggactgtatatagtgatgtgctagaactttctaggctgagtctagtgcccctattattaacaattcccccagaacatggaaataaccattgtttacagagctgagcattggtgacagggtctgacatggtcagtctactaaaaaccaaaaaaaaaaaaccccaaaaaaaaaaaccaaaagaaaaaaataaaaatacggtggcaatattatgtaaccttttttcctatgaagttttttgtaggtccttgttgtaactaatttaggatgagtttctatgttgtatattaaagttacattatgtgtaacagattgattttctcagcacaaaataaaaagcatctgtattaatgtaaagatactgagaataaaaccttcaaggttttccaaaaaaaaaa

SEQ ID NO: 80928 - DNA, 2667 bp, Homo sapiens
  sig_peptide (328)...(463): this location contains the signal peptide sequence, MSHMVPLALLLPLFPTSRRAALPFLPLFFGLMFPATTDLPPPHPS, Run with SignalP
  misc_feature (773)...(991): similar to gi5739572 in the genepept database release 114, Run with FASTXY 3.3t00, default parameters
atcagaagtgactctctggaaggatgctgctgcttctcaccagaggctgacgataacgaaggctatcctccatggccacctcctccaggctgccttcgtgaccactgcagctgcagctcccgttccactccttgtcctgggataggtgggcactaccaggggctcctttggtaaggagtaccgggtaggcacccggtcctgccaatccaccactggaacagctggggggacagcagacaggcacggtcggacagacttgacagatcaggcatcaggccctctgcgctggtcccgggctctttaagcaggaacgtgaatggcctcaagatgtctcacatggtcccactagccctcctcctccctttgttccctacctccaggagggctgctctgcccttccttcctctgttctttggccttatgttccccgccaccacagaccttcccccgccccacccctctgcagacttagccgtgcattgcaggcatggaggattaatcagtgacaggaagctgcgtctctcggagcggtgaccagctgtggtcaggagagcctcagcagggccagccccaggagtctttcccgattcttgctcactgctcacccacctgctgctgccatgaggcaccttggggccttcctcttccttctgggggtcctgggggccctcactgagatgtgtgaaataccagagatggacagccatctggtagagaagttgggccagcacctcttaccttggatggaccggctttccctggagcacttgaaccccagcatctatgtgggcctacgcctctccagtctgcaggctgggaccaaggaagacctctacctgcacagcctcaagcttggttaccagcagtgcctcctagggtctgccttcagcgaggatgacggtgactgccagggcaagccttccatgggccagctggccctctacctgctcgctctcagagccaactgtgagtttgtcaggggccacaagggggacaggctggtctcacagctcaaatggttcctggaggatgagaagagagccattgggcatgatcacaagggccacccccacactagctactaccagtatggcctgggcattctggccctgtgtctccaccagaagcgggtccatgacagcgtggtggacaaacttctgtatgctgtggaacctttccaccagggccaccattctgtggacacagcagccatggcaggcttggcattcacctgtctgaagcgctcaaacttcaaccctggtcggagacaacggatcaccatggccatcagaacagtgcgagaggagatcttgaaggcccagacccccgagggccactttgggaatgtctacagcaccccattggcattacagttcctcatgacttcccccatgcctggggcagaactgggaacagcatgtctcaaggcgagggttgctttgctggccagtctgcaggatggagccttccagaatgctctcatgatttcccagctgctgcccgttctgaaccacaagacctacattgatctgatcttcccagactgtctggcaccacgagtcatgttggaaccagctgctgagaccattcctcagacccaagagatcatcagtgtcacgctgcaggtgcttagtctcttgccgccgtacagacagtccatctctgttctggccgggtccaccgtggaagatgtcctgaagaaggcccatgagttaggaggattcacatatgaaacacaggcctccttgtcaggcccctacttaacctccgtgatggggaaagcggccggagaaagggagttctggcagcttctccgagaccccaacaccccactgttgcaaggtattgctgactacagacccaaggatggagaaaccattgagctgaggctggttagctggtagcccctgagctccctcatcccagcagcctcgcacactccctaggcttctaccctccctcctgatgtccctggaacaggaactcgcctgaccctgctgccacctcctgtgcactttgagcaatgccccctgggatcaccccagccacaagcccttcgagggccctataccatggcccaccttggagcagagagccaagcatcttccctgggaagtctttctggccaagtctggccagcctggccctgcaggtctcccatgaaggccaccccatggtctgatgggcatgaagcatctcagactccttggcaaaaaacggagtccgcaggccgcaggtgttgtgaagaccactcgttctgtggttggggtcctgcaagaaggcctcctcagcccgggggctatggccctgaccccagctctccactctgctgttagagtggcagctccgagctggttgtggcacagtagctggggagacctcagcagggctgctcagtgcctgcctctgacaaaattaaagcattgatggcctgtggacctgctacagtggcctggtgcctcatactcctcaggtgcaggggcagggacaagagaagggggaagtaaccccatcagggaggagtggagggtgcctgagccgcccatgtgggcattgggggagtgatgggaatgcccagcagtgatgacgttgactactgactgagcacccactactatgactgagcactcactcgctagatactatcttgaactgctctgtgaaaaa

SEQ ID NO: 80929 - DNA, 495 bp, Homo sapiens
  sig_peptide (69)...(204): this location contains the signal peptide sequence, MCSVRPFPSPLFSQSFGLLFLHSELFYSFLHLLSPTLCKSVVCCP, Run with SignalP
  misc_feature (98)...(202): similar to gi1181427 in the genepept database release 114, Run with FASTXY 3.3t00, default parameters
cacaaacacacacacatatattcagctttgaatttctatatgcagaatatccttcttgcagattatccatgtgctctgttaggccatttccctccccattattcagccagtcctttggtctccttttcctgcacagtgagcttttctatagttttcttcaccttctgtcccccactttatgcaagtctgttgtttgctgtccctactcctcatgtgttcttggccagctgtgggtttggaagtctatagctaggaggggagggactttaggaactgatggcagtgaaacctgtagatggtctcctctggtgttgccaaagagggcggtagtagcctgtttttctagttgatgtctgataccagctcactgtggtttaatgcaagaacaccattcgtagcacaaaactgcttcagttttggtattggggtataaaaatataaaatgcgggaatgtctttgagaaatagagggtcttccctcttttttctgttgcag

SEQ ID NO: 80930 - DNA, 514 bp, Homo sapiens
  misc_feature (1)...(514): n = a,t,c or g
  sig_peptide (179)...(314): this location contains the signal peptide sequence, MMLGSCVLLCSCLSVCTANCTLEACCLVHGVPEPKKGAEHWKTWV, Run with SignalP
  misc_feature (124)...(267): similar to gi1480863 in the genepept database release 114, Run with FASTXY 3.3t00, default parameters
tggggnnnnnnnnnattccctcggctgcacgaattcggcacgaggagcatggcagtcctgcctggctgctgtatgaagggagatcaaataggaacgcccaccgcctgctctctgggcacgcactgcccagagagggctcctgaagagtcctgctgcaggtgcacttgtggggcacgggatgatgctgggctcctgtgtgctgctgtgcagctgcctctccgtgtgcacagctaactgcactttggaagcatgttgtttagtccatggtgtgcctgaacccaagaagggagctgagcactggaagacctgggttctaggaccttgtctgctgccaactggcttctctctggatctcgacttctattctggaaaaagggaaggttgggtgtgaaatcagggattctccagctatgtatctgacagtactgtcttcccatgacttggagtaaggtagtctataccaaaataaaaaaattgataaagtttttgcaatttactaaaaagtaacatgaat

SEQ ID NO: 80931 - DNA, 796 bp, Homo sapiens
  sig_peptide (47)...(182): this location contains the signal peptide sequence, MCYHTWLIFIFLVEMGFYHVGQAGFKLLASSGPPASASQSAGITG, Run with SignalP
  misc_feature (62)...(97): similar to gi5326714 in the genepept database release 114, Run with FASTXY 3.3t00, default parameters
gtgaggaattcctgcctcagcctcccgagtagctgggattacaggcatgtgctaccacacctggctaatttttatatttttagtagagatggggttttaccatgttggccaggctggtttcaaactcctggcttcaagtggtccgcctgcctcggcctcccaaagtgctgggattacaggcgtgagtcaccatgcccggccaactttttaaacatttataattatctatttaaatttacttgttgtctctgattcatttctgaaagtgaaatatagagaaattccttgaaatctggagagacaaataattgttctccatagacaagtggtaagcattactttttctaaaaacttactcagagatttttattatgttatattttgaaatgcagaactgacctttgagcaagtattcacttttttaagtttggaaattgttctaaaatattcactggtattgagtgttaagtaacaggtaaaaaggcacagaaaaccaataggaaattagagttttgtaactgggtgtctccaccaataatatttctctgactctgtatttttgggtaatgttgcatcctcctggttgaaaatgtattcagttatgtgatttgaagtgtttatgaattaagacaaattatcattactagttagaaatgtctcttccaaaagtagtacactatacaactttagtttttgggctacttaggagagaaaagcagatattggcttattttgtgtgccctatccatttaattagaagctcaatgaaaatttttatcattatattatcacctct

SEQ ID NO: 80932 - DNA, 6087 bp, Homo sapiens
  misc_feature (1)...(6087): n = a,t,c or g
  sig_peptide (431)...(566): this location contains the signal peptide sequence, MNCDVLWCVLLLVCMSLFSAVGHGLWIWRYQEKKSLFYVPKSDGS, Run with SignalP
  misc_feature (524)...(4020): similar to gi3043656 in the genepept database release 114, Run with FASTXY 3.3t00, default parameters
aaaaaaagcataacatatccccattgtaacatttggaaactaggaaaatggaaaggagcaaaagcaaaaattctttgaatagtacctcaacccaaagccttctttcttggcacggtagtgtatttctttccatttcgttctccacagtcattatatatgtataagattaatttcattttattttatttattttcagacctgttcaacaggaagtaagattaattttaaaccctgcttttttgaccaagcttctcacctaagcaccactgaatggcagcatggaattccctccacgccatccatgcagctggtcccttagctccagtctctgacttgccatgtctctttgtcctccccgacaggacatgaaaccaaggctctgctgaacaacagtgggccccgctacaagcgcagcaagctggagaggcagatgaactgcgacgtgctctggtgtgtcctgctccttgtttgcatgtctctgttttcagcagtcggacatggactgtggatatggcggtatcaagagaagaagtcattattttatgtccccaagtctgatggaagctccttatccccagtcacagctgcagtttactcatttttaacaatgataatagttctgcaggttttgatcccaatttccttatacgtttccattgaaattgttaaagcatgccaagtgtacttcattaaccaggacatgcagttgtatgacgaagaaacagactcgcagctgcagtgccgagctctgaacatcacggaagacttaggacagatacagtacattttctcagataaaactggcactttgacagagaataagatggttttccgaagatgcactgtgtctggtgtagaatattctcatgatgcaaatgcgcagcgtctggccaggtaccaagaggcagactcggaggaggaggaggtggtgcccagagggggctcggtgtcccagcgcggcagcatcggcagccaccagagtgtccgggtggtgcacagaacccagagcaccaagtcccaccggcgcacgggcagccgggccgaggccaagagggccagcatgctgtccaagcacacggccttcagcagccccatggagaaggatatcacgcccgacccaaagctgctggagaaggtgagtgagtgtgacaagagcctagccgtggcgaggcatcaggagcacctgctggcccacctctcgcccgagctgtctgacgtctttgatttcttgatcgcactcaccatctgcaacacagtcgtcgtcacgtccccggatcagccacgaacaaaggtgagggtgaggtttgagctgaagtccccggtgaagacgatagaagacttcctgcggaggttcacacccagctgcctgacctcaggctgcagcagcatcgggagcctggccgccaacaagtccagccacaagttgggctccagcttcccgtccaccccgtccagcgacggcatgcttctcaggctggaggagaggctgggccagcccacctcggccatcgccagcaacggctacagcagccaggcggacaactgggcctcggagcttgctcaggagcaggagtcagagcgcgagctgcggtacgaggcggagagcccggatgaggccgcactggtgtatgcggccagagcctacaactgcgtgcttgtggagcggctgcacgaccaagtgtcagtggagctgccccacctgggcaggctcaccttcgagctcctgcacacactgggtttcgattccgtccgcaagaggatgtcagtggtgatccggcacccgcttaccgatgagatcaacgtctacaccaagggggccgactcagtggtcatggatctcctgcagccctgctcttcagttgacgccagagggaggcatcaaaaaaagattcggagcaaaactcagaattacctcaacgtgtatgcggcggaaggcctgcgcaccttgtgcatcgccaagagagttctgagtaaagaagagtatgcctgctggttgcaaagccacctagaagccgaatcctccctggaaaacagcgaggagctcctcttccagtctgccattcgcctggagaccaacctgcacttgttaggtgccactgggattgaagaccgcctgcaggacggagtccctgaaactatttctaaattgcgtcaagcgggcctgcagatttgggttctcactggtgacaaacaagaaacagctgtcaacattgcatatgcctgcaaactgctggaccacgacgaggaggtcatcaccctgaatgccacctcccaggaggcgtgtgcagccctgctagaccagtgcctatgctacgtgcagtccagaggcccccagagagcccctgagaagaccaagggcaaagtgagcatgaggttctcctctctctgcccaccctccacgtccactgcctctggccgcagacccagcctcgtgatcgatgggagaagcatggcctacgctctcgagaaaaacctggaggacaaattcctcttccttgccaagcagtgccgctccgtcctctgctgtcggtcgacgcctctgcagaagagcatggtggtgaagctggtgcggagcaagctcaaggccatgaccctggccataggtgatggagccaatgatgtcagcatgatccaggtggcagatgtgggtgtgggaatctccggccaggagggtatgcaggcagtgatggccagcgactttgcagtgccgaaattccgatacctggagaggctcttgattcttcacgggcattggtgctactcccgacttgccaacatggtgctgtacttcttctacaaaaacacaatgttcgtgggcctcctgttttggttccagtttttctgtggcttctctgcatctaccatgattgaccagtggtatctaatcttctttaatctgctcttctcgtcacttcccccgctcgtgactggggtgctggacagggatgtgccagccaatgtgctgctgaccaacccgcagctctacaagagtggccagaacatggaggaataccggccacgaacgttctggtttaacatggccgacgccgccttccagagcctggtttgcttttccattccttacctggcctactatgactcgaacgtggacctgtttacctgggggacccctattgtgacaatcgcgctgctcactttcctgctccacctgggcattgaaaccaaaacctggacctggctcaactggataacgtgtggcttcagtgtccttttgtttttcaccgtggctttgatttacaatgcgtcttgtgccacgtgctatcctccgtccaacccttactggactatgcaagccttactgggtgacccagtgttttacttgacttgcctgatgacgcctgtcgctgcactgctgcccagattgtttttcagatccctccaggggagggttttccccacacaacttcagctggcacgtcagttgaccaggaagtcccccaggagatgcagtgctcccaaagagacctttgctcagggacgcccttncgaaggactcgggaaccgaggcactcatcagggaggacagtcaagacctctgtgcccctgtcccagccttcttggcacacacagcagccggtctgctccctggaggccagcggggagcccagcacagtggacatgagcatgccagtgagggagcacaccccctgctaaggggctgagcgcaccgggccccaatgtcctctgcgccaggggaggctgtcctgaggagtccaggagggtgtcctgaggagtccaaggtgagagctgccagcaccggcagggtgacccccctgtcttccctcttcagcctgcctaccttcagcttactcaactggatttcctcctggtcgctggtcagcaggctggggagtgtcttacagttctcccggacggagcagcttgcagatggacaagcgggacgtggacttcctgtccagccccactcaggccgatcaggacttcaagggccagaccacagactacttataggagcatcttcaaggcggtcacagtgaaaaccttgaaatggccttttttaatatatataaataaatgttaatattatttatgtttattatttgcacagaagagttctagggagatgtatttctaaatgtttcccaggctaatacaggaaacaagaggtaccaaaaaagaaagtttattttttaaaattctaagtagagtatattgaaaagaaaaagaagagccttaacatatataaaagtttaaagaagagtaacacttgaaaagtgtgtttagatttattttttcatctcatttttaagaacaagcagtacgatttgttttcttcaacatgtgtgactgcgcactgagtacaaatgtgtgactgctcatggttaatgcaggcaggtgtgaacatgggggaacaatgagcagagatggcagagggcagagcacatggcccccagaggcttccagtctcactgacacaggagggctgggctccacttcatccagatgaaggaaaggaagacctcaagaaaaattcacagttgagtgcatcccagcattctgttccgggcaggcatttcaggaagaccgccttgtaggtattacatccctggtgtcgtattttgcctgttaaatcgtaacaagcaataaacaactttcactttgcaaagacagtgtgtccagttaccactggtgtatgaaatgattaatacctgacctcacagagtatgatctgagggcacttccgtaaggcaagtccttttagaggctatgaagaaaacagctgcatggcacataccaaagctgctgcacagccggccaccatggcaccctgcaccaggccatcagcaccacgtgccaaggagctcagcggtcttcaggcatttttgtaatgagccattagttctgtccctctaaaactagaaaaggaagggcaggaaatgataacaacccaaggcaatgatatggcatgtcatcttctgagcccttctttctactttgtcaaacagttcttagttgctggctctgctcggcaccggggctgtgaagggtgtactccctgctgtgtgggagggacctagggcctctttggatgctgtcttcgaggacagcaatgcagagagggcataggatctgaggacaaggaaattcctcagcatggcgtatcaggaaagcatggctcattctgcaatgagccatgagtgtgggccatcgcaagtcacagaaattgcacctcattccagtcaagcagaaaaacaggcacaggctcagtgtaggtcccaagagagggtgcctggactcagcaactcggacctgggcttttctcccagctttcagggacagctttgtcctgagtctgcctctgttcacggggatgcttggctggagtcacccccaggacttatccatgcatcactattcagaagacacagagggcccctctctccacattccaaacagagtcctggtttcctcagcctcaccctgcatagcttgcacaacatcctcagaaccattcactggcaaatggaggggaacgtgctgactgggactcccagctggagctgggaggagaggtccacttcccttagaacacctgagctgctgcatgagtggacgtcagaagaatctctatgccctgttaaatggggagacaaaggggtggtgggggcttcagccagtgatttcggaccgaaggtgacagccgtcccaaccctgcccagcctgatgccacctcctctgttcttggaacaacgcataggaaaagaatctcctttggaaggtgacactgctccctgaattaaggtaatggttgcgagcaccaagtacaaggactagacgcatatttacctgcgtatctgagagttccagattcccagcttccagatgatccttgcacagacaacctaccttctttccagaggatgtctttctcctctggagagtagatgcttgctcttgggaaacggaatgaccttggcgctggcttcaggaatatgcatcccacagccagtttagagaaatacatgttgtaaatggcattgacagctgctctttaggatggggagtattatggaaatccacaataacaatctatggcaagcaact

SEQ ID NO: 80933 - DNA, 740 bp, Homo sapiens
  sig_peptide (49)...(184): this location contains the signal peptide sequence, MILSLLKFFPLLSSDTPNSSVPLLTTPRDPPYHLSPCSSSYFVKE, Run with SignalP
  misc_feature (193)...(57): similar to gi609436 in the genepept database release 114, Run with FASTXY 3.3t00, default parameters
tcgtgtaattccagtttttgattgtcaactcttcaccacattaaatatatgatcctttctctcttgaaattctttcctctcctgtcctccgatactcctaactcctctgttcctcttcttaccaccccaagggatcctccctatcacctttccccctgctcttcctcctactttgtaaaagagggcttttctgtggtttagcacttgaatttctgcagtacgttgattctgacgctcatatattcccacagtttcccctgaagagtcccatgcgtgtcacctcctcaggatgggaactgtaatcacctcaaatacaacgtaatgttgggtctaataaggaaactccactctgctccactttaggaagaaatcgttgctaggaacaacacatattaaactgctctatgctatttatcagatatttctctaagactggtggtggagaagaggttcctgaagtgacagaagttttaagggggaaagacaaggagatggagaagaacgattttgccatcaaggatcaaggcagaggccaagcgcggtggctcatgcctataatcccagcattttgggagcctgaggtgggtggatcactagaggtcaggagttcaagaccagcctggccaatatggtgaaatcccgtctctaccgaaaataccaaaattggccgggcatggtggcacacacctgtaaccccagctacttgggaggctgaggcgggagaatcacttgaacccagg

SEQ ID NO: 80934 - DNA, 482 bp, Homo sapiens
  misc_feature (1)...(482): n = a,t,c or g
  sig_peptide (172)...(307): this location contains the signal peptide sequence, MVRFPSCALPCTWHCPIIPLYCRCLFNCLLSLWMLWEQGPYLSSL, Run with SignalP
  misc_feature (75)...(283): similar to gi11076 in the genepept database release 114, Run with FASTXY 3.3t00, default parameters
agaggccngnnnactgataatgagaacctgccagaggccggaattcccggctcatgctccaaaatccaatcacactgtcctgtctcccgtcactcagcctgctgcaaccagtcatttctgggccttggcacgtgctgttccctctgcctgaatccatctcttcgtctagacatggttaggttccccagctgtgcactcccctgtacctggcactgccctatcatcccactttattgtaggtgcttgtttaactgtctgctctccctgtggatgctgtgggagcagggaccatatctgtctagtttgccttgggatccccagagcctagtacagtccctgggacaaagtaggaagaggaatggactcatcaagttagacttttccaatctgaatgatctgtgtgctgcctggaaagcctggagtaggttaagaaatgaagacagaaggataatggggttggaacgtgcaaaagctgcctaaaa

SEQ ID NO: 80935 - DNA, 926 bp, Homo sapiens
  sig_peptide (418)...(553): this location contains the signal peptide sequence, MILFCVMVFILFITFHLQLPTVGDVTYCFCSNKLRKTRELKKISS, Run with SignalP
  misc_feature (40)...(208): similar to gi435675 in the genepept database release 114, Run with FASTXY 3.3t00, default parameters
ctgtggtgtaattcgtctcaggcaagatctttgattttcctggatgccacctggaaatgccacccattgtgtttcttttctgtcaaatgtaaaccctttagatgtgaatgtactggtttaatgatgccattattctgcctgccagaacgcagtaacccagtgtctcacagagcacaaggggtgtgccactggtggtacacaagataatttttaagtagtttctagaaacaacattaagtaataccaaatcacaaagaatgtttccccttttctattcttttttcatcctgattacagcaaggaaaaagtctctgtttagtgctagcaggtcctttacacctttcagacactatggctcttttccctttttagcaaagaaagagcaggcctcagagtcttctgtctagatagaatttaatgatattgttttgtgtcatggtatttattttatttattaccttccatttacagcttcccacagtgggggatgtgacatattgtttctgttcaaataaattaagaaaaacaagagaactcaagaaaatatcaagtaattaacacaccagataagtatatgtggcaaaagtcacttcaaagaattaatgtcagaaagatggtgataatgaagcaaaagaaaggcagattatgctggccgggcgtggtggctcacgcctgtaatcccagcaatttgagaggctgagatcacttaaggtcaggaggttgagaccagcctgaccaacatggggaaactccatctctactaaaaatacaaaaattagccaggcgtgggggtgcatgcctgtaatcccagctaataaaaaggctgaggcaggagaatcacttgaatccaaaaggcggaggttgccgtgagctgagactgcgccactacactccagcccggggtgacagagcaagactccatctca

SEQ ID NO: 80936 - DNA, 745 bp, Homo sapiens
  sig_peptide (90)...(225): this location contains the signal peptide sequence, MGPLSALLSQSLLLSCTAPRERLPGGGWPGTPGMGPLRSGTSAPS, Run with SignalP
  misc_feature (267)...(157): similar to gi2961551 in the genepept database release 114, Run with FASTXY 3.3t00, default parameters
ctggtgtaattccaggcgaagggccctggccttctgtaccccagtgtttcctgtgtgccaacaggaacaggtgcttagcatctcgtgccatggggcctctcagcgccctcctgagccagagcttgctgttgagctgtacagcgcctcgagagaggctgcctgggggaggctggcctgggactcctggcatgggcccactccgctcaggcacctctgcaccctcctcgattgtccgtaagggcagggggtccctccgggccctggcctatgccacaccctccggaggtgaagccggggtgctctgcttgttctcgcagtacggcttctctcacagggcaaaggtcactcgtgacgtgtcccagtcaaaaacggggtaaagtgtggggaaacgcacaaagtgagttttgctttttagagaagagcggttgagcacacgccatgctggctgctcagggtggggcgcaccctgtagagagcttaccgaacttgggggtcctgagtccggaactgatggaatcggggcctggatcgacgccccacagatgtgttgactcctactccacactgactggtaaatgacaaataactgaacatctccaacttctttcctgatgtgatatctgcactttcccaagttggtattgatccctgtatacaacacaacctgcattcttggcgccagaatattcatgttgaagaggctgtcaagcgaccttctgacgttggagtggacccttgagacccc

SEQ ID NO: 80937 - DNA, 718 bp, Homo sapiens
  sig_peptide (103)...(238): this location contains the signal peptide sequence, MASAPKLGFSVFTSLFSFGGGCLPCDFNFLVDLRVVDSAFIQPLY, Run with SignalP
  misc_feature (208)...(101): similar to gi806 in the genepept database release 114, Run with FASTXY 3.3t00, default parameters
gtcccgtaattcagagttccaacaattccgctagtccctattcatcatccaggaagacatcagttaccatgtaagtgttcttaccagttgctggctctggcaatggcttctgctcctaagctgggattctctgtattcacctctctctttagttttgggggtggctgtttgccctgtgacttcaattttctggttgacttaagagttgttgattcagcttttattcagccactttattcagctttttacttgctgcgaggatgggaatgatgactcccaagcccttcacatgtttgtgcagaaaccagaagtcctgtgttcacttttacccatttttttttctttctgtattgcagtttggataatctcaactatcttcaagttcactgattcttctgtcaatcccaatctgctatgaaagcccttctagtgaatttttcatttcagttattgtaccttccaatgacataatttctatttgggtattccgataacttttatccttattggccttttttacgaagagaccttattcccatattttcctttaacccctcggacatggatctcctttcgcccctatttaccagacctttcacagcatctctcctactacggccccatgggcgggccttcctttcccgaaaccccctgccacttaaacgccgctcccaccacccctcttttcagggtctcctaccgcttctcccagcgcgcg

SEQ ID NO: 80938 - DNA, 845 bp, Homo sapiens
  misc_feature (1)...(845): n = a,t,c or g
  sig_peptide (508)...(373): this location contains the signal peptide sequence, MFSTAFWPPFLNPSLMFFTLLCSDFMPCEAVCSSIIYSFIPVTKT, Run with SignalP
  misc_feature (320)...(497): similar to gi214950 in the genepept database release 114, Run with FASTXY 3.3t00, default parameters
caggacagaaggagcaagctgtggaatggtataagaaaggtattgaagaactggaaaaaggaatagctgttatagttacaggacaagcgttagcaaagtttggagcaatcccctcagaggcgattgggtggttggagccaggactgctggggaggaggcggctgcagccagcagctgacataacattaatagctcctcaccactgtgcatgctcatatgtccagtactttgcatatatgactgagggctgccaaggccagacaacgcacatgtgtcctggatcctcccctggcctggggcagcagcagcagcagcagctgggcttgggatcaggtgtgaggctgtgggcctctggtatggggggctgcaccctgggtcttggtgactggtatgaaactgtatatgatgctgctgcacacagcctcacacggcatgaagtcactgcagagcaaggtaaaaaacatcaagcttgggttcaggaaaggaggccaaaatgcagtggaaaacattttctctttgggaaatgagcatgataatgtgtagagtgagcactgtcattccaaatgcagtttgggtggacaggttttctgtgtttatacatctcagactgctgcaggacctgtctcactccagaaagcatgagccctccccacctggaggctgcacaggtaagcctctgaaatcccaaggcataaagtcccatggaagccgcttcctctgcaaggccaaatacatacgtcacagaacccaataaggtcctacagcaaattcgacaggcctttttttttgcccgaattccgccncnctgcgaaggttctcaaggtaatcagttnttnttacgctct

SEQ ID NO: 80939 - DNA, 1294 bp, Homo sapiens
  sig_peptide (564)...(699): this location contains the signal peptide sequence, MQVKNFSLKIAFCLLNMRLLGNWATWIFISCTKHLAIFKPLHPAE, Run with SignalP
  misc_feature (636)...(846): similar to gi521108 in the genepept database release 114, Run with FASTXY 3.3t00, default parameters
aatggtcccaaaaggaagaaactgtgcttgtcttcactataaagagcagagaagtgggagaggtattgaaagctgtgggtggagttttgcaggtaagattgtgtgaaagaggtgagggaactacaatctaggggaatgtggataggagagtaaaagggaattctagagaacaatccctactgacttcacacaacttaagaaatgcaagtaaagggccgggcgcggtggcccacacctgtaatcccagtactttgggaggcagaggcaggtggatcacttgaagtcaggagttcaagaagagcctggccaacatggtgaaaccccatctgggttagtcaggcatggtggcatgtgtctgtaatcccagctacagaaagatagagaggtggctgaggcaggagaattactcaaacccaggagttggaggttgcagtgagccgagatcacaccactgcactccagtctgctggacaacagagcaagactcagggggtggggtgggggaaggaaagaaggaaggaaggaaggaagaaaggaaggaaggaaggaaaatagaaatagaaatgcaagtaaagaatttcagtttgaaaattgccttttgtctactgaacatgagactgcttggaaactgggcaacgtggatttttataagttgtacaaagcacttagcaattttcaaacctctccatcctgcagagccagctcaatcacttctccagaaagacttactgagtcctctgcactgaacaggtgtcctgtgctccaggagagccctgggctggctcctagtgtagccattatgaccctggaatgcaccatctttcacatcactgcctggccttctagaatctcagcttcttaaatcaagaaattgtgtcttgttcatgtctgaattccccaagtgaacacagtgagtgggtgcttgacaaatctttgttggtaatgagcaaaaaaggggattctgtgcccaataccatgaaatcaatgcacagaagattcaatcaatcaagaaaggtgcacagacgctggccacacacactgacatttgttttcagatgttcccagtccccctgacttcccaccaatcccattcattcattcccacaagcatttttgctggggtggaagcagggccatacagggtgtgtacatcacagatagggtgggtttgtataatgagtataaaaaacttctagcagaagatgacaaagtatatcaagaaagggctctcttcgaaatcacaccactgcactccagcctgggtaacagagggagattccatctaaaaaaaaaa

SEQ ID NO: 80940 - DNA, 2950 bp, Homo sapiens
  misc_feature (1)...(2950): n = a,t,c or g
  sig_peptide (699)...(834): this location contains the signal peptide sequence, MCESTELNMTFHLFIVALAGAGAAVIAMVHYLMVLSANWAYVKDA, Run with SignalP
  misc_feature (82)...(941): similar to gi1663517 in the genepept database release 114, Run with FASTXY 3.3t00, default parameters
aaaaaaaacaccagtttttccaacatctaattgagcttttgattaattccgtgtaccagattctactgaagaaaggtagccatggaagagaatatggaagagggacagacacaaaaagggtgttttgaatgctgtatcaaatgcctggggggcattccctatgcctctctgattgccaccatcctgctctatgcgggtgttgccctgttctgtggctgcggtcatgaagcgctttctggaactgtcaacattctgcaaacctacatttgagatgggcaagaactgctgggagacacactgggatgtttttaccatggattgacatctttaagtatgtgatctacgggcatcgcagctgcgttctttgtgtatgggcattttgcttgatggtggaaggtttctttcacaactggggccatcaaagatctctagtggggattttcaaaatcaccacttgtgggcagatgtgtgagcgcttggttcattatgctgacatatcttttccatgttgggcctggcttgggagtcacggctttcacctcactgccagtttacatgtacttcaatctggtggaccatctggccggaacaccacattagtggagggagcaaatctctgcttggaccttcgtcagtttggaattgtgacaattggagaggaaaagaaaatttgtactgtctctgagaatttcttgaggatgtgcgaatctactgagctgaacatgaccttccacttgtttattgtggcacttgctggagctggggcagcagtcattgctatggttcactaccttatggttctgtctgccaactgggcctatgtgaaagacgcctgccggatggcagaagtatgaagacatcaagttcgaagggaaggaggcaagagctttcatgacatccactctactcgctccaaagagcggcttcaatgcatacacatgaaatggcatcttcctgtttcttttcttaccctttggaatggcattgggtgttttaactaaggggccatccaacccttcccaaccttttaaaaaacaaaacggaaagtgctttctcattcaatggatatgtaaggtgacttatgaatcaccctgagtacaaatatctttgttgtttagcactttaaatttcccaattttatttaaattggatgtaaatcagatctttttctacaaggctcctattccaggcctttttttttggaaattttcttcaaactcatttactaggttctgtaaaattcaaaggttactaacattgttcaaatggcaaaggtttgttntggatttttttaaccacttcccatgtgttatacataacaccttttgcattatttccttatgttttgaaaagaaaatagctttttatactttttagttttgatttcggtaactagtttaactacaggtaaccttcaaagggaccattgtacattatgaacaatagatagagatgacatcttgatgactcttgaaatatggaaattttgtctgaagatcagtggccatattactgtaggccctggttcatgttttcatcaatctaaggtgcaatttctaaatttgtaagagtaggtttaaaaaaaaaagtgcttcttatctttgttaacattgtacttttccttgatgttcttaaaaggtatttccctcagattactcatgtttatgttgtgagcatgtagaaacagtaatgctaatgcatggctagttgcctttttaagattgtgacaccaggcttaccttttaaagtttagtatatagagacaattttaatggaaataactactgtagactattgaagaatgatctctttgtgatttaagaagtggctggattggaacttttaatatgctaatgtggaaaattaattacctttatgaaggtggtttattacaaataagcacactaacccctcggaagttgttttacctactttaaaagttttaatggattgcacctctgtaaactattcctaaaatgtgtatgatatatttgaaaaggcttccattaatataatagctttgcttgcagccttccaatctatgttggtttaccctgtagtgttttaaaaaagtgtggtccagaggccccctatagaatgtaattgtttgaaagtgtagtgatatatttgtgtttttatttcaagtaagtcattttaaccgaatgttcattcatattcatttataaaaagtacctgtatcaaaggaattttaacaaagagcaatcagtattattggaccaaatttggtgtttgttttcaccttgacgctcttcttttcattatttctaatgctacaagaatgctgtaaagtgtcttctaaaatgatgtagcctgacaagacatttttttcagtgtataaaactaggtagtattgtgcactgatttgaccattgtgaaatcctttctcagtgtaactgcatttctaataaaaatttattgagtgaaacaatctttggtacaatgactagtcatgcatcatcagtaattttacaagttcttgtagtaggtagggggtactactagggatatctgtggcatgattatgcattccgtagtattatttaattaatttggggttcattttgcttcctttcctttatgcttaagattatccttactggttcaacatttttctgatatatgcagtattacagatattcagcaaaagtattaatgggcttctttaaattctatattatagtatttcagttccgtgtcttaacagtttgtgataatttctaaaactgtcttttcaacttatgtaatgatgttgacacttttggcttttatttctggtattagagtttgtattttcacagagtgctttgtagcaggcattacaattaatctgttttgtacataaatgtgccaacagcttgatggtggcgtttttgaaatgtagaacagagtgcttgcaaaatgtaataaatacacttgtgtaaaaaaaaaa

SEQ ID NO: 80941 - DNA, 410 bp, Homo sapiens
  sig_peptide (118)...(253): this location contains the signal peptide sequence, MCWSLLTHGFGLMGGAAHFHKHPGCSLHPLFKVRSLDEQHGSTWL, Run with SignalP
  misc_feature (353)...(178): similar to gi161546 in the genepept database release 114, Run with FASTXY 3.3t00, default parameters
cgcttttcagaaaaagaaacatatttctggagggtaagtaacccaaatcgtacagctgagccatctgtctgcatctcaagcattgaggcagcattcggcctccgagggtgttgtcaaatgtgctggtctctgttaactcacggttttggattaatgggtggagctgctcattttcacaaacacccaggatgcagtctgcaccctctatttaaagtgaggtccctggacgagcaacacggcagcacctggctgcttgtcagcaatgcagaacatcaggcactccctggagctacagcacaagatccccaggcaggcgcatgtgcatccaagtttgagccgcactgctttctgccactacggaggaatgtatcctttactctcttcctccccttcgtctcatctttgttggg

SEQ ID NO: 80942 - DNA, 387 bp, Homo sapiens
  sig_peptide (109)...(244): this location contains the signal peptide sequence, MLMIWSAGRWTYAVLFHCCQTLLPWKVPLEKVWHHQDGQVGSGLS, Run with SignalP
  misc_feature (122)...(294): similar to gi504527 in the genepept database release 114, Run with FASTXY 3.3t00, default parameters
ggaaattacgtcgataccaggcaagaaatctgagagccattatctaggagccttgttgaactgagtaattaagggcaattaaacttttctgcttgctctctgcaaaatatgctaatgatctggtctgctggaaggtggacatatgcagtgctgtttcactgctgtcagacgctgctgccctggaaggtccccctggagaaggtgtggcatcaccaggatggtcaggtgggcagtgggttgagcgtgcagcctcgtacccagcctcctgtgtcctggctggctgttccaggacttgcaccttttcagcagttatctagacctggccgcagtggcctgagttgcagcgattcgtattcactcattctttgatgctctatatccaccatt

SEQ ID NO: 80943 - DNA, 7705 bp, Homo sapiens
  sig_peptide (3628)...(3493): this location contains the signal peptide sequence, MLWVTGPVLAVILIILIVIAILLFKRKRTHSPSSKDEQSIGLKDS, Run with SignalP
  misc_feature (7402)...(1675): similar to gi205133 in the genepept database release 114, Run with FASTXY 3.3t00, default parameters
ttttttttttttgtaagaaatctgattattcaaatttattaccatcaagaattatgcaatgatgctgtagtttttcttaacaaatagaaaacagactgtgtacaacagtgaactctacagcactagcacccacaaggtaaaaatgaatgtttcatcatccaacattaccaaccctggaatgttgatcttgacttagcctagctaggtttggggacgtcggcaccacgtccctcagctaaaacagctatgcacccttccccgcccccacttacctatctagatagcgctgcccagaggaagaggcgctctccctgcccctcagcaagctgggataataaggactgattagagtaccattgatagaagtccagtagtcttgccacattggtttatgagggcatcttggagtggaaaagagcgattatcgggggctttgaaaacagctgcaaaccagggaggaaaatcatctggcccctgctctgaggacagacatgtgctaccaggcccactggcctggacctgaaaggccagccacgcccccgcttggccctgaggtgcatggggtgtggcacacaccctaacctgtgctattcaccttggccacacagccagaccccacagcctacaaacaccacaccatactgcaatgctggggaccaaagccaggctctgtgggcccaggtcagccagcagctccctcgggaaccccaggcacacggagttgcttcccctcttgagggtttgaagcagaagccaagggctgactctttttttttttcttgggttttttgttttttttgttttttatttttgtggttttttgtttttgttttaacctttgcaaacacgatggtgatgaggaatgccttgccaggctctcccagacacatctgtggttctgggctgtgaatgttaaacacacactgggatagacgaccagggatgagtgttccctatcttctccccgcccaccactgtcaatgtggcctaaaaaaaggctttaaagggaaaacaaaacttaaaaaaacattgagtttccctgcatttagctgaaacaggatctcgtctgaagggctggaggagcagccggatcagcactgcctcccggcccacggccgagcctccgctcaggctggcagccccagctttgcacgaggaaggcaatgttctgtccttcagcagaagtcatacaaaataaggatccaaagtgaactcaagaaaaaaaaaaacaaaacaaaataaaccccaacccctacagtggcccattctgcagatacggattcgcgaaaggaaaaatcagagggaagaggctaaaatccctcagtctaccccacttaatgtattaaaaaggaggctttgccccaaccccaccccatgagaagaagcatgagaaatgcgggagcgcaacagagagcttgaagcgggctccaggtgggtctggtggacagaagggccacagtgcctgcctgctgggccatccacttgcccagggatgttctaggctctctgattggtgtggcaacgttcctgaaacgctgtgatccccgtgggctgtgctctgccagtgacagcatctgcgtaggagggctggacgatggtcggtatggctcagaggagctgggtcccctccggagccccacggcgggggtggcggaggagaggggagcggtagttacgttgcatagtggtcaaagctgccgaggtactccagggccgcacggtagcacagctgatactggtcctctgtctgcaccatggcaggacgctgtgtacgcagggtcttcacggtctgaaacatgtcgaccacgccctcatagcgcatgcgctccaggacgatgctcagagtgatgaacaccccggtgcggcccacgccagcactgcagtgcaccgtgataggcccatcctgtccaaactgctccttggtcttatgcacctgcccgatgaagtcaatgaatccctcgcctgtcttgggcacgccctgctctggccagtctgtgaactggaactgccggattgtccttgactgcccatcccgggcatccgtgaccttgaactcacgcaggatatactggggcatgttgtactcagccatcgggtcaacaacaaagtactggtagcgagcagagcgctctgctggccagtactggtggcatttctccctgcccatctcccgaagcttggtcagcatgacgatgatggtggaattgtgctcccatagcatgcgccagaagtcctcggtgctctctgccagaggcccctgtgtagctatgtaggccttctgctgtctataaccatccaggaagctggcattgatgtagtcagagccctccacaccacggatgggctgcagacacacacgggtcaattcgtagggcatgatgttcaccagccggttcttgaacttgttgcagggcaggttggcgctgatgaagcgggacgtgtgggccttggagctggccagcaacttgaactcgagctccatggcggtcacactctcccctggaggcacttggcccagcttctggatgtgggcatacaggttgcgggcaggcacctctgtgtggccgcacgtggcagcctccagcagcgcctcatggatgaacacgtactggtcctccgtctgcaccatgtagttcctctgtgatcgcatgcaggtcacgtggccatagatgtccaccgtcttctcgtgcttcatccgctccaacatggcatcaatcacgatgaagcagccggtgcggcccacgcccgcgctgcagtgcaccaccatgggccctgcgtctagggggttgcaggccttgacccgtcgtaggaaggccaggatgggagttgggtactcaggaactccatggtctggccaggccatgaactgaaactgacgcagctcacgcttctcactggagccactcttgtggagtgcgaaggtgcgcacagtgtatgtggccagctccactgtgtccaacagggtcacctgaataaggccacaggtctcggtgccacgggctggccagtactgatcacattttacccgggacttctcctccagccgtgtcatcatgaccacagtggccgtgcgctgttcccacaccatcctccagaaatcgcccatggtctcgggcagggggccctgcgtggcgatgtaggcattctgcttgcggtagccatcgatgtagttggcattgatgtagtcactcccggggacgccatcgatagaggtaaggatgactcgagagtggtcgtaggcgatgacattcgcatagcggttcttgggcttgttcacctccaggtttgaattctcccacgtgaactgctgtccagggtcgatggactcatactcctgggagaacttgaggccatcgttggctttgaggcgctcgatgttgtccgccaggtcggtgatggggatgggtgggtggtctcgcatacctggggtctggtagttgagcctccgcatctccacagggtcagaggagtgggccagcaaggagtccttcagtccgatcgactgctcatccttagaggacggagagtgggtccttttccttttgaacaagaggatggcgatgacaatgaggatgatgaggatgactgccagcacgggacccgtcacccacagcatctccggctcctcctgctgctgggctggtgtcacctggaccacgatctcatccgagtaggggctggaggcatagcgcttctggtccatgggttccttcaaggaggcaagcacaaagcactggtagctcaagtccggagacaggggccggttgtagaagccccggtagttcttcttgtcccccaaggtaaaggtctccgggagcacatccagttgagcagccacatatggcttcagacgttctgcctgccgccgccgccgccgctgctcctctccgccttgctcgatggcttctagaagctcgtccagctccagttcctcgggtgtgctccaccttggcgtcagcatgctcccgcccacacggtcaatgggtaccacaacaatgtagaaccacctgacaagcgaggggtcttgcacatggggcatggagagatcgaagcggccgtcctctatgtaggcagaggcaggcagcggcttgtgaggcaggaggtcgggggctgtgcggatggacaccaggtgctgcaggccccctgcgctgctgccacggttcatcagcacaaacgagtactctgtgttgggctgcaggtctgcgatcagcttccgcatcgagtgcccgtccacctccacactctgcccattgtacagaatcttaaagggcacagctgacttataggagtcgggaacctcccagctgagcagcacagacgtcttcattgcagccgccacccggaagttcttggcaaacacttgctccaccggcatggtccgggactggatgctggggctgagtgggccagagcctttgctggtccatgcgcggaccttgatgtcgtaagtggtgtctggcttgaggccagtaagggtaaagcgggtgtctgtcgtgatgttctgcagctcctgttggctgttgatgtctcggaacaccacggtgtagctgatgatgcgcccgttcctctccgccagcactggcgggtcccaggccagttctgtggtagacgtggtcagtcctgtcacatgcaggttttgggggaagccgctgggcaggtcctcgggggtcctgatctccttctcgaactcctcacccaagccagcccggttcttggcagcaagccggaagatgtaggtggtccccttgtgcaggccggtgactgtgaagtgctggtcatccttgccgaaatctatggtgttgggccgcgcctcgtcggcccggcagtactgcagccggtagcccagcagctcgccaggcagttccttgggtgggtgccactggagcagccgcagtgttcatggccgtggtgctgatcatcatggtgggccggcctgggactgcacctgttgtagtgacaattttgggcttgctgcgggcaccatcccccttggtggtataggcagcaacagtaacggagtaggtggtctccggggtcaggccgctgatagtggtttcatagtcctcggactcctctggccgccactgggcctcggctagcatgacgtcttggatgatggggagtccacggggctcgccattctccagccgcacgtaggtgacctggtagccgcggatctggccatgctgcttgctggggacaggcagcttccagtagacatgcacagcagtggagttcagtggctccacctccaccttccgcggaggcccgctgggcacgtcctcatcggtgcgcaccagcaccgggctgctctcggggccggggcccacgtctgtgtgtgcccgcacccacacccggtactccgtccacttctccaggcccaccaggtcccagctggagtgctcacggctgatgccatccaccacatgccgcccgcggtcctcgccgtccaccgcctcgtaggccacggagtactgggtgataacgccgttgcggctgtcggcaggcggcgggacccaacttacccggaccgtggtggagcccatgctcacacacatcaccttctggggaggggcggagggggtggactgggctgtgcgggcctcaatggtgggggtgaagacgcccacccccatatccgagcgtgcagccagctggaagcggtagagtgtgtcaggcttcaggtcctctagtgtgtaggaggaggttgggtcgaaggtgaccttgtgctgttggtcttcgtcctctgccgcccagtacaccagttcatacatgatgatccgctcctgagggggcagcagccacgagagctggatcctggtgtccgactccacctcggcctggaagtccgcgggctgggcaggcactccctgctgcgtcttgacctggatggtggggctgggagggccatcgcccacggcggtgaaggcaagcacgcgcaggctgtaggtgatgccaggcagcaggctgcccacggtcgtgaggagccccgcgtcggtgttgtgcttgtgccaggcgttcggggggcggcgggagtccggagtatagtagacgcggtatccccgcaccaggccgttgggctcctcgggaggctcccactgcaccagcatggtgctggcgctcagcatgcgtgcctgcacgcggcgcggtgggctggagggcgcctgttctcccgtgcgtgcccgcactgcctcgctgggcggccctcgcccgatgctgttcaccgccagcacgcggaaggcatattccgagaaagggctgaggccgccaatgctgtagcgggtggtggccaccccatccacctcctgaaaggggccctccgtgcccgctgcgcggtactggatgccatagtaggttacaggctccgagttcccagagtcccaggtgagggtgacactggtggcagttgtctctgtcaccacaagatcaatcggaggctttggaagagctttcactgtgacctgggctgtggcctcgatcatgcccagcgaggagatggccacacaggtgtagttggcagagcgtacgacattgctgagctccaggacgttgcggccaactggcatctcatcctccttggtgagctcctcggcccccatcatccacttcacgtagggcatgggtgcacccactgccacgcatgtcaggttcacgctgccgcctggcatcacctcctggctgctgggagggatggagaaacgaggagccacgcggcgcactcgcacatacaggttcgcaggggctgagtaacgtgtgcctgccgagttggtcgccacacactcgtacttgccttggtcggattcctcactgctctctatctgcaaggcacctgaacgcagctgcttgatgcggccgttgctcgtggcagggtctacaggaaggaagtccttgaaccaagaaatctcagggtctggatttccgcctgcggcacatagcatggtggctgtgcgtgccttctccaccaccttcagctgaggccccatgtcgatggaagggaacccagggggcagctgttcctcttcgagcactgagagcttggcactagtgttgatctcacccaggctgttagtagctgtacactcatagatggcttcatctcgctgcacccgcaatggctggatccgaagcactgaccctgccccatcatcaaactcaatgacctcgaagcgctgggagctgactttcttccccttcttcatccatgtgatgcgcggcttgggttctcctgtagcttggcacacgaaggaggctacccctcctgacagcccagtctggtcctcagggactttaatgaagacaggtttgctgtcaccatgggcgcctgccaccaaaccaagcatcaccagtgcaggcacaaggggcaccatcgtcctccctggggctggctcaggggccatccagggctctagctccacagccagccacagcccaggacaatcaaccgagtctttgcttcttcaccccggtcactcttgctggatactcagcaccaagggccgggcaccagggcctccactccttccttcaatactgcccgtctcaggcagtggcatcttcagcaatttaatcactgacatgcagagaccttccctcctgcaccactgtccaatcagtcatcaatcctctcctccttccgctctgtctcccctgtgctcagggtgctccggcgcctccaggctttgctctctattccccgtccacgaaa

SEQ ID NO: 80944 - DNA, 2125 bp, Homo sapiens
  sig_peptide (847)...(982): this location contains the signal peptide sequence, MPVIWSALSAVLLLASSYFVGALIVHADCFLMRNHTITEQPMCFQ, Run with SignalP
  misc_feature (174)...(1950): similar to gi791004 in the genepept database release 114, Run with FASTXY 3.3t00, default parameters
tttcgtacgaaatcgtagggaaaaacaaactcgaagttaatcattcccagctcaaagccttgtgcaagtgctctctgccttcacgcttgcttcctttgggagagaaccttcctcttcttgatcggggattcaggaaggagcccaggagcagaggaagtagagagagagacaacatgttacatctgcaccattcttgtttgtgtttcaggagctggctgccagcgatgctcgctgtactgctaagtttggcaccatcagcttccagcgacatttccgcctcccgaccgaacatccttcttctgatggcggacgaccttggcattggggacattggctgctatggcaacaacaccatgaggactccgaatattgaccgccttgcagaggacggcgtgaagctgacccaacacatctctgccgcatctttgtgcaccccaagcagagccgccttcctcacgggcagataccctgtgcgatcagggatggtttccagcattggttaccgtgttcttcagtggaccggagcatctgcaggttttaccaccaatgtagacaacttttgcaaaaatactggaagagaaaggctatgccactggactcattggaaaatggcatctgggtctcaactgtgagtcagccagtgatcattgccaccaccctctccatcatggctttgaccatttctacggaatgcctttctccttgatgggtgattgcgcccgctgggaactctcagagaagcgtgtcaacctggaacaaaaactcaacttcctcttccaagtcctggccttggttgccctcacactggtagcagggaagctcacacacctgatacccgtctcgtggatgccggtcatctggtcagccctttcggccgtcctcctcctcgcaagctcctattttgtgggtgctctgattgtccatgccgattgctttctgatgagaaaccacaccatcacggagcagcccatgtgcttccaaagaacgacaccccttattctgcaggaggttgcgtcctttctcaaaaggaataagcatgggcctttcctcctctttgtttcctttctacacgttcacatccctcttatcactatggagaacttcctcgggaagagtctccacgggctgtatggggacaacgtaaaggagatggactggatggtaggacggatccttgacactttggacgtggagggtttgagcaacagcaccctcatttattttacgtcggatcacggcggttccctagagaatcaacttggaaacacccagtatggtggctggaatggaatttataaaggtgggaagggcatgggaggatgggaaggtgggatccgcgtgcccgggatcttccgctggcccggggtgctcccggccggccgagtgattggcgagcccacgagtctgatggacgtgttccccaccgtggtccggctggcgggcagcgaggtgccccaggacagagtgattgacggccaagaccttctgcccttgctcctggggacagcccaacactcagaccacgagttcctgatgcattattgtgagaggtttctgcacgcagccaggtggcatcaacgggacagaggaacaatgtggaaagtccactttgtgacgcctgtgttccagccaagagggagccggtgcctgctatggaaagaaaaggtctgcccgtgctttggggaaaaaagtagtccaccacgatcccacccttgcttctttgacctctcaagagccccatctgagacccacatcctcacaccagcctcagagcccgtgttctatcaggtgatggaacgaagtccagcaggcggtgtgggaacaccagcggacactcagcccagttcctctgcagctggacaggctgggcaatatttggagaccgggggtgcagcccttctgtgggccgttccccctttggtggggccttagggaaaatgacccccaataaatgtttgcagtgaaaagctggagccccgattcctaaattttgtcactcaaattgaaacaaaccagctggccatggtggttgtcatcccagcactttaggaggccaccacaggaggatcactcccgtgatcaaaaccaacctgggcaacatgatgaaactatagctctacaaaac

SEQ ID NO: 80945 - DNA, 661 bp, Homo sapiens
  sig_peptide (159)...(294): this location contains the signal peptide sequence, MTPPLAAWSLILAQSGFPSVPGSPLGATGGGYRGWDSETPWDLGR, Run with SignalP
  misc_feature (262)...(43): similar to gi808666 in the genepept database release 114, Run with FASTXY 3.3t00, default parameters
tttcgttgaaggcggagcctgaacggcctctggggccgctcaagggtccagtttgggctctgtgcctgcccgcggaatggggtcggggtccgacgtagaagagccagagaagcccttcagacccctcccctacccctggcttcaggcttagtccgcagatgactcctcccttggcggcctggagtttgattctggcccagtccggctttccctctgtccccgggtctcccctcggcgccactggtggcggttacaggggatgggactctgagaccccctgggacctggggcggcaggaagggacgcgaacgagggcgcaggctcccctgtgtgttttgttgtggtggtagagccactccagcccggaggatgggctaggccaagctgacagttcaaatcccctgggtgctcctccgtcccgcccgggagtctctagctttagttccgggtgtgggtgccctgatgtggagctggggtggaaattgcctgaaccaggcccccattaaaggccgaggtggcggccttccagcttccccttcgttgaggccccttggaaagggaggagcggttttcccctgatggctggggggagggctttgcccatggttggttgggaattgcagttcaccctcgtttcacccctttcccttcagttcttttt

SEQ ID NO: 80946 - DNA, 1947 bp, Homo sapiens
  sig_peptide (775)...(910): this location contains the signal peptide sequence, MLRLGVAFHMELLCRGRLLLLIPTAETRCDHRRLQNLKLGLSNTL, Run with SignalP
  misc_feature (1887)...(1373): similar to gi4426962 in the genepept database release 114, Run with FASTXY 3.3t00, default parameters
ttttttttttttaggttcttgcgaaacacctgaagttttactcatggtacaaaagtatttaataagtgacacatcagtacagaaacacagagcttgtagcttgtcctttaaaaccagaatggccaagtgaaaagtcagtacagattcttatttttactattaaaaaaaaaaaatcaaagggacacactgggaattgaactactatgctttttcttcgttctagagatgacatatatgttttctgataagtaatctaccacacattgcactaaaccaaagcatacaaacagccagtaaagctgtgctctacctgctactcatgctgggctggacagtggaacaccatcttggtaggagagattttgacaggaagaaactgcagagtccctacctaacccagagaaccttacaaactggtttatacacaaaggattttcagcaaacatgcaaacacactaacatgctataggaatatgttttagtctatttctagcacacagcatacattcataggtgcccagtaaaataggaatgaatgtcaatgtagaaagcatttttgccttcacagtactaacaaacacctaaaaagcacacagcatataatactttgatctttaagtggataatcatggaagttccaagatcacatcccctaggttagcctgagtattcatctataaaaatattttttttttcaaaaataatgcttaaaagagacttctagaaacagtgggactacatcaggaccagaagacagtgacacaaggactgcaaatgttaagactaggagtagcttttcacatggagcttttatgtagaggacgtctccttctgttgattcctacagccgagacaagatgtgatcacaggagactccaaaatctcaaactgggcttgagtaacaccctagataaacatcaggaaccccactgaggctgaagtactgaaactgtggcccatgtgaaaaagaggtgcaagtgcacaaagattcatgcagagcctgctggaacagagggtggtggcggcgggttagtccacacttacacaccagcaggtatgctggggaagggccccccaggtggagtgcctgacatagggctcgctccagaggcgtctgactcagaagctcctgagagaggtgtctacttgaggtggggaggagtactatggttaatgaatacaagaaggtgtttcaggataaataggtccaggagggttaggtcattttggttttgacctattaatacttaacataaatgaagagttacataacagagtcagtctttccaagatgtgttctgtcatcatgagctgagcctattgggctggtgacatccaaaaagatcccattcattggctggaggtaggacctagtgccgcagattgttctgggaagctggcagagaagatgatttgcacaatgaagtcaccagtaagccactgcttaagtccagtcctcggccttctttttctgctctgtagtccaaaaacatttctttaaaagccagaaaatctgtgaaggtgagcagcatgtcgaatatgtcaccagccacttcatccttatggtgcctgcaaacgggaacagatggtgtaatgttgtggtgaaggctgccatgttgaactcaggaatccgctgcagcagctgttcttcaatgtatttttctaccaaagaaatgtattcattaaaaataggtgtgtagatgagtttattctcttctgtgtcttcaaactccaggtagtacttgtccatgaaatttctctgtaataactggaactcgtcatccatgataatgtcctctaaatatccaaccacagcatcaaattctgcatcagaggcggaggagaaagacagcgcaaagctctctccttctaaggcgtccatcgcagtcgccccgagtaggctccaaccccgcccgcggcccaactcgcatgcagggcgcggccgct

SEQ ID NO: 80947 - DNA, 1095 bp, Homo sapiens
  misc_feature (1)...(1095): n = a,t,c or g
  sig_peptide (25)...(160): this location contains the signal peptide sequence, MALCFSAGTGLFVGRCCPVQVNLHEIVTLPGALREGLRTAGPGVW, Run with SignalP
  misc_feature (275)...(160): similar to gi2773306 in the genepept database release 114, Run with FASTXY 3.3t00, default parameters
agtggcagaacacccttgggaaccatggctctgtgctttagtgcagggactggcttgtttgtcggaaggtgctgcccggtccaagtgaacctacatgagattgtcacccttccaggggccctcagggaagggctgagaaccgctggcccaggtgtgtggaggagctgcaggtgaggcagggctggaggggccaggtagaggagcagacaggttgtcctgtcaccatgggagcctgcatgagctttaggttggggagccctgctcctctgacctggatgctcctgtgtggaaaggaggcttgctcaatgagatccacgccagggggtaaattgggaactgatgggaaatgaggggctagagtcctgggtaatgccttggaggaccttgctcgaggactgaatttttggtctgtccccaccttgattactctgacagcccctctctgtgtcccaccaggggtaaaaatgtcctgagcagtggccactgggacagaggagaacctggtggccagggctaagcatccaggatcctggatttggggacaggcaaactcacttgtggaggacagtgatagacagggccgccagggcctgggtgaagagggcaggagggctcaggacactggaggctgtgtgggggtcacagcccccgaactataccacccatgtatgctcctgcattgctcacctttgtgtggacatcagatggccccatcttccacgctcctgagaccccacatgcattcacagaggaacccaggctggggcaaggcatggccttggtccctggggtagtggcaagacagcttgatgcttggctggctgggcagagcttctgtgaatccctgcctttcctgtggangggccacctcagcctggattccaacccttatttctgttctcagagaagaaaaacgggtctggaaagcgcctgaacatttccctcgtggaaccgtgcaataacgccgtggtcatcaagattcatgcttgcaacaatgtcaccacctcctgacgcctgttctcaggaagccatccctttctcacgcctgcatccttgtgaccacgtctggcatcacgtcacactatctattctacc

SEQ ID NO: 80948 - DNA, 1131 bp, Homo sapiens
  misc_feature (1)...(1131): n = a,t,c or g
  sig_peptide (286)...(421): this location contains the signal peptide sequence, MLNFISPFGSTILLLIPSALPPSPPSRCSLLSPPPTTPLPLPLPS, Run with SignalP
  misc_feature (349)...(452): similar to gi5579130 in the genepept database release 114, Run with FASTXY 3.3t00, default parameters
tagcttaacccattgcgtccggaaatgttccgaatcaaaaaggggaaggatgaagagactcaaggcacttcattttgtgtgtgcctgtgtatatgtgtgtgtgtgttttctagggggttaacacattgccccagcttggattatttctatcctcagaacagcatataaacattttttggggggaaaaagttaaaatatttacacagctgcttcctttatttttttttaaatacacagataatatttttactacctcatgaacatcatcatgtctttgtaactagcatgctaaactttatttctccttttggtagcactattttgttattaatcccttctgcccttcctccttcccctccttcccgttgttccctcttatcccctcctccgaccactcccctccccctcccgctcccttctcccttctcctcccctctcctttccttcttttaaaaattataatctgttaatttgtttgaacctagggtgcctgaaaattcagataacttgagagtaattaattaattccacattagtattccaatgcatttgtaatgacagccttgcaatttttggggggtaggtaaccattaattntgcctcagtaaaataaatggcctttatgtataagctaagacttgtacaaaagtagattaatgtccttcacctgtgactctacaacaccaattcattcactttggtttttcagccagacatctggccattttagtgatttattgacttaactgattaatttggtaggggagggtaatactattgtgccttcagatatangcctaaagtttctgtcaccaagaggtgatggcaatctaacctgttggcctcaggatgtgccttgcttttcctggattctccanactcctatttttattataaaatcctactttgggtgcctggcatgacttttaagttggcaggcgcaagggcttcttttgaaggggaccggcctcctcaacccgcctggcattaaacgcggggggacagggaggcgaaaacatgttatgtgcccgcagccattgggtggctcaaaccgaatctaattgccctcttggggtgnggacgcacattagtcctggcctctataacaacagacgatctgagtgcgcgccc

SEQ ID NO: 80949 - DNA, 1072 bp, Homo sapiens
  sig_peptide (327)...(462): this location contains the signal peptide sequence, MYLLVLFTLPFWNWGSGHQHSYKSADSLTNSVAVKERWEGMDLAV, Run with SignalP
  misc_feature (358)...(226): similar to gi1750065 in the genepept database release 114, Run with FASTXY 3.3t00, default parameters
ctccatttgtaggcaaactcttgatccctggttggcaatgacctgttctttatccccatggttttgcctttccaaaaatgacatataaatggaaccacatatagtgagataattctccatgggtctcgcattgctgcatgttttacaagcagggacactgactgtttttgttccagactatcattttgagaatgtttgaatagtgaatagccttggaagatatagtatgtttctccctctgaagcaaatgggaggcatactcactgcccattataaaagatttgagttttctgagatagggttcttctcctgtaacaagtcatggtatgtatctcttggttctcttcaccttgcccttttggaattggggctcagggcaccagcactcatacaaaagtgctgatagtctgacgaattctgttgctgtcaaagagaggtgggagggaatggatttggcagtttgaggagcttggagaagacttgaaatagttgtacaaaatgagagtaagtgttactgcggaaatgtggaattatatattaagtaaaacaagctggttgtagcaataactagttattatttttacagataagccccaaaaaaacaaagggcgggcggtttataagtaccaacctttagacccggggctctcaaaaagctaacttttttatttagggcccacaaaattcatttccgggcgcgcgttttcaacggtggactgtggaacaccacgccgacgcgcctgcaaccccgtgactcatttcccgccttctgaccttgcctcttctcccaaccctatccatccttgtgacccacgtaattcacacatccgagcgtctcgcggccacctggacactaatccacaaccttcgcagccaactcgcttccgcgactctcccagcgcctagctcctctgctcgtccgctatacgtccctccccatccgtcttccactaatcacgacttccaaccacccgagctcctcctggctcagactgcgccgtcctcttgtccctaccgcgctccgtaactccacgcgtcatctgacacggtgaacgtctcgcctcttaccccc

SEQ ID NO: 80950 - DNA, 975 bp, Homo sapiens
  sig_peptide (807)...(942): this location contains the signal peptide sequence, MQLHVSLPWLLRFPGLDCTLHPDQPSIQLLQGTIDLLDSVILSCS, Run with SignalP
  misc_feature (803)...(927): similar to gi552798 in the genepept database release 114, Run with FASTXY 3.3t00, default parameters
cacccaccacgacgcctggctaatttttgtatttttttagtagagacagggtttcactatgttggccaggctggtctcgaactcctgacctcaagtgatccacctgcctcggcctcccaaagtgctgggattacagagtctcactctgtagtccaggttggagtgcagtggcgttatttcggctcactgcaacctccgcctcccaggttgaagtgattctcctgcctcagcctcctgagtagctgggattacaggtgtgcaccaccacacccagctaattgtgtatttttcatagagatggggtttcaccacgttggccaggctggtctcgaactgacctcaggtgatccacctgccttggcctcctgaagtgcttggattacaggcatgagccaccacacccagcctcatttttgtatttttagtagagacagggtttcaccatgttggccaggctggtctcgaactcctgacctcaagtgatccacccgccttggcctcccaaagtgctgggattacaggcatgagccactgtgcccggccagtgattcttaattagttcatgatattttggagttctaggcaggacagcagcctctgcctcctcaaccccatgtaaaccagaatgagcaactgctgggctggaggagctctccttcttagagcattgtgggacaacttgctatgagttctccttcattttttcatttcaccaccatgagttgtagggccctttgtgctttggcccctaacaacttgcccagtatggtgccctgcccatcacccattgtcttcaacaacctatcatgcagctccatgtctccctgccttggctcttgaggttccctggcctagactgtactttgcatcctgatcagccttcaatccaactccttcagggaactattgacttgctggattctgtgattttgtcatgttccctgtgtctctttggtgtcttgcagatgcacatct

SEQ ID NO: 80951 - DNA, 1601 bp, Homo sapiens
  sig_peptide (1227)...(1362): this location contains the signal peptide sequence, MLSQLPRCQSSVPALAHPTRLHYLLRLLTFLLGPGAGGAEAQGML, Run with SignalP
  misc_feature (1436)...(1142): similar to gi545013 in the genepept database release 114, Run with FASTXY 3.3t00, default parameters
tgagggttgtgtttaagctatctaaaagcatacgaagaaaggagacagaagggggccaggtggacagaaagaattccaactggggcttctcctaagtgattttggaccttggcagggcagctttctcttttttgccccgttgcagcatctcaaccagtaacgcctaaactctcagggacctcgcttgtagaaaagcctatgcttgccatgccccttgagggctctgagtcagggtcagaatcttcagctggaggaaatgtgaactgaccagatcctgcctgctcctccctctgcacccaggggcgtccggcacaacctttcctgggatgtccaggcgctgggctttctgtctggatcaccacccccaccccctgccctccttcactgcctgagcacgggcgtgcctctgcccagagcttctcagccgtcagcccacatcagcccacgccaacggcgagccatcactgtggaggccctctgtgagaaccacttaggcccagcaccaccctacagcatttccaacttctccatccacttgctctgccagcacaccaagtcctgccactccacagaccccatcccagcaccactgccatctgccagaacagctgtgtggtatgcagtgtcctgggcaccaggtgccaagggctgggctacaggcctgccacgaccagtttcctgatgagtttttggatgcgatctgcagtaacctctccttttcagccctgtctggctccaaccgccgcctggtgaagcggctctgtgctggcctgctcccaccccctaccagctgccctgaaggcctgccccctgttcccctcaccccagacatcttttggggctgcttcttggagaatgagactctgtgggctgagcgactgtgtggggaggcaagtctacaggctgtgccccccagcaaccaggcttgggtccagcatgtgtgccagggccccaccccagatgtcactgcctccccaccatgccacattggaccctgtggggaacgctgcccggatgggggcagcttcctggtgatggtctgtgccaatgacaccatgtatgaggtcctggtgcccttctggccttggctagcaggccaatgcaggataagtcgtgggggcaatgacacttgcttcctagaagggctgctgggcccccttctgccctctctgccaccactgggaccatccccactctgtctgacccctggccccttcctccttggcatgctatcccagttgccacgctgtcagtcctctgtcccagctcttgctcaccccacacgcctacactatctcctccgcctgctgaccttcctcttgggtccaggggctgggggcgctgaggcccaggggatgctgggtcgggccctactgctctccagtctcccagacaactgctccttctgggatgcctttcgcccagagggccggcgcagtgtgctacggacgattggggaatacctggaacaagatgaggagcagccaaccccatcaggctttgaacccactgtcaaccccagctctggtataagcaagatggagctgctggcctgctttagtgtgagtgctctgccagagggaaagctcctagaacagtga

SEQ ID NO: 80952 - DNA, 974 bp, Homo sapiens
  sig_peptide (113)...(248): this location contains the signal peptide sequence, MFCFLHVFLVSLPFLTSYSCLQIISYSSFKAWFKYPFLCKIFPTL, Run with SignalP
  misc_feature (69)...(211): similar to gi5640025 in the genepept database release 114, Run with FASTXY 3.3t00, default parameters
caacagtctgtcttaaatgtgttgaatttgaattaacattgctgtttaaacaccttaattatattcttctagcccttgacagctctgcagagtacttcacctgtctgtgaatatgttttgctttctgcatgtgtttcttgtctctctgcctttcttgacttcctactcttgcttgcagataatttcatattcatccttcaaggcctggttcaagtatcccttcctctgtaagatttttccaactctgccaaataatgactccctccagcagactcctttagttcatggtgtgtgccttcagcaaggagtgcatcatcgcctcatttagtgtggaaaaccagtagacatatggagtgggtgattttaaagcccatcatcttttttgtccagggccaggggcactcagtccgtaagcagaactttcatacgtaagataattgagttggttgggcgccgtggctcatgcctgtaatcccagcactttgggaggctgaggcgggcggatcacctgaggttgggagttcgagaccagcctgaccaacacggagaaaccctatctctactaaaaatacaaaagtagccgggcgtggtgatgcgtgcctgtaatcccagctacccaggaaggctgaggcggcagaatcacttgaacccggaggcggaggttgcggtaagccgagatcacctccagcctggacactctgtctcgaaaaaaagaaaagaaacacggttaataacatataaatatgtatgcattgagacatgctacctaggacttaagctgatgaagcttggctcctagtgattggtggcctattatgataaataggacaaatcatttatgtgtgagtttctttgtaataaaatgtatcaatatgttatagatgaggtagaaagttatatttatattcaatatttacttcttaaggctagcggaatatccttcctggttctttaatgggtagtctatagtatat

SEQ ID NO: 80953 - DNA, 1918 bp, Homo sapiens
  misc_feature (1)...(1918): n = a,t,c or g
  sig_peptide (222)...(357): this location contains the signal peptide sequence, MAFLRKVYSILSLQVLLTTVTSTVFLYFESVRTFVHESPALILLF, Run with SignalP
  misc_feature (97)...(847): similar to gi4929707 in the genepept database release 114, Run with FASTXY 3.3t00, default parameters
aaatcgactcgctcggtgttcgcccgccgacgccgcacggcttgctggggctgggctcttcctcgcggaagtggggaggaggcggttgcggttagtggaccgggaccggtaggggtgctgttgccatcatggctgaccccgacccccggtaccctcgctcctcgatcgaggacgacttcaactatggcagcagcgtggcctccgccaccgtgcacatccgaatggcctttctgagaaaagtctacagcattctttctctgcaggttctcttaactacagtgacttcaacagtttttttatactttgagtctgtacggacatttgtacatgagagtcctgccttaattttgctgtttgccctcggatctctgggtttgatttttgcgttgattttaaacagacataagtatccccttaacctgtacctactttttggatttacgctgttggaagctctgactgtggcagttgttgttactttctatgatgtatatattattctgcaagctttcatactgactactacagtattttttggtttgactgtgtatactctacaatctaagaaggatttcagcaaatttggagcagggctgtttgctcttttgtggatattgtgcctgtcaggattcttgaagttttttttttatagtgagataatggagttggtcttagccgctgcaggagcccttcttttctgtggattcatcatctatgacacacactcactgatgcataaactgtcacctgaagagtacgtattagctgccatcagcctctacttggatatcatcaatctattcctgcacctgttacggtttctggaagcagttaataaaaagtaattaaaagtatctcagctcaactgaagaacaacaaaaaaaatttaacgagaaaaaaggattaaagtaattggaagcagtatatagaaactgtttcattaagtaataaagtttgaaacaatgattaaatactgttacaatctttatttgtatcatatgtaattttgagagctttaaaatcttactattctttatgatacctcatttctaaatccttgatttaggatctcagttaagagctatcaaaattctattaaaaatgcttttctggctgggcacagtggctcacgcctgtaatcccaccactttgggagaccgaggcaggtggatcacgaggtcaagagaaagttaccatcctggctaatacggngaaaccccatctctactaaaaatacaagaagattagctggctgtggtggcatgcacctgtggtcccggctactcgggaggctgaggcaggagaatcgcttgaacccgggaggtggaggttgcattgagccaagatcacgccactgcattccagcctggtgacagagcgagactcagtctcaaaaaaaatttaacgagaaaaaaggattaaagtaattggaagcagtatatagaaactgtttcattaagtaataaagtttgaaacaatgattaaatactgttacaatctttatttgtatcatatgtaattttgagagctttaaaatcttactattctttatgatacctcatttctaaatccttgatttaggatctcagttaagagctatcaaaattctattaaaaatgcttttctggctgggcacagtggctcacgcctgtaatcccaccactttgggagaccgaggcaggtggatcacgaggtcaagaggttgagaccatcctggccaacatggtgaaaccccgtctctactaaaaatacaaaaattagctggatgtggtggcacacacctgtagtcccagctagtcaagaggctgaggccagagaatcgcttgaacctgggaggtggaggttgcattgagccaagatcacgccactgcattnccagcctggtgacagagcgagactcagtctcaaaaaaaaaaaa

SEQ ID NO: 80954 - DNA, 609 bp, Homo sapiens
  misc_feature (1)...(609): n = a,t,c or g
  sig_peptide (374)...(239): this location contains the signal peptide sequence, MSLIPSFPIPALSPPLTLLSCMYSCLSSASCQNALKNNFIWTVCA, Run with SignalP
  misc_feature (282)...(189): similar to gi704445 in the genepept database release 114, Run with FASTXY 3.3t00, default parameters
agactggttgaggaaagcagccatcccaactgaccttgcagaggagttaggagaataaatgctccaagcttatgttcctgtcttcctcaaatctttctctgtttttctgctgtgctccccactggctggacgctactagaaaccagcaagcaatagagtctccatgcagtccatagaggtcagctttccagggcaaggagctgggaggaagcgaatatgaaggggcacacaggatatccagcacagacagtccatataaagttatttttaagggcgttttgacaggaagcactggataagcaactatacatacaggataataaagtaagtggtggggatagggctggaattgggaaactgggaattagtgacatcgtttaggtaaattttgatgtttgtggatgcatttgtttttaaacataagacagtgtgaggtttcattagtgtatcagcttaggttttgtaatgtatcctagtcattgttagtgatagagctttggagaatggaccttgattctacctatggntctgactcattaattcattgggccaacccattctttcaacaaaagccttttccttccttttttcacggaggcaccaactttt

SEQ ID NO: 80955 - DNA, 1593 bp, Homo sapiens
  sig_peptide (167)...(302): this location contains the signal peptide sequence, MKVVPSLLLSVLLAQVWLVPGLAPSPQSPETPAPQNQTSRVVQAP, Run with SignalP
  misc_feature (167)...(1503): similar to gi5834412 in the genepept database release 114, Run with FASTXY 3.3t00, default parameters
gaaatcccgcggcgacccacgcgggcgcccacgcgttcgaggtttttttttcaaagctgaagctttggtttctgctctaaatgaaggacttttccaggacccaaggccacacactggaagtcttgcagctgaagggaggcactccttggcctccgcagctgatcacatgaaggtggtgccaagtctcctgctctccgtcctcctggcacaggtgtggctggtacccggcttggcccccagtcctcagtcgccagagaccccagcccctcagaaccagaccagcagggtagtgcaggctcccaaggaggaagaggaagatgagcaggaggccagcgaggagaaggccagtgaggaagagaaagcctggctgatggccagcaggcagcagcttgccaaggagacttcaaacttcggattcagcctgctgcgaaagatctccatgaggcacgatggcaacatggtcttctctccatttggcatgtccttggccatgacaggcttgatgctgggggccacagggccgactgaaacccagatcaagagagggctccacttgcaggccctgaagcccaccaagcccgggctcctgccttccctctttaagggactcagagagaccctctcccgcaacctggaactgggcctcacagcaggtgagttttgccttcatccacaaggattttgatgtcaaagagactttcttcaatttatccaagaggtattttgatacagagtgcgtgcctatgaattttcgcaatgcctcacaggccaaaaggctcatgaatcattacattaacaaagagactcgggggaaaattcccaaactgtttgatgagattaatcctgaaaccaaattaattcttgtggattacatcttgttcaaagggaaatggttgaccccatttgaccctgtcttcaccgaagtcgacactttccacctggacaagtacaagaccattaaggtgcccatgatgtacggtgcaggcaagtttgcctccacctttgacaagaattttcgttgtcatgtcctcaaactgccctaccaaggaaatgccaccatgctggtggtcctcatggagaaaatgggtgaccacctcgcccttgaagactacctgaccacagacttggtggagacatggctcagaaacatgaaaaccagaaacatggaagttttctttccgaagttcaagctagatcagaagtatgagatgcatgagctgcttaggcagatgggaatcagaagaatcttctcaccctttgctgaccttagtgaactctcagctactggaagaaatctccaagtatccagggttttacaaagaacagtgattgaagttgatgaaaggggcactgaggcagtggcaggaatcttgtcagaaattactgcttattccatgcctcctgtcatcaaagtggaccggccatttcatttcatgatctatgaagaaacctctggaatgcttctgtttctgggcagggtggtgaatccgactctcctataattcaagacatgcataagcacttcgtgctgtagtagatgctgaatctgaggtatcaaacacacacaggataccatcactggatggcacgggt

SEQ ID NO: 80956 - DNA, 901 bp, Homo sapiens
  sig_peptide (643)...(508): this location contains the signal peptide sequence, MSFLPSFFPFSFSSFPPFLSLPSSFLPSIFVRAECVSCLFLRPGL, Run with SignalP
  misc_feature (460)...(283): similar to gi4775290 in the genepept database release 114, Run with FASTXY 3.3t00, default parameters
aaatgacttcgagctaatgacatgctacgccagcttggcacgaggcttgaatatgatgctgctgagactcaatccgagatgacaggctcctttctttaacccgaacttacaagagtattgaatgaggagtctcaagagaagggctctgattctagctccatcccaaattccctggggttgctggtggtgtaccttcaagttagatagcacattgcatttttatgaatggtattatgcatttaaaatccatttgttcctacaggtagatgtagtactctgatggtgagaaagccacagagccttgtctcatggagtttttgggtctgcggggaagacaagcaaccaaacaagcaatggccatcacgtgaggcagatgctgtgacagagaaggcccacagtgtctcacctcactagaggaggggacagggaaggctccccagagaaggacacctcgagtccagagcttggaagctgcatctcagctggctaggtctttaggaggcgtggctaacccaggccgaaggaaaaggcaagagacacattctgctctgacaaaaattgaaggaaggaaggatgaaggaagagagaggaagggagggaatgaagagaaagagaaagggaaaaaagaaggaaggaagctcattctggctaaaacttaaagggttggggtagtgtgcaccgaaagatgaagtttgccacggaagtaaaggctatgtgaaaaaaaacctgggggccctttctcagggatttcaccatggacttagaaccaaggggaagcccccttaagaagttttcctggcgggggccaccgggtcccaaaatgtgttttaaaaaaggcctcgctttaagcctgcttccggggaagtcttggaattgggaagggaaaacccgaggtcctatt

SEQ ID NO: 80957 - DNA, 1583 bp, Homo sapiens; identical to SEQ ID NO: 60752
  sig_peptide (97)...(232): this location contains the signal peptide sequence, MAFLGLFSLLVLQSMATGATFPEEAIADLSVNMYNRLRATGEDEN, Run with SignalP
  misc_feature (97)...(1328): similar to gi1785654 in the genepept database release 114, Run with FASTXY 3.3t00, default parameters

SEQ ID NO: 80958 - DNA, 2701 bp, Homo sapiens
  sig_peptide (581)...(716): this location contains the signal peptide sequence, MLSLRRCTSMRLCLSSSLASPCSTMLSTVVLYKVCNSFVEMGSAN, Run with SignalP
  misc_feature (12)...(2703): similar to gi4071359 in the genepept database release 114, Run with FASTXY 3.3t00, default parameters
tttcgtgcaggatgctgcgcgccgccctgtccctgctcgcgctgcccctggcgggggcggccgaagagcccacccagaagccagagtccccgggcgagcctcccccaggcttagagctcttccgctggcagtggcacgaggtggaggcgccctacctggtggccctgtggatcctggtggccagtctggccaaaatcgtgtttcacctgtctcggaaagtaacatctctggtccctgagagctgcctgctgattttgctgggcctggtgctagggggaattgttttggctgtggccaagaaagctgagtaccagctggagccaggcaccttcttcctcttcctgctgcctcctattgtgttggactcaggctatttcatgcctagcaggctgttctttgacaacttgggtgccatcctcacctatgccgtggtaggcacactctggaatgccttcacaacaggcgctgccctctggggcttgcagcaggctggacttgtagcccctagggtgcaggctggcttactggacttcctgctgtttgggagcctcatctcggcggtggaccccgtggccgtgctatgctgtctttgaggaggtgcacgtcaatgagactgtgtttatcatcgtctttggcgagtccctgctcaacgatgctgtccaccgtggtgctgtacaaggtctgcaactcctttgtggagatgggctctgccaatgtgcaggccactgactacctgaagggagtcgcctccctgtttgtggtcagtctgggcggggcagccgtgggcttagtctttgccttcctcctggccctgaccacacgcttcaccaagcgggtccgcatcatcgagccgctgctggtcttcctcctcgcctacgcagcctacctcactgctgaaatggcctcgctctccgccattcttgcggtgaccatgtgtggcctgggctgtaagaagtacgtggaggccaacatctcccataagtcacgcacaactgtcaaatatacaatgaagactctagccagctgtgctgagaccgtgatcttcatgctgcttggcatctcaaccgtggactcttctaagtgggcctgggattctgggctggtgctgggcaccctcatcttcatcctgttcttccgagccctcggcgtagtcctgcagacctgggtgctgaatcagttccggctagtccctctggacaagattgaccaagtggtgatgtcctatgggggcctgcggggggctgtggcctttgctctcgtcatcctactggataggaccaaggtccctgccaaggactactttgtagccaccactattgtagtggtcttcttcacagtcatcgtgcagggcttgaccatcaagccactggtcaaatggctgaaggtgaagaggagtgagcatcacaaacccaccctgaaccaggagctgcatgaacacacttttgaccacattctggctgcagtggaggacgttgtggggcaccatggctaccactactggagggacaggtgggagcagtttgacaagaaatacctgagtcagctgctgatgcgacgatcagcctaccgcatccgggaccagatctgggatgtgtactacaggcttaacatccgggatgccatcagctttgtggaccagggaggccacgtcttgtcttccacaggtctcactctgccttctatgcccagccgcaattctgtggcagaaacttctgtcaccaacctgctgagggagagtggcagtggagcgtgtctggatctgcaggtgattgacacagtacgcagcggccgggatcgtgaggatgctgtgatgcatcatctgctctgcggaggcctctacaagccgcgccgtaggtacaaagccagctgcagtcgccacttcatctcagaggatgcgcaggagcggcaggacaaggaggtcttccagcagaacatgaagcggcggctggagtcctttaagtccaccaagcacaacatctgcttcaccaagagcaagccacgaccccgcaagactggccgcaggaagaaggatggtgtggcgaatgctgaggctacaaatgggaaacatcgaggcctgggctttcaggacacagctgctgtgatattaaccgtggagtctgaggaggaggaggaggagagcgacagttcagagacagagaaggaggacgatgaggggatcatctttgtggctcgtgccaccagtgaggttctccaagagggcaaggtctcaggaagccttgaggtgtgcccaagcccacgaatcattcccccctccccaacctgtgcagaaaaggagctcccctggaagagtgggcagggggacctggcagtgtacgtgtcctcggaaaccaccaagattgtgcctgtggacatgcagacgggttggaaccagagcatctcatccctggagagcctagcgtcccctccctgtaaccaggccccaattctgacctgcctgcctccccatccacggggcactgaagagccccaggtccctctccacctaccttctgatccacgctctagcttcgccttcccaccgagcctggccaaggctggccgctctcgcagtgagagcagcgctgacctcccccagcagcaggagctgcagcccctcatgggccacaaggaccacacccatctcagcccaggcaccgctacctcccactggtgcatccagttcaacagaggcagccggctg

SEQ ID NO: 80959 - DNA, 723 bp, Homo sapiens
  sig_peptide (403)...(268): this location contains the signal peptide sequence, MFASLLQLSRLRTSWLPEVCHPEDLEIWRQGHHLVILPFLLWAGS, Run with SignalP
  misc_feature (85)...(182): similar to gi1685290 in the genepept database release 114, Run with FASTXY 3.3t00, default parameters
tgtggcgtaattcctagagttgagagatggaggaagagatacagaatctggatggctatgctctgatcctgtaatccgactatgcctgaatgtggatctaccttccaaaggacttctccagctccatttacagtctggctcctgggcctttggatcccagcagtgtccgagcaggagctcaaaggacagccccaccatgggggatcagccctagaagctgtcactacatctccaacggacgcaactattttccagcaggtgaatgagcttcctgcccataggagaaagggtaaaatcacaaggtggtgcccttgtctccaaatctcaaggtcctctggatggcagacttcagggagccaggatgtccgcagcctggagagctgaagaagggaagcaaacatcttcaagacgtctcccggcctgcccactgctctgcccaggcttggagggagggagaaagggacacaaaagttcatgtcacactccaggctaaaattctcccaggtgccctaccattacctacaggcaaacagcctaattcctgttttcccaagacaggagaagccctgcacaacctggcctggcctctcccatccctgttccaggcatgctttcttgtgtggatcactcactcccaccctcagaggggccaggcatttccacacctctccacttttgtctcaaataaaaatattctggaattagatagcgataaaaaaaaaa

SEQ ID NO: 80960 - DNA, 2823 bp, Homo sapiens
  sig_peptide (1254)...(1119): this location contains the signal peptide sequence, MAFRTFSWIFSGLLSPTLASPSVSMMTMEVLLSGILCSSRALFSI, Run with SignalP
  misc_feature (11)...(2697): similar to gi288563 in the genepept database release 114, Run with FASTXY 3.3t00, default parameters
tggcatttgcatggtggccctgtctcatcttggctctgctctccagcttggcagcctctggcttcccgagaagcccctttcggctgcttgggaaacggagcctcccagaaggggtggccaatggcatcgaggtctacagtaccaaaatcaactccaaggtgacctcccgttttgctcacaatgttgtcaccatgagagccgtcaaccgtgcagacacggccaaggaggtttcctttgatgtggagctgcccaagacggccttcatcaccaacttcaccttgaccatcgacggtgttacctaccctgggaatgtcaaggagaaggaagttgccaagaagcagtatgaaaaggctgtgtcccagggcaagacggccggcttggtcaaggcctctgggaggaagttggagaagttcacagtctcggtcaacgtggctgcaggcagcaaagtcaccttcgagctaacctacgaggagctgctgaagaggcacaagggcaagtacgagatgtacctcaaggtccagcctaagcaactggtcaaacactttgagatcgaggtagacatcttcgagcctcagggaatcagcatgctggatgctgaggcctctttcatcaccaacgacctcctgggaagcgccctcaccaagtccttctcagggaaaaagggccatgtgtccttcaagcccagcttagaccaacagcgttcatgcccaacctgtacagactccctcctcaatggagatttcactatcacctatgacgtgaacagagaatctcctggcaacgtgcagatagtcaatggctacttcgtgcacttctttgcacctcaaggccttccagtggtgcctaagaacgtggcctttgtgattgacatcagcggctccatggctggtcggaaattagagcagacaaaggaggcccttctcagaatcctggaagatatgcaagaggaagactatctgaatttcatcctgttcagtggagatgtgtccacatggaaagagcacttagtccaggccacgcccgagaacctccaggaggccaggacgtttgtgaagagcatggaggataaaggaatgaccaacatcaatgacgggctgctgaggggcatcagtatgctgaacaaggcccgagaggagcacagaatcccagagaggagcacctccattgtcatcatgctgactgatggggatgccaatgttggtgagagcagacccgaaaaaatccaagagaatgtgcggaatgccatcgggggcaagttccccttgtataacctgggctttggcaacaatctgaattataacttcctggagaacatggccctggagaaccatgggtttgcccggcgcatttatgaggactctgatgccgatttgcagttgcagggcttctatgaggaggtggccaacccactgctgacgggtgtggagatggagtaccccgagaacgctatcctggacctcacccagaacacttaccagcacttctacgatggctctgagatcgtggtggccgggcgcctggtggacgaggacatgaacagctttaaggcagatgtgaagggccatggggccaccaacgacctgaccttcacagaggaggtggacatgaaggagatggagaaggccctgcaggagcgggactacatcttcgggaattacattgagcggctctgggcctacctcaccattgagcagctgctggagaagcgcaagaacgcccatggcgaggagaaggagaacctcacggcccgggccctggacctgtccctcaagtatcactttgtgactccactgacctcaatggtggtgaccaagcctgaggacaacgaggatgagagggccattgccgacaagcctggggaagatgcagaagccacaccggtgagccccgccatgtcctacctgaccagctaccagcctcctcaaaacccctactactatgtggacggggatccccacttcatcatccaaattccggagaaagacgatgccctctgcttcaacatcgatgaagccccaggcacagtgctgcgccttattcaggatgcagtcacaggcctcacagttaatgggcagatcactggcgacaagagaggcagccctgactccaagaccagaaagacttactttggaaaactgggcatcgccaatgctcagatggacttccaggtggaggtgacaacggagaagatcaccctgtggaacagggccgtgccgagcactttcagctggctggacacagtcacagtcacgcaggatggccactttctggcttcctctcgtaggctgtccatgatgatcaacaggaagaacatggtggtctcctttggagatggggttaccttcgtggtcgtcctacaccaggtgtggaagaaacatcctgtccaccgtgactttctaggcttctacgtggtggacagtcaccggatgtcagcacagacgcatgggctgctggggcaattcttccaaccctttgactttaaagtgtctgacatccggccaggctctgaccccacaaagccagatgccacattggtggtgaagaaccatcagctgattgtcaccaggggctcccagaaagactacagaaaggatgccagcatcggcacgaaggttgtctgctggttcgtccacaacaacggagaagggctgattgatggtgtccacactgactacattgtccccaacctgttttgagtagacacaccagctcctgttgggatggatggcccggattttatggcatctggaacatgggcacagagaggggcctgtgggaggggctgggaaaataaagtccaaggtcgagaccagaaaaaaaaaa

SEQ ID NO: 80961 - DNA, 1798 bp, Homo sapiens
  sig_peptide (1442)...(1307): this location contains the signal peptide sequence, MVLWESPRQCSSWTLCEGFCWLLLLPVMLLIVARPVKLAAFPTSL, Run with SignalP
  misc_feature (1443)...(318): similar to gi5911403 in the genepept database release 114, Run with FASTXY 3.3t00, default parameters
ttttttttttttctcatctctgagtatttattatatataacaaatacatgggaaagaaaaaactatattgtgtgatataaatagtttatttacattacagaaaaaacatcaagacaatgtatactatttcaaatatgatgcatacataatcaaatatagctgtagtacatgttttcattggtgtagattacccacaaatgcaaggcaaacatgtgtaagatctcttgtcttattcttttgtctataatactgtattgtgtagtccaagctctcggtagtccagccactgtgaaaacatgctccctttaggattaacctcgtgggacggctcttgttgtattgtctggaactgtagtgccctggtattttgcttctgtctggtggaattctgttggcttcggggggcatttccttgtgatgcagaggaccaccacacagatgacagcaatctgaattgttccaatcacagctgcgattaagacatactggaaatcgtacaggaccgggaacaacgtatagaacactgtagtcctttttttcacagtgttgtccagtataaccagcatcacacctgcaagatggctcctgcatattgatagaatgctcacacttcccatgcatgcagaagccattgtaatgttccggacaaggtatgtggtgttctctggcactttcttctaatttgttagcattctctgcataatctgttcttgcataatgcccatcttcagacttagtagttgtagttgtgttatcttgacatcgacccaaagacaagacttcaattttctcctgtttctgacacgatgcttctttgatttggcatgcattatcataagatttcccatcagaagcgcagaggggattgaagttggtttgagaacagtcaatattacacacacaccagacatcctcggcattttcgtcacattctgcaccaaactggcaaatatcacaggtggatgtctccttttgactagtttctccagagccttcatggactccatctccagatcctgatcctgcatctgtggcacatgatccttctgacaccacaagtatctcactctgctgtttgcatgcagcctgtcgcaggtaacactcattctggtagctctccccattggagccacacacaggcacatagtcattgttgcacttgaactgacagacgcaagtcacagtgtctccaattcttaaacattccccatcaaatttacaggtgttggtgtcacagaggaagagatcattttctctgtcatcataaccagagcaattccagccggtgggcgtttggcagtcacttaaggaggtagggaaagcagcgagcttcaccgggcgggctacgatgagtagcatgacgggcagcagcagcagccagcaaaagccctcgcaaagtgtccagctgctgcactgccgcggggactcccacagcaccatgactagttcgtgcaactctgcagcagcaaacggcttccgaggaacacaggatcgcgggggccgggcagcgggctactgagcatcccgcggacggcggcagcagaggcggcggcggtggcagtggcacccggcggggaagcagcagccaaacccgcgcatgatctcgagagtttcagcaacatccagggactgggctcagccccggagcgagagggtcgtccgctgagaagctgcgccggagacgcgggaagctgctgccataaggagggagctctgggaagccggaggacaggaggagacgggagtccaggggcagacgagtggagcccgaggaggcagggtggagggagagacgaaa

SEQ ID NO: 80962 - DNA, 5726 bp, Homo sapiens
  sig_peptide (4739)...(4604): this location contains the signal peptide sequence, MLFVFICSYFHLSLFLLFPFLPVSLPSFLPFFLPSFLEFTEVFPR, Run with SignalP
  misc_feature (1271)...(4235): similar to gi3882237 in the genepept database release 114, Run with FASTXY 3.3t00, default parameters
tttcgtgcctgaaaacgcgaaatgagtcttgcttggttctccctccactgggcgtgagagcccctgcccaggaggcccaggacaaatggccccatagtggaaactgggaagcttttaggcatctgatcagagcgggagccagccgggggaccacagtgctggacaggccaaccaactcaaacttgaagacatgaaatccccaaggagaaccactttgtgcctcatgtttattgtgatttattcttccaaagctgcactgaactggaattacgagtctactattcatcctttgagtcttcatgaacatgaaccagctggtgaagaggcactgaggcaaaaacgagccgttgccacaaaaagtcctacggctgaagaatacactgttaatattgagatcagttttgaaaatgcatccttcctggatcctatcaaagcctacttgaacagcctcagttttccaattcatgggaataacactgaccaaattaccgacattttgagcataaatgtgacaacagtctgcagacctgctggaaatgaaatctggtgctcctgcgagacaggttatgggtggcctcgggaaaggtgtcttcacaatctcatttgtcaagagcgtgacgtcttcctcccagggcaccattgcagttgccttaaagaactgcctcccaatggacctttttgcctgcttcaggaagatgttaccctgaacatgagagtcagactaaatgtaggctttcaagaagacctcatgaacacttcctccgccctctataggtcctacaagaccgacttggaaacagcgttccggaagggttacggaattttaccaggcttcaagggcgtgactgtgacagggttcaagtctggaagtgtggttgtgacatatgaagtcaagactacaccaccatcacttgagttaatacataaagccaatgaacaagttgtacagagcctcaatcagacctacaaaatggactacaactcctttcaagcagttactatcaatgaaagcaatttctttgtcacaccagaaatcatctttgaaggggacacagtcagtctggtgtgtgaaaaggaagttttgtcctccaatgtgtcttggcgctatgaagaacagcagttggaaatccagaacagcagcagattctcgatttacaccgcacttttcaacaacatgacttcggtgtccaagctcaccatccacaacatcactccaggtgatgcaggtgaatatgtttgcaaactgatattagacatttttgaatatgagtgcaagaagaaaatagatgttatgcccatccaaattttggcaaatgaagaaatgaaggtgatgtgcgacaacaatcctgtatctttgaactgctgcagtcagggtaatgttaattggagcaaagtagaatggaagcaggaaggaaaaataaatattccaggaacccctgagacagacatagattctagctgcagcagatacaccctcaaggctgatggaacccagtgcccaagcgggtcgtctggaacaacagtcatctacacttgtgagttcatcagtgcctatggagccagaggcagtgcaaacataaaagtgacattcatctctgtggccaatctaacaataaccccggacccaatttctgtttctgagggacaaaacttttctataaaatgcatcagtgatgtgagtaactatgatgaggtttattggaacacttctgctggaattaaaatataccaaagattttataccacgaggaggtatcttgatggagcagaatcagtactgacagtcaagacctcgaccagggagtggaatggaacctatcactgcatatttagatataagaattcatacagtattgcaaccaaagacgtcattgttcacccgctgcctctaaagctgaacatcatggttgatcctttggaagctactgtttcatgcagtggttcccatcacatcaagtgctgcatagaggaggatggagactacaaagttactttccatatgggttcctcatcccttcctgctgcaaaagaagttaacaaaaaacaagtgtgctacaaacacaatttcaatgcaagctcagtttcctggtgttcaaaaactgttgatgtgtgttgtcactttaccaatgctgctaataattcagtttggagcccatctatgaagctgaatctggttcctggggaaaacatcacatgccaggatcccgtaataggtgtcggagagccggggaaagtcatccagaagctatgccggttctcaaacgttcccagcagccctgaggagtcccattaggcgggaccatcacttacaaatgtgtaggctcccagtggggggtagaagagaaatgactgcatctctgccccaataaacagtctgctccagatggctaaggctttgatcaagagcccctctcaggatgagatgctccctacatacctgaaggatctttctattagcatagacaaagcggaacatgaaatcagctcttctcctgggagtctgggagccattattaacatccttgatctgctctcaacagttccaacccaagtaaattcagaaatgatgacgcacgtgctctctacggttaatgtcatccttggcaagcccgtcttgaacacctggaaggttttacaacagcaatggaccaatcagagttcacagctactacattcagtggaaagattttcccaagcattacagtcaggagatagccctcctttgtccttctcccaaactaatgtgcagatgagcagcacggtaatcaagtccagccacccagaaacctatcaacagaggtttgttttcccatactttgacctctggggcaatgtggtcattgacaagagctacctagaaaacttgcagtcggattcgtctattgtcaccatggctttcccaactctccaagccatccttgctcaggatatccaggaaaataactttgcagagagcttagtgatgacaaccactgtcagccacaatacgactatgccattcaggatttcaatgacttttaagaacaatagcccttcaggcggcgaaacgaagtgtgtcttctggaacttcaggcttgccaacaacacaggggggtgggacagcagtgggtgctatgttgaagaaggtgatggggacaatgtcacctgtatctgtgaccacctaacatcattctccatcctcatgtcccctgactccccagatcctagttctctcctgggaatactcctggatattatttcttatgttggggtgggcttttccatcttgagcttggcagcctgtctagttgtggaagctgtggtgtggaaatcggtgaccaagaatcggacttcttatatgcgccacacctgcatagtgaatatcgctgcctcccttctgggtcgccaacacctggttcattggggtcgctgccatccaggacaatcgctacatactctgcaagacagcctgtgtggctgccaccttcttcatccacttcttctacctcagcgtcttcttctggatgctgacactgggcctcatgctgttctatcgcctggttttcattctgcatgaaacaagcaggtccactcagaaagccattgccttctgtcttggctatggctgcccacttgccatctcggtcatcacgctgggagccacccagccccgggaagtctatacgaggaagaatgtctgttggctcaactgggaggacaccaaggccctgctggctttcgccatcccagcactgatcattgtggtggtgaacataaccatcactattgtggtcatcaccaagatcctgaggccttccattggagacaagccatgcaagcaggagaagagcagcctgtttcagatcagcaagagcattggggtcctcacaccactcttgggcctcacttggggttttggtctcaccactgtgttcccagggaccaaccttgtgttccatatcatatttgccatcctcaatgtcttccagggattattcattttactctttggatgcctctgggatctgaaggtacaggaagctttgctgaataagttttcattgtcgagatggtcttcacagcactcaaagtcaacatccctgggttcatccacacctgtgttttctatgagttctccaatatcaaggagatttaacaatttgtttggtaaaacaggaacgtataatgtttccaccccagaagcaaccagctcatccctggaaaactcatccagtgcttcttcgttgctcaactaagaacaggataatccaacctacgtgacctcccggggacagtggctgtgcttttaaaaagagatgcttgcaaagcaatggggaacgtgttctcggggcaggtttccgggagcagatgccaaaaagactttttcatagagaagaggctttcttttgtaaagacagaataaaaataattgttatgtttctgtttgttccctccccctcccccttgtgtgataccacatgtgtatagtatttaagtgaaactcaagccctcaaggcccaacttctctgtctatattgtaatatagaatttcgaagagacattttcactttttacacattgggcacaaagataagctttgattaaagtagtaagtaaaaggctacctaggaaatacttcagtgaattctaagaaggaaggaaggaagaaaggaaggaaagaagggagggaaacagggagaaagggaaaaagaagaaaaagagaaagatgaaaataggaacaaataaagacaaacaacattaagggccatattgtaagatttccatgttaatgatctaatataatcactcagtgcaacattgagaatttttttttaatggctcaaaaatggaaactgaaagcaagtcatggggaatgaatactttgggcagtatcttcctcatgtcttcttagctaagaggaggaaaaaaaggctgaaaaaatagggaggaaattccttcatcagaacgacttcaagtggataacaatatttataagaaatgaatggaaggaaatatgatcctcctgagactaactttgtatgttaaggtttgaactaagtgaatgtatctgcagaggaagtattacaaagatatgtcattagatccaagtgctgattaaatttttatagtttatcagaaaagccttatattttagtttgttccacattttgaaagcaaaaaatatatatttgatatacccttcaattgccaaatttgatatgttgcactgaagacagaccctgtcatatatttaatggcttcaagcaggtacttctctgtgcattatagaatagattttaataatcttatagcattgtatattattattgctgttgtcactgttattattattgtggatactggcccttggtgtgttgcatagctccctatgtattctctgtttccatctttaagttcccagaccaatatacattaagagttttgcatggtctaaattgtgtttattccaaccacgtggaaagctcctggaaagaaattttacattcggttgttctgtgctcctaatgacacttgaccttgttgaacaaatggcagagcctttcccaaggatttgattgtttgtgaattatctgcatgtgtgcttttttttggtgtgtatgtatttcattaaaaaatataaatacttatgaaaattgcacgcatattagagttaaccatgtactattgatacagcaacgctacattgcaaataaaagtccgatcccaaaaggagaatgagacaaaaa

SEQ ID NO: 80963 - DNA, 5612 bp, Homo sapiens
  sig_peptide (1431)...(1566): this location contains the signal peptide sequence, MVLSAPSLWPCSSFSISCLHVGLTAFLFQVAFLCLLCCVELLLDV, Run with SignalP
  misc_feature (51)...(2673): similar to gi1263890 in the genepept database release 114, Run with FASTXY 3.3t00, default parameters
tcactagtccatgtggtggaattcgtccagagtggcagtaaaggaggaagatggcggggtgcagggggtctctgtgctgctgctgcaggtggtgctgctgctgcggtgagcgtgagacccgcacccccgaggagctgaccatccttggagaaacacaggaggaggaggatgagattcttccaaggaaagactatgagagtttggattatgatcgctgtatcaatgacccttacctggaagttttggagaccatggataataagaaaggtcgaagatatgaggcggtgaagtggatggtggtgtttgccattggagtctgcactggcctggtgggtctctttgtggacttttttgtgcgactcttcacccaactcaagttcggagtggtacagacatcggtggaggagtgcagccagaaaggctgcctcgctctgtctctccttgaactcctgggttttaacctcacctttgtcttcctggaaagcctccttggtctcattgagccggtggaagcgggttccggcattaccgagggcaaatgctatctgtatgcccgacaggtgccaggactcgtgcgactcccgaccctgctgtggaaggcccttggagtgctgctcactgttgctgcaatgcttcttatttgggcttggaagccccatgatccacagtggttcggtggtgggagctggcctccctcagtttcagagcatctccttacggaagatccagtttaacttcccctatttccgaagcgacaggtatggaaagagacaagagagactttgtatcagcaggagcggctgctggagttgctgcagctttcggggcgccaatcgggggtaccttgttcagtctagaggagggttcgtccttctggaaccaagggctcacgtggaaagtgctcttttgttccatgtctgccaccttcaccctcaacttcttccgttctgggattcagtttggaagctggggttccttccagctccctggattgctgaactttggcgagtttaagtgctctgactctgataaaaaatgtcatctctggacagctatggatttgggtttcttcgtcgtgatgggggtcattgggggcctcctgggagccacattcaactgtctgaacaagaggcttgcaaagtaccgtatgcgaaacgtgcacccgaaacctaagctcgtcagagtcttagagagcctccttgtgtctctggtaaccaccgtggtggtgtttgtggcctcgatggtgttaggagaatgccgacagatgtcctcttcgagtcaaatcggtaatgactcattccagctccaggtcacagaagatgtgaattcaagtatcaagacatttttttgtcccaatgatacctacaatgacatggccacactcttcttcaacccgcaggagtctgccatcctccagctcttccaccaggatggtactttcagccccgtcactctggccttgttcttcgttctctatttcttgcttgcatgttggacttacggcatttctgttccaagtggcctttttgtgccttctctgctgtgtggagctgcttttggacgtttagttgccaatgtcctaaaaagctacattggattgggccacatctattcggggacctttgccctgattggtgcagcggctttcttgggcggggtggtccgcatgaccatcagcctcacggtcatcctgatcgagtccaccaaatgagatcacctacgggctccccatcatggtcacactgatggtgggcaaatgtacaggggactttttcaataagggcattttatgatatccacgtgggcctgcgaggcgtgccgcttctggaatgggagacagaggtggaaatggacaagctgagagccagcgacatcatggagcccaacctgacctacgtctacccgcacacccgcatccagtctctggtgagcatcctgcgcaccacggtccaccatgccttcccggtggtcacagagaaccgcggtaacgagaaggagttcatgaagggcaaccagctcatcagcaacaacatcaagttcaagaaatccagcatcctcacccgggctggcgagcagcgcaaacggagccagtccatgaagtcctacccatccagcgagctacggaacatgtgtgatgagcacatcgcctctgaggagccagccgagaaggaggacctcctgcagcagatgctggaaaggagatacactccctaccccaacctataccctgaccagtccccaagtgaagactggaccatggaggagcggttccgccctctgaccttccacggcctgatccttcggtcgcagcttgtcaccctgcttgtccgaggagtttgttactctgaaagccagtcgagcgccagccagccgcgcctctcctatgccgagatggccgaggactacccgcggtaccccgacatccacgacctggacctgacgctgctcaacccgcgcatgatcgtggatgtcaccccatacatgaacccttcgcctttcaccgtctcgcccaacacccacgtctcccaagtcttcaacctgttcagaacgatgggcctgcgccacctgcccgtggtgaacgctgtgggagagatcgtggggatcatcacacggcacaacctcacctatgaatttctgcaggcccggctgaggcagcactaccagaccatctgacagcccagcccaccctctcctggtgctggcctggggaggcaaatcatgctcactccgggcggggcacagctggctggggctgtttccggggcattggaaagattcccagttacccactcactcagaaagccgggagtcatcggacaccttgctggtcagaggccctgggggtggttttgaaccatcagagcttggacttttctgacttccccagcaaggatcttcccacttcctgctccctgtgttccccaccctcccagtgttggcacaggccccacccctggctccaccagagcccagaagccagaggtaagaatccaggcgggccccgggctgcactcccgagcagtgttccctggcccatctttgctactttccctagagaaccccggctgttgccttaaatgtgtgagagggacttggccaaggcaaaagctggggagatgccagtgacaacatacagttgcatgactaggtttaggaattgggcactgagaaaattctcaatatttcagagagtccttcccttatttgggactcttaacacggtatcctcgctagttggttttaagggaaacactctgctcctgggtgtgagcagaggctctggtcttgccctgtggtttgactctccttagaaccaccgcccaccagaaacataaaggattaaaatcacactaataacccctggatggtcaatctgataataggatcagatttacgtctaccctaattcttaacattgcagctttctctccatctgcagattattcccagtctcccagtaacacgtttctacccagatcctttttcatttccttaagttttgatctccgtcttcctgatgaagcaggcagagctcagaggatcttggcatcacccaccaaagttagctgaaagcagggcactcctggataaagcagcttcactcaactctggggaatgctaccattttttttccaaagtagaaaggaagcacttctgagccagtgaccactgaaaggtatgtgctatgataaagcagatggcctatttgaggaagagggtgtctgcccttcacaaacacctctctctcccctgcactagctgtcccaagcttacatacagaggcccttcaggagggcctcctgtggccgcagggagggtgcgtggggaagatgcttcctgccagcacgtgcctgaaggtttcacatgaagcatgggaagcgcaccctgtcgttcagtgacgtcattcttctccaggctggcccgccccctctgactaggcacccaaagtgagcatctgggcattgggcattcatgcttatcttcccccaccttctacatggtattagtcccagcaggcatccctggggcagacgtgctttggctcaagatggccttcatttacgtttagttttttttaaaaccgtggaggttgcccacgggcctcggcacctgggccctggcagcacagctctcaggcccagccctgggcgacctccttggccaagtctgcctttcaccctgggggtgagcatcagtcctggctctgctggtccagatcttgcgctcagcacactctagggaataattccactccagagatggggctgcttcaaggtcttttctagctgattgtggcccctccattttccgcattttcttatctccctgaccaaaattgctttgacttctaaatgtttctgcttcccagaatgcacctgacttatgaaatggggataatactcccaggaaatagcgcaggacatcacaaggaccaaaaaggcaattcttatttaaatgttactatttggccagctgctgctgtgttttatggcagtgttcaaagcttgatcacgttatttcttccttttattaagaaggaagccaattgtccaagtcaggagaatggtgtgatcacctgtcacagacactttgtcccctctccccgccccttcctggagctggcagagctaacgccctgcaggaggaccccggcctctcgagggctggatcagcagccgcctgccctgaggctgccccggtgaatgttattggaattcatccctcgtgcacatcctgttgtgtttaagtcaccagatattttgttcccatcagtttagcccagagatagacagtagaatgcaaatacctccctcccctaaactgactggacggctgccaaggaggccccaaacccaggccccatgcaaaggcacgtggtttccttttctcctctctctgcatctgcgctttccagataagcccaaagacagcaacttctccactcatgacaaatcaactgtgaccctcgctccttccatttctgtccattagaaaccagccttttcagcatctcacccattagcagccccatcacccagtgatcagtcgcctcagtaaagcagatctgtggatggggagcctacgggtggtaagaagtggtgttttgtgtttcatctccagcttggtgttccatggcccctaggcgaggtgatcagggagtggggccaatgggcccccggccctggctttgggaccttgtgctgagggatgatttgctcctgaccttgattaacttaacagttcccagctggaagggacactttcaggacccagtccactgtatggcatttgtgatgcagaattatgcactgacatgaccctgggtgacaggaaagcctttcgagaggcccaaggtggcctcgccagccctgcagtattgatgtgcagtattgcaccacagctctgcggaccttggccattgccgcagtcgcagcttccttttttctgtttgcactgtttgtttgtatgatgttagctaattccactgtgtatataaattgtattttttttaatttgtaaaatgctatttttatttgaacctttggaacttgggagttctcattgtaaccctaacatgtgagaataaaatgtcttctgtctcaaaaaaaaaa

SEQ ID NO: 80964 - DNA, 4573 bp, Homo sapiens
  sig_peptide (2491)...(2626): this location contains the signal peptide sequence, MAGVIAGLLMFIIILLGVMLTIKRRRNAYSYSYYLKLAKKQKETQ, Run with SignalP
  misc_feature (1094)...(4575): similar to gi2828708 in the genepept database release 114, Run with FASTXY 3.3t00, default parameters
atgcagatttcatctcctgtcttctatgtgatatgggctctgggtggcattaccacttttgatgctacgggaatgaagtgtgatgggggacatggtgaactgaagcaagattttagccagtcagaactcaaggatgtggctgtgatgaaaggaagtgctggaaaggggttgaggctggcgctgacccaacagagggcctccttctttcatcgcactttctccttggtcacagtgcatctcacagtgtctgctcacaaactggtgcctgggaaggctggggcccgtggctgttcctttgatgagcactacagcaactgtggttatagtgtggctctagggaccaatgggttcacctgggagcagattaacacatgggagaaaccaatgctggaccaggcagtgcccacaggatctttcatgatggtgaacagctctgggagagcctctggccagaaggcccaccttctcctgccaaccctgaaggagaatgacacccactgcatcgacttccattactacttctccagccgtgacaggtccagcccaggggccttgaacgtctacgtgaaggtgaatggtggcccccaagggaaccctgtgtggaatgtgtccggggtcgtcactgagggctgggtgaaggcagagctcgccatcagcactttctggccacatttctatcaggtgatatttgaatccgtctcattgaagggtcatcctggctacatcgccgtggacgaggtccgggtccttgctcatccatgcagaaaagcacctcattttctgcgactccaaaacgtggaggtgaatgtggggcagaatgccacatttcagtgcattgctggtgggaagtggtctcagcatgacaagctttggctccagcaatggaatggcagggacacggccctgatggtcacccgtgtggtcaaccacaggcgcttctcagccacagtcagtgtggcagacactgcccagcggagcgtcagcaagtaccgctgtgtgatccgctctgatggtgggtctggtgtgtccaactacgcggagctgatcgtgaaagagcctcccacgcccattgctcccccagagctgctggctgtgggggccacatacctgtggatcaagccaaatgccaactccatcatcggggatggccccatcatcctgaaggaagtggaatatcgcaccaccacaggcacgtgggcagagacccacatagtcgactctcccaactataagctgtggcatctggaccccgatgttgagtatgagatccgagtgctcctcacacgaccaggtgaggggggtacgggaccgccaggggctcccctcaccaccaggaccaagtgtgcagatccggtacatggcccacagaacgtggaaatcgtagacatcagagcccggcagctgaccctgcagtgggagcccttcggctacgcggtgacccgctgccatagctacaacctcaccgtgcagtaccagtatgtgttcaaccagcagcagtacgaggccgaggaggtcatccagacctcctcccactacaccctgcgaggcctgcgccccttcatgaccatccggctgcgactcttgctgtctaaccccgagggccgaatggagagcgaggagctggtggtgcagactgaggaagacgttccaggagctgttcctctagaatccatccaaggggggccctttgaggagaagatctacatccagtggaaacctcccaatgagaccaatggggtcatcacgctctacgagatcaactacaaggctgtcggctcgctggacccaagtgctgacctctcgagccagagggggaaagtgttcaagctccggaatgaaacccaccacctctttgtgggtctgtacccagggaccacctattccttcaccatcaaggccagcacagcaaagggctttgggccccctgtcaccactcggattgccaccaaaatttcagctccatccatgcctgagtacgacacagacaccccattgaatgagacagacacgaccatcacagtgatgctgaaacccgctcagtcccggggagctcctgtcagtgtttatcagctggttgtcaaggaggagcgacttcagaagtcacggagggcagctgacattattgagtgcttttcggtgcccgtgagctatcggaatgcctccagcctcgattctctacactactttgctgctgagttgaagcctgccaacctgcctgtcacccagccatttacagtgggtgacaataagacatacaatggctactggaaccctcctctctctcccctgaaaagctacagcatctacttccaggcactcagcaaagccaatggagagaccaaaatcaactgtgttcgtctggctacaaaagcaccaatgggcagcgcccaggtgaccccggggactccactctgcctcctcaccacaggtgcctccacccagaattctaacactgtggagccagagaagcaggtggacaacaccgtgaatatggctggcgtgatcgctggcctcctcatgttcatcatcattctcctgggcgtgatgctcaccatcaaaaggagaagaaatgcttattcctactcctattacttgaagctggccaagaagcagaaggagacccagagtggagcccagagggagatggggcctgtggcctctgccgacaaacccaccaccaagctcagcgccagccgcaatgatgaaggcttctcttctagttctcaggacgtcaacggattcaatggcagccgcggggagctttcccagcccaccctcacgatccagactcatccctaccgcacctgtgaccctgtggagatgagctacccccgggaccagttccaacccgccatccgggtggctgacttgctgcagcacatcacgcagatgaagagaggccagggctacgggttcaaggaggaatacgaggccttaccagaggggcagacagcttcgtgggacacagccaaggaggatgaaaaccgcaataagaatcgatatgggaacatcatatcctacgaccattcccgggtgaggctgctggtgctggatggagacccgcactctgactacatcaatgccaactacattgacggataccatcgacctcggcactacattgcgactcaaggtccgatgcaggagactgtaaaggacttttggagaatgatctggcaggagaactccgccagcatcgtcatggtcacaaaccctgggtgaagtgggccaggtgaaatgtgtgcgatactggccagatgacacggaggtctacggagacattaaagtcaccctgattgaaacagagcccctggcagaatacgtcatacgcaccttcttctttcctcagaaaggctaccatgagatccgggagctccgcctcttccacttcaccagctggcctgaccacggcgttccctgctatgccactggccttctgggcttcgtccgccaggtcaagttcctcaaccccccggaagctgggcccatagtcctctcttccagtgctggggctgggcggactggctgcttcattgccattgacaccatgcttgacatggccgagaatgaaggggtggtggacatcttcaactgcgtgcgtgagctccgggcccaaagggtcaacctgctgactttgcaggagcaatatgtgtttgtgcacgatgccatcctggaagcgtgcctctgtggcaacactgccatccctgtgtgtgagttccgttctctctactacaatatcagcaggctggacccccagacaaactccagccaaatcaaatgtgccccacagaccctcaacattgtgacaccccgtgtgcggcccgaggactgcagcattgggctcctgccccggaaccatgataagaatcgaagtatggacgtgctgcctctggaccgctgcctgcccttccttatctcagtggacggagaatccagcaattacatcaacgcagcactgatggatagccacaagcagcctgccgccttcgtggtcacccagcaccctctacccaacaccgtggcagacttctggaggctggtgttcgattacaactgctcctctgtggtgatgctgaatgagatggacactgcccagttctgtatgcagtactggcctgagaagacctccgggtgctatgggcccatccaggtggagttcgtctccgcagacatcgacgaggacatcatccacagaatattccgcatctgtaacatggcccggccacaggatggttatcgtatagtccagcacctccagtacattggctggcctgcctaccgggacacgcccccctccaagcgctctctgctcaaagtggtccgacgactggagaagtggcaggagcagtatgacgggagggagggacgtactgtggtccactgcctaaatgggggaggccgtagtggaaccttctgtgccatctgcagtgtgtgtgagatgatccagcagcaaaacatcattgacgtgttccacatcgtgaaaacactgcgtaacaacaaatccaacatggtggagaccctggaacagtataaatttgtatacgaggtggcactggaatatttaagctccttt

SEQ ID NO: 80965 - DNA, 949 bp, Homo sapiens
  sig_peptide (122)...(257): this location contains the signal peptide sequence, MPVLLWAPWPLGQAALMRERVPSSRLKNQTPGASGIWRDGVAGGP, Run with SignalP
  misc_feature (490)...(734): similar to gi5734375 in the genepept database release 114, Run with FASTXY 3.3t00, default parameters
tttcgtgcccagctgtgcgccctccctagctctcctgccccctggagctgatggccccttctccactgaccgattccttatcggggcctcttggggtctcgggcctcgggtgcaccgtcccatgcccgtcctgttgtgggcaccgtggcccttggggcaggcggctctaatgcgggagcgagtccctagctccagacttaagaaccagaccccgggagcatctggcatttggcgtgacggcgtcgcaggcgggcctgggctccctggagagtggcctccctgggagtgagcagggctggggtcgtgggcgcaaatactcctgcagagcaagtgcaggggagtcctgggcccgtttctcctccacctgcgttttcagtgcacttggcttggctgggaggtcctgaggccctgaggccagcaggggaaccagtcctgagggagaggactttgaaagcaacatttgagggtcgtacgcccctggctggtgggggtcctggcgctcagggtgttcggggagccatgtctggcgtccattggggaagctgcctccctggcctttttggctaacccagaccacggccagggcaacttcccaaggccctggcgccaattgagcgggcctccgcttgagctgttatcctatcccccttccttgtgctagaaccctgttcccaaaaaaggtgtcaaccttgcgaagggctatgaaagccctttcgtccaagcttccaatagcgatgagcagtcttgcttccttaaggcaaatgatccgtgtcttaggcaccttcgccgtcgcatgaacaaatcgtcgtatctctatgagacgacatacaatgagtctatctcgttcttgccacacgtagtacccgcccgatcactacttccgcgtccactcatccagtgctaacgatcagcgccctaggaagcttcaccttgtcactatccatcgtcc

SEQ ID NO: 80966 - DNA, 615 bp, Homo sapiens
  sig_peptide (86)...(221): this location contains the signal peptide sequence, MTFHRHGFLLRRCLAFRCNPVFSSLPHESALDFVRNERKFKNSCA, Run with SignalP
  misc_feature (102)...(260): similar to gi533243 in the genepept database release 114, Run with FASTXY 3.3t00, default parameters
atcgttcagaagagcaaagttgaacacttccttcaacattagggcatggcgtgctgtgtgtgtcagtgattgcctctgtggactcatgactttccatcgccatggctttctcttacgccgctgtttggctttcagatgtaatcctgtcttctcctctcttccccacgaaagcgcactcgattttgttaggaatgaacggaagtttaaaaattcttgtgcccacccccgccctccacccattcctgttaaaagttctctggcgaagagccaatgggtgaacgtaattgaaagagctatttactcttttggaaatctgatttgaagtctaagttttcagtaacagaagacacacaagcaatgtggactgccaagcttgaagcacttcgggctctgccttcactcgcatgctaccatgtcgagcccaaactccactttaattaaaagagctgtgctgcgaattccacaacttctgttaaataatttgtattccattatatatattttgcacatctcaggggaccataatgaacatatgaaagggggggggtgccgtcaaattgagaatacatatataatatgtgtatggagactatctggataaaaataaccaatttc

SEQ ID NO: 80967 - DNA, 2475 bp, Homo sapiens
  sig_peptide (463)...(598): this location contains the signal peptide sequence, MAVFRSGLLVLTTPLASLAPRLASILTSAARLVNHTLYVHLQPGM, Run with SignalP
  misc_feature (1456)...(2342): similar to gi894178 in the genepept database release 114, Run with FASTXY 3.3t00, default parameters
ggttgcagccagggaagcctccgcggtggtgcaagtggaacccaagccttgaggtttcagtgagtagggggccgacgtgagctttagcgtccccctttagcctccctcttcgattccttgaagaccctggtgcagcttagcaagagggcccaggatttttggatccccagccctgtgacaagggttcctgtccagtttccccctcccaggatttcgactcagttcagcgaagtcaccgccccgtctgagaaatgaggacaccaaggcttagagcacagccccgaggcgccgtctaccaggccccgtcccctcccccggctcctgtcggtcagcactgaaaccccgtccctgctccaggcctccttctctggggtccaaggtcccatacaggcctctgcctcggccgcaggcccttcagtcaccgtcgcctcgtctccctgactgtccgcaggcctgggcagcatggccgtattccggtcgggtctcctggtgctgacgacgccgctggcctccctagcccctcgcctggcctccatcctgacctcggcggcccggctggtgaatcacacactctatgttcacctgcagccgggcatgagcctggagggcccggctcagccccagtacagccccgtgcaggccacgtttgaggttcttgatttcatcacgcacctctatgctggcgccgacgtccacaggcacttggacgtcagaatcctactgaccaatatccgaaccaagagcacctttctccctcccctgcccacctcagtccagaatctcgcccacccgccagaagtcgtgttgacagatttccagaccctggatggaagccagtacaacccggtcaaacagcagctagtgcgttacgccaccagctgttacagctgttgtccgcgactggcctcggtgctgctatactccgattatgggataggagaagtgcccgtggagcccctggatgtccccttaccctccacgatcaggccagcttcccccgtggccgggtctccaaagcagccggtgcgtggctactaccgtggcgctgtcggtggcacgtttgaccgcctgcacaacgcccacaaggtgttgctcagtgtcgcgtgcatcctggcccaggagcagcttgtggtgggagtagcagacaaagatctgttgaagagcaagttgctccctgagctgctccaaccttatacagaacgtgtggaacatctgagtgaattcctggtggacatcaagccctccttgacttttgatgtcatccccctgctggacccctatgggcccgctggctctgacccctccctggagttcctggtggtcagcgaggagacctatcgtggggggatggccatcaaccgcttccgccttgagaatgacctggaggaacttgctttgtaccagatccagctgctgaaggacctcagacatacagagaatgaagaggacaaagtcagctcctccagcttccgccagcgaatgttggggaacctgcttcggcctccatatgaaaggccagagctccccacatgtctctatgtaattgggctgactggcatcagtggctctgggaagagctcaatagctcagcgactgaagggcctgggggcgtttgtcattgacagtgaccacctgggtcatcgggcctatgccccaggtggccctgcctaccagcctgtggtggaggcctttggaacagatattctccataaagatggcatcatcaacaggaaggtcctaggcagccgggtgtttgggaataagaagcagctgaagatactcacggacattatgtggccaattatcgcaaagctggcccgagaggagatggatcgggctgtggctgagggaaagcgtgtgtgtgtgattgatgccgctgtgttgcttgaagccggctggcagaacctggtccatgaggtgtggactgctgtcatcccagagactgaggctgtaagacgcattgtggagagggatggcctcagtgaagccgcggctcaaagccggctgcagagccagatgagcgggcagcagcttgtggaacagagccacgtggtgctcagcaccttgtgggagccgcatatcacccaacgccaggtggagaaagcctgggccctcttgcagaagcgcattcccaagactcatcaggccctcgactgaaaagttctcagtggggccagactggctcctggagctgacaagcgaccccgtggtgaggagaaatgggggccttgatgctcaccctggttcaggcccagaggtccaagctatactgtgcaggacatggccaggcctggtggacacaggaagcctacccaacacgctggtatttggccaacactgaggatgtggttcatgggggagcagtcccctccccactcttgcccatgggtgactcttacccacagctgactagggccagcgcaaatactggaacctgtaacagaattaaaggtgaatgttctgagaaaaaaaaaa

SEQ ID NO: 80968 - DNA, 2428 bp, Homo sapiens
  sig_peptide (156)...(291): this location contains the signal peptide sequence, MFPAGPPWPRVRVVQVLWALLAVLLASWRLWAIKDFQECTWQVVL, Run with SignalP
  misc_feature (63)...(1757): similar to gi3549154 in the genepept database release 114, Run with FASTXY 3.3t00, default parameters
tttcgtggagcggaagcagagtgaggagcaagccccgggcgagaaacgggggcccggccgggagcaagagcaggggcggggccgggagcaagagcaggggcggggcccggagacgggcgagaccaggttctagccacgttatgtgcggcccagccatgttccctgccggtcctccgtggcccagagtccgagtcgtgcaggtgctgtgggccctgctggcagtgctcctggcgtcgtggaggctgtgggcgatcaaggatttccaggaatgcacctggcaggttgtcctgaacgagtttaagagggtaggcgagagtggtgtgagcgacagcttctttgagcaagagcccgtggacacagtgagcagcttgtttcacatgctggtggactcacccatcgacccgagcgagaaatacctgggcttcccttactacctgaagatcaactactcctgcgaggaaaagccctctgaggacctggtgcgcatgggccacctgacggggctaaagcccctggtgctggtcaccttccagtccccagtcaacttctaccgctggaagatagagcagctgcagatccagatggaggctgcccccttccgcagcaaaggtgggcctgggggaggcgggagggatcgcaacctggcagggatgaatatcaacggcttcctgaagagagaccgggacaataacatccaattcactgtgggagaggagctcttcaacctgatgccccagtactttgtgggtgtctcatcgaggcccttgtggcacactgtggaccagtcacctgtgcttatcctgggaggcattcccaatgagaagtacgtcctgatgactgacaccagcttcaaggacttctctctcgtggaggtgaacggtgtggggcagatgctgagcattgacagttgctgggtgggctccttctactgcccccattctggcttcacagccaccatctatgacactattgccaccgagagcaccctcttcattcggcagaaccagctggtctactattttacaggcacctataccacactctatgagagaaaccgcggcagtggtgagtgtgctgtggctggacccacgcctggggagggcaccctggtgaacccctccactgaaggtagttggattcgtgtcctggccagcgagtgcatcaagaagctgtgccctgtgtatttccatagcaatggctctgagtacataatggccctcaccacgggcaagcatgagggttatgtacacttcgggaccatcagagttaccacctgctccataatttggtctgaatacatcgcgggtgagtatactctactgctgctggtggagagtggatatggtaatgcaagtaaacgtttccaggtggtcagctacaacacagctagtgatgacctggaacttctctaccacatcccagaattcatccctgaagctcgaggattggagttcctgatgatcctagggacagagtcctacaccagcactgcaatggcccccaagggcatcttctgtaacccgtacaacaatctgatcttcatctggggcaacttcctcctgcagagctctaacaaggaaaacttcatctacctggcagacttccccaaggaactgtccatcaaatacatggccagatcgttccgtggggctgtggctattgtcacagagacggaggagatctggtacctcctggagggcagctaccgggtctaccagctgttcccttccaagggctggcaggtgcacatcagcttaaagctgatgcaacagtcctctctctacgcatccaatgagaccatgctgaccctcttctacgaagacagcaaactgtaccagctggtgtaccttatgaacaaccagaagggccagctggtcaagaggctcgtgcccgtggagcagcttctgatgtatcaacagcacaccagccactatgacttggagcggaaagggggctacttgatgctctccttcatcgacttctgccccttctcggtgatgcgcctgcggagcctgcccagtccgcagagatacacgcgccaggagcgctaccgggcgcggccgccgcgcgtcctggagcgctcgggctttccacaaggagaactcgcccgccatctaccagggcctggtctactacctgctgtggctgcactccgtgtacgacaagccgtacgcggacccggtgcacgaccccacctggcgctggtgggcgaacaacaaacaagaccaggattactacttcttcttggcgagcaattggcgaagcgcgggcggcgtgtccatagaaatggacagctacgaaaagatctacaacctcgagtccgcgtacgagctgccggagcgcattttcctggacaagggcactgagtacagcttcgccatcttcctgtcggcgcagggccactcgttccggacgcagtcagaactcg

SEQ ID NO: 80969 - DNA, 692 bp, Homo sapiens
  sig_peptide (167)...(302): this location contains the signal peptide sequence, MGWVWTLCTASACLTLLFWSQTPGKAFQIPCPPPHLSHWCLSPMQ, Run with SignalP
  misc_feature (450)...(335): similar to gi1345539 in the genepept database release 114, Run with FASTXY 3.3t00, default parameters
ggccgggttggaaaacccagcaacgagctttgaaaacatatcacccggacaccaggggcagaggctgttctgggcgggaggttgtgcctgccccacggagcgacagaagcggggagaccagacgtcgaccctgaggcgtgcctcctggggggctccagtggccggcatggggtgggtgtggactctctgcactgctagtgcctgcctgaccttgctgttctggagccagaccccagggaaagcattccagatcccgtgccccccaccacacctttcccattggtgcttgtctcctatgcaaatggatgatggttgtgctcggctttgcgtgttgtggacggcgtggatgagatggagggtgctcatgtgctcttgtcgggtgtgggccacagatcttgggatcttccttggcgtggccttggggaatgagcctttggagatgtggcccttgacgcaaaatgaggagtgcactgtcacgggttttctgcgggacaagctgcagtacaggagccgacttcagtacatgaaacactacttccccatcaactacaagatcagagtgccttacgagggggtgttcagaatcgccaacgtcaccaggctgagggcccaggggagcgagcgggagctgcggtatctgggggtcttggtgagcctcagtgccactgagtcggtgcatgacgagctgctcg

SEQ ID NO: 80970 - DNA, 735 bp, Homo sapiens
  sig_peptide (102)...(237): this location contains the signal peptide sequence, MFHRCRLKAGLMLWRSLESGLCAGAHRLWLEGPMAFPELGEKDPL, Run with SignalP
  misc_feature (515)...(345): similar to gi169880 in the genepept database release 114, Run with FASTXY 3.3t00, default parameters
ttcccgggtcgacccacgcgaacgattttttaattaatggaacggcctcccttttcgttgtccattgagggagaggggtgatcctacaggaggaagtggagatgttccaccgttgcaggctgaaggccgggttgatgctgtggaggagcttggagtctggtctgtgcgctggggcccatcggctgtggcttgagggtcccatggctttccctgaacttggggagaaggaccccctccttgcgtcacccctggcactgataccacagtctctgataggtttgggtggcctgaggggagcttggtagacgtgcccactgcccttccggtgtgaggaaaagcgtgtgggtggaggaagtgcgggtgggggatattgctggccaggacggtggtgtttgggaacaaagcatcggttttggaaatctgtgtcaggccagcccaccatgaggccatgaaaccaagaggagctggggaactggcaagaggtgagggggagtgggtgtgggtaatggacggtgttgtgtgctggacctgttgagtttttattaattgaatgtgtcaaagaggaagagaagctgtgaaccctgtgatgtcatcagttaggtaagaaagaaatgccactttttatgcataaacacaaacatatgaaaatgggcccgtctgactgtgcttcgtcccttccacattgggcaccctgtgactcttcacttatcccagccctggcgtcctcactgggtg

SEQ ID NO: 80971 - DNA, 754 bp, Homo sapiens
  misc_feature (1)...(754): n = a,t,c or g
  sig_peptide (224)...(359): this location contains the signal peptide sequence, MFPASREAWLALAWALGGAQLAGHSWGSWVRPAPAGGHRHLFTRY, Run with SignalP
  misc_feature (190)...(52): similar to gi198549 in the genepept database release 114, Run with FASTXY 3.3t00, default parameters
cagatccctttaccacattggtcaggtacccctgaagaacagggagagcccaaaaatcaggtcccgagcagctcagtccccaaaatagggccagcatgggcttctgattgggatgaggaaaagactgaggaacgaggaaacaagggaaactgaaggcccatccggtggcctagccacacctggcaggggcacggagtgaatagctgagtcgccagtggaaaagatgtttccagcttcacgtgaagcctggctcgcattggcttgggccctgggtggggctcagcttgcaggccattcctggggcagctgggtgaggccagccccagcagggggacaccggcacctcttcacacgttatggtggtgtcctctggaaaaaggtgtgaagtaaatgcatcgactgatgtaccttgcacacatttcacaccctcctttttctgtttcatgctccctttctccctcaagccagctctgaatgtgtgagcctttgtgccatttctgaatttacaaatccccccaaaaggcactcatcatggactctctttctagatctttggtggcaggtatggggaaaanaaagggacttaacttttccttagggtttttataaaacaatgatctttttgtcccaggcgggtaaagttttattaatttttcccagttagaaaaaaccaggttttcccccacccggggaaagctgggcttctggcctttccacttgtccaaggggtttttggagcctgggttttttctta

SEQ ID NO: 80972 - DNA, 1970 bp, Homo sapiens
  sig_peptide (1157)...(1292): this location contains the signal peptide sequence, MSFCFTFLSLLPACIKLILQPSSKGFKFTLVSCALSFFLFSFQVH, Run with SignalP
  misc_feature (261)...(1783): similar to gi5281124 in the genepept database release 114, Run with FASTXY 3.3t00, default parameters
tttcgtctgggacccacggcaggcgcgaatcccagcggtctttgggcggcggggatacttctacataaacataatcaagttttgactatttggaaaccaagcatcattaaaattctctcaaactcctaattgcgaagaatcgataacatttcaagaagtgataacatttttctgaacaagaaaagaagtgattgaccacgttttaaaagtactctggcactggtgctgtgttttcttcccctccctaaatttgaagaactatggagaaatggtacttgatgacagtagtggttttaataggactaacagtacgatggacagtgtctcttaattcttattcaggtgctggtaaaccgcctatgtttggtgattatgaagctcaaagacactggcaagaaataacttttaatttaccggtcaaacaatggtattttaacagcagtgataacaatttacagtattggggattggattacccacctcttacagcttatcatagtctcctatgtgcatatgtggcaaagtttataaatccagactggattgctctccatacatcacgtggatatgagagtcaggcacataagctcttcatgcgtacaacagttttaattgctgatctgctgatttacatacctgcagtggttttgtactgttgttgcttaaaagaaatctcaactaagaaaagattgctaatgcattatgcatcttgctgtatccaggccttattcttatagactatggacattttcaatataattctgtgagtcttggctttgctttgtggggtgttcttggaatatcttgtgactgcgacctcctagggtcactggcattttgcttagctataaattataaacagatggaactttaccacgccttgccatttttttgctttttacttggcaagtgttttaaaaaaggcctcaaaggaaaggggtttgagttgctagttaagctagcttgtattgttgtggcttccttcgttctctgctggctgccattctttacagaaagggaacaaaccctgcaggttctaagaagactcttcccggttgatcgtggattatttgaggataaagtagccaatatttggtgcagcttcaatgtctttctgaagattaaggatattttgccacgtcacatccaattaataatgagcttttgttttacgtttttgagcctgcttcctgcatgcataaaattaatacttcagccctcttccaaaggattcaaatttacactggttagctgtgcgctatcattctttttattttctttccaagtacatgaaaaatccattctcttggtgtcactaccagtctgcttagttttaagtgaaattccttttatgtctacttggtttttacttgtgtcaacatttagtatgctacctcttctattgaaggatgaactcctaatgccctctgttgtgacaacaatggcattttttatagcttgtgtaacttccttttcaatatttgaaaagacttctgaagaagaactgcagttgaaatccttttccatttctgtgaggaaatatcttccatgttttacatttctttccagaattatacaatatttgtttcttatctcagtcatcactatggtgcttctgacgttgatgactgtcacactggatcctcctcagaaactaccggacttgttttctgtattggtgtgttttgtatcttgcttgaacttcctgttcttcttggtatactttaacattattattatgtgggattccaaaagtggaagaaatcagaagaaaatcagctagctgtattcctaaacaaattgtttcctaaacaaatgtgaaaatgtgaacagtgctgaaaggttttgtgaactttttgctatgtataaatgaaattaccattttgagaaccatggaaccacaggaaaggaaatggtgaaaagtcattgttgtctacacaaaataaatgtatatggagaccaaaaaaaaa

SEQ ID NO: 80973 - DNA, 753 bp, Homo sapiens
  sig_peptide (239)...(374): this location contains the signal peptide sequence, MVFFSFFFQFFVFFFLPFLLILSSFFRCFYWETAIMTVHGELFKE, Run with SignalP
  misc_feature (145)...(311): similar to gi1142588 in the genepept database release 114, Run with FASTXY 3.3t00, default parameters
gcactcagttaattaccacataatatttttttaaagagtaagcttatatttcagactctgaataccacgtatgtaagtgctttagatatctctccaatagagaaataatggcatggaaatatggtaaatatgtctcaatttagattatttctgctttttccaacatgtatttttccccaacattacattttgtgaaataacttgtgggttttttcaatgccttctatactcactacctatggttttcttttctttttttttccaattcttcgttttcttttttcttcctttccttctcattctttcttccttctttcggtgcttctattgggaaacagcaatcatgactgtccatggcgaattatttaaagaaatctcacctatttcttttcaaagcaaataaaagataaaatttacttgctgctgttgaagtcaaactaagaaagagccagcaaacactagaccatcctctatccagtgtccttgcagctgcattttggcagcgatggctaactgtccccttccacagaataaagatgtttcttggaagtgcctgaactataggacccatatttttcaaccccaccccccttgtttgcttctaagtggagcccttttactaccttttcccttataaactccaggggcggaaaatttgggtttctattccttgggcccccaataccctaagaggggggggggttcccccctttttttttcggcccttaacccggggtttccccaaaaaaaaaa

SEQ ID NO: 80974 - DNA, 392 bp, Homo sapiens
  sig_peptide (176)...(311): this location contains the signal peptide sequence, MLIKIVLLILVTYLLVFSCVWKNKSWLILLKVVINKIDYADIYTF, Run with SignalP
  misc_feature (152)...(363): similar to gi552132 in the genepept database release 114, Run with FASTXY 3.3t00, default parameters
aaaaccctcccctacaatataatacagatttttttgattattagatataattttaaatttcttttacctttatacataaaatcactacagattaaggagatgtacaaatgtccttaaattatattaaatgcacttactttgccatcttaaaatttatttaagtaaaataacatatatgctcataaaaatagttttattgatcttggttacctatcttctagttttctcttgtgtctggaaaaataaaagttggttaattttgttaaaggtggtaattaataaaatcgactatgcagacatttatacatttacttatacataaaaatatatttatgtactttaatctctatattactcttctaattcaatttttaaagtaaagttccattttt

SEQ ID NO: 80975 - DNA, 1146 bp, Homo sapiens
  sig_peptide (270)...(405): this location contains the signal peptide sequence, MYKNFCLFFIFALYQGLANYGLWANSNPLHVSVYKILLGCVPWLL, Run with SignalP
  misc_feature (253)...(429): similar to gi42568 in the genepept database release 114, Run with FASTXY 3.3t00, default parameters
ttttagttctataatttatgtacaacaaaaaaaagtgtgtagcttggtgaaatttacatatgggtatacctttgtgattactacccagataaacatataaaacattttcattccttctgccccttcctatcaatggagccactcgcttcccccagtcaactactgtcccgatttctatgaccatgtattattttcaaatgtttttaaacttcatataaacggagtcatacagtttattcttttgttcacattgtattcatccatgttgcatgtataaaaatttttgtttgttttttatttttgctttgtatcaagggttggcaaactatggcctgtgggccaattccaacccactgcatgtttctgtttataaaattttattgggctgtgttccatggctcctgtctgtggtttcagcctcccgagtagctgggactacaggcacccaccactatgcctggataattttttgtatttttagtacagacggggtttcaccgcgttggccaagatggtcttgatctcctgacctcgtgatccacccgccttggcctcccaaagtgctgggattacaggggtgagccaccgcgcccaggccactctcaaaattttgaagacattgcctttggtttcctccaaaaactttatagttttaactgttggatctgggactatcaccagttgattttcgcgtatggggggagggggggacaagatttattttggattggacatccctcgactctaacatttattggaaaaacacacctttttttgcgctagaaatgcggggggaactgctcaaaaagaagggtctacattggggccgggggagggactctgtcttacacttgactaccatccggtcttgaacgatccactctgttgaacgtgcaatttcggtcccttgctcagatagcacccgcaatgtctcgtcggacggcgaacggctgaacgggtgcgatcgatagatcgcggcgggccggacccttataaccgaacggcatcgctccggccggattcgctgaaacgtacgggccgatcggctgcaacgcaacgatcggtctgactgacatgcatgcacctgagtcggcccataagcgcgccatgcgaggactagctacgggtgcacggtagtcaccgacc

SEQ ID NO: 80976 - DNA, 1004 bp, Homo sapiens
  sig_peptide (92)...(227): this location contains the signal peptide sequence, MEFGLSWLFLVAILKGVQCEVQLVESGGGLVQPGGSLRLSCAASG, Run with SignalP
  misc_feature (149)...(935): similar to gi2911500 in the genepept database release 114, Run with FASTXY 3.3t00, default parameters
gcccacgcgtccgcccacgcgtccgtttcccagccttgggattttcaggtgttttcatttggtgatcaggactgaacagagagaactcaccatggagtttgggctgagctggctttttcttgtggctattttaaaaggtgtccagtgtgaggtgcagctggtggagtctgggggaggcttggtacagcctggggggtccctgagactctcctgtgcagcctctggattcacctttagcagctatgccatgagctgggtccgccaggctccagggaagggggaaggggctggagtgggtctcaggttttagttatagtggtagtggtggtagtgggggtagcacatactacgcagactccgtgaagggccggttcaccatctccagagacaattccaagaacacgctgtatctgcaaatgaacagcctgagagccgaggacacggccgtatattactgtgcgaaaggccttttgcccccgcggtgggcgtatagggtgtatgaagatagtggctggtacttcgatctctggggccaagggacaatggtcaccgtctcctcaggtggaggcggttcaggcggaggtggcagcggcggtggcggatcggacatccagatgacccagtctccttccaccctgtctgcatctattggagacagagtcaccatcacttgccgggccaaccagaatattaataactggttggcctggtatcagcagaaaccagggaaagcccctaagctcctgatctatcaggcgtctagtttagaaagtggggtcccatccaggttcagcggcagtggatctgggacagacttcactctcaccatcagcagcctgcagcctgatgattttgcaacttattactgccaacagtataatagttattctccggcgtggacgttcggccaagggaccaaggtggaaatcaaacgtgcggccgcagaacaaaaactcatctcagaagaggatctgaatggggccgcacatcaccatcatcaccat

SEQ ID NO: 80977 - DNA, 1970 bp, Homo sapiens
  sig_peptide (817)...(682): this location contains the signal peptide sequence, MSFCFTFLSLLPACIKLILQPSSKGFKFTLVSCALSFFLFSFQVH, Run with SignalP
  misc_feature (1715)...(191): similar to gi5281124 in the genepept database release 114, Run with FASTXY 3.3t00, default parameters
tttttttttggtctccatatacatttattttgtgtagacaacaatgacttttcaccatttcctttcctgtggttccatggttctcaaaatggtaatttcatttatacatagcaaaaagttcacaaaacctttcagcactgttcacattttcacatttgtttaggaaacaatttgtttaggaatacagctagctgattttcttctgatttcttccacttttggaatcccacataataataatgttaaagtataccaagaagaacaggaagttcaagcaagatacaaaacacaccaatacagaaaacaagtccggtagtttctgaggaggatccagtgtgacagtcatcaacgtcagaagcaccatagtgatgactgagataagaaacaaatattgtataattctggaaagaaatgtaaaacatggaagatatttcctcacagaaatggaaaaggatttcaactgcagttcttcttcagaagtcttttcaaatattgaaaaggaagttacacaagctataaaaaatgccattgttgtcacaacagagggcattaggagttcatccttcaatagaagaggtagcatactaaatgttgacacaagtaaaaaccaagtagacataaaaggaatttcacttaaaactaagcagactggtagtgacaccaagagaatggatttttcatgtacttggaaagaaaataaaaagaatgatagcgcacagctaaccagtgtaaatttgaatcctttggaagagggctgaagtattaattttatgcatgcaggaagcaggctcaaaaacgtaaaacaaaagctcattattaattggatgtgacgtggcaaaatatccttaatcttcagaaagacattgaagctgcaccaaatattggctactttatcctcaaataatccacgatcaaccgggaagagtcttcttagaacctgcagggtttgttccctttctgtaaagaatggcagccagcagagaacgaaggaagccccaccaatacaagctagcttaactagcaactcaaacccctttcctttgaggccttttttaaaacacttgccaagtaaaaagcaaaaaaatggcaaggcgtggtaaagttccatctgtttataatttatagctaagcaaaatgccagtgaccctaggaggtcgcagtcacaagatattccaagaacaccccacaaagcaaagccaagactcacagaattatattgaaaatgtccatagtctataagaataaggcctggatacagcaagatgcataatgcattagcaatcttttcttagttgagatttcttttaagcaacaacagtacaaaaccactgcaggtatgtaaatcagcagatcagcaattaaaactgttgtacgcatgaagagcttatgtgcctgactctcatatccacgtgatgtatggagagcaatccagtctggatttataaactttgccacatatgcacataggagactatgataagctgtaagaggtgggtaatccaatccccaatactgtaaattgttatcactgctgttaaaataccattgtttgaccggtaaattaaaagttatttcttgccagtgtctttgagcttcataatcaccaaacataggcggtttaccagcacctgaataagaattaagagacactgtccatcgtactgttagtcctattaaaaccactactgtcatcaagtaccatttctccatagttcttcaaatttagggaggggaagaaaacacagcaccagtgccagagtacttttaaaacgtggtcaatcacttcttttcttgttcagaaaaatgttatcacttcttgaaatgttatcgattcttcgcaattaggagtttgagagaattttaatgatgcttggtttccaaatagtcaaaacttgattatgtttatgtagaagtatccccgccgaacaccggccgctgggattcgcgcctgccgtgggtcccagacgaaa

SEQ ID NO: 80978 - DNA, 5201 bp, Homo sapiens
  sig_peptide (101)...(236): this location contains the signal peptide sequence, MGPWGWKLRWTVALLLAAAGTAVGDRCERNEFQCQDGKCISYKWV, Run with SignalP
  misc_feature (101)...(2688): similar to gi307121 in the genepept database release 114, Run with FASTXY 3.3t00, default parameters
gacgtgggccccgagtgcaatcgcgggaagccagggtttccagctaggacacagcaggtcgtgatccgggtcgggacactgcctggcagaggctgcgagcatggggccctggggctggaaattgcgctggaccgtcgccttgctcctcgccgcggcggggactgcagtgggcgacagatgcgaaagaaacgagttccagtgccaagacgggaaatgcatctcctacaagtgggtctgcgatggcagcgctgagtgccaggatggctctgatgagtcccaggagacgtgcttgtctgtcacctgcaaatccggggacttcagctgtgggggccgtgtcaaccgctgcattcctcagttctggaggtgcgatggccaagtggactgcgacaacggctcagacgagcaaggctgtccccccaagacgtgctcccaggacgagtttcgctgccacgatgggaagtgcatctctcggcagttcgtctgtgactcagaccgggactgcttggacggctcagacgaggcctcctgcccggtgctcacctgtggtcccgccagcttccagtgcaacagctccacctgcatcccccagctgtgggcctgcgacaacgaccccgactgcgaagatggctcggatgagtggccgcagcgctgtaggggtctttacgtgttccaaggggacagtagcccctgctcggccttcgagttccactgcctaagtggcgagtgcatccactccagctggcgctgtgatggtggccccgactgcaaggacaaatctgacgaggaaaactgcgctgtggccacctgtcgccctgacgaattccagtgctctgatggaaactgcatccatggcagccggcagtgtgaccgggaatatgactgcaaggacatgagcgatgaagttggctgcgttaatgtgacactctgcgagggacccaacaagttcaagtgtcacagcggcgaatgcatcaccctggacaaagtctgcaacatggctagagactgccgggactggtcagatgaacccatcaaagagtgcgggaccaacgaatgcttggacaacaacggcggctgttcccacgtctgcaatgaccttaagatcggctacgagtgcctgtgccccgacggcttccagctggtggcccagcgaagatgcgaagatatcgatgagtgtcaggatcccgacacctgcagccagctctgcgtgaacctggagggtggctacaagtgccagtgtgaggaaggcttccagctggacccccacacgaaggcctgcaaggctgtgggctccatcgcctacctcttcttcaccaaccggcacgaggtcaggaagatgacgctggaccggagcgagtacaccagcctcatccccaacctgaggaacgtggtcgctctggacacggaggtggccagcaatagaatctactggtctgacctgtcccagagaatgatctgcagcacccagcttgacagagcccacggcgtctcttcctatgacaccgtcatcagcagagacatccaggcccccgacgggctggctgtggactggatccacagcaacatctactggaccgactctgtcctgggcactgtctctgttgcggataccaagggcgtgaagaggaaaacgttattcagggagaacggctccaagccaagggccatcgtggtggatcctgttcatggcttcatgtactggactgactggggaactcccgccaagatcaagaaagggggcctgaatggtgtggacatctactcgctggtgactgaaaacattcagtggcccaatggcatcaccctagatctcctcagtggccgcctctactgggttgactccaaacttcactccatctcaagcatcgatgtcaatgggggcaaccggaagaccatcttggaggatgaaaagaggctggcccaccccttctccttggccgtctttgaggacaaagtattttggacagatatcatcaacgaagccattttcagtgccaaccgcctcacaggttccgatgtcaacttgttggctgaaaacctactgtccccagaggatatggtcctcttccacaacctcacccagccaagaggagtgaactggtgtgagaggaccaccctgagcaatggcggctgccagtatctgtgcctccctgccccgcagatcaacccccactcgcccaagtttacctgcgcctgcccggacggcatgctgctggccaggggacatgaggagctgcctcacagagggttgaggctgcagtggccacccaggagacatccaccgtcaggctaaaggtcagctccacagccgtaaggacacagcacacaaccacccgacctgttcccgacacctcccggctgcctggggccacccctgggctcaccacggtggagatagtgacaatgtctcaccaagctctgggcgacgttgctggcaagaggaaattgagaagaagcccagtagcgtgagggctctgtccattgtcctccccatcgttgctcctcgtcttcctttgcctgggggtcttccttctatggaagaactggcggcttaagaacatcaacagcatcaactttgacaaccccgtctatcagaagaccacagaggatgaggtgcacatttgccacaaccaggacggctacagctacccctcgagacagatggtcagtctggaggatgacgtggcgtgaacatctgcctggagtcccgtccctgcccagaacccttcctgagacctcgccggccttgttttattcaaagacagagaagaccaaagcattgcctgccagagctttgttttatatatttattcatctgggaggcagaacaggcttcggacagtgcccatgcaatggcttgggttgggattttggtttcttcctttcctcgtgaaggataagagaaacaggcccggggggaccaggatgacacctccatttctctccaggaagttttgagtttctctccaccgtgacacaatcctcaaacatggaagatgaaagggcaggggatgtcaggcccagagaagcaagtggctttcaacacacaacagcagatggcaccaacgggaccccctggccctgcctcatccaccaatctctaagccaaacccctaaactcaggagtcaacgtgtttacctcttctatgcaagccttgctagacagccaggttagcctttgccctgtcacccccgaatcatgacccacccagtgtctttcgaggtgggtttgtaccttccttaagccaggaaagggattcatggcgtcggaaatgatctggctgaatccgtggtggcaccgagaccaaactcattcaccaaatgatgccacttcccagaggcagagcctgagtcactggtcacccttaatatttattaagtgcctgagacacccggttaccttggccgtgaggacacgtggcctgcacccaggtgtggctgtcaggacaccagcctggtgcccatcctcccgacccctacccacttccattcccgtggtctccttgcactttctcagttcagagttgtacactgtgtacatttggcatttgtgttattattttgcactgttttctgtcgtgtgtgttgggatgggatcccaggccagggaaagcccgtgtcaatgaatgccggggacagagaggggcaggttgaccgggacttcaaagccgtgatcgtgaatatcgagaactgccattgtcgtctttatgtccgcccacctagtgcttccacttctatgcaaatgcctccaagccattcacttccccaatcttgtcgttgatgggtatgtgtttaaaacatgcacggtgaggccgggcgcagtggctcacgcctgtaatcccagcactttgggaggccgaggcgggtggatcatgaggtcaggagatcgagaccatcctggctaacaaggtgaaaccccgtctctactaaaaatacaaaaaattagccgggcgtggtggcgggcacctgtagtcccagctactcgggaggctgaggcaggagaatggtgtgaacccgggaagcggagcttgcagtgagccgagattgcgccactgcagtccgcagtctggcctgggcgacagagcgagactccgtctcaaaaaaaaaaaccaaaaaaaacccttgcttggggcatcagcagcccttggcctctggccaggcatggcgaggctgaggtgggaggatggtttgagctcaggcatttgaggctgtcgtgagctatgattatgccactgctttccagcctgggcaacatagtaagaccccatctcttaaaaaatgaatttggccagacacaggtgcctcacgcctgtaatcccagcactttgggaggctgagctggatcacttgagttcaggagttggagaccaggcctgagcaacaaagcgagatcccatctctacaaaaaccaaaaagttaaaaatcagctgggtacggtggcacgtgcctgtgatcccagctacttgggaggctgaggcaggaggatcgcctgagcccaggaggtggaggttgcagtgagccatgatcgagccactgcactccagcctgggcaacagatgaagaccctatttcagaaatacaactataaaaaaataaataaatcctccagtctggatcgtttgacgggacttcaggttctttctgaaatcgccgtgttactgttgcactgatgtccggagagacagtgacagcctccgtcagactcccgcgtgaagatgtcacaagggattggcaattgtccccagggacaaaacactgtgtcccccccagtgcagggaaccgtgataagcctttctggtttcggagcacgtaaatgcgtccctgtacagatagtggggattttttgttatgtttgcactttgtatattggttgaaactgttatcacttatatatatatatatatatacacacatatatataaaatctatttatttttgcaaaccctggttgctgtatttgttcagtgactattctcggggccctgtgtagggggttattgcctctgaaatgcctcttctttatgtacaaagattatttgcacgaactggactgtgtgcaacgctttttgggagaatgatgtccccgttgtatgtatgagtggcttctgggagatgggtgtcactttttaaaccactgtatagaaggtttttgtagcctgaatgtcttactgtgatcaattaaatttcttaaatgaaccaaaaaa

SEQ ID NO: 80979 - DNA, 1193 bp, Homo sapiens
  sig_peptide (21)...(156): this location contains the signal peptide sequence, MTDHFTFFSQCPNACLSLFLCHICSLCFGSLGHCLRKVIWLYEVL, Run with SignalP
  misc_feature (185)...(303): similar to gi2323290 in the genepept database release 114, Run with FASTXY 3.3t00, default parameters
cttttttgctttagtttccaatgactgaccattttacttttttctctcaatgcccaaatgcatgcttatccttatttctttgtcacatttgtagtctttgctttggctctttgggccattgtttaaggaaggtcatttggctgtatgaggtcctctgttgtgttgaccctgggacaccagagtcatgttgttctgtggccccaattgcgttaggtcttgtgcctttggggttcactgttggctgccccccgatgctctgggattttcagcgtttgctgtggggaccctcactggccagtacttgggtactctgtttttttcagcatttgatattgttggctgattcctagcaccacctgggatactcagaggagtttggaattggcattccctctaggattatgggttagaggtccacccaaggtgaaacttggccttaccttttcttgttatgtcctaaagatatcattttctgtaacaccattttctttacttattgtaactttaacactttgctacagaaggtgggaattttcaagggaaagaaaactgggctttcgcttgactcagaaaaactttttatttagcggagatccttgttaaacgtgaggaccatgggggaatacttgaaggactcacttgtatggtggtattttaagcaattgggagccaaattcagatttaccaacagtttagtccccatgggacaaggtctcaggttttggcagagaagaaaattaggaagcccccctaaccttttaataacgaaagacgcatgtgggataactatcgcactgggctagaagctacgaacgtaaaacgtactgcgcactgaccgtaggcgcgtccctaggattcaaggagcgaggcatgttctaacgagtccgtatgctcgtacaacgatcgcaggacgtacgtaggtaatcacgtcatagcgacgacgctatctagtacgaactacacgagctagcaccggagcatagtatttaggaacgacggaagctagtactcaacgcaagagtgacggaatgtaggagcgtctgcaaggagccatgtgacgcaggtatgctagccgagcgatgtagaggtacgcaagcgtagcgacgcacgtacggatccgcaagctcgcgatgctaagctagctacggacagcttcgtaagccaccctctgctctcgatcgcaggcgatgtct

SEQ ID NO: 80980 - DNA, 990 bp, Homo sapiens
  sig_peptide (119)...(254): this location contains the signal peptide sequence, MRGNLALVGVLISLAFLSLLPSGHPQPAGDDACSVQILVPGLKGD, Run with SignalP
  misc_feature (183)...(911): similar to gi5162875 in the genepept database release 114, Run with FASTXY 3.3t00, default parameters
acctgtctggtagcagccatgaggcgcttggtttcagtgtcctcgcgggccagcgacgggcaggacgccccgttcgcctagcgcgtgctcaggagttggtgtcctgcctgcgctcaggatgagggggaatctggccctggtgggcgttctaatcagcctggccttcctgtcactgctgccatctggacatcctcagccggctggcgatgacgcctgctctgtgcagatcctcgtccctggcctcaaaggggatgcgggagagaagggagacaaaggcgcccccggacggcctggaagagtcggccccacgggagaaaaaggagacatgggggacaaaggacagaaaggcagtgtgggtcgtcatggaaaaattggtcccattggctctaaaggtgagaaaggagattccggtgacataggaccccctggtcctaatggagaaccaggcctcccatgtgagtgcagccagctgcgcaaggccatcggggagatggacaaccaggtctctcagctgaccagcgagctcaagttcatcaagaatgctgtcgccggtgtgcgcgagacggagagcaagatctacctgctggtgaaggaggagaagcgctacgcggacgcccagctgtcctgccagggccgcgggggcacgctgagcatgcccaaggacgaggctgccaatggcctgatggccgcatacctggcgcaagccggcctggcccgtgtcttcatcggcatcaacgacctggagaaggagggcgccttcgtgtactctgaccactcccccatgcggaccttcaacaagtggcgcagcggtgagcccaacaatgcctacgacgaggaggactgcgtggagatggtggcctcgggcggctggaacgacgtggcctgccacaccaccatgtacttcatgtagcagcccaggagaagagccgaagagagaagccgcagcctttcctaagctcacctggacatatcctgctgtctgcatccatt

SEQ ID NO: 80981 - DNA, 1891 bp, Homo sapiens; identical to SEQ ID NO: 60597
  sig_peptide (178)...(313): this location contains the signal peptide sequence, MSGAPTAGAALMLCAATAVLLSAQGGPVQSKSPRFASWDEMNVLA, Run with SignalP
  misc_feature (178)...(1397): similar to gi5231137 in the genepept database release 114, Run with FASTXY 3.3t00, default parameters

SEQ ID NO: 80982 - DNA, 617 bp, Homo sapiens
  sig_peptide (62)...(197): this location contains the signal peptide sequence, MSPIMLRLLTLGGCVHTSVWLSVSVHAMRLSSWVGVPFCLEYKLE, Run with SignalP
  misc_feature (100)...(235): similar to gi2764879 in the genepept database release 114, Run with FASTXY 3.3t00, default parameters
tatttccaagaagttctttttattatttttacactttagatgaaatgggtatttggatgggatgagtcccattatgctgcggttgctcacgttggggggatgtgttcacacgtctgtgtggttgtcggtgtctgtgcatgcaatgcgattgagctcctgggtaggtgttcctttctgtcttgaatacaaactggaacagtatgagaacaagctcatgattattatttctactgttatttatctttgatttaagagatcactgcgaatagctttggatgccatactttactgtgaattctgacttaccttatttggaaaatacagatcatttccaaaatgtacattcagttgaaggataaatagttgatgaaataggtttaaaaaaactcataggacattaaaagcctcattttattgaaaaataaataatgacttttttttcttgatgaccaaccctgttgtttagaggcctaaaagatttgcccaaactatccctatactatccctgtctttaacaagcttgttcaggtgaaggcacttggtcattattggggggttttggggggaattttaattttggaaacacatggcttttgcttttacaacagcctggggta

SEQ ID NO: 80983 - DNA, 3196 bp, Homo sapiens
  sig_peptide (2939)...(2804): this location contains the signal peptide sequence, MMTPKLMIWLLLQAKSSISMLEKSSKCLGRCFSSFAKNLVMIQSC, Run with SignalP
  misc_feature (3065)...(1208): similar to gi31686 in the genepept database release 114, Run with FASTXY 3.3t00, default parameters
ttttttttttttacacgtgaaaaaaataatttattacagactcttttacacattaacatggaacatttatacatatatcgatgtgctgatatgaaatactaaatttaaaggcaaacatttttacacaaaagtagttgcactctattttataaagatagatattaataagttatcagagacatttaagagctagaggccaattattccaacagtaatgcattctatgctgaaagtaaactaagttttctgaacatgatgtcctggatataatcacattcttctaagctaaggaaagggagctcatttctgggaatacaaggccaagaagggctctaacagcagtatcccagcagtgtgttttcccagatttattcttgggatggtgggttgggagctccccaaccatttagcctgaactaatgtaacagctcaatgtgaaacaatgcagctttctgtaacagctgcctgtggttaatgagatttaatacaggggatacagttacaaatgatagcattttagaagaattataattgccatatgatttgaattagtaatcaaatactttaataacagaaacgtgtattctatatttctgaaagggaagtagcatacttcaaaatagtcactattttcttagcatgatatgttaattcttactttgggagtctgaaaataaattgcattttttcccctaaaacttagaattcactcctttagaaaatgatttctataatgatatacaccaacatgatataaactttattacattatagtcattaaaatatacatatacatatatgtggaacactaaacagatttggtaaacatgatataaatatacacatggccaaacactgttcagtttcatttaactaaattcaacaaatatttattgggtgcctactacttgcagatcaccatgttaggtaatgcttgtagtagattttaagacacatgaagctcacatcatccacatcaaaagccaaactttagataatatactaaagcctaaaaagtaatagaaagcagagctaaggttgaataacggatagtgagagatatatctagaagaaagtcttggggtaatggacaaggacaaaagaaaatctgtatccatagggaagaactgctcctgggcttggcacgtgttaggagaaaactggaacctagtctgtactcctcttcaccccataatccaagattcagtcatcatcctgctttgtttcctctgttcctgtattttttctggatagaaaccaaacttgcattggttcttttttgcccttcatggacactgggcctctgtgctccaagtggaattgtggatctgaattttctggagacataagacatctgtatgtatattcagacacatttatttttcccttttctcctgtggtttctgttcggcttgtgaggttgacagtattcccaaaaagacagtatcgaggcatccgctgtcctatgacacctgtaactacctctccagtgtgtatccctattgttatctgaacagattcaccatctacttgaacctggccagcaatttccatcatgtccaaggccaggtggcagatggatcgtgcatggtgaatgcatggctctggtaaaccactcactgtcatatacttgtcaccaacagtctccaccttataaacaaatgggtttttccgggaatcagtcagtgtgtcaaatctggtgtagaggtcgttgaggaggttgacgatcttcatggctccttctccagatgcatgcttgctacagaaagcattgaagcccacaatgccactaaagaggatggtcacattgtcatatcttttggcaggcactggacgcttgtgccgcagctcattggcaacagacggaggaaggacagaatacagcaatgtgtctgtctttttcttttcatcttccagggctcttaacgtgagctgtagcctgtcagtgaggatttccagttcttgggtgagtttgtattcctctctaaattgttctcccaaaagaacaagatcgcgcgtggcatcatgcagagggatgtcacttagatacagccctctccttgtcaaatcgtccaggttcatgacacttggtgaacatagaaaaagtatgctatctgcttcaggtaagtagatcatttgacccttgagactgtaagcagctgatctcagtcccagtcagttcatcctcacattctaatttctccacatccaacaatccttccttgcttctcaatacaaaaacagtattgatgtgagaaaggatcccatggaaactaatatcaatatgaggacgaaccagcgagaagacagacagaaggctgcaattcccaggctggagctgggggagaactctgtatatagcattgccacactgagtgaccactaggtcccggtcaaatattatatgaaaaggaaaagctttgcagaatgtatatgggctgatgcgtgattcctgggtaccattttcttcaaatctgtcaagatcttcataaaaatcctcttcttttgactctttttcttcaattaaaaattgagtatgatcacattcttcatttctttgctgaataaccttcatgtctatttcagtgccatggatttgttgtgccactgttttgatgattccaatgacaatatcctgaagtccttctctctctgagtagtagtgcaaaatgagtcctttgcccttttctgcatcagtgcacctaaaggaaggtgcacgcattcctgggtagatggtagcaaggtggtcgtgcagagcatcaaggttctgtagaaattctctgacattagagcccaggacacgcaagattgtatcataaccagattcttggcaaaagacgaaaaacatcttcccaaacatttggaggatttctccagcattgagattgaggactttgcttgcagcagcaaccaaatcataagttttggagtcatcatatattattctgacaagaaactgtccttcttcatctaactgtgcctcttttttgatgtcttcccacacctcggggccgtaattgcggatcaccagcaactccagggcgtgattcacaaatccgtacatggtgtctgcaccgggagccggggaggcagcccccacgcagaggtacggccgaagggacccaggcagaggcggcagcggctacagcgcaaccgggccggggaggcagcatcgagctggagcgagaacagccgc

SEQ ID NO: 80984 - DNA, 413 bp, Homo sapiens
  sig_peptide (99)...(234): this location contains the signal peptide sequence, MLLHNLFVCITVRFMCIHIKFFLLKIGFNELSRMIALFVASSVVS, Run with SignalP
  misc_feature (99)...(288): similar to gi1345110 in the genepept database release 114, Run with FASTXY 3.3t00, default parameters
gcgccctggtagattttggggtataaacgttttgatatgtttctcagaaagtgagaaatatttcttgattgtatctttaaaattaatgcaaaattgatatgttactccataatttatttgtgtgcattaccgtaaggttcatgtgtattcatattaaattttttcttttaaaaattgggttcaatgaattatctaggatgattgcattgtttgtggcatcaagtgtagtttctccctttccataccaagcatatcctgcttttggtacaggatatattcttttcagatgtcaaaacacctagggatacattttatgaattactaacttacttttttaggacagacttgaaatcatttagagggttaactctagcaatatagaaatctgttttttgttgaatggagtagcagat

SEQ ID NO: 80985 - DNA, 2186 bp, Homo sapiens
  sig_peptide (1095)...(1230): this location contains the signal peptide sequence, MSRFFIFCCLRHFSYFSDFAVLFLGALEHLKYQLAVGHSVLSEST, Run with SignalP
  misc_feature (246)...(375): similar to gi2440166 in the genepept database release 114, Run with FASTXY 3.3t00, default parameters
ggggccttttcttgctgaatgactcaccagtgatctttgaatgcagacaagcttctagccctccctcttcattagtgagcatttctatacaggggcctatatagtgcttggagtctaggagctatacaattggggggaaaagaagccctacagattctggcctctacttaggaagtgctgaaggactctgagtgactttattcattaaaacaggttgctattaattaactgtcataataaaataaagaactattatttgcatttcttactatgttctctttagtaatatgtataaaagatgcttgtaacagaaatgaatttattgggccacttccccatcccccccaatccctgcctttttttcccctttgcattttggcagcaggagcctactaattattgggtctagatctctgagtccaaatagaaataaaacataaatataaaattaattaagtaaatgcaaaatcttttttactcgccagtttgtgcaactgaaataagcaaacatcaaattaactttttttttttttagtgatttccaagaacgatttaagacagtaaaacccaaacttttttcaaaatatcacccatttggtgtttagcttgaagtgtaagactatgtaacaactatagctactttgtaaaaaatgtactctcacctaaagcctaacatgattcatttttttttttccaggaaacagaaaatgtctttggtctggtattaatatcaaaagaatttaactttaaaactgatcccaataagcatggcccttacacagttcatgaccaatatttagttatatgaaaatggttcattctcttctagaatctaatccagtgcagtcatctggtgaaagactgggaagtcagaagacttttcaaaagcttctcactgaaatgggtaatttgggtaacacgggataaacagaattttgcataaatagcagaccttagtcactgaataccccattaaacagtactgctggaccatgatacttatatctgggagatgacttagttttaaattttttatgcagtttcttttctttgaaggaaaaacttccagacttcagaattttggaagctgaacgatgagcaggtttttcatattttgctgtctcagacatttttcctatttctcagactttgcagttcttttcttaggtgctttagagcacctaaaatatcagcttgctgtgggtcattcggtgctttctgagagtacagacggaaatgtctgatggtttccgataacagcacttcaggatctgcatctcttgcctgaagacgcagcatccgctcacaggcgatggcatagttcttgtgccaattcactgggtgctccttttgtaaatagacaatctccttataaaggtcatatgcttgagcgtagagttgagctttcacttttgaaggcatgtgagcagtttctgccaggttaaagatgaagaacggtgttttcatcctcgcttgccacatttcttcattggccacagattcccaagaagatggatcaaaccttccatattcttcggtccagttatagatattttttgtaagtttaatccattcctcagggttgaatacaatctccaaaggaactaatttgtcacaagacccccatggccaaagtgaatagttctttttccaggttgggtcgccttcatgaattcctatgcaaacaaatgtttctttttgtttatttacttcaagaaaatgataaagattaaatgtgaccattccactaggtaatattccttccacaggattccaccggttcccaggaaagttgacacctggcaagtgctttgccatcttgggtaaataccactcgtaagtcatcatttcctgatccactaatgaaatgtcaggcctcaacccctcacagtaatgcatgtaacggagagaatttcctggcaaatctcctctgagtaagataattgcatcatgaggcatagaggtgagaaggttctttgcgaacttatcaatcacatagttggtcctttggtcacaaacactgtaattagaatatatttggtaaactacaaaaagagttgcagaaagccattccagacactgaagcccattgctattcagcactcggttagtctcagacacaactgcagccaaaccaatgccagcgaggaaggccactactgcattgctctgcatccagaatcgtt

SEQ ID NO: 80986 - DNA, 891 bp, Homo sapiens
  sig_peptide (91)...(226): this location contains the signal peptide sequence, MTRVLLKVLVTGWQARSWGWGGYHSEMPPPLPGWMISLCEYTESH, Run with SignalP
  misc_feature (742)...(869): similar to gi553165 in the genepept database release 114, Run with FASTXY 3.3t00, default parameters
cggtggaattccattgttatttatccttcacgtaagctggggctcttaggccccctagaacagtatgtgtgcactgaggaagggaccctaatgaccagagtccttctgaaggtcttggtgacaggatggcaggccaggagctgggggtggggtggctaccatagtgagatgcctcctcctctacctggatggatgataagtctgtgtgaatacactgagtcccactttgcccaaggaccctatgttctgtggttggcgaatgcagtgtgtcctcacacagcacttcgtgcttgcaatataaaaccagcccgagcctgggcgttccgaggaaggcgggcccccagccaacagccagcaagcataccacttcccatctcaggccatgggagtatatagccaaccagcctagaaagcttagtgagttctggctgccataattgagtagcatagactgggtggcttgtaaagaaatgccttgctcgcagttctggaggctggaagtctgagatgaggctgccagcatggtcaggttttggggacggccaggcagcagaccgtcagcttcttcccacatcctcatatggcagaaagagggccaaagcacttgactgactcccttgggtaaagggactgattccatttctgacccagccatttccttacccagtccctttcccagggcttctacctttaagggccatacctttaaggcggcggattttcactcggcactccggggatggaggcaaacaacattgcccccctaagttcccttgacctctgcgcggaacatttttccagcccaccacctgtggacccgcgcccttcttcttgcacgcgcgcgtcctttacacccttacccgcccgtcaacactcctcgggaatcacacc

SEQ ID NO: 80987 - DNA, 1911 bp, Homo sapiens
  sig_peptide (47)...(182): this location contains the signal peptide sequence, MVCLRLPGGSCMAVLTVTLMVLSSPLALAGDTRPRFLEYSTGECY, Run with SignalP
  misc_feature (47)...(874): similar to gi307274 in the genepept database release 114, Run with FASTXY 3.3t00, default parameters
cgacttgcctgctgctctggcccctggtcctgtcctgttctccagcatggtgtgtctgaggctccctggaggctcctgcatggcagttctgacagtgacactgatggtgctgagctccccactggctttggctggggacaccagaccacgtttcttggagtactctacgggtgagtgttatttcttcaatgggacggagcgggtgcggttcctggacagatacttctataaccaagaggagtacgtgcgcttcgacagcgacgtgggggagtaccgggcggtgacggagctggggcggcctgatgccgagtacctggaacagccagaaggacgtccttggaacagccagaaggacatcctggaagacgagcgggccgcggtggacacctactgcagacacaactacggggttgtggagagcttcacagtgcagcggcgagtccatcctaaggtgactgtgtatccttcaaagacccagcccctgcaggcaccacaacctgctgttctgttctgtgagtggttctaatccaggcagcattgaagtcaggtggttcccgaaatggccaggaagagaagacttggggtggtgtccacaggcctgatccacaatggagactggaccttccagaccctggtgatgctggaaacagttcctcggaagtgaagaggtttacactgccaaagtggagcacccaagcgtaacgagcccctctcacagtggaatggagtgcacggtctgaatctgcacagagcaagatgctgagtggagtcgggggctttgtgctgggcctgctcttccttggggccgggctgttcatctacttcaggaatcagaaaggacactctggacttcagccaagaggattcctgagctgaagtgcagatgacacattcaaagaagaactttctgccccagctttgaaggatgaaaagctttccctcctggctgttattcttccacaagagagggctttctcaggacctggttgctactggttcagcaactgcagaaaatgtcctcccttgtggcttcctcagctcctgcccttggcctgaagtcccagcattggtggcagcgcctcatcttcaacttttgtgctcccctttgcctaaaccctatggcctcctgtgcatctgtactcaccctgtaccacaaacacattacattattaaatgtttctcaaagatggagttaaatatcatctggtccatttggctcccaagacaccctatgaaaagaaaagaaaaagggaaggaagattatttcccaatagaataatgattttcatgtatatgtcatgagtatgtgaggtaatgcatatgtaaaataacttgatttagacattccacactataggcatatatcaaaacttcattctgtacaatataaatacactatacaatttttacttgtcaatcaaaaaagtaatcctaatgtttaaaaaggcaatgcataaaaactgagaacagactataacaactgaaacaaacttggcaaccatgagatgagaaaccagctagcaagtcaatcagaactttttttcaccccgtctacaatattttgtatttataactgtaaattagtgtatagtgtttcactccagagacttcaataatatagtgttatcaaaggacttgtacagatttcagagaaagacaaatttagaagacggaggattctctattatgtgctatctgagagtcagtatgaaatgtcaaatccaaaagtacataatttagaggtctatttcaaagtaatcatttgagcatagtttctccactgtcagagacgactgttattttattttcaatcaaattaaaacttgtttttatgcatatcttatttttagttttatgttacttgtacataagtagcagcacaatacgtacatataaaccctatgagtataa

SEQ ID NO: 80988 - DNA, 515 bp, Homo sapiens
  sig_peptide (268)...(403): this location contains the signal peptide sequence, MMFSPLDFIWCFILEFPSISLGLALSFNLQNKFLYTLYQLISFNA, Run with SignalP
  misc_feature (188)...(396): similar to gi606881 in the genepept database release 114, Run with FASTXY 3.3t00, default parameters
tcagaacttcattttcctaactggaaaataagagggttgagccagatattttccaaggttccttacaactccaaaatatttccatattctccttaccattatgaggatagtattaattaatcaaaaactgtatgcttgacagtgaataaacatactgattgatatgtatggcacaggcaattgggatatctttctacttttttataaatgtcatttttctacaaaaaaaaagattaagaatgaatacacaaattggttctttcagtcatgatgttctctcctttggactttatttggtgtttcattcttgaatttcctagcatttcactgggcctggccttatcttttaatttacaaaacaagttcctgtatacactatatcaactgatctccttcaatgctctctgttgtattcacactcagatgttattgtttcataatggctgtaatcaatggccttttatgcctatgtgggataaagccttcatcatcaacattcagtattacagcagggg

SEQ ID NO: 80989 - DNA, 5669 bp, Homo sapiens; identical to SEQ ID NO: 61338
  sig_peptide (2217)...(2082): this location contains the signal peptide sequence, MLTFLMLVRLSTLCPSAVLQRLDRLVEPLRATCTTKVKANSVKQE, Run with SignalP
  misc_feature (5429)...(1873): similar to gi4240147 in the genepept database release 114, Run with FASTXY 3.3t00, default parameters

SEQ ID NO: 80990 - DNA, 771 bp, Homo sapiens
  misc_feature (1)...(771): n = a,t,c or g
  sig_peptide (100)...(235): this location contains the signal peptide sequence, MRRGCFFWTLRSSRALRVGAMGRDGTGEVNRNQLREVSIIRPENS, Run with SignalP
  misc_feature (172)...(360): similar to gi34633 in the genepept database release 114, Run with FASTXY 3.3t00, default parameters
ggaggcaggaggtgtgggagtgaggatgaatgtacccagggaaaggtggggcgagtgttccaggctgagggaacagcctttgcaaaggcctagaaggaaatgagaagagggtgctttttttggactcttagaagttcaagagctctgagagtgggggcaatgggaagagatgggactggagaggtaaacagaaatcagctcagggaagtctcgattatcagaccagagaattcagacttcgtcttgaagacaacagggagtcattgaaggcccaggatctatggagaaatagagccagatttgtgttttctgaaaacgatccaggctattgcggaaaagctggcagggaggggagaggctggcaaacacggaaggctgatgagatgggagttgtgattgtctagacagtgggaggagattactgtactctgcaggggctacggaagggtttttagcagggggagatgggaccagcatgctctccatcctgttgccccggctcacgtctgggccctggttttccaggcccccaccccagaccaaacacggaagaggcagtcctgttcttaagcccagccttaacttcccccgacttggttttttggtaaagcccaaggcgggggggggaagggcccgggcccttggacccccccccccccaaaaaaaaggccttgggggggtttttgttngtgtttgggggggggggggggttgtcgcgcacaccccgcccccccccccacccccctcgggcccgggggggcatcggtttct

SEQ ID NO: 80991 - DNA, 8836 bp, Homo sapiens
  sig_peptide (235)...(370): this location contains the signal peptide sequence, MIPARFAGVLLALALILPGTLCAEGTRGRSSTARCSLFGSDFVNT, Run with SignalP
  misc_feature (235)...(8685): similar to gi340356 in the genepept database release 114, Run with FASTXY 3.3t00, default parameters
tttcgtaaagggagggtggttggtggatgtcacagcttgggctttatctcccccagcagtggggactccacagcccctgggctacataacagcaagacagtccggagctgtagcagacctgattgagcctttgcagcagctgagagcatggcctagggtgggcggcaccattgtccagcagctgagtttcccagggaccttggagatagccgcagccctcatttgcaggggaagatgattcctgccagatttgccggggtgctgcttgctctggccctcattttgccagggaccctttgtgcagaaggaactcgcggcaggtcatccacggcccgatgcagccttttcggaagtgacttcgtcaacacctttgatgggagcatgtacagctttgcgggatactgcagttacctcctggcagggggctgccagaaacgctccttctcgattattggggacttccagaatggcaagagagtgagcctctccgtgtatcttggggaattttttgacatccatttgtttgtcaatggtaccgtgacacagggggaccaaagagtctccatgccctatgcctccaaagggctgtatctagaaacttgaggctgggtactacaagctgtccggtgaggcctatggctttgtggccaggatcgatggcagcggcaactttcaagtcctgctgtcagacagatacttcaacaagacctgcgggctgtgtggcaactttaacatctttgctgaagatgactttatgacccaagaaggtaccttgacctcggacccttatgactttgccaactcatgggctctgagcagtggagaacagtggtgtgaacgggcatctcctcccagcagctcatgcaacatctcctctggggaaatgcagaagggcctgtgggagcagtgccagcttctgaagagcacctcggtgtttgcccgctgccaccctctggtggaccccgagccttttgtggccctgtgtgagaagactttgtgtgagtgtgctggggggctggagtgcgcctgccctgccctcctggagtacgcccggacctgtgcccaggagggaatggtgctgtacggctggaccgaccacagcgcgtgcagcccagtgtgccctgctggtatggagtataggcagtgtgtgtccccttgcgccaggacctgccagagcctgcacatcaatgaaatgtgtcaggagcgatgcgtggatggctgcagctgccctggagggacagctcctgggatgaaggccttctgcgttgagagcaccgagtgttcctgcgtgcatttccggaaagcgctaccctcccggcacctccctctctcgagactgcaacacctggtattgccgaaacagccagtggatctgcagcaatgaagaatgtccaggggagtgccttgtcacaggtcaatcacacttcaagagctttgacaacagatacttcaccttcagtgggatctgccagtacctgctggcccgggattgccaggaccactccttctccattgtcattgagactgtccagtgtgctgatgaccgcgacgctgtgtgcacccgctccgtcaccgtccggctgcctggcctgcacaacagccttgtgaaactgaagcatggggcaggagttgccatggatggccaggacgtccagctccccctcctgaaaggtgacctccgcatccagcatacagtgacggcctccgtgcgcctcagctacggggaggacctgcagatggactgggatggccgcgggaggctgctggtgaagctgtcccccgtctatgccgggaagacctgcggcctgtgtgggaattacaatggcaaccagggcgacgacttccttaccccctctgggctggcggagccccgggtggaggacttcgggaacgcctggaagctgcacggggactgccaggacctgcagaagcagcacagcgatccctgcgccctcaacccgcgcatgaccaggttctccgaggaggcgtgcgcggtcctgacgtcccccacattcgaggcctgccatcgtgccgtcagcccgctgccctacctgcggaactgccgctacgacgtgtgctcctgctcggacggccgcgagtgcctgtgcggcgccctggccagctatgccgcggcctgcgcggggagaggcgtgcgcgtcgcgtggcgcgagccaggccgctgtgagctgaactgcccgaaaggccaggtgtacctgcagtgcgggaccccctgcaacctgacctgccgctctctctcttacccggatgaggaatgcaatgaggcctgcctggagggctgcttctgccccccagggctctacatggatgagaggggggactgcgtgcccaaggcccagtgcccctgttactatgacggtgagatcttccaagccagaagacatcttctcagaccatcacaccatgtgctactgtgaggatggcttcatgcactgtaccatgagtggagtccccggaagcttgctgcctgacgctgtcctcagcagtcccctgtctcatcgcagcaaaaggagcctatcctgtcggccccccatggtcaagctggtgtgtcccgctgacaacctgcgggctgaagggctcgagtgtaccaaaacgtgccagaactatgacctggagtgcatgagcatgggctgtgtctctggctgcctctgccccccgggcatgcgtccggcatgagaacagatgtgtggccctggaaaggtgtccctgcttccatcagggcaaggagtatgcccctggagaaacagtgaagattggctgcaacacttggtgctgtcaggaccggaagtggaactgcacagaccatgtgtgtgatgccacgtgctccacgatcggcatggcccactacctcaccttcgacgggctcaaataccctgttccccggggagtgccagtacgttcttggtgcaggattacttgcggcagtaaccctgggacctttcggatcctagtggggaataagggatgcagccacccctcagtgaaatgcaagaaacgggtcaccatcctggtggagagtggagagattgagctgtttgacggggaggtgaatgtgaagaggcccatgaaggatgagactcactttgaggtggtggagtctggccggtatatcattctgctgctgggcaaagccctctccgtggtctgggaccgccacctgagcatctccgtggtcctgaagcagacataccaggagaaagtgtgtggcctgtgtgggaattttgatggcatccagaacaatgacctcaccagcagcaacctccaagtggaggaagaccctgtggactttgggaactcctggaaagtgagctcgcagtgtgctgacaccagaaaagtgcctctggactcatcccctgccacctgccataacaacatcatgaagcagacgatggtggattcctcctgtagaatccttaccagtgacgtcttccaggactgcaacaagctggtggaccccgagccatatctggatgtctgcatttacgacacctgctcctgtgagtccattggggactgcgcctgcttctgcgacaccattgctgcctatgcccacgtgtgtgcccagcatggcaaggtggtgacctggaggacggccacattgtgcccccagagctgcgaggagaggaatctccgggagaacgggtatgagtgtgagtggcgctataacagctgtgcacctgcctgtcaagtcacgtgtcagcaccctgagccactggcctgccctgtgcagtgtgtggagggctgccatgcccactgccctccagggaaaatcctggatgagcttctgcagacctgcgttgaccctgaagactgtccagtgtgtgaggtggctggccggcgttttgcctcaggaaagaaagtcaccttgaatcccagtgaccctgagcactgccagatttgccactgtgatgttgtcaccctcacctgtgaagcctgccaggagccgggaggcctggtggtgcctcccacagatgccccggtgagccccaccactctgtatgtggaggacatctcggaaccgccgttgcacgatttctactgcagcaggctactggacctggtcttcctgctggatggctcctccaggctgtccgaggctgagtttgaagtgctgaaggcctttgtggtggacatgatggagcggctgcgcatctcccagaagtgggtccgcgtggccgtggtggagtaccacgacggctcccacgcctacatcgggctcaaggaccggaagcgaccgtcagagctgcggcgcattgccagccaggtgaagtatgcgggcagccaggtggcctccaccagcgaggtcttgaaatacacactgttccaaatcttcagcaagatcgaccgccctgaagcctcccgcatcgccctgctcctgatggccagccaggagccccaacggatgtcccggaactttgtccgctacgtccagggcctgaagaagaagaaggtcattgtgatcccggtgggcattgggccccatgccaacctcaagcagatccgcctcatcgagaagcaggcccctgagaacaaggccttcgtgctgagcagtgtggatgagctggagcagcaaagggacgagatcgttagctacctctgtgaccttgcccctgaagcccctcctcctactctgccccccgacatggcacaagtcactgtgggcccggggctcttgggggtttcgaccctggggcccaagaggaactccatggttctggatgtggcgttcgtcctggaaggatcggacaaaattggtgaagccgacttcaacaggagcatggagttcatggaggaggtgattcagcggatggatgtgggccaggacagcatccacgtcacggtgctgcagtactcctacatggtgactgtggagtaccccttcagcgaggcacagtccaaaggggacatcctgcagcgggtgcgagagatccgctaccagggcggcaacaggaccaacactgggctggccctgcggtacctctctgaccacagcttcttggtcagccagggtgaccgggagcaggcgcccaacctggtctacatggtcaccggaaatcctgcctctgatgagatcaagaggctgcctggagacatccaggtggtgcccattggagtgggccctaatgccaacgtgcaggagctggagaggattggctggcccaatgcccctatcctcatccaggactttgagacgctcccccgagaggctcctgacctggtgctgcagaggtgctgctccggagaggggctgcagatccccaccctctcccctgcacctgactgcagccagcccctggacgtgatccttctcctggatggctcctccagtttcccagcttcttattttgatgaaatgaagagtttcgccaaggctttcatttcaaaagccaatatagggcctcgtctcactcaggtgtcagtgctgcagtatggaagcatcaccaccattgacgtgccatggaacgtggtcccggagaaagcccatttgctgagccttgtggacgtcatgcagcgggaaggaggccccagccaaatcggggatgccttgggctttgctgtgcgatacttgacttcagaaatgcatggtgccaggccgggagcctcaaaggcggtggtcatcctggtcacggacgtctctgtggattcagtggatgcagcagctgatgccgccaggtccaacagagtgacagtgttccctattggaattggagatcgctacgatgcagcccagctacggatcttggcaggcccagcaggcgactccaacgtggtgaagctccagcgaatcgaagacctccctaccatggtcaccttgggcaattccttcctccacaaactgtgctctggatttgttaggatttgcatggatgaggatgggaatgagaagaggcccggggacgtctggaccttgccagaccagtgccacaccgtgacttgccagccagatggccagaccttgctgaagagttatcgggtcaactgtgaccgggggctgaggccttcgtgccctaacagccagtcccctgttaaagtggaagagacctgtggctgccgctggacctgcccctgcgtgtgcacaggcagctccactcggcacatcgtgacctttgatgggcagaatttcaagctgactggcagctgttcttatgtcctatttcaaaacaaggagcaggacctggaggtgattctccataatggtgcctgcagccctggagcaaggcagggctgcatgaaatccatcgaggtgaagcacagtgccctctccgtcgagctgcacagtgacatggaggtgacggtgaatgggagactggtctctgttccttacgtgggtgggaacatggaagtcaacgtttatggtgccatcatgcatgaggtcagattcaatcaccttggtcacatcttcacattcactccacaaaacaatgagttccaactgcagctcagccccaagacttttgcttcaaagacgtatggtctgtgtgggatctgtgatgagaacggagccaatgacttcatgctgagggatggcacagtcaccacagactggaaaacacttgttcaggaatggactgtgcagcggccagggcagacgtgccagcccatcctggaggagcagtgtcttgtccccgacagctcccactgccaggtcctcctcttaccactgtttgctgaatgccacaaggtcctggctccagccacattctatgccatctgccagcaggacagttgccaccaggagcaagtgtgtgaggtgatctcctcttatgcccacctctgtcggaccaacggggtctgcgttgactggaggacacctgatttctgtgctatgtcatgcccaccatctctggtctacaaccactgtgagcatggctgtccccggcactgtgatggcaacgtgagctcctgtggggaccatccctccgaaggctgtttctgccctccagataaagtcatgttggaaggcagctgtgtccctgaagaggcctgcactcagtgcattggtgaggatggagtccagcaccagttcctggaagcctgggtcccggaccaccagccctgtcagatctgcacatgcctcagcgggcggaaggtcaactgcacaacgcagccctgccccacggccaaagctcccacgtgtggcctgtgtgaagtagcccgcctccgccagaatgcagaccagtgctgccccgagtatgagtgtgtgtgtgacccagtgagctgtgacctgcccccagtgcctcactgtgaacgtggcctccagcccacactgaccaaccctggcgagtgcagacccaacttcacctgcgcctgcaggaaggaggagtgcaaaagagtgtccccaccctcctgccccccgcaccgtttgcccacccttcggaagacccagtgctgtgatgagtatgagtgtgcctgcaactgtgtcaactccacagtgagctgtccccttgggtacttggcctcaaccgccaccaatgactgtggctgtaccacaaccacctgccttcccgacaaggtgtgtgtccaccgaagcaccatctaccctgtgggccagttctgggaggagggctgcgatgtgtgcacctgcaccgacatggaggatgccgtgatgggcctccgcgtggcccagtgctcccagaagccctgtgaggacagctgtcggtcgggcttcacttacgttctgcatgaaggcgagtgctgtggaaggtgcctgccatctgcctgtgaggtggtgactggctcaccgcggggggactcccagtcttcctggaagagtgtcggctcccagtgggcctccccggagaacccctgcctcatcaatgagtgtgtccgagtgaaggaggaggtctttatacaacaaaggaacgtctcctgcccccagctggaggtccctgtctgcccctcgggctttcagctgagctgtaagacctcagcgtgctgcccaagctgtcgctgtgagcgcatggaggcctgcatgctcaatggcactgtcattgggcccgggaagactgtgatgatcgatgtgtgcacgacctgccgctgcatggtgcaggtgggggtcatctctggattcaagctggagtgcaggaagaccacctgcaacccctgccccctgggttacaaggaagaaaataacacaggtgaatgttgtgggagatgtttgcctacggcttgcaccattcagctaagaggaggacagatcatgacactgaagcgtgatgagacgctccaggatggctgtgatactcacttctgcaaggtcaatgagagaggagagtacttctgggagaagagggtcacaggctgcccaccctttgatgaacacaagtgtctggctgagggaggtaaaattatgaaaattccaggcacctgctgtgacacatgtgaggagcctgagtgcaacgacatcactgccaggctgcagtatgtcaaggtgggaagctgtaagtctgaagtagaggtggatatccactactgccagggcaaatgtgccagcaaagccatgtactccattgacatcaacgatgtgcaggaccagtgctcctgctgctctccgacacggacggagcccatgcaggtggccctgcactgcaccaatggctctgttgtgtaccatgaggttctcaatgccatggagtgcaaatgctcccccaggaagtgcagcaagtgaggctgctgcagctgcatgggtgcctgctgctgcctgccttggcctgatggccaggccagagtgctgccagtcctctgcatgttctgctcttgtgcccttctgagcccacaataaaggctgagctcttatcttgcaaaaggaaaaaaaaaa

SEQ ID NO: 80992 - DNA, 2428 bp, Homo sapiens; identical to SEQ ID NO: 80968
  sig_peptide (156)...(291): this location contains the signal peptide sequence, MFPAGPPWPRVRVVQVLWALLAVLLASWRLWAIKDFQECTWQVVL, Run with SignalP
  misc_feature (63)...(1757): similar to gi3549154 in the genepept database release 114, Run with FASTXY 3.3t00, default parameters

SEQ ID NO: 80993 - DNA, 691 bp, Homo sapiens
  sig_peptide (445)...(310): this location contains the signal peptide sequence, MGKCYKCFICLKLILPVQPLLRLSFLGFHLKPLHHIQPKLSNCSE, Run with SignalP
  misc_feature (498)...(381): similar to gi2598948 in the genepept database release 114, Run with FASTXY 3.3t00, default parameters
actctgcggaaccgctccggaattcccgggtcgacgatttcgtcaaagattgggagatttacaatggcatggggtggaaggtaggggctgaagggatcacgagccacaaaaaacacagtcaagccacgaattcataatagtaaggattcataatagctaagcatgggactctgctaggtagctgctaaaatgtcattctgctgaaatgggacaaaagaccttcagatgcctggaggacaccagcacacccttggaaactcctcttccctctgtctttgccatgctctgtattctgaaggactcatattcagaacaattacttagtttgggttggatgtggtggagcggtttgagatgaaaacccaggaaagaaagccgtaaaagtggctgaacagggagaataagctttaagcaaataaagcatttgtaacactttcccatttcatcagggcctagcgacgtcatatgcttgctgttgctgctgaggctacagaaacacaattccaagttaatgttgtggttcttgcttctgacagttttggctggagcacattattttgcttgcattagaatacaccatatgcatagaggaatcgtgttgctaattatcaggcctgagagtacatagacctcttatagcatttaatcatgtgagagaccaaggggcaaatatacttcgttcgcacacacc

SEQ ID NO: 80994 - DNA, 2974 bp, Homo sapiens
  sig_peptide (1992)...(2127): this location contains the signal peptide sequence, MGAGCTPVVLGAALWLWRWFSRWGLGGLCWRPCTCTPCHSASPGA, Run with SignalP
  misc_feature (71)...(430): similar to gi4512307 in the genepept database release 114, Run with FASTXY 3.3t00, default parameters
tttcgtccccagccctgagattcccaggtgtttccattcagtgatcagcactgaacacagaggactcaccatggagttgagacggagctggattttcctcttggctattttaaaaggtgtccagtgtgaagtgcagttggtggagtctgggggaggcttggtacagcctggcaggtccctgagactctcctgtgcagcctctggattctcttttgatgattatgccatgcactgggtccggcaagctccagggaagggcctggagtgggtctcaggtattagttggaatagtggtagcataggctatgcggactctgtgaagggccgattcaccatctccagagacaacgccaagaactccctgtatctgcaaatgaacagtctgagaattgaggacacggctcttgtattactgtgtaaaagatccatcttaccctgattattatgatcgtcgtggttattctgttggacgtctggggccagggaaccctggtcaccgtctcctcagcctccaccaagggcccatcggtcttccccctggcgccctcctccaggagcacctctgggggcacagcggccctgggctgcctggtcaaggactacttccccgaaccggtgacggtgtcgtggaactcaggcgccctgaccagcggcgtgcacaccttcccggctgtcctacagtcctcaggactctactccctcagcagcgtggtgaccgtgccctccagcaacttgggcacccagacctacatctgcaacgtgaatcacaagcccagcaacaccaaggtggacaagaaagttgagcccaaatcttgtgacaaaactcacacatgcccaccgtgcccagcacctgaactcctggggggaccgtcagtcttcctcttccccccaaaacccaaggacaccctcatgatctcccggacccctgaggtcacatgcgtggtggtggacgtgagccacgaagaccccgaggtccagttcaactggtacgtggacggcatggaggtgcataatgccaagacaaagccgcgggaggagcagttcaacagcacgtaccgtgtggtcagcgtcctcaccgtcgtgcaccaggactggctgaatggcaaggagtacaagtgcaaggtctccaacaaaggcctcccgtcctccatcgagaaaaccatctccaaagccaaagggcagccccgagagccacaggtgtacaccctgcccccatcccaggaggagatgaccaagaaccaggtcagcctgacctgcctggtcaaaggcttctaccccagcgacatcgccgtggagtgggagagcaatgggcagccggagaacaactacaagaccacgcctcccatgctggactccgacggctccttcttcctctacagcaagctcaccgtggacaagagcaggtggcagcaggggaacgtcttctcatgctccgtgatgcatgaggctctgcacaaccactacacgcagaagagcctctccctgtctccgggtaaatgagtgccacggccggcaagcccccgctccccaggctctcggggtcgcgtgaggatgcttggcacgtaccccctgtacatacttcccagggcagtggtgggtgctttatttccatgctgggtgcctgggaagtatgtagacggggtacgtgccaagcatcctcgtgcgaccgcgagagcccggggagcgggggcttgccggccgtcgcactcatttacccggggacagggagaggctcttctgcgtgtagtggttgtgcagagcctcatgcatcacggagcatgagaagacgttcccctgctgccacctgctcttgtccacggtgagcttgctatagaggaagaaggagccgtcggagtccagcacgggaggcgtggtcttgtagttgttctccggctgcccattgctctcccactccacggcgatgtcgctgggatagaagcctttgaccaggcaggtcaggctgacctggttcttggtcatctcctcccgggatgggggcagggtgtacacctgtggttctcggggctgccctttggctttggagatggttttctcgatgggggctgggagggctttgttggagaccttgcacttgtactccttgccattcagccagtcctggtgcaggacggtgaggacgctgaccacacggtacgtgctgttgtactgctcctcccgcggctttgtcttggcattatgcacctccacgccgtccacgtaccagttgaacttgacctcagggtcttcgtggctcacgtccaccaccacgcatgtgacctcaggggtccgggagatcatgagggtgtccttgggttttggggggaagaggaagactgacggtccccccaggagttcaggtgctgggcacggtgggcatgtgtgagttttgtcacaagatttgggctcaactctcttgtccaccttggtgttgctgggcttgtgattcacgttgcagatgtaggtctgggtgcccaagctgctggagggcacggtcaccacgctgctgagggagtagagtcctgaggactgtaggacagccgggaaggtgtgcacgccgctggtcagggcgcctgagttccacgacaccgtcaccggttcggggaagtagtccttgaccaggcagcccagggccgctgtgcccccagaggtgctcttggaggagggtgccagggggaagaccgatgggcccttggtggaggctgaggagacggtgaccaggattcctttgccccagtagtcaaagccggtagtaggtcccacgccccagtagtcaaagccattactaagtcccacccacttgaggctcgcacagtaatagacggccgtgtcctcggctctcaggctgtgcatttgcaaatacaatgagttcttggcgttgtctctggagatggtgaatcggcccttcacagagtcctgatagtatatgccatttccatcctgctttatgttggccacccactccagccccacgaaa

SEQ ID NO: 80995 - DNA, 575 bp, Homo sapiens
  sig_peptide (87)...(222): this location contains the signal peptide sequence, MGLHVLSCVHLMCLSPQPVEQVLPASISGHFVEAMIQPPFIGPCC, Run with SignalP
  misc_feature (192)...(323): similar to gi1364186 in the genepept database release 114, Run with FASTXY 3.3t00, default parameters
tttcgtagaatctaaaacccaaatcattagaattattttctcttcagataactgaactgtcaacaacagattgggactggttacagatggggttgcatgtgctctcctgtgttcacctgatgtgcctgagcccacagcccgtggagcaggttctgccagcatctatttctgggcactttgttgaggctatgatacaacctccttttattggtccctgttgtgatcagcaccctgagcttttagaaagtgtgataggggctgtgtagcagaggggtcttctttcactagtacatttgatgtgccaggagtacatgggtggtgtgtgccaaaggacacttgagattttttccattgtctcatggtggaatactggaggagtaagtgttcctacttgttaagcaggtattctgtgtgtgctgaaagcaggcctttcgctgacgtgtgcgggcagccagtgctgtggagcaaggccaccatggactgtctgctgttgatggtaagagtgtgccactcctgttctttgtcatggcctctgcagccattgcattctggatgtagcatagtgtgttacccat

SEQ ID NO: 80996 - DNA, 465 bp, Homo sapiens
  misc_feature (1)...(465): n = a,t,c or g
  sig_peptide (274)...(409): this location contains the signal peptide sequence, MGCVLGTLSLVRMCRWNYKFKDEKICKAVREAVGWDEDIRDSTRM, Run with SignalP
  misc_feature (189)...(92): similar to gi2454158 in the genepept database release 114, Run with FASTXY 3.3t00, default parameters
gtaagtgccgtggaattctgttgatgtagaggcactgccagaggttattagcccctgcgtgttccagattctggaccttgcatttagcctgaccagcttgtttcattttgccccacacttctggttttagcacagagagtcccacgtcccaggaaaatggagtcccaagtccctcagtaaatggagatgggggtcacctcatttctctctgggtatctgggcaactggtaatgctattaactggcacttagaatgcaggaaaaggaatgataaatgggctgtgttctgggcactctcagtctagtgcggatgtgcaggtggaactacaagtttaaagatgaaaagatctgtaaagccgttagggaagccgtgggatgggatgaggacatcagggacagcacaagaatgggaattgggcttgagacaggacctcacagctgtcagtgcttgagaggcaggagaagn

SEQ ID NO: 80997 - DNA, 1896 bp, Homo sapiens
  sig_peptide (972)...(837): this location contains the signal peptide sequence, MMYILFLQAFILDYYQYFLGLNCVYSYQSKKDFSQIWSQGWFALL, Run with SignalP
  misc_feature (1187)...(605): similar to gi4929707 in the genepept database release 114, Run with FASTXY 3.3t00, default parameters
ttttttttttttgagactgagtctcgctctgtcaccaggctggaatgcagtggcgtgatcttggctcaatgcaacctccacctcccaggttcaagcgattctctggcctcagcctcttgactagctgggactacaggtgtgtgccaccacatccagctaatttttgtatttttagtagagacggggtttcaccatgttggccaggatggtctcaacctcttgacctcgtgatccacctgcctcgggtcctcccaaagtggtgggattacagggcgtgagccactggtgcccagccagaaaagcatttttaatagaattttgatagctcttaactgaggatcctaaatcaagggatttaggaaatgaggtattcataaaggaatagtaaggtttttaaagcttttcaaaattacatatgatacaaataaagattggtaacaggatttaatcattgtttcaaactttattacttaatgaaacagtttctatatactgcttccaattactttaatccctttttcctccgttaaaattttttttggttggttccttcaagttgaagcctgagatacttttaattactttttatttaactggcttcccggaaaccgtaacaggtgccaggaatagattgatgatatcccaagtagaggctgatggcagctaatacgtactcttcaggtgacaagtttatgcatcatgtgagtgtgtgtcataggatgatgaaattccacaggaaaaggaggggctcctgcagcgggctagggcccaactccattatctcactataaaaaaaaaaaactttcaagaatcctggacaggcacaatatccacaaaagagcaaaccagccctggctccaaatttggctgaaatccttcttagattggtaggagtatacacagttcaaacccaaaaaatactggtagtagtccagtatgaaagcttgcaggaataatatatacatcatagaaagtcaacaacaacagccacagtcagagcttccaacagcgtaaatccaaaaagtaggtacaggttaaggggatacttatgtcctgtttaaagtcaacgcaaaaatcaaacccagagatccgagggcaaacagcaaaattaaggcaggactctcatgtacaaatgtccgtacagactcaaagtataaaaaaacttgttgaaagttccctgtaagttaaaaagaccctccaggaaaaaaaatgctggtagctcttttctcagaaaggtctgtattttcccaccaattaattttttttaaaaaaaagctgagttcgctggccaaaataatttcaaaattcaattccaaaaatataaatgttaggcaccaagattcttggtgcatcagaactatcttcatctttccttttccagaacaagttctaggcactaagattcttagcacatcagaactatcttcatctttccttttccagaacaagttccagctgcctaaacaggctgaaagtctggggctgtttcggcgatcaaatgaccaaactagagcaggcaatggcttccacgtagatgaagctgagcattttaaattcaaaaatttctgcccattggctactacgtaataacttaaaacacaatttagactgacttaggaagcttctgtgttgagcaacttcctcaataatcctcaaagacctgttgcattctgggccctgcggagaggaaatagtgccgtcagggagcttccagcctagcacaggacggtaaatataagcctgtaacgcgaaaccccacagaacaaaaacatcaggccgtggattccactcgtgtgtacgtcagtcacagtgatcaaccgactcatttccacgacgtttcttttcacttcaagatgccaaattcaggctgcggcggtttccatctgtcccacgaaa

SEQ ID NO: 80998 - DNA, 3678 bp, Homo sapiens
  sig_peptide (2578)...(2713): this location contains the signal peptide sequence, MVGFLCCFYLFQLLGPGLLCLPKAVLSFLGLLEAAHHLLVKGFLL, Run with SignalP
  misc_feature (3063)...(1599): similar to gi5305706 in the genepept database release 114, Run with FASTXY 3.3t00, default parameters
ttttttttttttcacgagatcaactgtttattgatttttttcctcaaatactacacatgtaaaggaactgttaaactgaaaaagacttgacaatttttggtaaatccgtagcacagaaatgaggatttctgctggtaagttctcaggacagacacagacacaggtccactttccaagcaagacatctgctcactggaaacggagtgaatgcatagctggtgacggcggcgggcactgctgagtcacgtgaaacacaggttcccccacgttccccccacccccgccggcccgcgtggcccccgcgtaactctggctgcagcacctgctcccgggcgactccgggcagcccgagacactcgtgctgcgggtaagacccagcttctgtttgtgcacaagtaacacgacgactgaaatctgcaactactgcaaagacgcgggcacttttacagtgttctgctacggagccaggacaaaggccggtcagaagccggaccagcagtcagctggtgacgacgagcctccctccagcaggcaccacgtcagagaggccccaggcccactgagcccgggaggagacccagccggccagccagacgtgtgcctgaatgccacagacttcaagcagtttacaaacgaaactcactgttaaaagctgttaaatctcattaaaacagtagacgagtgctttagattctctgaatatcaaataatatatacagatagacactgagacatgacagtctaatctaaagcatctttacagatgcatttgcttgaaaagttagtcttctttttaactctgaatcagtgataaaattgttaatttgcaaaagagtacagttttaagcaagaatagagtgaaaataatttttaaatatggcgatttgggggagttctacctaaggttctatgtaaagcttccattcagatgcccaaaagcacaaagagcattcccaatagaaacccgaccataacccggtcccaccttcctggcataattcctttcctcaaacatctgccacctgaggctaagcctacacacggcgtggctgagtaacagggtaagggaatagggagatcgtttcctcaagactggtgcgcatcaatctgtgccataatttaagtagaaatgaacaggtgtataaaaaagtataactgtacacagcctttaaattaaaaacctcaaaatcttcactcaaaatgggatgtaagcttgttcatttaagttgcaggtgatggactcgtcagagagagtaatcagtggaacaagatcagtgtaacccaccattgactcggaaaggagagacaaagtcaagaacatagagatctatgataggccaacaggcacagtgggcggggaggggcggctatttctgttgttctgcgtcttcctgcgctcagatccctccagctgcactcggaaaggtgccgagtcccaggcgaaatgaccagctcatctgccttccaggaacaccatgaagccaagagcaatggaaccatcatctcttgcaggaaaaggagtggatgcccacgtggctggctgaggctcctgggcccgccgcctccgtccccccgctggcctgtccccgactcatcactggatcgcctccacataatttgccgggtataggccaacttgcccgttgtccaagcgtcccttgcaccagccctgctcatcctcgtcctccatcttggtcagctcatccccagccttgaagctcagctcatcatgctcctgcccctcatagtcatacagggcccggactcgcacttccgtccccgaggtggcgtcgtcgtcgaatggattcgagtccccattggcatccgtggaggagaaggggttgttagactcatcgtctgaccagtcggtgggatagctctgggtcttctcgtagctgctcacatttttggccttagtgtcgtccttctcactgacggtgctgcccgtgtcgtcctcatcctcgaaggggttgtagctggactgtgactgcgcagactgggcggggttgctcgggacattaagggtgctgctgggcttactcggcagagactggtcgcctgtctggttgatgcccgtcagggtgacgccgtcagtggccttcttcttctctctccggctgagggttcgattcaggtctgcggaccactcctcaaactgcggccagttcatggccatgcccggcccgtgattggctcggaaccacctcaggtcctccactgcatcagctgctctgatgctctgctccaggtcatggtaaatggctttgtagccagccacattggacaggtctaggtgcttctgaacctccaagcagaacctcccggaaaaagcgaaggcgtctctcctcgaactgctggcactgctcaaacacctgctccatgttctccatgtactggggtgtgccctggtcgagttccttgagggacttctcatacttctctttggtcttaagaacatcttgcttgcacttttactattttgtcttgcaatttcttgagctgttcagggttgagggatgggtctgccttgctgttggcttctcgtgagatagccagcttctcctctttgcacgctgcatggtgggctttctttgctgcttctacctctttcagcttcttggcccagggcttctgtgccttccgaaagccgtcctcagcttccttggtctccttgaagccgcccatcatctgcttgtgaaaggcttccttctgccagttcttgatcttcctcaagtcatcgttcatcagtgaggccttcaccctgaggtgcagctcgctcaccctctctgcctcggacatgaaggccatccaggccttctccacggtcccgtactggggccctttctccacgagctgcctccagcgccgggcccactcagtgagctgctgcgcatacgcccttctcgatgcgcgcccgctcatgcaggcagttcatgaggtcgctgcacaggcggtggccatcgtcgatccgcttcacagtccgcttgtagttcccgacctcccagaagctgtcgctggacacttctactccaacggaatcatcatatgtgacagacattttttcaaaggctgagggagcagcaaagtatacttagtcaggggtcaacttcgaacgctcaaaatctgtagacaaacctcccaatccgtcgcacactccgttcaggctgccacggcgtctccagacccagctccggccgggctcccgctaccgcttttgctccggcagcactgcccagccctgcccagacccctgcggccgcttctgccgccagccgcgaccgcaccgcccccgccgctcccgctgggctctgtccattggctaccggacaccgagccccgccccacagcctccccggcgcccccgattgggccagatgagtagagaggcggctcaccccgcgtgaggacgagggaaagccccaggacgcgcattggtgacttctcctgtcaatcaaacggggagtgcctatttaatgggctgcgagggtggcgcacatcactctcccaaagccgctcgctggtggtggtccttgagacgcgcttcccggggctggagttttgcggtttcgtcggcatccaggggtaagagggcgcggcagggcagcaccgcacctgaccggaagttcagggaaggtaatcctacagtctttcagaaacgtttcctctcccaagggactc

SEQ ID NO: 80999 - DNA, 6329 bp, Homo sapiens
  sig_peptide (6257)...(6122): this location contains the signal peptide sequence, MALQLWALTLLGLLGAGASLRPRKLDFFRSEKELNHLAVDEASGV, Run with SignalP
  misc_feature (6268)...(739): similar to gi2280476 in the genepept database release 114, Run with FASTXY 3.3t00, default parameters
ttttttttttttcggagtgaaaaagacgctgtatttgatttacaatgaacaagatttacaaaaaggggtggggtggtcttggaactgctcccagtccccccggactgggtggggctctagggcagcctgtctgacagaccaggaccccaggatgtctgggccccgacgtaggacttgacctacgtctcacttgacctttgacgtggggcccagcagccgtgagtccacccagagtgccggcacccttggggaggccggtgaggtcaggaaggcatcgtaccgctttttctcctcctcccatctcgtggtggacagacagacataggatctgggaacttgccctgggggccacaggccctcagatcccccaggggcccaacctagggcatggaggcggctgctggtgcgtgggcggaggcggaggccagctgcccccagcgtggcagcgtaaggcacattttcaaatcactcgagactcgacagtgaacacccgatgctggttctgcggccggagggagctggggctggggctggtgctggtgcggtgcccggcggtattgctcagaggaagatgctacagtctagacgctgggcgggttccggctgcacccactccggcttggggcgcgttccaggggagggtgggggcctcagccacagccactcggcctcctcccctgaggggctctcaggtacctcaggtacctatgtcccaaggcagcactggagattgtaggtcagaggtcagtgaccttgttctccagtgcagcggcaatctgctgcaggcggaaggccagctgcatcttctgggcggcaggatcctcctccaaggcattgatgatctcgtcatagtacttctgcgtgtattggtagagctggtggagtgccacgagggtgttcaaggagtccgtgtgcgcccgggaaatctctgccaggtgtgtgttcatgtcctggtcgctgacctgcaccatctgccggatccccttgtagtaatcctccaccatcttcttgtaggtggagatctccttggcgtacagcagcttgttgctgggagaatcgcggctcagcttatgctccgtgcgcgtgcaggcatccatgaaggtctgcgcgatgactgacagcgaggcgtccaccacctcgtggacatgcacgtcaaagatgaagtgggggttcttgaggatgttcacccagaaccggagcggtaaactgttcgtcttccagatgtggatggtgtcttcatcctggatgttgtgcttctctgcctgctcgtccaggaagtcgaagaagtacttgactgcaggtggcaccgcgtgcccaggcgccagcacgctctggaagaagttgtccacaaactgctgcagtgtgcccttgactgagagcagccgcgtcaggtagatctcggtgatggccttcgtccgctccttctctttcacgctgcctctcttggacttgccctcgtccacctcgtcggtcggccgcaccaggtgccacacccggttctcctcctccaggagggcatggcgctccccaggcaggtcctgctggctgtcctccggctgctgggagacccccaccttggacaggatgagggtggctccatcccggacattgtagtgcataagggtgttgacgcgcttccaccggccctcccgctgtgacgtcaggtccaggtccgacaggatctgcgctgtggagcccggacgccactccaggaccacgctgtctggcctgggccagcaggagcagggctgcccacggtacacctggtcaatgatcttctccttgacctgggagatggtgtcacagttgaggaccttcaccgggatggcgtccactccctcgtcctgcacgatcacgctcaccgtcaggggtgcgtactccacatcatcccccagcagccccgtgtcgttgagagtgtacttggccttcttctgtaccgcatccaccgggcccttttccacctgatgtttgatggccttgaagagcttgtacaggggctccccggcactgtccttgaggtactggtacaggcagatggacatccagttggacagcatcctctccaccacagtctcagacctgcgcagcatcagcttggggttcttggccaccacgtactgctccaggagctccaggaagagcgtgtgcatgatgtccgtgtagtactccagtttcccgtgcagcgccaccgtcagcagggacgcgaagtagaccttggcgcgggccgagaactccggctggttctcccagggtgtggatgaaattgatgaggaaagacttgctgttcagcaggttggagaactggtagagggcctgctccaccaccggccgccgcggctcggggatgtccagcttgccggtgatcatcacgtccttgtcgccgtccttggagggcaggaagaagacgcggtcggtgtaggtcttgtagtccagcacggggatgccggcctcgtgcacgtcgttggtctggtcctccatctcgatcatcaggtctgtgaattccttcttgcagcggtcccgcacgctctcctccaggccctccagctgggacttgatcttctcatactctcgttcggcctgctggctcttcctccagtagcagtagacagacaccgcgatgacgaccaccatgggcacgatgaccagcggcaagatgaggctgagcggcacgtcgctcacccgtgtgtcgtactccacgcggcccagcacccactcgcgagagccgaacttcacaatgaactcgggcaggttgtgtgtggtgtctcgtttctgccgccgcttgggcgggggctgcacctccgggggctcacagtacaggtcggtctccgtcagcgtcttcatggtgcagcgctcggcacccacgaaggcctcggcctcctgcagcgtcatcgccttgttcagattggtgccccgggcgcggatgagcttgttgacctgcttcttgacgccacctgtgaagttctcaaaggtggggtcaggcacgtactcgaaggccccggcctctgttctgagcagggcacggtgcccgtccatctcgatcagcaccgtgaggttgtaggcctctggctcctcaggcacagccggggacaggaagacgaccttggtgtcattgtggaacacgtagtctgtacccaccaccgtcatgggctgcagggattcagcctcccgcggcggctgccaggactgcaggggctccgcgatgaccaccatggcaaacctctggatcaggctgaagccctgacccgtgacgttgatgctgcggccaccactggcaaagcttcgtagcggctcgaaggctcgcagtacggggttttcgcggtaggtgaagaagatgccggggttgggcacgggggaccccccgtaggagacctccagaagcatctggccccgtgtcgcctgggggccagtgacacactggagctgcgccccaaacttcgtcactttacacgggacgccgttgagggtcacccgcacgtcctcctgggagcccgtgtccaggtgggtgccgtggatggtcagtgtggtgccgcccgcctgcggtccctgctgcggctccacactgagaggcttgggctgttggaaggtgaactggacattgggaggcgaacggcccagtttcccgaagacgtccacctcgacaccccccgtgaaaggcgtctccgcagcctcgatcacacacacgatccgggtggacacggagtaacgttccggctgaaaggagcagttccggccggccacagagatcctctggatgtcccctgcttggacgcccaaattggaccccaggatggtgatgcggatgcccccacccagggggcccgtctcaggctggatcctggtgatgacgggcggcgggcactcggaggtggtgttgcacagggcctcatacacgcacctgctctggcccccgcaccacgcacacctgtagtcggggttagcggcccggcacaggctgcagtcgctgcggccaaaggagcagtcgtagagggtcacatggagcttgctgtcgatattcttgccgtaagacttgacgtaaaggtgcaggggcagcgtctcgttggcatcgtgggacagctttggggtccgaaaggcgaaggtcccagattcctgcatggtcaccggctccatgaacttgagcaagtcactgcccacgtgcagggaggaacccttcacggtgtccaggttcttgccctggaagttcacatctgtctcgtggttcatggggatcaccagggggctgggtcccaggaactggggacagctgtcctccatgtgggcacggacgatgccgtcctcagggttgggcgaagcctcccggcactcgtggtagcgcaggtcccactggcaggtccagcggttgctcacgcaggagatgcacggcaggttctcctccaggctcatggcctggcggcagtcgtagaaggggtactggtaggacgtgaggaagatgttgcctcgtctaaggaggagctggatggtcacggccacgtggtcctggcctggcggtgtgacggggatgctgcttggggagttgcagatgacggcctcgccctccacgcgggcggggtgtggcggcgactccccaaaaaggcacagcaactcgtcctcctcgctcagggcagggagggggctgacggtcagctgcacctccccctgggcccgccggctcatgttctgtggctgggcgctggtgacggccacgcaggacttgcttcggctccacagccagtggctggcctcctcggcccgcggacactcggccttccgggtgcatcgtccctcgacgacgcaccagccgcagtaggggtcctgggagtcgcggcactgggtgcaggtcgggtagctcaggcactcctgcaccggcagccggaacaccttgtcctgggtcatggcgtacaggctgcccaggtctccagacagtaccaggtcgcgcttgactctcttgtttatctccacaaggatagagtcgtactctgaggaggtgccatctggggtgaggtacaccttgaggatccggccatcagaggtgcccagaaaagcaacagtgtggttgttctcggcggcgaccgtcacggccgtgaggttcaggcctccacgctgcagcacggctgtgcctctgagcccgtcgcggctgcccagcgggtagggcaggtgctccgagccacatgggaagctcttgctggagcccggcgcgtggccgccgcactggatatcgccgtggaagggcttgtagaagatgtcacgggcctcccgggtgcctgtgtaacaggcgttgcggttggcctccatcttggcgtgcacctcgtccagcgggaacaggcagaggcccgcaccgggccccccactgctccggctgtctctgctgaagacagcatatagcaccctgccagagccaggcgcagccacggaggcggccaggcaggtgccaaaggcagcggcgtggatgtcggggtcccggcactgcaggtccatctccaggtaggagtagtagttggggtcttctctgcacatgcgtgccagcagcgtgcggttccgggccgggtgcttgtcctgctggttgaagacaaagaagacgtaggggccgtcctcgaaggccgccacgaactgctgtgtgttggtggacaggtagccggccttgtaggtggcgtggtccgtgtaggcttcaaaggcctccctgctgtcagtccggtccaacagccgagtgctcacgatgatgccgttgtcgtgtggcccattgcctttgcccacaaacagcacgcggtcaccaccaggacccgtggagctcaccagccccactgtggccacgccctcatcattgctggccacgaaagacttctccccgctgccgtcctcgtagaacaggcggagggagatgttgctcagggcgcgcagagcgcaggatgcccttaagaagctgcccgcactccaccaggcgtttcctgggagggtcgaccagcagcagctggttgacattgtcagtcatctcagcctcatggcactggctggcctcgatgggcggcgtgcacttcttgttgtccaggaccgggcccgtggccacctgctgctccagctgcagcttcgcatccagctggtagagggcattcaccgcccccaggtacaccacgcctgaggcctcatccacagccaggtggttcagctctttctcgctgcggaagaagtccagcttgcggggcctcaggctggcacctgcgcccagcaggcccagcagggtcagggcccagagctgcagtgccattgccccctgcacccgaggctccagtggtccagctcagtttctgctccaggccagcatcgagattctcacgaaa

SEQ ID NO: 81000 - DNA, 1616 bp, Homo sapiens
  sig_peptide (29)...(164): this location contains the signal peptide sequence, MRWLWPLAVSLAVILAVGLSRVSGGAPLHLGRHRAETQEQQSRSK, Run with SignalP
  misc_feature (29)...(1475): similar to gi3059118 in the genepept database release 114, Run with FASTXY 3.3t00, default parameters
tttcgtgctgtctcctgctcatccagccatgcggtggctgtggcccctggctgtctctcttgctgtgattttggctgtggggctaagcagggtctctgggggtgcccccctgcacctgggcaggcacagagccgagacccaggagcagcagagccgatccaagaggggcaccgaggatgaggaggccaagggcgtgcagcagtatgtgcctgaggagtgggcggagtacccccggcccattcaccctgctggcctgcagccaaccaagcccttggtggccaccagccctaaccccgacaaggatgggggcaccccagacagtgggcaggaactgaggggcaatctgacaggggcaccagggcagaggctacagatccagaaccccctgtatccggtgaccgagagctcctacagtgcctatgccatcatgcttctggcgctggtggagtttgcggcgggcattgtgggcaacctgtcggtcatgtgcatcgcgtggcacagttactacctgaagagcgcctggaactccatccttgccagcctggccctctgggattttctggtcctctttttctgcctccctattgtcatcctcaacgagatcaccaagcagaggctactgggcgacgctccttgtccgtgccgtgcccttcatggaggtctcctctctgggagtcacgactttcagcctctgtgccctgggcattgaccgcttccacgtggccaccagcaccctgcccaaggtgaggcccatcgagcggtgccaatccatcctggccaagttggctgtcatctgggtgggctccatgacgctggctgtgcctgagctcctgctgtggcagctggcacaggagcctgcccccaccatgggcaccctggactcatgcatcatgaaaccctcagccagcctgcccgagtccctgtattcactggtgatgacctaccagaacgcccgcatgtggtggtactttggctgctacttctgcctgcccatcctcttcacagtcacctgccagctggtgacatggcgggtgcgaggccctccagggaggaagtcagagtgcagggccagcaagcacgagcagtgtgagagccagctcaacagcaccgtggtgggcctgaccgtggtctacgccttctgcaccctcccagagaacgtctgcaacatcgtggtggcctacctctccaccgagctgacccgccagaccctggacctcctgggcctcatcaaccagttctccaccttcttcaagggcgccatcaccccagtgctgctcctttgcatctgcaggccgctgggccaggccttcctggactgctgctgctgctgctgctgtgaggagtgcggcggggcttcggaggcctctgctgccaatgggtcggacaacaagctcaagaccgaggtgtcctcttccatctacttccacaagcccagggagtcacccccactcctgcccctgggcacaccttgctgaggccccagtaggggtggggagggagggagaggccgccacccccgccggtgtctgctgttctttccccataggtcttgctttgttgcctgtcttgctgtctagggatggacttggttcctcttgtcaaggtttgggaatccg

SEQ ID NO: 81001 - DNA, 445 bp, Homo sapiens
  misc_feature (1)...(445): n = a,t,c or g
  sig_peptide (226)...(361): this location contains the signal peptide sequence, MRPDDINPRTGLVVALVRVFLVFGFMFTVSGMKGETLGNIPLLAI, Run with SignalP
  misc_feature (272)...(391): similar to gi1478440 in the genepept database release 114, Run with FASTXY 3.3t00, default parameters
tttcgtgagagagagatagagagattgcaagagagatacagagacagtgattttgactgaaagtcaagaagcaagtcggagacaaagggcaagagaaagacaagagttgatgggtgggagcttgacttggatttttttttaacgcactgtggtttcatctctgacagaatagaggaacgctgctccctggtcagcaagcagcccccaacctggatggagtgaaacatgcggcctgatgacattaacccgaggactgggctggtggtggccctggtcagagtcttcctcgtctttggtttcatgttcaccgtctctgggatgaaaggggagactttgggaaacatccccctcctggccatcgggccagccatctgcctaccaggcatcgcagccattgccctggccaggaaaaccgagggatgcaccaagtggccagagaacgacn

SEQ ID NO: 81002 - DNA, 8002 bp, Homo sapiens
  sig_peptide (1123)...(1258): this location contains the signal peptide sequence, MLGNVLLLCFFVFFIFGIVGVQLWAGLLRNRCFLPENFSLPLSVD, Run with SignalP
  misc_feature (496)...(7287): similar to gi4633670 in the genepept database release 114, Run with FASTXY 3.3t00, default parameters
attgaaccctcaatgaaatgaagttgcgaggcagttaccgtcagcctcctatggaataaatattcgaggcccagagagggtaagagacctgcctgcgacccctcagcacttctgtttctctctggggtcttgagggtacaataaagacccctaaggcttcctcttctcgcaggaggtccaggcgcagctgtgggggagggtgcccttggtgtcttctgtccctgcagccagtctgctttctactcggcagctcctctctccctcctgggatgagatgtgcacgcgatgatgggattccccgtgccgcctgtctcctttcttccccaggcccgcccagagctgagctccgtcctccggctgctgcccaaatcaggggtcgtggacaaaggatgcctggggcctgcggccctacgccaggaccccgcgccgaatactctgattcttcgggctccctccaagggagtcccaaagaccccaatggccaataggaaaaggatggacgaggaggaggatggagcgggcgccgaggagtcgggacagccccggagcttcatgcggctcaacgacctgtcgggggccgggggccggccggggccggggtcagcagaaaaggacccgggcagcgcggactccgaggcggaggggctgccgtacccggcgctggccccggtggttttcttctacttgagccaggacagccgcccgcggagctggtgtctccgcacggtctgtaacccctggtttgagcgcatcagcatgttggtcatccttctcaactgcgtgaccctgggcatgttccggccatgcgaggacatcgcctgtgactcccagcgctgccggatcctgcaggcctttgatgacttcatctttgccttctttgccgtggagatggtggtgaagatggtggccttgggcatctttgggaaaaagtgttacctgggagacacttggaaccggcttgactttttcatcgtcatcgcagggatgctggagtactcgctggacctgcagaacgtcagcttctcagctgtcaggacagtccgtgtgctgcgaccgctcagggccattaaccgggtgcccagcatgcgcatccttgtcacgttgctgctggatactctgcccatgctgggcaacgtcctgctgctctgcttcttcgtcttcttcatcttcggcatcgtcggcgtccagctgtgggcagggctgcttcggaaccgatgcttcctacctgagaatttcagcctccccctgagcgtggacctggagcgctattaccagacagagaacgaggatgagagccccttcatctgctcccagccacgcgagaacggcatgcggtcctgcagaagcgtgcccacgctgcgcggggacgggggcggtggcccaccttgcggtctggactatgaggcctacaacagctccagcaacaccacctgtgtcaactggaaccagtactacaccaactgctcagcgggggagcacaaccccttcaagggcgccatcaactttgacaacattggctatgcctggatcgccatcttccaggtcatcacgctggagggctgggtcgacatcatgtactttgtgatggatgctcattccttctacaatttcatctacttcatcctcctcatcatcgtgggctccttcttcatgatcaacctgtgcctggtggtgattgccacgcagttctcagagaccaagcagcgggaaagccagctgatgcgggagcagcgtgtgcggttcctgtccaacgccagcaccctggctagcttctctgagcccggcagctgctatgaggagctgctcaagtacctggtgtacatccttcgtaaggcagcccgcaggctggctcaggtctctcgggcagcaggtgtgcgggttgggctgctcagcagcccagcacccctcgggggccaggagacccagcccagcagcagctgctctcgctcccaccgccgcctatccgtccaccacctggtgcaccaccaccaccaccatcaccaccactaccacctgggcaatgggacgctcagggccccccgggccagcccggagatccaggacagggatgccaatgggtcccgccggctcatgctgccaccaccctcgacgcctgccctctccggggccccccctggtggcgcagagtctgtgcacagcttctaccatgccgactgccacttagagccagtccgctgccaggcgccccctcccaggtccccatctgaggcatccggcaggactgtgggcagcgggaaggtgtatcccaccgtgcacaccagccctccaccggagacgctgaaggagaaggcactagtagaggtggctgccagctctgggcccccaaccctcaccagcctcaacatcccacccgggccctacagctccatgcacaagctgctggagacacagagtacaggtgcctgccaaagctcttgcaagatctccagcccttgcttgaaagcagacagtggagcctgtggtccagacagctgcccctactgtgcccgggccggggcaggggaggtggagctcgccgaccgtgaaatgcctgactcagacagcgaggcagtttatgagttcacacaggatgcccagcacagcgacctccgggacccccacagccggcggcaacggagcctgggcccagatgcagagcccagctctgtgctggccttctggaggctaatctgtgacaccttccgaaagattgtggacagcaagtactttggccggggaatcatgatcgccatcctggtcaacacactcagcatgggcatcgaataccacgagcagcccgaggagcttaccaacgccctagaaatcagcaacatcgtcttcaccagcctctttgccctggagatgctgctgaagctgcttgtgtatggtccctttggctacatcaagaatccctacaacatcttcgatggtgtcattgtggtcatcagcgtgtgggagatcgtgggccagcaggggggcggcctgtcggtgctgcggaccttccgcctgatgcgtgtgctgaagctggtgcgcttcctgccggcgctgcagcggcagctggtggtgctcatgaagaccatggacaacgtggccaccttctgcatgctgcttatgctcttcatcttcatcttcagcatcctgggcatgcatctcttcggctgcaagtttgcctctgagcgggatggggacaccctgccagaccggaagaattttgactccttgctctgggccatcgtcactgtctttcagatcctgacccaggaggactggaacaaagtcctctacaatggtatggcctccacgtcgtcctgggcggccctttatttcattgccctcatgaccttcggcaactacgtgctcttcaatttgctggtcgccattctggtggagggcttccaggcggagggagatgccaacaagtccgaatcagagcccgatttcttctcacccagcctggatggtgatggggacaggaagaagtgcttggccttggtgtccctgggagagcacccggagctgcggaagagcctgctgccgcctctcatcatccacacggccgccacacccatgtcgctgcccaagagcaccagcacgggcctgggcgaggcgctgggccctgcgtcgcgccgcaccagcagcagcgggtcggcagagcctggggcggcccacgagatgaagtcaccgcccagcgcccgcagctctccgcacagcccctggagcgctgcaagcagctggaccagcaggcgctccagccggaacagcctcggccgtgcacccagcctgaagcggagaagcccaagtggagagcggcggtccctgttgtcgggagaaggccaggagagccaggatgaagaggagagctcagaagaggagcgggccagccctgcgggcagtgaccatcgccacagggggtccctggagcgggaggccaagagttcctttgacctgccagacacactgcaggtgccagggctgcatcgcactgccagtggccgagggtctgcttctgagcaccagggactgcaatggcaagtcggcttcagggcgcctggcccgggccctgcggcctgatgaccccccactggatggggatgacgccgatgacgagggcaacctgagcaaaggggaacgggtccgcgcgtggatccgagcccgactccctgcctgctgcctcgagcgagactcctggtcagcctacatcttccctcctcagtccaggttccgcctcctgtgtcaccggatcatcacccacaagatgttcgaccacgtggtccttgtcatcatcttccttaactgcatcaccatcgccatgggagcgccccaaaatttgacccccacagcgttgaacgcatcttcctgaccctctccaattacatcttcaccgcagtctttctggctgaaatgacagtgaaggtggtggcactgggctggtgcttcggggagcaggcgtacctgcggagcagttggaacgtgctggacgggctgttggtgctcatctccgtcatcgacattctggtgtccatggtctctgacagcggcaccaagatcctgggcatgctgagggtgctgcggctgctgcgggccctgcgcccgctcagggtgatcagccgggcgcaggggctgaagctggtggtggagacgctgatgtcctcactgaaacccatcggcaacattgtagtcatctgctgtgccttcttcatcattttcggcatcttgggggtgcagctcttcaaagggaagtttttcgtgtgccagggcgaggataccaggaacatcaccaataaatcggactgtgccgaggccagttaccggtgggtccggcacaagtacaactttgacaaccttggccaggccctgatgtccctgttcgttttggcctccaaggatggttgggtggacatcatgtacgatgggctggatgctgtgggcgtggaccagcagcccatcatgaaccacaacccctggatgctgctgtacttcatctcgttcctgctcattgtggccttctttgtcctgaacatgtttgtgggtgtggtggtggagaacttccacaagtgtcggcagcaccaggaggaagaggaggcccggcggcgggaggagaagcgcctacgaagactggagaaaaagagaaggaatctaatgctggacgatgtaattgcttccggcagctcagccagcgctgcgtcagaagcccagtgcaaaccttactactccgactactcccgcttccggctcctcgtccaccacttgtgcaccagccactacctggacctcttcatcacaggtgtcatcgggctgaacgtggtcaccatggccatggagcactaccagcagccccagattctggatgaggctctgaagatctgcaactacatcttcactgtcatctttgtcttggagtcagttttcaaacttgtggcctttggtttccgtcggttcttccaggacaggtggaaccagctggacctggccattgtgctgctgtccatcatgggcatcacgctggaggaaatcgaggtcaacgcctcgctgcccatcaaccccaccatcatccgcatcatgagggtgctgcgcattgcccgagtgctgaagctgctgaagatggctgtgggcatgcgggcgctgctggacacggtgatgcaggccctgccccaggtggggaacctgggacttctcttcatgttgttgtttttcatctttgcagctctgggcgtggagctctttggagacctggagtgtgacgagacacacccctgtgagggcctgggccgtcatgccacctttcggaactttggcatggccttcctaaccctcttccgagtctccacaggtgacaattggaatggcattatgaaggacaccctccgggactgtgaccaggagtccacctgctacaacacggtcatctcgcctatctactttgtgtccttcgtgctgacggcccagttcgtgctagtcaacgtggtgatcgccgtgctgatgaagcacctggaggagagcaacaaggaggccaaggaggaggccgagctagaggctgagctggagctggagatgaagaccctcagcccccagccccactcgccactgggcagccccttcctctggcctggggtcgagggccccgacagccccgacagccccaagcctggggctctgcacccagcggcccacgcgaggatcagcctcccacttttccctggagcaccccacgatgcagccccaccccacggagctgccaggaccagacttactgactgtgcggaagtctggggtcagccgaacgcactctctgccccaatgacagctacatgtgtcggcatggggagcactgccgaggggcccctgggacacaggggctgggggctccccaaagctcagtcaggctccgtcttgtccgttcactcccagccagcagataccagctacatcctgcagcttcccaaagatgcacctcatctgctccagccccacagcgccccaacctggggcaccatccccaaactgcccccaccaggacgctcccctttggctcagaggccactcaggcgccaggcagcaataaggactgactccttggacgttcagggtctgggcagccgggaagacctgctggcagaggtgagtgggccctccccgcccctggcccgggcctactctttctggggccagtcaagtacccaggcacagcagcactcccgcagccacagcaagatctccaagcacatgaccccgccagccccttgcccaggcccagaacccaactgggggcaagggccctccagagaccagaagcagcttagagttggacacggagctgagctggatttcaggagacctcctgccccctggcggccaggaggagcccccatccccacgggacctgaagaagtgctacagcgtggaggcccagagctgccagcgccggcccacgtcctggctggatgagcagaggagacactctatcgccgtcagctgcctggacagcggctcccaaccccacctgggcacagacccctctaaccttgggggccagcctcttggggggcctgagagccggcccaagaaaaaactcagcccgcctagtatcaccatagacccccccgagagccaaggtcctcggaccccgcccagccctggtatctgcctccggaggagggctccgtccagcgactccaaggatcccttggcctctggcccccctgacagcatggctgcctcgccctccccaaagaaagatgtgctgagtctctccggtttatcctctgacccagcagacctggacccctgagtcctgccccactttcccactcacctttctccactgggtgccaagtcctagctcctcctcctgggctatattcctgacaaaagttccatatagacaccaaggaggcggaggcgctcctccctgcctcagtggctctgggtacctgcaagcagaacttccaaagagagttaaaagcagcagccccggcaactctggctccaggcagaaggagaggcccggtgcagctgaggttcccgacaccagaagctgttgggagaaagcaatacgtttgtgcagaatctctatgtatattctattttattaaattaattgaatctagtatatgcgggatgtacgacattttgtgactgaagagacttgtttccttctacttttatgtgtctcagaatatttttgaggcgaaggcgtctgtctcttggctattttaacctaaaataacagtctagttatattccctcttcttgcaaagcacaagctgggaccgcgagcacattgcagccccaacggtggcccatcttcagcggagagcgagaaccattttggaaactgtaatgtaacttattttttcctttaacctcgtcatcattttctgtagggaaaaaaaaaaggaaaaggaaaaatgagattttacaagtgaaatggaacctttttatatatacatacatacatatctatctatctatctatctatatataaaataaagtaattttcct

SEQ ID NO: 81003 - DNA, 841 bp, Homo sapiens
  sig_peptide (120)...(255): this location contains the signal peptide sequence, MVQPGLWEAGRAGKGAGLGSLLLLAPGHFLLCQPFSPLGLDQQHC, Run with SignalP
  misc_feature (210)...(9): similar to gi705389 in the genepept database release 114, Run with FASTXY 3.3t00, default parameters
tttcgtcctggacagtggggaaggggtggggtgagaagggtaaaagtcgccctgggctggggtctgggcaacgggaaagggctggaagagggcggcgggatgggagggtggaagctgctatggtgcagcctgggctgtgggaagcgggcagggccgggaaaggagcgggcctgggctctctactcctcttggccccaggtcattttctgctatgtcagcctttctctccactaggactggatcaacagcattgcactgctaaaataaaggttcagctaattgaaattagccggggatgcttcctgcttattttcagttaataagcagggatgcttccggcttattttcagtccagggacacttcccgcttattttcagttaatccaacatttcagacaatttaaggcataagaacagaattgtactggcccacttatttgaaggctatggtttttttactcttacattgagaacgattcacctgaaaaactcattttgttggccggcggagacatgcattctaccattaagaggatcacaactcatcttagctcacggtaccacgaggggtgcagggtgcttctctcattggccctgtggggccttaggcccttcctttgatgggcaaggagaagcggttaccacatatccccctgattcgcttcccccccccccgtgccatgggacctttcaccccgtctgacaaaagctttatttcttccttcccccgggttggtttgtaatgtgatccccccttgccctaggtcctcttgcggtatcccacagggtaacacttccctctccttcttcccctaaaataatcgctccaccttttaatctc

SEQ ID NO: 81004 - DNA, 3697 bp, Homo sapiens
  sig_peptide (581)...(716): this location contains the signal peptide sequence, MLSLRRCTSMRLCLSSSLASPCSTMLSTVVLYKVCNSFVEMGSAN, Run with SignalP
  misc_feature (12)...(2703): similar to gi4071359 in the genepept database release 114, Run with FASTXY 3.3t00, default parameters
tttcgtgcaggatgctgcgcgccgccctgtccctgctcgcgctgcccctggcgggggcggccgaagagcccacccagaagccagagtccccgggcgagcctcccccaggcttagagctcttccgctggcagtggcacgaggtggaggcgccctacctggtggccctgtggatcctggtggccagtctggccaaaatcgtgtttcacctgtctcggaaagtaacatctctggtccctgagagctgcctgctgattttgctgggcctggtgctagggggaattgttttggctgtggccaagaaagctgagtaccagctggagccaggcaccttcttcctcttcctgctgcctcctattgtgttggactcaggctatttcatgcctagcaggctgttctttgacaacttgggtgccatcctcacctatgccgtggtaggcacactctggaatgccttcacaacaggcgctgccctctggggcttgcagcaggctggacttgtagcccctagggtgcaggctggcttactggacttcctgctgtttgggagcctcatctcggcggtggaccccgtggccgtgctatgctgtctttgaggaggtgcacgtcaatgagactgtgtttatcatcgtctttggcgagtccctgctcaacgatgctgtccaccgtggtgctgtacaaggtctgcaactcctttgtggagatgggctctgccaatgtgcaggccactgactacctgaagggagtcgcctccctgtttgtggtcagtctgggcggggcagccgtgggcttagtctttgccttcctcctggccctgaccacacgcttcaccaagcgggtccgcatcatcgagccgctgctggtcttcctcctcgcctacgcagcctacctcactgctgaaatggcctcgctctccgccattcttgcggtgaccatgtgtggcctgggctgtaagaagtacgtggaggccaacatctcccataagtcacgcacaactgtcaaatatacaatgaagactctagccagctgtgctgagaccgtgatcttcatgctgcttggcatctcaaccgtggactcttctaagtgggcctgggattctgggctggtgctgggcaccctcatcttcatcctgttcttccgagccctcggcgtagtcctgcagacctgggtgctgaatcagttccggctagtccctctggacaagattgaccaagtggtgatgtcctatgggggcctgcggggggctgtggcctttgctctcgtcatcctactggataggaccaaggtccctgccaaggactactttgtagccaccactattgtagtggtcttcttcacagtcatcgtgcagggcttgaccatcaagccactggtcaaatggctgaaggtgaagaggagtgagcatcacaaacccaccctgaaccaggagctgcatgaacacacttttgaccacattctggctgcagtggaggacgttgtggggcaccatggctaccactactggagggacaggtgggagcagtttgacaagaaatacctgagtcagctgctgatgcgacgatcagcctaccgcatccgggaccagatctgggatgtgtactacaggcttaacatccgggatgccatcagctttgtggaccagggaggccacgtcttgtcttccacaggtctcactctgccttctatgcccagccgcaattctgtggcagaaacttctgtcaccaacctgctgagggagagtggcagtggagcgtgtctggatctgcaggtgattgacacagtacgcagcggccgggatcgtgaggatgctgtgatgcatcatctgctctgcggaggcctctacaagccgcgccgtaggtacaaagccagctgcagtcgccacttcatctcagaggatgcgcaggagcggcaggacaaggaggtcttccagcagaacatgaagcggcggctggagtcctttaagtccaccaagcacaacatctgcttcaccaagagcaagccacgaccccgcaagactggccgcaggaagaaggatggtgtggcgaatgctgaggctacaaatgggaaacatcgaggcctgggctttcaggacacagctgctgtgatattaaccgtggagtctgaggaggaggaggaggagagcgacagttcagagacagagaaggaggacgatgaggggatcatctttgtggctcgtgccaccagtgaggttctccaagagggcaaggtctcaggaagccttgaggtgtgcccaagcccacgaatcattcccccctccccaacctgtgcagaaaaggagctcccctggaagagtgggcagggggacctggcagtgtacgtgtcctcggaaaccaccaagattgtgcctgtggacatgcagacgggttggaaccagagcatctcatccctggagagcctagcgtcccctccctgtaaccaggccccaattctgacctgcctgcctccccatccacggggcactgaagagccccaggtccctctccacctaccttctgatccacgctctagcttcgccttcccaccgagcctggccaaggctggccgctctcgcagtgagagcagcgctgacctcccccagcagcaggagctgcagcccctcatgggccacaaggaccacacccatctcagcccaggcaccgctacctcccactggtgcatccagttcaacagaggcagccggctgtagctcaaggcctcggggaggagcaggaggtggaatccctgtgggaagtgctccctgggtgatgggtagagccctcgaaacttgacatggggccagaagggcctgggttgaagtagtaattgggcttccttggagctagtcagaggggtcacctaagctggtcctcacaggggcctttctcaccacctccctgctcctaacccctgccactttctgtttcattaaggcctctactctggctcaggacccagtccaggccttctacgggctaggcccagagacttgggttgctggtcccccttccctagtgggttttcccggggactctataggcagctgctcctgcccgcaaagcaagagcatcattcctattcttcagtggatgccagccttccctgccccaactccctccccagcactgggtcagtggtgtcctggcagtgaggctccgtgagggggctggcccttagaggaactggggtgggaggtggggcaggcctcacccttgggctttgcttgccctgttgggtcagctacccattagtccatttttttagggcagtgggaacctctgcctccacttcctgctttagccccttccctttgctgccaggtattggggtaatatttcctcctttgatgaagaccaaggccaagaggctgggccaggctttcagtttcaggcctgttgcttaactggggtcaccctgggatctgctgctctgggtctaagtctagacctttctgatccttgggtctgggttttttgaggagggggacaaagtggcctttgggttgccatgtcaccacctgcaacattccccaaacagagaaggaacccagcatctcagggccactgctccattgctctgggggctgggatgcctggctaagcaggggctgacagggtggcaggtgactttctagggatcagcacctgccctgtgttttgtaccttgaacctaagatatattaaacatctctcagatggaaaaa

SEQ ID NO: 81005 - DNA, 434 bp, Homo sapiens
  sig_peptide (155)...(290): this location contains the signal peptide sequence, MWRVPPLLMHALWSRRTLLIKEHLIKGETVQNANDGDRALSPGHG, Run with SignalP
  misc_feature (163)...(54): similar to gi791045 in the genepept database release 114, Run with FASTXY 3.3t00, default parameters
tttcgtcagactgcgtgtgggggctgtgggcgcctgtctccctccctcccaaggctccggtcgtgggctagtgggagaaagtgactgggtgggaccaacgcgacctcctccactggacgctctttacacgggctgggaatggcagtgggcttgcatgtggcgtgtgccacctctgctcatgcatgctctgtggtcacggagaactttgcttataaaagaacatcttatcaaaggtgaaactgttcagaatgccaatgatggggacagagcgttaagcccaggacatggctgcgtgcccacaaagccagctctggatggaaaagtaacgagtggagggcgttttcttcccagacccggtggtccagccgtgagtgtccagctgcaggccccacagcagccagctctgggcgaaaatctagagggcccctgcgcac

SEQ ID NO: 81006 - DNA, 470 bp, Homo sapiens
  sig_peptide (157)...(292): this location contains the signal peptide sequence, MLIETQTYLTQGSSQAFLLLGIFSLLLSGSVMWVMSVLPGAATLC, Run with SignalP
  misc_feature (258)...(391): similar to gi206884 in the genepept database release 114, Run with FASTXY 3.3t00, default parameters
acttaattttattcaaaattcaccaacttaatgtgctttataaatattctcatacctttgaagctctactgataaaacataatttacagttaatgaaaaagtgaagttaaaataaatccaatcatattttcaaggtgacaaaattagaaggtgacaatgctgattgaaacacagacatatcttacccaagggtcaagtcaagcctttctattacttgggatattttccctgcttctatctggttcagtgatgtgggtcatgagcgtcctacctggagctgctacgctctgctccactgtgtctgtgaggtgcattttactttgcaggtttttgcactgcctcactaggttgggtttctttatcctttgaaatattttctctcccttcaccaatctgaggacattttttcctcaatatcagcatccagttgcctgggcctgcaatgtgtctcttaaggaatgggaaactat

SEQ ID NO: 81007 - DNA, 452 bp, Homo sapiens
  sig_peptide (282)...(417): this location contains the signal peptide sequence, MKNPSPFLLLCILIVLASWSQDDDDDYTSINNYYYYKDNDSSYDL, Run with SignalP
  misc_feature (242)...(71): similar to gi3599625 in the genepept database release 114, Run with FASTXY 3.3t00, default parameters
tggaattcctaatttctctgacttcaacggaagacaattagaaattagtatccaaagaatgtcggcgctaagaggcggagggttttcgttgttggtgttcgtggctatagccccaaagcctagaatagtgcctggcatcaatttctgaattagtgaaaaacgtaatgaggcatactgattagaacacatccaataaaaattaacagaggagctaaagtaacgatatgtattgtttattgaatgtctagaggtacattttccaggctctgtgtaacatcctcatgaagaatccaagcccgttccttctgctctgtattctcattgtcttggcctcatggtcccaagatgacgatgatgattatactagtattaataactattattattataaagataatgatagttcgtatgacttgctttgtgccaattgttgttctgagcccctgacgtat

SEQ ID NO: 81008 - DNA, 790 bp, Homo sapiens
  sig_peptide (164)...(299): this location contains the signal peptide sequence, MLLFLPMSSPFHLPGLPSFPLLPCVPGLDTPASSCLSFRESFLSE, Run with SignalP
  misc_feature (270)...(417): similar to gi939868 in the genepept database release 114, Run with FASTXY 3.3t00, default parameters
ctggccccctaggcttccctcattcatggcactgtccacaccttcctgaagccaccagcttcagtgaggaagtctcactcagtgttggccccatggccagcccaggactttgcccagaggtagaaccagtgaaagtttgttgagtgaataggcaagggagtggatgttgctcttcctgcctatgtccagcccattccacctgcctgggctgccctcctttcctctcttaccctgtgtgcctggcctggataccccagcttcaagctgcctgtccttcagagagtccttcctctctgagcctgtcctcacctgcagcccacctgccatgaggaccccagatggagcccactgtggtgcctctcctgcacccccagcatggtgtgtgagcaccctggggctcccactggcttctcccacttttcattgcttcaggcccccattaggtggctggtgattgctgacagactgaactgttccagaacctcccctgtcaggactgccctggggaaatctctagaggtgtccacagcctcctgtctgccccctccctgcttgggtctcctcagaccattccttgattccaggtttctgaaaaattgggtgaaaactggcttggtgtcatcagatccaatttcctgccacctcttacttttaaaggaggcacagccagttttaaacaaaaacatcctgcttgggtgtgagctgaaaactttgcgcccaagagccttggctgtgaaggcctttcggtatggcaccttccctcatttaagccgctccccttctcccctgg

SEQ ID NO: 81009 - DNA, 1188 bp, Homo sapiens
  misc_feature (1)...(1188): n = a,t,c or g
  sig_peptide (43)...(178): this location contains the signal peptide sequence, MLQAALWCGIGLYLVTLRLGVEVTPESQHFGRPRRADHLRPGGRG, Run with SignalP
  misc_feature (541)...(732): similar to gi3878799 in the genepept database release 114, Run with FASTXY 3.3t00, default parameters
ccccattgagacatcgttgagccgtagaaaacaacgaaagggatgctgcaggcagctctctggtgtggaattgggctatatttggtaacattaaggctgggcgtggaggtaacgcctgaatcccagcattttgggaggccaaggcgggcagatcacttgaggcccggaggtcgaggccagtctggccaacatggtgaaaccccatctctactagaaatacaaaaaattagctggatgtggtggcacatacctgtaatcccagctacttgggaggctgaggcgggagaatcgcttgagcgtgggaggtggaggttgcagtgagccgagatcgcgccgttgcactctagcctgggcgacaagaacaaaactccatctcaaaaaagaaaaagaaaaagaaaaagaaatagtagcaccaagaagaaaggagcccccaccccagcaggagggagagcaggagcaggctgggtggggcacctggtggcttcctccaagttggctgtacctcaggctggagggagggggcgtgtcccttcagatgtgcatgtgggagtgctaacttcggtaccactcttctgtcctgcagtgagctgaggaagaggtacaacgtcacagccatccccaagcttgtgattgtgaaacaaaatggggaggtcatcaccaacaaagggcggaagcagatccgggaacgggggttggcctgcttccaggactgggtggaggcggccgatatcttccagaatttctccgtttgaagtgggagggacctcagagggccaggacaggtgctgcttctccagcaccgacgctggggcaaagaggagcatgttgggttccttcctctgttggtgtgatttcattgtatttcagagcagaagcactaagctgtggtcaaaaagcaactattgctcaggaaataatacactccatattttgatcatgcaggctgtttgtattatagttatttttgttattctttgcatacctttatccacctgtgcttaaggaaggatcctcatatgttcatactgagctgttggaaatctatgcaagacatttatttgtacaagtctcttcaggtaaaataatatatttattgataacattttctggcgatctgtttattttaatggtatgctttcacaactatcttaataaagtttgcaagctgtgtactttanaaaaaaaaaa

SEQ ID NO: 81010 - DNA, 676 bp, Homo sapiens
  sig_peptide (139)...(274): this location contains the signal peptide sequence, MLIRPLGLCLCWFWGWGACPVPSPGSPLRGGAYLQKGHLPTMAFP, Run with SignalP
  misc_feature (100)...(243): similar to gi4886479 in the genepept database release 114, Run with FASTXY 3.3t00, default parameters
tggtggaattcaaaatccaagtgatttgccctgacctacaaggccctgcgtaatcgggctccaacagatctcttcccagttttctctcctgtgacttctgcccttgcctactctgcctttctgctggtctttcaacccatgctcattcggcctttagggctttgcctgtgctggttctggggctggggtgcttgtcccgtaccttctccaggctctcctctgcgtgggggtgcttacctgcagaagggtcatcttcccaccatggccttccctgactcctcatccccaatactgccctctgccccacctgccccatcttcacactttgctgtatttttcatcatagtttatcactacctggcactatttacatatttacttgtttatttgtttgctgtctgcctccccaaatggatgtaagctccatgaaggtaggactttatagtattcgttgctatctccccagcttccagagcggagtgtagcccatagtagatgctcagtaaatattcatggctggattgaatgcaggattagatgcaaatgtgtagattccttttcaccctgttttattccaagcccagaggttatcactgttaacagtttgataactagccttctagacttttaaaaatgcctttataaaggcagacaaaaaaaaaaaccctcccccccc

SEQ ID NO: 81011 - DNA, 629 bp, Homo sapiens
  sig_peptide (423)...(558): this location contains the signal peptide sequence, MTSYISPHLRISLRMLFPLIKLKFCSFSTSQLCRLAIIFKVTNSH, Run with SignalP
  misc_feature (143)...(252): similar to gi4775290 in the genepept database release 114, Run with FASTXY 3.3t00, default parameters
aaatgtattgaaggatgcaaaatgatttgaatttgtaggtactcataaacctgatactacagtacacaggtatcccgctcctcatccaagttcagttgttctgacctcagggttcacacttggcggcagatcagtggatgtaccggatctgagtccttcccagccatgtggcagcagctctgtgtagagacgttgcctgccccccgccccctgcacgctctccaggagccaagtacagccaggaattggccaaaatggagagccccgaacggaccatgaatggacactgttgccactgtttactattcctgttcctttctgtagtttacctgctgattttaaataaacctgattgcttactcaagcaaggttggaagtttttttaatcctttaatttaaaactttaaatacagtaaaaatccatgacttcttatatttcccctcatttgcgtatttcacttaggatgctcttccctttaattaaactaaaattctgttcattttccacttctcaattatgcagactagctataatatttaaagttacaaattctcatattagaagaatcttggacataattcataatacgtagcttgtaatcaacagtaaactattacttccaatggat

SEQ ID NO: 81012 - DNA, 7705 bp, Homo sapiens; identical to SEQ ID NO: 80943
  sig_peptide (3628)...(3493): this location contains the signal peptide sequence, MLWVTGPVLAVILIILIVIAILLFKRKRTHSPSSKDEQSIGLKDS, Run with SignalP
  misc_feature (7402)...(1675): similar to gi205133 in the genepept database release 114, Run with FASTXY 3.3t00, default parameters

SEQ ID NO: 81013 - DNA, 810 bp, Homo sapiens
  sig_peptide (81)...(216): this location contains the signal peptide sequence, MFFVPILLCLLLLIYNIICFNMEHPTGAGLRCSLLAAPKERQHRH, Run with SignalP
  misc_feature (52)...(180): similar to gi2447150 in the genepept database release 114, Run with FASTXY 3.3t00, default parameters
gattttgttctcagagctacagtctgggagccattaataggaggtgtacggatatttttctcaaattatctattttgttgatgttttttgtacccattctgttgtgtttgcttttattaatctataatatcatctgcttcaatatggaacaccccacaggtgcaggtctgaggtgctccctgttggcagctcctaaagagaggcagcacagacaccacttcgtcttccacatagacaccaatcattgacctacatgaataaaactgaatacatttcagcaaatcaggccacagaataagccttttctttcttatgtcaaaataattaaatttccttttacagtttttgaataaaatgagccacatacttaattacagatgaatttcgtgaccaaagaccaaacacctaccattacccagggagagaaatgtccttgggaaatacgtaccaagagaacttatttggagtatataaatggtttaacttcaaagttttctgctttttaaaaatcagtggtgcttggctgggtgcggtggctcacgcctgtaatcccagcactttgggaggccgaggtgggcggatcatgaggtcaagagatcaagaccatcctggccaacatggtgaaaccccctctctactgaaaatgcaaaaattatctgggcatggtggcaggcgcctatagtcccagctacttgggaggctgaggcaggagaattgcttgaacctgggaggcagaagttgcaatgagccaagatcgtgccattgcactccagcctggtgaaagagcaagactccgtcttaaaaaaaaaa

SEQ ID NO: 81014 - DNA, 1870 bp, Homo sapiens
  sig_peptide (9)...(144): this location contains the signal peptide sequence, MDLSLLWVLLPLVTMAWGQYGDYGYPYQQYHDYSDDGWVNLNRQG, Run with SignalP
  misc_feature (9)...(615): similar to gi5441451 in the genepept database release 114, Run with FASTXY 3.3t00, default parameters
caggcagcatggacctcagtcttctctgggtacttctgcccctagtcaccatggcctggggccagtatggcgattatggatacccataccagcagtatcatgactacagcgatgatgggtgggtgaatttgaaccggcaaggcttcagctaccagtgtccccaggggcaggtgatagtggccgtgaggagcatcttcagcaagaaggaaggttctgacagacaatggaactacgcctgcatgcccacaccacagagcctcggggaacccacggagtgctggtgggaggagatcaacagggctggcatggaatggtaccagacgtgctccaacaatgggctggtggcaggattccagagccgctacttcgagtcagtgctggatcgggagtggcagttttactgttgtcgctacagcaagaggtgcccatattcctgctggctaacaacagaatatccaggtcactatggtgaggaaatggacatgatttcctacaattatgattactatatccgaggagcaacaacccactttctctgcagtggaaagggatcgcccagtggaagttcataatgtgccggatgactgaatacgactgtgaatttgcaaatgtttagatttgccacataccaaatctgggtgaaaggaaaggggccaggggacaggagggtgtccacatatgttaacatcagttggatctcctatagaagtttctgctgctctctttccttctccctgagctggtaactgcaatgccaacttcctgggcctttctgactagtatcacacttctaataaaatccacaattaaaccatgtttctcacttttcacatgtttcatagcaactgctttatatgactgatgatggcttccttgcgcaccacgtatacagtgcgcatgcttacagccgggcttctggagcaccagctgcagcctggctactgctttttactgcagaatgaactgcaagttcagcatagtggaggggagaggcagaactggaggagaggtgcagtgaaggttctctacagctaagcctgtttgaatgatacgtaggttccccaccaaaagcaggctttctgccctgagggacatcttcccactcccctgctccacatgagccatgcatgcttagcaatccaagtgcagagctctttgctccaggagtgaggagactgggaggtgaaatggggaaatggaagggtttggaggcagagctgaaaacagggttggaaggatttcctgaattagaagacaaacgttagcatacccagtaaggaaaatgagtgcaggggccaggggaacccgtgaggatcactctcaaatgagattaaaaacaaggaagcagagaatggtcagagaatgggattcagattgggaacttgtggggatgagagtgaccaggttgaactgggaagtggaaaaaggagtttgagtcactggcacctagaagcctgcccacgattcctaggaaggctggcagacaccctggaaccctggggagctactggcaaactctcctggattgggcctgatttttttggtgggaaaggctgccctggggatcaactttccttctgtgtgtggctcaggagttcttctgcagagatggcgctatctttcctcctcctgtgatgtcctgctcccaaccatttgtactcttcattacaaaagaaataaaaatattaacgttcactatgctgaaaaaaaaaaaaaagggggggccgttttaaaggatccaattttacgtccccgggcttgcaaggtaatattttttttttggggcccccaaaattaaatccccgggccggggtttaacaccggggggaggggaaaaacccgggggttccccaattaaatgggcgcggga

SEQ ID NO: 81015 - DNA, 721 bp, Homo sapiens
  sig_peptide (540)...(675): this location contains the signal peptide sequence, MCAPHLLLTVLAQSYGAQEISPLGHRLQGAPKPPLCPTGLPKPAS, Run with SignalP
  misc_feature (390)...(636): similar to gi4760736 in the genepept database release 114, Run with FASTXY 3.3t00, default parameters
gcggtcctcttgcctcggcctcccaagtgctgggattactggtgtgggcccctgcgcctggccttggcatgttttttgaccagggggaggatgaggtgcttgggaggatgagatgtcaggaggatgagacgctgcctatcagtgtttagcactgtgcctggcgtcttgatagagcccagttgacgagggctggcaaagaagctggtttttgggtttctcatccaaaccccactactcctctgtcaagaaatgatcactctagttattcagccaaaccttggaatatccttgtttcttctcatccctgtgaccaagctcttagcaaatcctgccagcttaagcatcacatagatagagaacccagctccgtctcactgcctttagctcccctgcagctggtggggattctagaaactgggactagggggtcagcttcctcctctgccctttccacaccaacagccagtagaatccttttaaatagacgtcagacccttcagtggtcctggcttcccattgtggtgtcagctcactgtgccatgtgtgccccccatctgctcctcactgtgctagcccagtcatacggagctcaagagatttcccccttgggccaccggcttcagggtgccccaaaacccccactctgtcccacagggctgccaaagccagcctccttgacaacatttggctgacggggaaggggagggccataaagagccgg

SEQ ID NO: 81016 - DNA, 7526 bp, Homo sapiens
  sig_peptide (2565)...(2700): this location contains the signal peptide sequence, MVALTIQTWHWLMTVAELLSLACYIASLVFLHEFIDVYFIATLSF, Run with SignalP
  misc_feature (68)...(2807): similar to gi3327036 in the genepept database release 114, Run with FASTXY 3.3t00, default parameters
gggtcgacgatttcgtgccgccgacatgacggacaacatcccgctgcagccggtgcgccagaagaagcggatggacagcaggccccgcgccgggtgctgcgagtggctgagatgctgcggtggaggggaggccaggccccgcactgtctggctggggcaccccgagaagagagaccagaggtatcctcggaatgtcatcaacaatcagaagtacaatttcttcacctttcttcctggggtgctgttcaaccagttcaaatactttttcaacctctatttcttacttcttgcctgctctcagtttgttcccgaaatgagacttggtgcactctatacctactgggttcccctgggcttcgtgctggccgtcactgtcatccgtgaggcggtggaggagatccgatgctacgtgcgggacaaggaagtcaactcccaggtctacagccggctcacagcacgaggtactgttgtgggtgttgttctttacactggcagagaactccggagtgtcatgaatacctcaaatccccgaagtaagatcggcctgttcgacttggaagtgaactgcctcaccaagatcctctttggtgccctggtggtggtctcgctggtcatggttgcccttcagcactttgcaggccgttggtacctgcagatcatccgcttcctcctcttgttttccaacatcatccccattagtttgcgcgtgaacctggacatgggcaagatcgtgtacagctgggtgattcgaagggactcaaaaatccccgggaccgtggttcgctccagcacgattcctgagcagctgggcaggatttcgtacttactcacagacaagacaggcactcttacccagaacgagatgattttcaaacggctccatctcggaacagtagcctacggcctcgactcaatggacgaagtacaaagccacattttcagcatttacacccagcaatcccaggacccaccggctcagaagggcccaacgctcaccactaaggtccggcggaccatgagcagccgcgtgcacgaagccgtgaaggccatcgcgctctgccacaacgtgactcccgtgtatgagtccaacggtgtgactgatcaggctgaggccgagaagcagtacgaagactcctgccgcgtataccaggcatccagccccgatgaggtggccctggtacagtggacggaaagtgtgggcttaaccctggtgggccgagaccagtcttccatgcagctgaggacccctggcgaccagatcctgaacttcaccatcctacagatcttccctttcacctatgaaagcaaacgtatgggcatcatcgtgcgggatgaatcaactggagaaattacgttttacatgaagggagcagatgtggtcatggctggcattgtgcagtacaatgactggttggaggaagagtgtggcaacatggcccgagaagggctgcgggtgctcgtggtggcaaagaagtctcttgcagaggagcagtatcaggactttgaagcccgctacgtccaggccaagctgagtgtgcacgaccactccctcaaagtggccacggtgatcgagagcctggagatggagatggaactgctgtgcctgacgggcgtggaggaccagctgcaggcagatgtgcggcccacgcctggagaccctgaggaatgctggcatcaaggtttggatgctgacaggggacaagctggagacagctacgtgcacagcgaagaatgcacatctggtgaccagaaaccaagacatccacgtttttcggctggtgactaaccgcggggaggctcacctcgagctgaacgccttccgcaggaagcatgattgtgccctggtcatctcgggagactccctggaggtttgcctcaagtactatgagtacgagttcatggagctggcctgccagtgcccggccgtagtctgctgccgatgtgcccccacccagaaggcccagatcgtgcgcctgcttcaggagcgcacgggcaagctcacctgtgcagtaggggacggaggcattgacgtcagcatgattcaggaatctgactgcggcgtgggagtggaaggaaaggaaggaaaacaggcttcgttggctgcagacttctccatcactcaatttaagcatcttggccggttgcttatggtgcatggccggaacagctacaagcggtcagccgccctcagccagttcgtgattcacaggagcctctgtatcagcaccatgcaggctgtcttttcctccgtgttttactttgcctccgtccctctctatcaaggattcctcatcattgggtactccacaatttacaccatgtttcctgtgttttctctggtcctggacaaagatgtcaaatcggaagttgccatgctgtatcctgagctctacaaggatcttctcaagggacggccgttgtcctacaagacattcttaatatgggttttgattagcatctatcaagggagcaccatcatgtacggggcgctgctgctgtttgagtcggagttcgtgcacatcgtggccatctccttcacctcgctgatcctcaccgagctgctcatggtggcgctgaccatccagacctggcactggctcatgacagtggcggagctgctcagcctggcctgctacatcgcctccctggtgttcttacacgagttcatcgatgtgtacttcatcgccaccttgtcattcttgtggaaagtctccgtcatcactctggtcagctgcctccccctctatgtcctcaagtacctgcgaagacggttctctccccccagctactcaaagctcacatcataggccgtgcgttcgctggagggggccctggtcttggcgcttccctgatggacagagctcaagttccatttatattaaccgccacctgtggattttgcagtaattgctaacacatgcagttttaatgggaagtggctctgcgcctaaacggagtcctaacgctgcatcaacgggagggagggtcctgaaagagacccatctgggcctgtctgaacccctcgttcttcatgtttaggtgaatatgaatatgttaaagctggtggctcagctgggagatttatatgggtcactgtgcgagcttccttatgacttgaattttgttgtcacatgataaaagtttctgtgtagctgaaggttgtagaaggcttgtgtgtgtgtgtgtgtgtgtgtgtgtgtgtgtgtgtgtgtgtttttaaagagtcataatgtgatatatactctttatgtctttcttgctcttacaaagaggtgtcagaaaaatagaaagctcttggtgtcggtttgggaggaaaagacagtgacatttggtaaaaagttatccacacaataatctccattcgggaaatgctcagtatcgtctccagccagccctgcttatccagggttacactgggattcctggggatcgtaaccagtaaatgagagggagagggagagagagtgtcctaagtccaatctgttatccttgatctgattcaggcatccatagtgtgtgagttaacttcacctgccacctcgtaaaagaatttcagaggtgtgatcccgctttattgggacctggtaacaatcacaaagccagtggctgttttgagaaggacctcagacattttcagcagagttgttttagcaggaaacgtgccactgaatggcccctaaatgtgtcgacagtgtgataagagactcaactaattctttaggcaacatggcagatgtgactcagatcctccaagaccaaagcggaaaggtcagggggctgggactcttctcttccatagaagcctgtttccctgttaggaggcataatggaagatgaccccacaaaggcagaggcatctttcggaacaacactggtggcagctttcagaacaaggaacccctggtgggaggacgcccaagctacagcgttgggatctgggatctgttccactgccggcagatttcaaggggaacttgctgaaaggcagccagtggtgaagatttctcccctcccaggatggactacatgccggcatgtttcttataaagctgtggctgcttgtttcagaggaagggagtttgcagtcgcgggacgtggtagagcaaggcattcttgggttttcaagttgcttcttgcagaagccacatatgcatgccataagggttaagttggtggatctttaagagccaagtgtggttgagatcttggatttgcgtttacttcttgatgaatacatatccttcaaaccctctgcctggcgcctacttctgtgtgccttccagagatgtacatcacagccctggtttctgatgcctactaactcctgctcttggagagctggagacacgaggatcagatagtcccttgcctttggagcactcttgataagcttttgtattttgtgttgtccttttaaaatgttctagaatgactttacgttgcaggtactggttaattggctgttgacaccacatctattttgtcttatgattctgcagttttgcagtacttttctctatctgattcagccatttctgccagagggaaaaggtcggcagaaaagatgtattgagtgaatagttaaggataggatctttgtccaaaaatttcagaaagattgagcaaatctgacgtattcattgagtgagtttctgtgttttcaaaggtggaggagaaatttgtgctggaagtttttaagcctccgttttcttggaaatcagtctgtaacactggcaagtcttaagatagtcccgtttagactttgcagatgctgaacctggctctgtaacgctgggaagtcttaagatagtcctgtttagactttgcaaaccctgtacctggctttgctcggagattcgggatgctggctcctgcaggcagggcgtgtgggagcctcgtcagaaagttttagaggtttccagcagaagcagaatgaagatggtctccctggccttttccttaattctcaattttgattgaggtgcacaagttgacttttaaagccaacgcttaagatactgattgacatcttcaagggagaatgctcccaggaggggctgaagaagccatagttggaagtggaaggtactcgtcagtgttctccacaaacctttttactctgttgtctcagccgcactggggcggaggcggtcaagggtgagaagtaccgacactcaagtgcaaactgccacgtcgttggcccatcccatcagtgggcagctggctgacgccattcactggacggtccctgaacacctaggaatgcacacaccgtgcttctcagacactggagacgcaaaggcaggaggatgcagtccggtgagaggacacgatctttacctgcacaatcagactgtaagcccagcagagaaccccaggggcgcctgggtacttctcggaaggtcatcttagttgtggtggggaagacaaagaaataagcaaacaagaaactagagttactatacaagaaactctcctgagtttgtaaaccttaagcataagggattcagttgacctttttcttggttcatcaatctggaaagaacttacataaagcgccattgacactgtcacctgggagctccatgggccgtaagtctttgacagccaatttaatttgaggtcagagggccttgaggtacacagtcagcactgtttgaacacttttcctgaaagcaaaactcacagctccctgcgccctctgacaacactagctatttctgccagagtaagaacttctattactattttattattgttcatatgtcttttgatgatggttgtgtgacagggggaagcaggatctatttggtttcttccccctccccccaccccttcctttttgtctctctttttttttctctaagaaaatcaccagactagtttttccatcttgagtaatttcttatgtgggacagttttgatcctcattttgaaagcatgcgtgcgcacatgtgtgttgcctgtggtgccaggtgagacaggtggcactaactccagctgcttggaaggcatcccaagggcgcatcttaaagttggagcagacctcccttttccagcccctggggccattagaccacgtgctggaactagcattgtaaaattcccatcccagttccactcccctgaagtgaaaccctttttttttgtgacagtaaatcttaaaaatcattgtctctttatgaacatttcctcagtttcttctctgctgaaaatgtaagccatgctactttttaatgtattttgaattttgtgctcattggaaattgatatgctaatgcctcccccaccccccgccagacttttctttttatactttgtcttgtttttactggggtaggctgggcatgcgtgcgtgcctttagggcagcattttaaacctttgccaaaattgcaaatgggacatgtacattcttctgctccatcctacttaaacacctatcagctatttttatctttaaccttttctgtatgtttgaagtgtgtggggggtgtgtgtgtgtgtgtgaaagagcgagagaatgatgtcatctaaagttttttgaagaattatttggttttcattgcattaaaattctatcactcccagctttgttttcatttaaaaaaatatacaaagagctttgtaaatacaacacattttatttctcccccttcttttaatgtacagcttttttgccacttatatatacttaaaatattcccatgaattatgtccagttcttcttggaaaaaaatttggttttgaatgaacctgcaaagcatcctgcagcgtgagcagctcctccacctggagctccgaagcatcttctcaggccaaagcggcattacccgtgaatctgtcttctccgccacagcatggtttgaggcgcagtctgttaatatagctgggccatgtcagtgactgttgtgtttgtggggtcaggtggggggcatggtatttgcaaaaaaaacaaattatggctaatttattattttgttgcagtggggttaactgtaaactcatgtaagagtctgtgatttcctcactggttgatctctctctctgtaatcctcattgcaaattttcaccaggacagcgttttttgattagaggggagctctggcacagtatgctttaatttagcaggaacttccagatgatttaaattctcgatgctgtgatgacacacatatgatctttcgtgtttctgagcgactctactttcattgtttgccagcgtggctccgttgctggttgcccaataaagcttgtgtacgttctgccttgggggattattttaatttgtacagaaacatgaattctggtatcaaaatgaggactttttattataacgctcctattttttctttatttcatggtacatgaaatgtaaagaaaactctttccagttcagaaaattattttgattttggcaaaaaaaaccccaaatcaatgcatgttatttattattttgtactattgtccatcccagacgtgtcagaatttcaaaaggtgatagatataaatggaaaataagatgaaa

SEQ ID NO: 81017 - DNA, 4668 bp, Homo sapiens
  sig_peptide (2373)...(2508): this location contains the signal peptide sequence, MLDLVALLYQAVLLPAILLLPLCQLEMFLMLQLNRQSLKKKYLIL, Run with SignalP
  misc_feature (186)...(4004): similar to gi5689569 in the genepept database release 114, Run with FASTXY 3.3t00, default parameters
gccgctgagggagcccttccccgccagcgcgtgcccttccactccgccccgaggtcgcagcggcccgctctcccgccagcgccccctcctcgcggccacgcagcagcccgcgtctcgctctccccacccagtgcagtggccgccgcctcttccgccgccgggctcggggcctccgcagcgacaacatggaggccgtgaagaccttcaatagcgagttgtattccctgaatgactataaaccacccatttcgaaagcgaaaatgacccaaattactaaggcagccatcaaagctattaagttctataaacatgtggtacagagtgttgagaagtttattcagaaatgtaaaccagaatacaaagtacctggactttatgttattgactccattgtgcgacaatcccgacatcagtttggtcaagaaaaggatgtgtttgcacccagatttagtaataacatcattagcactttccagaatttatatcgttgccctggggatgacaagagtaaaatagtgagagtactaaacttatggcagaagaataatgtatttaagagtgagattattcacccccttttggatatggcagccgggattccgcctccagttgtcacacctgttttggccagcactaccactgctatgagcaatactccaggaactcctgtgacacctgttactccggccaatgtggtccaaggcttacctgatccgtgggtatctcagataacaaatacagatacacttgcggctgtagctcagatcttgcaaagtcctcaaggccagcagcttcaacaattaatacaaaccttacagatacaacaacagaagccccagccttccattctgcaggccctagatgctggtcttgttgttcagttgcaagctcttacggcacaacttacagctgcagctgcagctgccaacactcttactcccttagaacagggagtctcctttaacaagaagttgatggataggtttgattttggggaagactctgagcatagtgaagaacccaaaaaggaaactccagcttcacaactttctcacgtttcagaatctgtgaacaattccatttttcatcagatagcagaacaactacaacagcaaaacctagaacatctcagacagcagctcttggagcagcaacagcctcaaaaggccactcctcaggatagtcaggaaggaacctttgggtcagagcattcagcgtcaccatcacaaagggagtagtcagcagcattttcttgaacctgaagtcaatttgggatgattccatagatattcagcaacaggatatggatatagatgaagggcaagatggagtggaagaggaggtctttgaacaagaagctaagaaagtggcggttcgctcaagatcaagaacacattcacgatctcgttcaagatcaccaagaaaacgaaggtctaggtcacggtctggctctagaaagcgtaaacacagaaagcgatcacgctcccgctcaagagaaagaaagaggaaatcatcacggtcgtattcaagtgaaaggagagccagagaaagggagaaagaacgacagaaaaagggattacctccaattagatctaaaacactaagtgtatgtagtactactctctgggttgggcaagtggacaagaaggcaacacagcaagacttaaccaacctgtttgaagagtttggacagattgaatccattaatatgattcctccccggggctgtgcttatgtctgcatggttcatcgacaagatgcatttcgagctcttcagaaactcagttctggatcatataaaattgggtccaaggtcattaagattgcttgggctttaaacaaaggtgtaaaaacagaatacaaacaattctgggatgtggatcttggagttacatatataccatgggaaaaagttaaagtggatgacttggaaggttttgcagaaggaggcatgattgatcaggagactgtaaatactgagtgggaaactgtgaaaagctcagaacctgttaaagagacggtccagacaactcagagcccaactccagttgaaaaggagacagtggtcacaacccaggcagaggttttccctcctcctgttgctatgttgcagattccagtggcgccagccgtgcctacagttagtttagtcccaccagcatttcctgtgtcgatgccggttcctcctcctggattcagtccaatccctccacctccttttttaagagcaagttttaacccttcacaaccaccacctggtttcatgccgcctccagttcccccacctgttgtgccaccccctacgattccaccagtagtaccaacatctttagtgcagccgtcattatccatgacaccggaaactgtgaaagatgttggatttggtagccttgttataccaggcggttctgttgccagcaatcttgctacttccgctctgccagctggaaatgtttttaatgctccaactaaacaggcagagcctgaagaaaaagtacctcatcttatagaccaccagatttcttctggtgaaaacaccagatcagtgattccaaatgatatttcaagtaatgctgcaattttaggaggacagccgccaaatgtgacaagcaattctggaattctgggagtccaaagaccaaatgtatcaagtaattctgaaattcttggggtccggccatctaatgtttccagtagttctgggattattgcagcccaaccaccaaatattctaaataactctggaatattgggaatacagccacccagtgtgtcaaatagttctggacttttgggagtgctacccccaaatatacctaacaattctggacttgtaggagtacagccaccaaatgttccaaatactcctggacttctgggaacacagccaccagctggacctcaaaacttaccccctttaagtatccctaatcaaaggatgcccacaatgccaatgttagacattcgtccgggactaataccacaggcacctgggccaagattccctttaatacagcctggaattccaccccaacggggaatcccacccccatcggtacttgattcagctcttcatccaccaccccgtggaccttttcctccaggagatatttttagtcaaccagaaagaccttttttagctcctggaagacaaagcgtagacaatgttactaacccagaaaaaaggataccacttgggaatgataacattcaacaggaaggagatagagattaccggtttcctcctatagaaaccagggaaagcattagtagacctccccctgtggatgttagagatgtggttgggcggcctatagatccaagagaaggtcctggacggcctccactagatggtagggatcattttggaagacctcctgtagatataagagagaatcttgtgaggccaggtatagatcatcttggtcgaagagaccactttggctttaatccagagaagccctgggggcatagaggagattttgatgagagagagcatcgggttctaccggtctatggtggtccaaaaggcttacatgaagaaagaggtagatttcggtctggaaactatcgatttgatcctagaagtggtccttggaaccgaggatttggacaagaagttcacagagattttgatgaccgcagaagaccctgggagaggcaaagggatagggatgacagagattttgatttctgcagagaaatgaatggaaatcgtcttggacgagacagaattcaaaacacttgggttccccctcctcatgctcgggtttttgattattttgaaggggccacttctcaacgaaaaggtgataatgtgcctcaggttaatggtgaaaatacagagagacatgctcagccaccacctataccagtacagaatgatcctgaactttatgaaaaactgacatcttcaaatgaaataaacaaggagaagagtgacacagttgctgatatagaaagtgaaccagtggtagaaagcacagaaactgaggggacataatcatcactcagtaggtaaaagataccttttgtaaagttgtcatctctctgtaatagataatggctgactggaccatagttgttcacttttgtctgccagaattaagttaatctgatgttcatgttcacctttctcttaaaataattgtacaactgacttgtatagacattgttcttaatatgaacatggtaggtaaactttttttttatttttttctgataaaatacaaatgttggccccagattcttttaacgtcaaggaaatgaataacagcttgtcagagacttcctatggaagaaagaattttttagatactatcattaggttggatatggtaatagatatatttcagaatagcaagtggtggtatatcttatccatatctttaggctgctgcagaattttaaggttatagataaagctgtgatattttatgcaaagactggctctaggtatttgaggagcacaatacagagattttaaaaagtgattttgtaaaatctacactatggtctctgtttctccaaagtaagtgtttgtgatttgttcctcatactgcagtgagtaaaaaagaaacaagaaaacaacaacataaatattaaagtacgtttcaatgttgggtgaattttgtttttagatgccaataaaacttatttgtttgataa

SEQ ID NO: 81018 - DNA, 5468 bp, Homo sapiens
  sig_peptide (3216)...(3351): this location contains the signal peptide sequence, MALLVPLALLVIQAHLVLSVQLERVVTEEKVALLALLVLPVLLVP, Run with SignalP
  misc_feature (547)...(3785): similar to gi930045 in the genepept database release 114, Run with FASTXY 3.3t00, default parameters
cgggcccggtgctgaagggcagggaacaacttgatggtgctactttgaactgcttttcttttctcctttttgcacaaagagtctcatgtctgatatttagacatgatgagctttgtgcaaaaggggagctggctacttctcgctctgcttcatcccactattattttggcacaacaggaagctgttgaaggaggatgttcccatcttggtcagtcctatgcggatagagatgtctggaagccagaaccatgccaaatatgtgtctgtgactcaggatccgttctctgcgatgacataatatgtgacgatcaagaattagactgccccaacccagaaattccatttggagaatgttgtgcagtttgcccacagcctccaactgctcctactcgccctcctaatggtcaaggacctcaaggccccaagggagatccaggccctcctggtattcctgggagaaatggtgaccctggtattccaggacaaccagggtcccctggttctcctggcccccctggaatctgtgaatcatgccctactggtcctcagaactattctccccagtatgattcatatgatgtcaagtcgggcggagtagcagtaggaggactcgcaggctatcctggaccagctggccccccaggcccccccggcccccctggtacatctggtcatcctggttcccctggatctccaggataccaaggaccccctggtgaacctgggcaagctggtccttcaggccctccaggacctcctggtgctataggtccatctggtcctgctggaaaagatggagaatcaggtagacccggacgacctggagaccgaggattgcctggacctccaggtatcaaaggtccagctgggatacctggattccctggtatgaaaggacacagaggcttcgatggacgaaatggagaaaagggtgaaacaggtgctcctggattaaagggtgaaaatggtcttccaggcgaaaatggagctcctggacccatgggtccaagaggggctcctggtgagcgaggacggccaggacttcctggggctgcaggtgctcggggtaatgacggtgctcgaggcagtgatggtcaaccaggccctcctggtcctcctggaactgccggattccctggatcccctggtgctaagggtgaagttggacctgcagggtctcctggttcaaatggtgcccctggacaaagaggagaacctggacctcagggacacgctggtgctcaaggtcctcctggccctcctgggattaatggtagtcctggtggtaaaggcgaaatgggtcccgctggcattcctggagctcctggactgatgggagcccggggtcctccaggaccagccggtgctaatggtgctcctggactgcgaggtggtgcaggtgagcctggtaagaatggtgccaaaggagagcccggaccacgtggtgaacgcggtgaggctggtattccaggtgttccaggagctaaaggcgaagatggcaaggatggatcacctggagaccctggtgcaaatgggcttccaggagctgcaggagaaaggggcgcccctgggttcccgaggacctgctggaccaaatggcatcccaggggagaaaggccctgctggagagcgcggtgctccaggccctgcaggccccagaggagctgctggagaacctggcagagatggcgtccctggaggtccaggaatgaggggcatgcccggaagtccaggaggaccaggaagtgatgggaaaccagggcctcccggaagtcaaggagaaagtggtcgaccaggacctcctgggccatctggtccccgaggtcagcctggtgtcatgggctttcccggtcctaaaggaaatgatggtgctcctggtaagaatggagaacgaggtggccctggaggacctggccctcaaggtcctcctggaaagaatggagaatacggacctcagggacccccagggcctactgggcccggtggtgacaaaggagacacaggaccccgtggtccacaaggattacaaggcttacctggtacaggtggtcctccaggagaaaatggaaaacctggagaaccaggcccaaagggtgaagccggtgcacctggagctccaggaggcaagggtgatgctggtgcccctggtgaacgtggacctcctggattggcaggggccccaggacttagaggtggagctggtccccctggtcccgaaggaggaaagggtgctgctggtcctcctgggccacctggtgctgctggtactcctggtctgcaaggaatgcctggagaaagaggaggtcttggaagtcctggtccaaagggtgacaagggtgaaccaggcggtccaggtgctgatggtgtcccagggaaagatggcccaaggggtcctactggtcctattggtcctcctggcccagctggccagcctggagataagggtgaaggtggtgcccccggacttccaggaatagctggccctcgtggtagccctggggagagaggtgaaactggccctccaggacctgctggtttccctggtgctcctggacagaatggtgaacctggtggtaaaggagaaagaggggctccgggtgagaaaggtgaaggaggccctcctggagttgcaggaccccctggaggttctggacctgctggtcctcctggtccccaaggtgtcaaaggtgaacgtggcagtcctggtggacctggtgctgctggcttccctggtgctcgtggtcttcctggtcctcctggtagtaatggtaacccaggccccccaggtcccagcggttctccaggcaaggatgggcccccaggtcctgcgggtaacactggtgctcctggcagccctggagtgtctggaccaaaaggtgatgctggccaaccaggagagaagggatcgcctggtgcccagggcccaccaggagctccaggcccacttgggattgctgggatcactggagcacggggtcttgcaggaccaccaggcatgccaggtcctaggggaagccctggccctcagggtgtcaagggtgaaagtgggaaaccaggagctaacggtctcagtggagaacgtggtccccctggaccccagggtcttcctggtctggctggtacagctggtgaacctggaagagatggaaaccctggatcagatggtcttccaggccgagatggatctcctggtggcaagggtgatcgtggtgaaaatggctctcctggtgcccctggcgctcctggtcatccaggcccacctggtcctgtcggtccagctggaaagagtggtgacagaggagaaagtggccctgctggccctgctggtgctcccggtcctgctggttcccgaggtgctcctggtcctcaaggcccacgtggtgacaaaggtgaaacaggtgaacgtggagctgctggcatcaaaggacatcgaggattccctggtaatccaggtgccccaggttctccaggccctgctggtcagcagggtgcaatcggcagtccaggacctgcaggccccagaggacctgttggacccagtggacctcctggcaaagatggaaccagtggacatccaggtcccattggaccaccagggcctcgaggtaacagaggtgaaagaggatctgagggctccccaggccacccagggcaaccaggccctcctggacctcctggtgcccctggtccttgctgtggtggtgttggagccgctgccattgctgggattggaggtgaaaaagctggcgggttttgccccgtattatggagatgaaccaatggatttcaaaatcaacaccgatgagattatgacttcactcaagtctgttaatggacaaatagaaagcctcattagtcctgatggttctcgtaaaaaccccgctagaaactgcagagacctgaaattctgccatcctgaactcaagagtggagaatactgggttgaccctaaccaaggatgcaaattggatgctatcaaggtattctgtaatatggaaactggggaaacatgcataagtgccaatcctttgaatgttccacggaaacactggtggacagattctagtgctgagaagaaacacgtttggtttggagagtccatggatggtggttttcagtttagctacggcaatcctgaacttcctgaagatgtccttgatgtgcagctggcattccttcgacttctctccagccgagcttcccagaacatcacatatcactgcaaaaatagcattgcatacatggatcaggccagtggaaatgtaaagaaggccctgaagctgatggggtcaaatgaaggtgaattcaaggctgaaggaaatagcaaattcacctacacagttctggaggatggttgcacgaaacacactggggaatggagcaaaacagtctttgaatatcgaacacgcaaggctgtgagactacctattgtagatattgcaccctatgacattggtggtcctgatcaagaatttggtgtggacgttggccctgtttgctttttataaaccaaactctatctgaaatcccaacaaaaaaaatttaactccatatgtgttcctcttgttctaatcttgtcaacagtgcaaggtggaccgacaaaattccagttatttatttccaaaatgtttggaaacagtataatttgacaaagaaaaatgatacttctctttttttgctgttccaccaaatacaattcaaatgctttttgttttatttttttaccaattccaatttcaaaatgtctcaatggtgctataataaataaacttcaacactctttatgataacaacactgtgttatattctttgaatcctagcccatctgcagagcaatgactgtgctcaccagtaaaagataacctttctttctgaaatagtcaaatacgaaattagaaaagccctccctattttaactacctcaactggtcagaaacacagattgtattctatgagtcccagaagatgaaaaaaattttatacgttgataaaacttataaatttcattgattaatctcctggaagattggtttaaaaagaaaagtgtaatgcaagaatttaaagaaatatttttaaagccacaattattttaatattggatatcaactgcttgtaaaggtgctcctcttttttcttgtcattgctggtcaagattactaatatttgggaaggctttaaagacgcatgttatggtgctaatgtactttcacttttaaactctagatcagaattgttgacttgcattcagaacataaatgcacaaaatctgtacatgtctcccatcagaaagattcattggcatgccacaggggattctcctccttcatcctgtaaaggtcaacaataaaaaccaaattatggggctgcttttgtcacactagcataggagaatgtgttgaaatttaactttgtaagcttgtatgtggttgttgatcttttttttccttacagacaaccataataaaata

SEQ ID NO: 81019 - DNA, 5585 bp, Homo sapiens
  sig_peptide (4242)...(4107): this location contains the signal peptide sequence, MLLYVFKFLGLFQFFHSFCTAYGPPGGCGDSGEETSLFFEQLDPA, Run with SignalP
  misc_feature (161)...(4223): similar to gi4240155 in the genepept database release 114, Run with FASTXY 3.3t00, default parameters
tttcgtcaagtgtaacagcgccaaacaccgcatcatctcgcccaaggtggagccacggacaggggggtacgggagccactcggaggtgcagcacaatgacgtgtcggagggcaagcacgagcacagccacagcaagggctccagccgtgagaagaggaacggcaaggtggccaagcccgtgctcctgcaccagagcagcaccgaggtctcctccaccaaccaggtggaagtccccgacaccacccagagctcccctgtgtccatcagcagcgggctcaacagcgacccggacatggtggacagcccggtggtcacaggtgtgtccggtatggcggtggcctctgtgatggggagcttgtcccagagcgccacggtgttcatgtcagaggtcaccaatgaggccgtgtacaccatgtcccccaccgctggccccaaccaccacctcctctcacctgacgcctctcagggcctcgtcctggccgtgagctctgatggccacaagttcgcctttcccaccacgggcagctcagagagcctgtccatgctgcccaccaacgtgtccgaagagctggtcctctccaccaccctcgacggtggccggaagattccagaaaccaccatgaactttgaccccgactgtttccttaataacccaaagcagggccagacgtacgggggtggaggcctgaaagccgagatggtcagctccaacatccggcactcgccacccggggagcggagcttcagctttaccaccgtcctcaccaaggagatcaagaccgaggacacctccttcgagcagcagatggccaaagaagcgtactcctcctccgcggcggctgtggcagccagctccctcaccctgaccgccggctccagcctcctgccgtcgggcggcggcctgagtcccagcaccaccctggagcagatggacttcagcgccatcgactccaacaaggactacacgtccagcttcagccagacgggccacagcccccacatccaccagaccccctccccgagcttcttcctgcaggacgccagcaaacccctccccgtcgagcagaacacccacagcagcctgagtgactctgggggcaccttcgtgatgcccacggtgaaaacggaggcctcgtcccaaaccagctcctgcagcggtcacgtggagacgcggatcgagtccacttcctccctccacctcatgcagttccaggccaacttccaggccatgacggcagaaggggaggtcaccatggagacctcgcaggcggcggaagggagcgaggtcctgctcaagtctggggagctgcaggcttgcagctctgagcactacctgcagccggagaccaacggggtaatccgaagcgccggcggcgtccccatcctcccgggcaacgtggtgcagggactctaccccgtggcccagcccagcctcggcaacgcctccaacatggagctcagcctggaccactttgacatctccttcagcaaccagttctccgacctgatcaacgacttcatctccgtggaggggggcagcagcaccatctatgggcaccagctggtgtcgggggacagcacggcgctctcacagtcagaggacggggcgcgggcccccttcacccaggcagagatgtgcctcccctgctgtagcccccagcagggtagcctgcagctgagcagctcggagggcggggccagcaccatggcctacatgcacgtcgccgaggtggtctcggccgcctcggcccagggcaccctaggcatgctgcagcagagcggacgggtgttcatggtgaccgactactccccagagtggtcttacccagagggaggagtgaaggtcctcatcacaggcccgtggcaagaagccagcaataactacagctgcctgtttgaccagatctcagtgcctgcatccctgattcagcctggggtgctgcgctgctactgcccagcccatgacactgggcttgtgaccctacaagttgccttcaacaaccagatcatctccaactcggtggtgtttgagtacaaagcccgggctctgcccacgctcccttcctcccagcacgactggctgtcgttggacgataaccagttcaggatgtccatcctggaacgactggagcagatggagaggaggatggccgagatgacggggtcccagcagcacaaacaggcgagcggaggcggcagcagtggaggcggcagcgggagcgggaatggagggagccaggcacagtgtgcttctgggactggggccttggggagctgctttgagagccgtgtggtcgtggtatgcgagaagatgatgagccgagcctgctgggcgaagtccaagcacttgatccactcaaagactttccgcggaatgaccctactccacctggccgctgcccagggctatgccaccctaatccagaccctcatcaaatggcgtacaaagcacgcggatagcattgacctggaactggaagttgaccccttgaatgtggaccacttctcctgtactcctctgatgtgggcgtgtgccctagggcacttggaagctgccgtcgtgctgtacaagtgggaccgtcgggccatctcgattcccgactctctaggaaggctgcctttgggaattgccaggtcacggggtcatgtgaaattagcagagtgtctggagcacctgcagagagatgagcaggctcagctgggacagaaccccagaatccactgtcctgcaagcgaagagcccagcacagagagctggatggcccagtggcacagcgaagccatcagctctccagaaatacccaagggagtcactgttattgcaagcaccaacccagagctgagaagacctcgttctgaaccctctaattactacagcagtgagagccacaaagattatccggctcccaaaaagcataaattgaaccctgagtacttccagacaaggcaggagaagctgcttcccactgcactgagtctggaagagccaaatatcaggaagcaaagccctagttctaagcagtctgtccccgagacactcagccccagtgaaggagtgagggacttcagccgggaactctcccctcccactccagagactgcagcatttcaagcctctggatctcagcctgtaggaaagtggaattccaaagatctttacattggtgtgtctacagtacaggtgactggaaatccgaaggggaccagtgtaggaaaggaggcagcaccttcacaggtgcgtcccacgggaaccaatgagtgtcctgatgatggctaacagagaggtggtgaatacagagctggggtcctaccgtgatagtgcagaaaatgaagaatgcggccagcccatggatgacatacaggtgaacatgatgaccttggcagaacacattattgaagccacacctgaccgaatcaagcaggagaattttgtgcccatggagtcctcaggattggaaagaacagaccctgccaccattagcagtacaatgagctggctggccagttatctagcggatgctgactgccttcccagtgctgcccagatccgaagtgcatataacgagcctctaaccccttcttctaataccagcttgagccctgttggctctcccgtcagtgaaatcgctttcgagaaacctaaccttccctccgccgcggattggtcagaattcctgagtgcatctaccagtgagaaggtagagaatgagtttgctcagctcactctgtctgatcatgaacagagagaactctatgaggctgccaggcttgtccagacagctttccggaaatacaagggccgacccttgcgggaacagcaagaagtagctgctgctgttattcagcgttgttacagaaaatataaacagctgacatggatagccttgaagtacgcactttataaaaagatgacacaggctgccatccttatccagagcaaattccgaagttactatgaacaaaaaaaattccagcagagccgacgggctgctgtgctcatccaaaagtactaccgaagttataagaaatgtggcaaaagacggcaggctcgccggacggctgtgattgtacaacagaaactcaggagcagtttgctaaccaaaaagcaggatcaagctgctcgaaaaataatgaggtttcttcgccgctgtcgccacagccccctggtggaccataggctgtacaaaaggagtgaaagaattgaaaaaggccaaggaacttgaagacatacagcagcatcccttagcaatgtgacattgcttttcagactgttttcatttctgtttttagcagagacatgcaacaacaacacacacgcacacacgcacacacacacacgtacacacacatacaaaatccctctgcagttttggggagatcagctgcaggattttaacaggaatgttttggtcattgcatttgcactttcatggacaacttttaatttgatcagcaagacatcttggaactcaatcttctgttggatcacgggaaatcaagacacccaggaggaattgaaagaggcttcctcttctcaggaagaagccatttccttctcatatagggctgtattcaaacatcgtgtggaactgtacaaatatttataccaaaaatatagataagaaaaggtggggctatactagcaacaaaaaaagaatgctgttcctgcacctgccggttatttccaagaagctgaatctttgggactgattctcagtggagggcttagatcatacaaaaatctttattgggtccgtgtgttctcatttccttcactgtttatttttgtttgtttgtttgtttgttttaatctctacagcacatttaatgcaacttttgaaatctgcaggtttttaatgtcttgtggaaatttgcagaggggcaggtgtgtggtaaacgggtaatgcatgggaaataatgagaagcagctcacagagtttaaactattttcttgtccccaccaccttccaagaacctgcgagggtagtaatcatcttgtcccctttttcatgttcagcactttaatttttttgccttactttcatgtgcaatgagaattacttaagaattggtaacgcatgtagccttttttagtaaccttggaagctgtagtaattctaaggaatcatgaaccttgcctggacatttgccacctaaacgatcagtgtggtgctgcgttctggccagtaaattccatgtttttggctatatctcatccaaactgagcagtttctgtgtatatatagaaggtagaaatgaaaagtgagaaaatatttgaaagggattatattaattgctaaatattttattcacaaaggtcaataacatggcaagataaaattatttgtatagttttgtctgaatgagcgagaaaaatgtggatgtactgtttgtatatattgtatatattaaaacagagatatgtgcatgaaatcaagaaaaaagaaatgaacaaaagcaaagcattagtggctatggtctgtaaaatgaaacaaaaaaactttatttcactataagagtactttattttaaatgttctttaggagaacattttgctaaagcatgactaaactgcaaaaaaaaaa

SEQ ID NO: 81020 - DNA, 619 bp, Homo sapiens
  sig_peptide (72)...(207): this location contains the signal peptide sequence, MVSIGNTQIPSLSLLSLALRALPSRGEERGCILGFYIILGGFGLR, Run with SignalP
  misc_feature (164)...(66): similar to gi342901 in the genepept database release 114, Run with FASTXY 3.3t00, default parameters
caaaaataaatcttgttacaatagaattaaagctggggaagcttaaacttgcacactaaaaacttcaatacatggttagcattggaaacacccagataccatccctgagccttctctccttggctctgagggctttaccttcacggggtgaggaaaggggttgcattcttggcttttacattatattaggtgggttcgggttgaggtatctgcaattcaaatgagtattacaatctctacttttatgcataagagactgaggggaaccaagagagggaatgacagtccatatcctggaaggcgaattgtcaggcactgatttccactatgtaacccctgccaatcaccgtgtatttaaagaatccccagataccataccaataggtgttcaagagagaggcctgtaatctaggcgtctgagaaaacaaggctagagattccaatattggagacaacagggctctgggaagattaaggttgagttttctggatctgcagaatagagtcactgaggaccaattgcaagatcagaggagatgaaagaacaagtcagggcatgctcaggaaaagagaataccagggataggttttcggcaaagaattcacccctgaggtgcaa

SEQ ID NO: 81021 - DNA, 409 bp, Homo sapiens
  sig_peptide (229)...(364): this location contains the signal peptide sequence, MICQRTLFLKFIDFCCTFEKALKPQYVLSQKLREVLTGKMSPQYM, Run with SignalP
  misc_feature (152)...(66): similar to gi38877 in the genepept database release 114, Run with FASTXY 3.3t00, default parameters
ctcaaatctatgtgctgcaatttttatttaatttaaaactaaataagaaccaggacttgctggaaggaggggaaatgccaagcccaacttagccctggcagccttcctgaaaccactgtgacttgggtactgtgaactcctgagctaaagagccagggtgcagagctgctgagcttgtctaacaaggagggagtttaggaaagcacctgggaaggttgtaggagccagatgatatgtcagcgaacactgtttctcaaattcattgacttctgctgcacttttgagaaggcattgaaaccccaatatgtcctatcacaaaaactacgagaagttttaaccggtaaaatgtcaccacagtacatggatttatacaaaacttcatccatgactttttcaaaaaaaaaaaaaa

SEQ ID NO: 81022 - DNA, 463 bp, Homo sapiens
  misc_feature (1)...(463): n = a,t,c or g
  sig_peptide (64)...(199): this location contains the signal peptide sequence, MEWRTRVTRNQRAALRVWWQRIRLWKSVVFLLVFWHLVLLSCGHF, Run with SignalP
  misc_feature (161)...(110): similar to gi1911629 in the genepept database release 114, Run with FASTXY 3.3t00, default parameters
agtaaacttgctgtacactgtggaggtcccgaccccggggtggtggtggtggctgccgaaggcatggaatggaggacacgagtgaccagaaatcaaagagctgccctcagggtctggtggcagaggatcaggctctggaaatctgtggtcttcctcctggtcttttggcatcttgttttactctcctgtgggcattttattctgctctctgtcccccactcctcatttctcctgagaaaagctcatctgaagatgaattcaaaacaaaacagccagtttgaaaaactggatgtttcactcttatattgccaagaaagatttgatgtaagaccagatgtcagggagctctatgtgattcacagatatgactgcttctagcagctaggagtgcaagggagggagggagctgcaggacacacatgcagttgcctcatcttggagaggngacactgaggcagaggct

SEQ ID NO: 81023 - DNA, 380 bp, Homo sapiens
  misc_feature (1)...(380): n = a,t,c or g
  sig_peptide (237)...(372): this location contains the signal peptide sequence, MTSHFFGLISFFLTLNTLDLHLPKRWQHLHPSLGSIEIQNEDDES, Run with SignalP
  misc_feature (199)...(314): similar to gi2736278 in the genepept database release 114, Run with FASTXY 3.3t00, default parameters
gtgatgccactcagatgcagtggaatgatttctgcatggggtaaatcttgaccattgggcagcaggagatggccagagtgaagaagaaacaattttctcttcctttctgccttcaatacaatacacagaggcctggatttttcttgtaacatttccagaggacatcctacctgagcagtctgctgttttctttatggcttgaaagatttgcacaccttggtgatgcatcacatcatatgacttctcatttttttggactcatctcctttttcctcacccttaacaccctggacttgcaccttccaaaaaggtggcagcaccttcatccttctttgggctctatagagatccagaatgaagatgatgaatcacagatttcn

SEQ ID NO: 81024 - DNA, 870 bp, Homo sapiens
  sig_peptide (307)...(442): this location contains the signal peptide sequence, MASSCCFIKFNLLVTHLRAPANLPSLIFCHSFLVLCMSAKLHYSL, Run with SignalP
  misc_feature (292)...(539): similar to gi1204237 in the genepept database release 114, Run with FASTXY 3.3t00, default parameters
cccccgcgtccgattttaacatgtgaatttggagaggacagaaacattcagttgatagcacttggttagcatagtggctcccacatagtggacacaactgtgagatggatggattgatagagcaaatagattaatgaaaagtatttgatcttttgatttcatctcctttggtttggactattgctgtagcctcctaactgttctccctgtcaccatctcaatgccatcatctgcactgccccactcccctaattttatctacaaaggagatctggtcttattcctttacaccttgagaaatctcctatggcttcctcctgctgttttataaagtttaacttgcttgtgacacacctcagagctccagccaatcttcccagcctcattttctgtcattccttccttgtactctgcatgtcagctaaattgcattactcactactgcctgtcacgcatacatcattacagatttctctggattcatttattacgacaattgtggttacaacatcccttctcccctttgcttgacaaacttctaccaagaaaacaaggagaacttcaagtgtccccttgggtagctctgctccacgaaaccctgctccagccagagttggaattaacctctccttccttcttgctcccagttaactttgtgcttgtaagttatgtgaaacattcattacttgagatggtaattatttacctaattgaccactctctcaactggatgcttttgaaagagcaggatcttactctctcttacagctccctcagcatggagtaatgaagagtgttctttaataccaagggacaaagaaagctgactgggatcggtctgccacatgctagttgcttcagttatttttt

SEQ ID NO: 81025 - DNA, 6164 bp, Homo sapiens
  misc_feature (1)...(6164): n = a,t,c or g
  sig_peptide (4243)...(4108): this location contains the signal peptide sequence, MLGSICNVMLLMLAASIPEICTFGPTKLAANCNWMPSRVARLPSV, Run with SignalP
  misc_feature (100)...(5595): similar to gi5901529 in the genepept database release 114, Run with FASTXY 3.3t00, default parameters
tttcgtgagtgtgagtgtgagtgggtgtgggtgcgagccgggccgccgacgatgccgcggggccgccccccgaagcccagggagagcaaggcgcgcggcgactccgatggagttttaacattgaatgcggagaacactaattatgcctatcaagttccaaacttccataaatgtgaaatctgtctactatcttttccaaaagaatcccagtttcaacgccacatgagggatcacgagcgaaatgacaagccacatcgatgtgaccagtgcccccaaacatttaatgttgaattcaacctgacacttcataaatgcacccacagcggggaagatcctacctgccctgtgtgtaacaagaaattctccagagtggctagtctcaaagcgcatattatgctacatgaaaaggaagagaatctcatctgttctgagtgtggggatgagtttactctgcagagtcagctggccgtgcacatggaggagcaccgccaggagctggctggaacccggcagcatgcctgcaaggcctgcaagaaagagttcgagacctcctcggagctgaaggaacacatgaagactcattacaaaattagggtatcaagtacaaggtcttataaccggaatatcgacagaagtggattcacgtattcgtgtccgcactgtggaaagacgtttcaaaagccaagccagttaacgcgacacattaggatacacacaggtgaaaggccgttcaaatgtagtgaatgtggaaaggcttttaaccagaagggggcgactgcagacccacatgatcaagcacacaggtgaaaaaccccatgcctgtgccttctgtcctgccgccttctctcagaaagggaatcttcagtcgcacgtgcagcgagtccactcagaggtcaagaatggtcctacctataactgtacagaatgtagttgtgtatttaaaagtttaggcagcttaaacacgcatatcagcaagatgcatatgggtgggccacagaattcaacaagttctacagagactgctcatgttttaacggccacactttttcagacgttacctcttcaacagacggaagcccaagccacgtcggcctcaagccagccgagctcccaggcggtgagcgacgtcatccagcagctcctggagctctcagagccggcgccggtggagtcggggcagtccccgcagcctgggcagcagctgagcatcacagtgggcatcaaccaggacattttacagcaagccttagaaaacagtgggctgttttcaattccagctgcagcacatcctaatgactcctgccatgccaagacctctgcaccacacgctcaaaacccagatgtttccagcgtttcaaatgagcagacggaccccacagacgcagagcaagaaaaagaacaggaaagcccggagaaactggataaaaaagaaaaaaaatgataaagaagaagtcaccgtttctacctggctccatccgcgaggagaacggcgtgcgctggcatgtgtgtccctactgcgccaaggagttccgcaagcccagcgacctggtccgccacatccgcatccacacccacgagaagcccttcaagtgcccgcagtgcttccgcgccttcgccgtgaagagcacgctgacagcgcacatcaagacgcacaccggcatcaaggcgttcaagtgccagtactgcatgaagagcttctccacctctggcagcctcaaggtgcacattcgcctgcacacaggagttagaccttttgcttgtcctcactgtgacaaaaaatttcgaacctcaggccataggaagactcacattgcttcccactttaaacatacggaattaaggaaaatgaggcaccagcgtaaacctgcaaaggtccgtgttggcaagacgaatgttccagtccctgatattcctttgcaggaaccaatcctcataactgacttaggtctcatccagcccattccaaaaaaccagtttttccaaagctatttcaataataattttgtcaatgaagcagatagaccatacaagtgtttttactgtcatcgtgcatataaaaaatcttgccaccttaaacaacacatcagatcccatacaggtgaaaaaccttttaaatgttctcagtgtggaagaggctttgtttctgcaggcgtgctcaaagcacacatcagaacacacacaggactgaaatctttcaagtgtctgatatgtaatggggctttcactactggtggcagcttacggcgacacatgggtatccacaacgaccttcgtccctatatgtgtccctattgccaaaaaacatttaagacttcactaaattgcaaaaagcacatgaaaacccacagatatgagcttgcccagcagctccaacagcatcagcaggcagcctcgatagatgacagcactgtagaccagcagagcatgcaggcctccactcaaatgcaggtggagatcgagagcgacgagctgccgcagacggcagaggtggtcgcagcgaaccccgaggccatgctggacctggagcctcagcatgtggtgggcacggaggaagcagggctgggccagcagttggcagatcagcccctggaagcagatgaagatgggtttgtggctccacaggaccctctgcgagggcacgtagaccagtttgaagagcagagccctgcgcaacagtccttcgaaccagcagggctaccccaaggttttacagtgactgatacgtaccatcagcagcctcagtttccacctgtccaacagctacaggattccagcacacttgagtctcaggccctctccacaagcttccaccagcagagcttgctgcaggctcctagctctgatgggatgaatgtaacaactcgcttgattcaggagtcatcccaagaggaactggacctgcaggcacaaggttcccagtttctggaggacaacgaggaccagagcaggcgctcttacaggtgtgactattgcaacaaaggctttaagaagtccagccacctgaagcagcatgtgcggtcgcacaccggggaaaagccctacaagtgcaagctctgtggacgcggctttgtttcctctggggtcctcaagtcccacgagaagacacacacaggagtgaaggcgttcagctgcagtgtgtgcaatgcttccttcaccaccaatggcagcctcacccggcacatggccacacatatgagcatgaagccttataagtgtccgttttgtgaggagggtttccgaactacagtgcattgtaaaaagcacatgaagagacaccaaacagtcccctctgctgtgtcagccactggagagacagaaggaggagacatttgtatggaggaagaggaagaacattctgacagaaatgcatcacggaagtctcgtcctgaggtcatcactttcacggaggaggagacagcccagttagccaagatccggccgcaggagagcgccacggtgtcagagaaggtcctggtgcagtccgcggcagaaaaggaccgcatcagtgagctgagggacaagcaggcggagctgcaggacgagcccaagcacgccaactgctgcacatactgccccaagagcttcaagaaacctagcgacctggtgaggcatgttcgaatccatactggagaaaagccatacaaatgtgatgaatgtggaaagagttttactgtgaaatccactctcgattgtcatgtgaagactcacacaggtcagaagctcttcagctgtcacgtctgcagcaacgccttctccacgaagggaagtctgaaggtccacatgcgcctgcacacgggagccaagcccttcaaatgcccgcattgcgagctgcgtttccgtacctcgggtagaagaaagacacacatgcagtttcattataaaccagacccaaagaaggccagaaagcctatgactcgaagctcatcggaaggactgcagcctgtaaacctcctcaactcctcctctactgacccaaacgtgtttatcatgaacaactctgttctaacaggacagtttgatcagaatctgctgcaaccaggactggtgggccaagctattctccctgcctctgtgtcagctgggggtgacctgaccgtgtctctgacagatgggagcctggctaccctagaaggcatccagttacagttggctgctaacttggttggaccaaatgtacagatttctggaatcgatgctgccagcattaataacattacgttgcagattgatccaagcattctgcagcagacgctacagcagggcaacctattggctcagcagctcacgggggagcctggcctggccccacagaacagctctctccagacatcggacagcacggtccctgccagtgttgtcatccagcccatctcaggcctgtccttacagcccacagtgacctctgcgaacctgaccataggcccgctgtctgagcaggattcagtgctgaccactaacagcagtgggacccaagacctcactcaagtgatgacttcgcaaggtctagtgtccccctccggcggtccccacgagatcaccctgaccattaacaactccagcctgagccaggtcctggcacaggccgctgggcccactgccacgtcttcctcggggtctccacaggaaattaccctgactatctccgaacttaacactacaagcggaagccttccttcaacaacaccgacgtctccatcggccatctcgactcagaacctggtcatgtcctcgtcgggcgtgggaggtgacgctagtgtcacgctgacgctggccgatactcagggtatgctatctggaggcctggacactgtcacactcaacatcacctctcagggtcagcagttcccagcgctcctcacggatccctctctctcgggccagggtggagcaggctcgccgcaagtcatactagtgagccacacgccacagtcagcgtctgctgcttgtgaagaaatagcctaccaggtagctggcgtctctgggaacctggccccgggcaaccagccagagaaggagggccgggcgcaccagtgcctggagtgtgaccgcgccttctcatcggcggcggtgctcatgcaccacagcaaggaggtgcatggccgggagcgcatccacggctgccccgtgtgcaggaaggccttcaagcgcgccacgcacctcaaggagcacatgcagacacaccaggccggcccctctttgagctcccagaagccaagagtgtttaaatgtgacacttgtgagaaggcatttgccaaaccaagccagctggagcgccacagccgcatacacacaggggagcggccgttccattgcacgctttgtgagaaagccttcaaccagaagagtgcgctgcaggtgcacatgaagaagcacacgggggagcggccctacaagtgtgcctactgcgtcatgggcttcacgcagaagagcaacatgaagctgcacatgaagcgggcgcacagctatgctggagctctgcatgagtctgcaggtcacccggagcaggacggggaggagctgagccggaccctccacctggaggaggtggtgcaggaggctgccggcgagtggcaggccctcacccacgtcttctgatgcgagttggaagtacacctttaagaatgtttctgaagttacgttttgtgaagagcaaagcacttggaatctctgttttaaagcttcaagtgttaaaaatgctacaatagttttttatctataaaattatctaaagaatcattgtctttcagagactcataggaaaaaaaaactgggaaaagtgtcaccgcattgttctcttttgtctacaaatcactgaactcaggtactactgtagggcagtttcctcctcagtctcctccgtgggctagtgtgtctaggttcacggagggcaattaactggggtcttacttatccattgtaggtgtggatttctttgtattagcaaagacaaaaacgctaacatgggaaaaagtatgtcaggattttccttcatgtttctggttataagaaggcatagcttaacaaaggcaagcgtaaggattggagggcatggaagttccaggaaaaaaaagtgttattaacacacagggggagttttttccnctcttttnctctgtggcattttggaaattagtccaaatggggnctcttttccggtctaccct

SEQ ID NO: 81026 - DNA, 601 bp, Homo sapiens
  sig_peptide (152)...(287): this location contains the signal peptide sequence, MLLLLERMALCPVLDVHTHLGCIICVFDVALSRELALLCRKSNWW, Run with SignalP
  misc_feature (245)...(126): similar to gi4377285 in the genepept database release 114, Run with FASTXY 3.3t00, default parameters
tgacggtaccgttaccggacttcccgggtcgacgatttcgtggccatacagggtgtgcgtcctagtgtgtgaatcaggccctgtgtggacatggtcgtgccagcggagctcgggaggcctgccgcgccgcaccgagaagctgctgtgtgtgatgcttttgcttctggagaggatggcactgtgccctgtgcttgatgtacacacacatttggggtgcatcatctgtgtgttcgatgtggctttgtcaagggagctagcattattgtgccggaagtcaaactggtgggttattaactggttgtgaatatgtcttttttatatgggtatagtattcaaagtttctgtggtgaattacagctttaaaaaaactttttttttcagtgagttgtaaatgtagctgattgtgggaggaggtggaattaatatccttccccttaaaacatatttttatactttttaacattgtaagaactatctgatgatagaactctcacaggcaaataactatcatcatgtatttttgcaagtaatacatttagcaaagcatcattatttggtcaaatatttgtatttttaccatgcttccttcatattttaaaat

SEQ ID NO: 81027 - DNA, 5944 bp, Homo sapiens; identical to SEQ ID NO: 61273
  misc_feature (1)...(5944): n = a,t,c or g
  sig_peptide (47)...(182): this location contains the signal peptide sequence, MKSGSGGGSPTSLWGLLFLSAALSLWPTSGEICGPGIDIRNDYQQ, Run with SignalP
  misc_feature (47)...(4148): similar to gi804990 in the genepept database release 114, Run with FASTXY 3.3t00, default parameters

SEQ ID NO: 81028 - DNA, 923 bp, Homo sapiens
  sig_peptide (121)...(256): this location contains the signal peptide sequence, MGPPSACPHRECIPWQGLLLTASLLTFWNAPTTAWLFIASAPFEV, Run with SignalP
  misc_feature (121)...(834): similar to gi3549152 in the genepept database release 114, Run with FASTXY 3.3t00, default parameters
cctttcgttcgacccacgcctccgggacagcagagacaacagtcacagtaaccctgtctagagcgttcctggagcccaagctcctctccacagaggaggacagagcaggcagcagagaccatggggcccccctcagcttgtccccacagagaatgcatcccctggcaggggctcttgctcacagcctcacttttaactttctggaacgcacccaccactgcctggctctttattgcatcagcgccctttgaagttgctgaaggggagaatgttcatctctctgtggtttatctgcccgagaatctttacagctatggctggtacaaagggaaaacggtggagcccaaccagctaatcgcagcatatgtaatagacgacactcacgttaggactccagggcctgcatacagcggtcgagagacaatatcacccagtggagatctgcatttccagaacgtcaccctagaggacacgggatactacaacctacaagtcacatacagaaattctcagattgaacaggcatctcaccatctccgggtataccaagtcagtggcttaacccctccatccaagccagcagcaccacagtcaccgagaagggctccgggggtcctgacctgccacacaaataacactggaacctctttccagtggattttcaacaaccagcgtctgcaggtcacgaagaggatgaagctgtcctggtttaaccatatgctcaccatagaccccatcaggcaggaggacgctggggagtatcagtgtgaggtctccaacccagtcagctccaacaggagcgaccccctcaagctgactgtaaaatcagatgacaacactctaggcatcctgatcggggtcctggttgggagtcttctggtggctgcacttgtgtgtttcctgctcctccgaaaaactggcag

SEQ ID NO: 81029 - DNA, 4784 bp, Homo sapiens
  misc_feature (1)...(4784): n = a,t,c or g
  sig_peptide (3819)...(3684): this location contains the signal peptide sequence, MLVLLVLRVSLAALVKMELLVRWAPVACLVREVALEPLALLVLVE, Run with SignalP
  misc_feature (4547)...(243): similar to gi30058 in the genepept database release 114, Run with FASTXY 3.3t00, default parameters
ttttttttttttggtaaggttgaatgcacttttggtttttggtcatgttcggttggtcaaagataaaaactaagtttgagagatgaatgcaaaggaaaaaaatattttccaaagtccatgtgaaattgtctcccattttttggcttttgagggggttcagtttgggttgcttgtctgtttccgggttggggggaaagttggttgggtgggagggagccaggttgggatggagggagtttacaggaagcagacagggccaacgtcgaagccgaattcctggtctggggcaccaacgtccaagggggccacatcgatgatgggcaggcgggaggtcttggtggttttgtattcaatcactgtcttgccccaggctccggtgtgactcgtgcagccatcgacagtgacgctgtaggtgaagcggctgttgccctcggcgcggatctcgatctcgttggagccctggaggagcagggccttcttgaggttgccagtctgctggtccatgtaggccacgctgttcttgcagtggtaggtgatgttctgggaggcctcggtggacatcaggcgcaggaaggtcagctggatggccacatcggcagggtcggagccctggccgccatactcgaactggaatccatcggtcatgctctcgccgaaccagacatgcctcttgtccttggggttcttgctgatgtaccagttcttctgggccacactgggctgagtggggtacacgcaggtctcaccagtctccatgttgcagaagactttgatggcatccaggttgcagccttggttggggtcaatccagtactctccactcttccagtcagagtggcacatcttgaggtcacggcaggtgcgggcggggttcttgcggctgccctctgggctccggatgttctcgatctgctggctcaggctcttgagggtggtgtccacctcgaggtcacggtcacgaaccacattggcatcatcagcccggtagtagcggccaccatcgtgagccttctcttgaggtggctggggcaggaagctgaagtcgaaaccagcgctgggaggaccagggggaccaggaggtccaggagggccggggggaccaacaggaccagcatcaccagtgcgaccgcgaggaccagggggcccaatggggccagggagaccgttgagtccatctttgccaggagcaccagcagaagccagggggacctcggggaccagcaggaccagaggctccagagggaccttgttcaccaggagatgccaggatgggcagggggaccctggaggccagagaagccacggtgaccctttatgcctctgtcgccctgttcgcctgtctcacccttgtcaccacgggggccttggggtccggcggggccacgggcgccagcggggccgacgggaccggcgggaccagcaggaccagtctcaccacgatcaccactcttgccagcagggccaacggggccaggggcaccaggagcaccaggagcaccagggggtccagcggggccggtctcaccacggtcacccttggcgccaggagaaccgtctcgtccaggggaaccttcggcaccaggagccccctcacgtccagattcacccagggggtccagccaatccaggggggcccatgggaaccagggggaccacgttcaccacttgctccagagggaccttgtttgcccaggttcaccagaggggccaggaagaccagggaagcctctctctcctctctgaccaggcaggccgaccacaccacgctgtccagcaataccttgaggcccgggagtaccaggagcaccagcaggaccatcagcaccaggggatcctttctcgccagcagggccagggggaccagggggaccaacttcaccaggacgtccagcagggccagtctcaccacggggacctttgccgccttctttgccagcaggaccaggagggccagggggtccagcatttccagaggggccaggaggaccgactcggccagcagcaccagggaaaccagtagcaccagggggaccagcgctgccggcgagcacctttggctccaggagcaccaacattaccaatggggccagggggtccagcgggtccggcagggccagggggaccagcatcgcctttagcaccagcatcaccaggttcgcctttagcaccaggttggccgtcagcaccaggggggccagcaaagccagcagggccggggggaccaggctcaccacggtctccgggggcaccacgagctccagtgggaccagcagggccgctgggaccactttcacccttgtcaccaggggcaccagcagggccaggaggaccaatggggccggtcagaccacggacgccatctttgccaggagagccatcagcacctttgggaccagcatcacctctgtcacccttaggccctggaagaccagctgcaccacgttcaccaggcattccctgaaggccaggggcgccctggctaccgggagctccaggggcaccagcatcacccttagcaccatcgttgccgggagcaccgttggcccctcggggaccagcaggaccagggggaccttgcacaccacgctcgccagggaaacctctctccgcctcttgctccagaggggccaggggcgcaaaggtctccaggaacaccctgttcaccaggtttgcctgcttcacctggaggaccagcaggaccagggagaccctggaatccgggggagccagcagggccttgttcccccctcttttcacaggggacccagaagggccagggggtcccttgagttcacaccttctccatttttccagcaaggaccgaaaaggcccaggggtccgggaacaacctcgctctccagccttgccgggcttttccnagcagcacctttaggtccagggaatcccatcacaccagcctgaccacgggcaccaggtgggcctgggggtccggggcgaccatcttgaccgggcgggaaccaaggggggccagttttgccatcaggaccaagggctgccagggcttccagtcagacccttggcaccaggcagaccagcttcaccgggacgaccagcttcaccaggagatcctttggggccagcagggccaggagaaccacgttcaccagcgggacccttgggaccagcaacaccatctgcgccagggaaaccacggctaccaggtccaccacgctcgccagggggtccgggcaggccagtgggtccgggttcacctcgagctcctcgctttccttcctctccagcagggccagggggtccttgaacaccaacagggccaggctctcccttagcaccagtgtctcctttgctgccaggagcaccaggttcaccgctgttacccttgggaccaggagggccgccggggccctggggtccagaggggcctcgggcaccagggaagccaggagcaccagcaataccaggagcaccattggcacctttagcaccaggctctcccttagcaccagtgtctccagcagggccagcagcaccagcagggccaggggggccaggctcaccacgcacaccctggggaccttcagagcctcggggcccttggggaccagcttcacccttagcaccaacagcaccagggaagccaggaggaccagcggggccggtgggaccagggggcccggcagcaccagtagcaccatcatttccacgagcaccagcagggccaggggctccagggcgacctctctcaccaggcaggccacgggggcccatctgaccaggagctccattttcaccagggctgccaggctcacccttaggaccagcaggaccagcatctcccttggcaccatccaaaccactgaaacctctgtgtcccttcattccagggaggccagctgttccgggcaatcctcgagcaccctgaggcccaggaggcccacgctcaccaggacgaccaggttttccagcttccccatcatctccattctttccagggggacctgggggacctcggggacccatgggacctgaagctccaggctcgccaggctcaccagggggaccttggaagccttggggaccaggtgcaccaggggggccagggagaccacgaggaccagagggacccatggggccaggcacggaaattcctccggttgatttctcatcatagccataagacagcttggggagcaaaagtttccctccgaggccagggggtccgggaggtccggggggtccggggggtccgggaagtccaggctgtccagggatgccatctcggccaggggggcctgcgggtcccccttgggcctcgggggcccagtgtctcccttgggtccctcgacgcccggtggtttctttggtcggtgggtgactcttgagccgtcggggcagacgggacagcactcgccctcggggacttcggcgccggggcagttcttggtcttcgtcacagatcacgtcatcgcacaacaccttgccgttgtcgcagacgcagatacggcagggctcgggtttccacacgtctcggtcatggtacctgaggccgttctgtacgcaggtgattggtgggatgtcttcgtcttggccctcgacttggccttcctcttggccgtgcgtcaggagggcggtggccgcttaagaggagcaggagccggaggtccacaaagctgaacatgtctagaccctagacatgtagactctttgtggctggggagggggttagcgtccgctcatgcgtggcctcacactccgcgtgcctcctgctccgaccccgaggagaaactcccgtctgctgcccc

SEQ ID NO: 81030 - DNA, 562 bp, Homo sapiens
  misc_feature (1)...(562): n = a,t,c or g
  sig_peptide (336)...(201): this location contains the signal peptide sequence, MVILPLLLLITTPPMTFLAFLLTLILSCKNCSKLAASMIRLLWGG, Run with SignalP
  misc_feature (161)...(489): similar to gi161631 in the genepept database release 114, Run with FASTXY 3.3t00, default parameters
atggctcctgtggttagtatggctccgcgtgaggcctcggctccaggggaggcacgtgggcctcgccgagcccggcatctacccaggctcgctggggacggcgccctgcagcgtcctgctggggtgggctggcagaaaaagcttgtggtaaaggggggcaaaaaaaaagaagcaggttctgaagttcactcttgattgcacccaccccatagaagacggatcatggatgctgccaattttgagcagtttttgcaagagaggatcaaagtgagcagaaaagctaggaatgtcattggaggggttgtgatcaaaaggagcaagggcaagatcaccatgacttccgagatgcctcttcccaaaaggtatttgaaataagaaatatttgaagaagaacaatctacgtgattggacgtgcgtaactgctaacagcaaaaggggttatgaattacgttacttccaaattcccccgaacaagcaagaggaggaagncgaggaataataatcacttatgtgaatattttatacgaattcttaataacggggttccaaaagatgcgccgtt

SEQ ID NO: 81031 - DNA, 1182 bp, Homo sapiens
  sig_peptide (4)...(139): this location contains the signal peptide sequence, MITHIVHHPWPPWAQGVTASCSFSLPVLTTVCLQPTLFFHVLSTT, Run with SignalP
  misc_feature (444)...(262): similar to gi338425 in the genepept database release 114, Run with FASTXY 3.3t00, default parameters
tgtatgattactcacattgtccaccatccctggccaccctgggcacaaggtgtcactgccagttgctccttttctttgccagtcctcaccaccgtctgtcttcagcccacactgttcttccatgttttatcgacaactgtccagtggggtgggggggcttcagggaaggaaccagggtgcacccagcaatggtgaccgagagtgaggaaagggctaccgagacagaagcattttgtcttcctgccctgccgtctccagaagctgtggccagcaggcttggtcacaggcagatgctggtggactgggcctgggaggtgaggacacgtgcccagtcttgcctgctcaagcccggctcccgcctctgatcccatggagggctgggtcccaggcagggctgctgagggcacgaaggtgctggctgagggggcgggtggggctgcatctgcccccaaggggctttctataaatgtacatgcagccatgttcaagctggcaggggcccaggtcccaggtggcctcccaggagccaccagccctgcctttctttggcttggtgaggcttttctggggctgccctctggcttcctgccagcctcacccctctggggaaccacgtggcctggctgatggctctgctgccgtcctgtgtccctgcaggcctgtatggctaccatgtttcagtgtgtgcacttctggggctggaagtccctggagcatccctcagggccaagtgataccgctactgatgacaagatgaccgttttccagacaaccatgtgctccatcctgactcggaaaaagccggctgttctctaccgcttcttgctagaaacaatggcctatgttaaaaataacttgtcaagaatcagaatcgctgcttgcaacttggcaggaattattatgaagcagatgtctacacattatctgaaaaagctggacttcccagcattacggaattccctccaggaactacagctggacccggatcccggggtcaggagggcagccctggagacgctcacagtcttggatagctgtagccagcatgggtttctggcttccccccccaggaatgccctagggggcccaaacataaagagggagacggccttcttaaggcccaaggccagccccttttcaattgagcgccgagcaggcctcatccccgcggcagcaagcgcg

SEQ ID NO: 81032 - DNA, 1600 bp, Homo sapiens
  sig_peptide (6)...(141): this location contains the signal peptide sequence, MLVMAPRTVLLLLSAALALTETWAGSHSMRYFYTSVSRPGRGEPR, Run with SignalP
  misc_feature (6)...(1057): similar to gi307221 in the genepept database release 114, Run with FASTXY 3.3t00, default parameters
ccgagatgctggtcatggcgccccgaaccgtcctcctgctgctctcggcggccctggccctgaccgagacctgggccggctcccactccatgaggtatttctacacctccgtgtcccggcccggccgcggggagccccgcttcatctcagtgggctacgtggacgacacccagttcgtgaggttcgacagcgacgccgcgagtccgagagaggagccgcgggcgccgtggatagagcaggaggggccggagtattgggaccggaacacacagatctacaaggcccaggcacagactgaccgagagagcctgcggaacctgcgcggctactacaaccagagcgaggccgggtctcacaccctccagagcatgtacggctgcgacgtggggccggacgggcgcctcctccgcgggcatgaccagtacgcctacgacggcaaggattacatcgccctgaacgaggacctgcgctcctggaccgccgcggacaccgcggctcagatcacccagcgcaagtgggaggcggcccgtgaggcggagcagcggagagcctacctggagggcgagtgcgtggagtggctccgcagatacctggagaacgggaaggacaagctggagcgcgctgaccccccaaagacacacgtgacccaccaccccatctctgaccatgaggccaccctgaggtgctgggccctgggtttctaccctgcggagatcacactgacctggcagcgggatggcgaggaccaaactcaggacactgagcttgtggagaccagaccagcaggagatagaaccttccagaaagtggggcagctgtgggtggtgccttctggagaagagcagagatacacatgccatgtacagcatgtaggggctgccgaagcccctcacccctctgagatggggagcggtcttcccagttccaccgtcccccatcggtgggcattggtgctgggcttgggctgtccctagcagttggtggtcatcgggagctgtggtcgctgctgtgatgtgtaagcaggaagagttcaggtgggaaaaggagggagcttactcttcagggcctggcgtgccagcgaccagtgcccaggggcttttatgtgttctctccacaggcttgaaaaagccctgagacaagctgtccttgtgagggactgaagatgcaggatttcttccacgccctcccctttgtgacttccaagagccctctggcatctcctttctgcaaaggcaccctgaatgtgtctgcgtcccctgttagcataatgtgaggaggtggagagacagcccaacctttgtgtccactgtgacccctgttccccatgctgacctgtgtttcctccccaagtcatctttcttggtcccagaaaggggggggctggatgtctccatctctgtctcaactttacgtgcactgagctgcaactttttactttcctactggaaaataagaatctgaatataaaatttgtttgttttctcaaaatatttgctatgagaggttgatggattaattaaataaggtcaattccctggaatgttgagagcaggcaaataaagacctgagaaccttccagaatctgcaaaaaaaaaaaaaa

SEQ ID NO: 81033 - DNA, 555 bp, Homo sapiens
  sig_peptide (150)...(285): this location contains the signal peptide sequence, MLFLGALAYPAVKWGCPFGEECEFCQVGPDNIAVRWRSLFQTLPV, Run with SignalP
  misc_feature (493)...(363): similar to gi170454 in the genepept database release 114, Run with FASTXY 3.3t00, default parameters
ggcacgaggcagacggccacccctgaggttgcaggagctgtgagttctggtggccagtggtggcagccagtgctctggcacaagggacattcctaaaagtttagattttgtgacttgagggccctgttgccgtttgacctgggaggaatatgttgttcctcggagccttggcttacccagctgtaaagtggggttgcccttttggtgaagaatgtgaattctgtcaggttgggccagataacatagctgtcaggtggcgctcactattccaaactctcccagttcccctcatttttcactgattttcacacattaatccagactggatgttttctcagtgactgaggtgtttggtgtggcagctgactggttctgtcaatggggaagttaccgaggtctgaggtgggtcaccctggggcggtggttgccaacataggggagggttgcagtggcctttggaggcctggacctgggtggagggctcactttaggctagaggccttaatctggtgtttcttttgacatactcaggtaggagtcacatttgaaaagaac

SEQ ID NO: 81034 - DNA, 537 bp, Homo sapiens
  sig_peptide (196)...(331): this location contains the signal peptide sequence, MCSWVSLFLSSLIISPLIDVFRSGLANYGWQVKSGLPPVYVNKIL, Run with SignalP
  misc_feature (190)...(32): similar to gi3139158 in the genepept database release 114, Run with FASTXY 3.3t00, default parameters
attaagtgttgttgatgaattgacccctctgtcatcatgaaatggtcccctttatcccaggtagtttccgttgttctgaagtctctgtctgatacaaacttttcttttgattagtatttacatgatatatctttttcatccttttacttttaacctatttatatcattatacttgaagtggatttcttgtagagaatgtgtagttgggtctcactttttttatctagtctgataatctctcctttaattgatgtgtttagatcagggttggcaaactatggctggcaggttaaatctggcctgccacctgtttatgtaaataaaattttattggaacacagccatgcccccatgccaaccagtggtttagaccatttgcacttaatgtaattttgatatagttgaatgaaactgtgccatcttactatttgttttctgttggctggagttgtttcttttttccttgattatctgcctgtttttggatggattattttttatgaatctattttatctttcctgttggtttgtaactta

SEQ ID NO: 81035 - DNA, 388 bp, Homo sapiens
  sig_peptide (197)...(332): this location contains the signal peptide sequence, MYKRSSARFFLEIIFFFFSLVQASTISCVDSCKTDRVSSFSWPNP, Run with SignalP
  misc_feature (144)...(270): similar to gi2224361 in the genepept database release 114, Run with FASTXY 3.3t00, default parameters
atgaatctaggtcccaaattaagttcatcattgtcccctccttccccctacacccatcctcttctttcaggctccctgcccatgttttttttgtttgtttctttttttttcgcctgcccatgttcttgattaactgtcaaatcagtcaggctcaaacttttgaaaattttaacgccctctttttttctcccttctcatgtataaaaggagttctgcacgtttttttcttgaaattatctttttcttcttctccctagttcaagcttctaccatatcatgtgtggatagttgcaaaaccgacagagtgtccagtttttcctggcccaatccactttgtgtggatacttctcatactaatcttctttaaatgctattttcatcgatgcct

SEQ ID NO: 81036 - DNA, 329 bp, Homo sapiens
  sig_peptide (180)...(315): this location contains the signal peptide sequence, MLLTCCSPAWNVPYLANIILLLCDSAGHIPSPEPEQMLPSGLPWT, Run with SignalP
  misc_feature (147)...(300): similar to gi409424 in the genepept database release 114, Run with FASTXY 3.3t00, default parameters
ttagctttgttgaaacggcggctaatgttgttttaacattcacattccttacactggaattaaagcccttcgtaactgaccccacctcctgttcaaaagtatttcccattattttcctatatggaccctgtagcaaacaaccttttattttggaacttggcactggcagggctacctctatgcttttgacctgctgctcccctgcctggaatgtcccctacctggctaacatcatactgctcctctgtgactctgctggacacattccttcccctgagcctgagcagatgctcccctctgggctcccatggacccctctgtgcgcctgt

SEQ ID NO: 81037 - DNA, 1293 bp, Homo sapiens
  sig_peptide (34)...(169): this location contains the signal peptide sequence, MLLFLLSALVLLTQPLGYLEAEMKTYSHRTMPSACTLVMCSSVES, Run with SignalP
  misc_feature (34)...(1171): similar to gi292507 in the genepept database release 114, Run with FASTXY 3.3t00, default parameters
cagctcctggggcctaacaaaaagaaacctgccatgctgctcttcctcctctctgcactggtcctgctcacacagcccctgggctacctggaagcagaaatgaagacctactcccacagaacaatgcccagtgcttgcaccctggtcatgtgtagctcagtggagagtggcctgcctggtcgcgatggacgggatgggagagagggccctcggggcgagaagggggacccaggtttgccaggagctgcagggcaagcagggatgcctggacaagctggcccagttgggcccaaaggggacaatggctctgttggagaacctggaccaaagggagacactgggccaagtggacctccaggacctcccggtgtgcctggtccagctggaagagaaggtcccctggggaagcaggggaacataggacctcagggcaagccaggcccaaaaggagaagctgggcccaaaggagaagtaggtgccccaggcatgcagggctcggcaggggcaagaggcctcgcaggccctaagggagagcgaggtgtccctggtgagcgtggagtccctggaaacacaggggcagcagggtctgctggagccatgggtccccagggaagtccaggtgccaggggacccccgggattgaagggggacaaaggcattcctggagacaaaggagcaaagggagaaagtgggcttccagatgttgcttctctgaggcagcaggttgaggccttacagggacaagtacagcacctccaggctgctttctctcagtataagaaagttgagctcttcccaaatggccaaagtgtgggggagaagattttcaagacagcaggctttgtaaaaccatttacggaggcacagctgctgtgcacacaggctggtggacagttggcctctccacgctctgccgctgagaatgccccccttgcaacagctggtccgtagctaagaacgaggctgctttccctgagcatgactgattcccaagaccagagggcaaagtttcaccttaccccacaggagagtccctgggtcttattccaacttgggccccaggggagcccaacgatgatggcgggtcagaggactgtgtggagatcttcacccaatggcaagtggaatgacagggcttgtggagaaaagcgtcttgtggtctgcgagttctgagccaactggggtgggtggggcagtgcttggcccaggagtttggccagaagtcaaggcttagaccctcatgctgccaatatcctaataaaaaggtgaccatctgtgccgggaaaaaaaaaa

SEQ ID NO: 81038 - DNA, 1479 bp, Homo sapiens
  sig_peptide (491)...(626): this location contains the signal peptide sequence, MGRWALDVAFLWKAVLTLGLVLLYYCFSIGITFYNKWLTKSFHFP, Run with SignalP
  misc_feature (491)...(1480): similar to gi4680669 in the genepept database release 114, Run with FASTXY 3.3t00, default parameters
tttcgtggagattccggcctggagctcccagggccgaggtcactttggtggcagttcatggagaatagcttgaggtgacaagacagcagacacgacgtgggtctctgggactgcctgtgccgttgtgggcagcccctccagagccctgagtcacgcagccttcagaggcacccatggctacgagaagcacagtctctgcctgaggctccagagcggccctttttccccagcagcagaccttgggacctgtgagcgctgcatccaattaaccatgggaagggtcagcaccagccaccagccccttaggtgaggactctgcctggggctctgctgatggttccgaatcatggagctgcagagagctcctccagcctggagacgttcttggtgaaagctgtggtctaactccaccggctcttcctgcacattgtattcaagaggggtgcctgcccccgctgactcaggagctccggtgctgcagccgccacgaatggggaggtgggccctcgatgtggcctttttgtggaaggcggtgttgaccctggggctggtgcttctctactactgcttctccatcggcatcaccttctacaacaagtggctgacaaagagcttccatttccccctcttcatgacgatgctgcacctggccgtgatcttcctcttctccgccctgtccagggcgctggttcagtgctccagccacagggcccgtgtggtgctgagctgggccgactacctcagaagagtggctcccacagctctggcgacggcgcttgacgtgggcttgtccaactggagcttcctgtatgtcaccgtctcgctgtacacaatgaccaaatcctcagctgtcctcttcatcttgatcttctctctgatcttcaagctggaggagctgcgcgcggcactggtcctggtggtcctcctcatcgccgggggtctcttcatgttcacctacaagtccacacagttcaacgtggagggcttcgccttggtgctgggggcctcgttcatcggtggcattcgctggaccctcacccagatgctcctgcagaaggctgaactcggcctccagaatcccatcgacaccatgttccacctgcagccactcatgttcctggggctcttccctctctttgctgtatttgaaggtctccatttgtccacatctgagaaaatcttccgtttccagggacacagggctgctccggcgggtacttggggagcctcttccttggcgggattctcgcctttggtttgggcttctctgagttcctcctggtctccagaacctccagcctcactctctccattgccggcatttttaaggaagtctgcactttgctgttggcagctcatctgctgggcgatcagatcagcctcctgaactggctgggcttcgcctctgcctctcgggaatatccctccacgttgccctcaaagccctgcattccagaggtgatggtggccccaaggcct

SEQ ID NO: 81039 - DNA, 1790 bp, Homo sapiens; identical to SEQ ID NO: 61165
  misc_feature (1)...(1790): n = a,t,c or g
  sig_peptide (78)...(213): this location contains the signal peptide sequence, MESALPAAGFLYWVGAGTVAYLALRISYSLFTALRVWGVGNEAGV, Run with SignalP
  misc_feature (78)...(1017): similar to gi5531815 in the genepept database release 114, Run with FASTXY 3.3t00, default parameters

SEQ ID NO: 81040 - DNA, 5612 bp, Homo sapiens; identical to SEQ ID NO: 80963
  sig_peptide (1431)...(1566): this location contains the signal peptide sequence, MVLSAPSLWPCSSFSISCLHVGLTAFLFQVAFLCLLCCVELLLDV, Run with SignalP
  misc_feature (51)...(2673): similar to gi1263890 in the genepept database release 114, Run with FASTXY 3.3t00, default parameters

SEQ ID NO: 81041 - DNA, 2554 bp, Homo sapiens
  sig_peptide (2375)...(2240): this location contains the signal peptide sequence, MTSKFILVSFILAALSLSTTFSLQPDQQKVLLVSFDGFRWDYLYK, Run with SignalP
  misc_feature (2376)...(942): similar to gi5924007 in the genepept database release 114, Run with FASTXY 3.3t00, default parameters
ttttttttttatccaatttgaattttaaaggaaataaaaggtgatttaatttccaaaggggcaattaattacaaccaagagaaaacattgctgagatggtgcctggttgcttctattcaggccattgctgaactatatagaaaaaaagtatattcatggtgtcttcattattatgaaaatcacagtaatatgactcatcaggaaatcacaataattttatgacagaaacaatatatttacgaacgaatctgtcagtatttgactctcttttgagggaaaaataaatgaaaaccacgttctctggaaagaaataagacaagaaatgcccacagttgcattctgctgttgggaatacatctccaaaattcaagggtcaaagggttttacacattaattttcaatacttatcaccttcttcttctctcaatttatggagatagatttctacgttcattattcgggattattagaaatttccttcagtttgaacaatgcgtaacaagtattctgtgacatgggtgcaaaaagttgtcattttcaatcaagttataagacataactgtgcataaagtgcatttcaaattaaagtacccatcaggagagaaatttaaagtgcaatacataaggtgctttacatagtgcaaagttgctaaatatatacattatctgcgccaagtccaaataaagcaggatcttatctatccctatgctacagtgaacaatggagacatactctcacatctttattcctttgcaggtgtaagtattttggtccgtgtgtgtgtatgtgtgtgtgtgtgtgtgtgtatacctaaatatgtaactgcttaatggtttctgcaaatgtttggaactggtttcccagaatttgaaacctttaaacactgacataattatggaatctccacttcaatatgcaaatccacttcaaagtaacattaggcttgtaataatggttgagctatttcagcatgcatatcttgtaaggcaggtatttgactgtgaattaaatgcttaatgaaaattacaaaaaaatacaatcactataatgctgccaagagagacccctatgaaataagggtatgacccctcttggtcatattctgctggtttaacactaccagggaggagtatagtactctgtgtataagggaccacccttggcattgctgaattgagcagatcctggacattccagaatgatccattgtgtggcatggcggtgatattgaggaggtggcatagtagtgggtacaaatctgtggagttcatggcttcttttgagaaattctttctgaaggcaggaccatgggctaaaaatattggatgcatatctgctaacgcattatggtaaccgtggttgcctaacagaaagtcatctgacttattctgtaaaatgtgccacccttcatcagccactgctatgattggttgaattcgactgttgtatttgtaatgccacctttctggaacgtcttcttttttgtaaacagtaagattaggatgagcgtgagttagtgcttcatagacttcatcaaatttaccttcttttggcaagatggctgctactggagattgatcaatcagggtatagtggtctttatccaggtactggtcaagttctattaacctttcctcagagcactgcgtcattccatgatcacttgtgatgattaggttcagagtgttccacaactttgcctttttcagcatttgtatgagatatcctaacttcttgtcaatatctgaaatgacaggccccatgagcggactgtcaggtcccaaatggtggcccatgtcatcagggtcttcccaatagagaagaccaagatttatgggctcttttgacgtaaaccattcaataattttggcaactctatcttcaaatgaaactgactcattgtaaggcatgtaatgagtaggaaagcgcttatgtatttttacatctgttccgggccacatggctgcaccactagtatgtcctgccctctggtttgtgatccatattggtgtcgcttcttcccaaaacttggaatcataaatattcatgtgatccaaggagaaagatttgttccgaataggatcaaacatatcatttgcaacaatcccatgattctctgcaaagaggccagttaccaaagtataatggttagggtaggtttttgtaataaaaacattagtaacttgcttcacgtgaacaccatatttcataatataatgaaaatggggcgttggaactttatataagtaatcccaacggaatccatcaaaagaaactagtagaaccttttgctggtctggttggagagaaaaggtggttgaaagactcagtgcagcaagtatgaaggacaccaagataaatttcgaagtcattttcaaagtacttgatcagttcagtgtaagataatcctcgcagcgatccgttcagtccgtattagtttggagcaacgggagggagggtctggaggagactccctcgggcgcgccgcgggtaacggcgggagggtgactggaggaacgcccccggaacgcgcaggagctcacctgcgctcaa

SEQ ID NO: 81042 - DNA, 551 bp, Homo sapiens
  sig_peptide (52)...(187): this location contains the signal peptide sequence, MKITGGLLLLCTVVYFCSSSEAASLSPKKVDCSIYKKYPVVAIPC, Run with SignalP
  misc_feature (86)...(309): similar to gi2935440 in the genepept database release 114, Run with FASTXY 3.3t00, default parameters
cagctgtagtgacaatctcagagcagcttctacaccacagccatttccagcatgaagatcactgggggtctccttctgctctgtacagtggtctatttctgtagcagctcagaagctgctagtctgtctccaaaaaaagtggactgcagcatttacaagaagtatccagtggtggccatcccctgccccatcacatacctaccagtttgtggttctgactacatcacctatgggaatgaatgtcacttgtgtaccgagagcttgaaaagtaatggaagagttcagtttcttcacgatggaagttgctaaattctccatggacatagagagaaaggaatgatattctcatcatcatcttcatcatcccaggctctgactgagtttctttcagttatactgatgatctgggtgggggacagagccagattcagagtaatcttgactgaatggagaaagtttctgtgctacccctacaaacccatgcctcactgacagaccagcattttttttttaacccgtcaataaaaaaataatctcccagaaaaaaaaaa

SEQ ID NO: 81043 - DNA, 2560 bp, Homo sapiens
  sig_peptide (1362)...(1227): this location contains the signal peptide sequence, MGRLSSSLAAMLIGILHMRSSFSGWKYSAKDWLMSDVDYFSFLFS, Run with SignalP
  misc_feature (2028)...(2146): similar to gi598396 in the genepept database release 114, Run with FASTXY 3.3t00, default parameters
ggggttgctttcattatcttcagatcagtgccacttctgtgctaacggtaagagatagacagataggcaatgaagtgttcacttaattaccttggtttttagtttactaattattacattcatcgtttttgtgatcacaaaaacacaaagaaggaggtctgcctggatgggattacaaagatttagccagtttcttggtatataacagaaggtaccacagtatcactctctattttgtaaatatttagctcctatgaaatgcacaatgcacaaccgcctatgaccatgtatcgtgtgctagtccgggaagccagcctacacatcaataggaacgcccaaacattattttcatatatcagtgcaaagaaagaaggttcgtaaacttctttaaaagttcagctttaatgacaaagatctattacatcagtctttttcttcaaataagatagatgtgaataaacaacttcaaacaggaggtactatggcctcttcaatacactgtagccagtgcactgggcccttggggatgcccagtgatatacacgttgaagcagtaatgtaagtctgtgagccactgttcctgaacacttccactcttcaatgtcgtgatattcttgatgatctgctgcaccaagatcgcattggtcaacatatgagtcctgaggggtgcatgctgaagcagcagtcgaagcagctggcccacaacaggcagctcctcaggcccaactctgttcacccgcaggctctgcagcatcaacctgaggactcgaggcaagagagccaggatggagacacagaccccccacagcttgtccctctttcttagatgttctgcttcccctttctctatagtgagcagaaaataaagaagactgtagcaacaagaagccagaaatggcagtagagtctcactaactacacaagtatgatccaggagcttacagataacaccaaaaacacagccagccgtgctgtcaggaattacagtcaacccaaccaaatgcttactgatggcactttgcaagatgtcaaagttctgacttcgggcaggaataaccaataaactgtgaaaaactgcctctgttacatcccagtggtgtaaaaattgatccaaatctgtaaggtagagaagcacaggggaaagctgtgtctggatgacatgaggaactcctcgaaggctctgaagccaagtcaactcctctttcgaaaaccctgtaagtgtggaaaataagaagctgaaatagtctacatcactcatcaaccagtctttagctgaatacttccacccagaaaatgatgatctcatgtgcagtatcccgataagcatggcagccaaacttgaactgagtcttcccataatacagcaacgacttaaccgagaaagcaaatcagccggcagactgggtaggaaatatacaagctgaaccaaacgctgctgagagtctgcagggagaaccaccacagcaccttcttgtggatcataaattcggagggcagtagcttgtaaactttttagtaattctttatttgctcgtgctgcagcggtatgaatgatatcgataagctgtgtagagagctcaggatttcgggagccaagatgagcaagttgcaatggtaagccagccagccaacgggataacactttactacgatatctgaatctacaagatctcagttcttctgtctgatagattttactgaaaaacttcaataacaaagtccgaactggaaggataaggcccctctgctgatataatgtataaactgccttaataagagtctctgtgtcctctctgtttggctgtatttgcattaacctccaggatactcccagcaatctgttcagttgcttactatttagcctagagccatcttcaagggtctctgttacaaatttccttatcatttctatccaactgcaatccttctgcaaagttgacgcatttgccagggagaccatgatatcagacagtgttaaattcagtaagagatgatctatgttattggagagaactgtgcaatgcttgatgcttttatttggctctttccttttgtgcttggttatttcttttaagacatatggaaaacgactcataaaatggtgtttaaaatcaataaggtagttctttcgaagccatgactccaatttatgggtttcatcctgttgtttagagagtttccacagaagggaaataatattaagaacttgctgcataacctgtagaggttctcgttctataccattcccaacaggagtagctagttgtggaggtacagcttcaacccagcattcaattagcaatggaattattatctcaataaatcctttcaggttttcagtagatgacaggccttcatccacaccactcagtcctccaaccagataccgtagcctgaactgtgaactgacatttggctgtgaacccccattttcataaacctggatgtgttgctggtcgttggcatgttccttccagttgataaaaatggagttgctagtggcatggggattttctttctgttcctgaagtccttcactttctctcaacctactggatcc

SEQ ID NO: 81044 - DNA, 1149 bp, Homo sapiens
  sig_peptide (540)...(675): this location contains the signal peptide sequence, MYRSWSWQQHLIGKVALFLHFCCLAVSCPFTAVSSLPLPDSSFPT, Run with SignalP
  misc_feature (599)...(1133): similar to gi53895 in the genepept database release 114, Run with FASTXY 3.3t00, default parameters
ggcacaacttatctggatcctctaattcggcttctttcagcgggcttcattcacgatgttaaccagaactgtatctcattcaaaggctcaactgggaaggatctgctttcacgctcacagaaacctggcctaattcatacccttgaattccagaactgaaggcttcaattcctagctggttcccattttcctactcagtattctctccaatatagaaactcgcttcatcaaggcctgcagactgaaaatgcaatatactctgcaaataacacagaatcacaagctgtataatccaatcatggtctgataatattgctatagcctactggttaaaaacaagtcactaagtctcttaacctactgacttgcttaattctaaccctaccagggttacatatgagagtgaataccaggaggcgggggcactgggaaccatctcaacagtctagcacagtgagttaattagataatcagcattgtaaataccaggaatggctttgacaggtgaaagcgtctgttttcagaggtgtccactcactatgtacaggtcctggagctggcagcagcatctgattggtaaggtggctctgtttctgcatttttgttgcttagctgtttcatgtccttttactgcagtgtcttcattgcctttgcctgacagttcttttcccactctcactccaacacttgggtgaactcctccttggcttagacttcacttcctcacaggcagccggttcttggtccttcccacccaaccccagtcaaggaaaggtccccctggctaatgctctcaaaatgctatgtctctgtcagagcacttatcacattctaatcaactgtttgtcttctaggttagaatttaagctctgtggtgacagagaccacatccatcttattctctgttgggtcccccgtgcctagcacatcacagctgctcaataaatattggcatgatgagtaaatagtcccacttggggggctgctttttcatttcaacaaagggggattcacttaagctctaatctttaaattttttgcgcgttgaccaccctttcttgtacatgaaattttcaccatttgggaaggcctcttttgaaaaaacacaccatggttttccaaatatctggctatgccaaaagggaactt

SEQ ID NO: 81045 - DNA, 974 bp, Homo sapiens
  sig_peptide (347)...(482): this location contains the signal peptide sequence, MVMLTLSICISTSLLGDTAGVSFSEECHTTMELFSIDLEIGNFLY, Run with SignalP
  misc_feature (602)...(432): similar to gi1311548 in the genepept database release 114, Run with FASTXY 3.3t00, default parameters
cttgacatgtagtaagtgctcatgaaatgtttgttcattgaataactgaattcaagaaccagtagacctctggatgaccctggtttcctgtttctgtggaccacaatgctctggggcagtgctgcgtatcagaggttcaagccatggctggagcagccacccctgaagtagacaccctaatatccttcccactgagttcctagttctacatgctggagtgaggctgtcaactctgaagtgtcagagtgtgtctgaaaatgattgctgtgaaaaataaaatatttcacattgcaggcctcatttttaagttatttttcccagagaacattttcatattttagaacttatggtaatgttaacactttctatttgcataagcacttccctgttgggagatactgcaggtgtaagtttttctgaggagtgtcataccaccatggaactattttccatcgatctggagatagggaacttcttgtatactctgagagagaacttctttgagatgtaaactagactgacctactttagaggctgcctgtatcctaattttctgttttaaaagagtgatggctgaacactgaaaagctcgggacattttagaactgtgctgcccaatatggtggccactagccatatgtggctatttaagtttaaattgaattaaaataaaatgaagtggaaaaaattaagttcatcaattatattagccacatgtaactgatgactagtggctacctaccatatatagaacatttctattattgcacattattctactggacaatgctggtttaggatgggaaaggcctgatggataatatcaaagccaccttaccacagacagagttttacagagcttggaagcaattcttactgggaacaccagatacttacttaccattttaactagcgtgtgggacaatatgatggttatggactttaagaatgttggcccccccccggatacaata

SEQ ID NO: 81046 - DNA, 508 bp, Homo sapiens
  misc_feature (1)...(508): n = a,t,c or g
  sig_peptide (360)...(225): this location contains the signal peptide sequence, MRGKVVAMMLFGLGAIKMTTDWWQFMDLHKKRELTELALFYPLSL, Run with SignalP
  misc_feature (166)...(284): similar to gi1402887 in the genepept database release 114, Run with FASTXY 3.3t00, default parameters
attagannacttggataacatgtataacatgattactactacactctaactggatattggaccttgggcctagaatcaggaacgagctctctcaagattgaattgtaagtcatatatttgaagaacccttgttgaataattcctctacctctggagtcatgtttttcttttttcattttgtcttgtccccagaatgtctaacaaaacagccaaatatacctctgtaaagacagagggtaaaataatgctagttctgtgagttctctcttcttgtgcaaatccataaactgccaccaatctgtagtcattttaattgcccctaaaccgaagagcatcatggcaactacctttcccctcatagagtgacactatcactagtcttattgaggccaaagttataaagatgggctctcgatctactaatattagtaaaatgggtttgggacttactaacatttgtgcttataagagacacacctgtgaaatagcacttggaaatgagattccc

SEQ ID NO: 81047 - DNA, 376 bp, Homo sapiens
  sig_peptide (83)...(218): this location contains the signal peptide sequence, MYEKLFLRKYKNYPCLPLLIKILLLFSPSTLTLYSFNRKRKGLDL, Run with SignalP
  misc_feature (113)...(56): similar to gi406956 in the genepept database release 114, Run with FASTXY 3.3t00, default parameters
ggcacgaggagctttgtcatcctgagataaccatcagataggagtaaatatcagcgcaccacttccctgtcactctacagggatgtatgagaaattatttttaagaaaatacaaaaattatccctgtctaccactcctcattaaaattcttcttcttttttctccttccacattaactctctattcattcaacagaaaaagaaaagggctggatctaaaggagcttgttctgttaggcatttaataccagactccttttctaacacctatttctcaagaatagcaaacctattttaaaagtgagccaactattcagcttgaatgacatactgttcattttttgaattctgatgtagacaattagaaaactttctca

SEQ ID NO: 81048 - DNA, 346 bp, Homo sapiens
  sig_peptide (111)...(246): this location contains the signal peptide sequence, MSACPHWGLLPLAFHISLPNAARSPLIWWETGREMEASQRICKKR, Run with SignalP
  misc_feature (179)...(306): similar to gi2183297 in the genepept database release 114, Run with FASTXY 3.3t00, default parameters
gaaatgccatcacatgggtacaaaagaaagaaaacagtcatcattcctccatgacagtgtttgacgctgagggtaatgatgaatgatgtacgtagtggggacatcaaattatgagtgcctgtccacattggggcctcctgcccctcgcatttcacatcagtctccccaatgctgcccgcagtcccctgatatggtgggagacaggaagggagatggaagcatcccagagaatctgtaagaagagaggctcaaaccacctgtccaaatgaagagttgctttctccctggggcaggctgcgttctcctcccttctgcttgtctggtttcaaatcaatgactatataaa

SEQ ID NO: 81049 - DNA, 663 bp, Homo sapiens
  sig_peptide (199)...(334): this location contains the signal peptide sequence, MHVRILRCVGLLSCVQLRVLPHWPGLRAFLPRHSPAAQSSSSRDF, Run with SignalP
  misc_feature (197)...(371): similar to gi3650458 in the genepept database release 114, Run with FASTXY 3.3t00, default parameters
ccctgcacccttctgtgaagaacccctgtgatttcaatcctgcagtgtgaagttgccacgactgagccagcatctctatccaagtctcctgggtgatagaacgcatatgtaggccaaactctgcagcactgatgcagctggtgatgactaaacatggcagatttacctagtcagtgactttatgcaggaagaaaccgaatgcatgtgcgcatcttgagatgcgtgggccttctgtcctgtgtgcagctgcgtgtgctcccccactggcccggcctgcgcgcttttctgccccggcactcgccagctgcccagtccagctcaagccgggattttccacggctgcctctgaacggtctccaagccgcagcttcctctcctccttctgagctccaagtaccattgctataaggggacaggagcagggtgggagattgtcctgagtcttgactctgactgtgctgggggcagggttatcacctttccacatcccactttcttcgtctttacagggggggagagcaacttttacctttgccatcccgaagcagggctgtggtggtaggaagatctttatttaagcggccggaagcctaattccctttaaggaggggttaattttaaattgggcactgggccgggcgttttaacaacatgcggaactgg

SEQ ID NO: 81050 - DNA, 342 bp, Homo sapiens
  misc_feature (1)...(342): n = a,t,c or g
  sig_peptide (172)...(307): this location contains the signal peptide sequence, MVLDHSSFTPLWKSLFIEGLWQPSIRSLIVFLLGCLITQCRPQPG, Run with SignalP
  misc_feature (269)...(152): similar to gi578468 in the genepept database release 114, Run with FASTXY 3.3t00, default parameters
aaccatttacccaagccaggtatgggagacagttgtcagatgaacacgtaaataaggccatgccccatttttagttttgtaatttatacggggaatgggggactctttgttccatccctccccagcatcacatctcagggttcggggctgaccaggattccgtaagtccacatggtgttggatcattcctccttcacccccctgtggaaaagtctgttcatagaggggttgtggcaaccctccataagaagcctcatcgtttttcttcttggctgtctcataacacaatgcaggccacagccaggggatggaaaacctggaagctgancagtgcgctgaaat

SEQ ID NO: 81051 - DNA, 359 bp, Homo sapiens
  sig_peptide (95)...(230): this location contains the signal peptide sequence, MFFSTTSLVLFLHQTAPFLKIILEQSKRPRLEVGHQGVVFQHPGA, Run with SignalP
  misc_feature (99)...(203): similar to gi1926329 in the genepept database release 114, Run with FASTXY 3.3t00, default parameters
gagaaattgtatttatcagccttatgttttatggcttctggattttagttcatgtatagaaaggcctcccttttccaagatgataaaaacacacatgtttttttctactacttctctggttttatttttacatcaaactgcaccttttttgaaaattattctagagcagtctaagaggcctcgccttgaagtgggtcaccaaggggtagttttccagcacccaggggcggacgcaggcgttcctctccagcaactaatgccgaccgcacaaggtaaggcccagcagcagagccagctccccgctcaggagcaggcagcacactgcggttccagaaaccagcaccagactcagacttggg

SEQ ID NO: 81052 - DNA, 655 bp, Homo sapiens
  sig_peptide (79)...(214): this location contains the signal peptide sequence, MASHFLLWGFALTLLQHLRLLVGSFADFSALSLPQSTCGHFSLFW, Run with SignalP
  misc_feature (231)...(316): similar to gi3228273 in the genepept database release 114, Run with FASTXY 3.3t00, default parameters
cggcacgaggatctggtccttcccttttgaggatctcacaatgtattcacagtcgaagaggtgtggcacaagcatttcatggcctcccacttcctcctctggggctttgcacttactctcctccaacacttacgattattggttggctcttttgctgacttttctgccctttccctgccacaatctacctgtgggcatttctcactgttctggtctcagccctcttctctttctgtatgcagtcccttgacaggctcattccacctatccagttgcaacccttcccactatgtggctgaacacacctacacctgtgacctctgcgattgggtatcattcttgggtacaatggcttgcatctgttccaaaatcatgaattcctgaaggggccagagcttactccactctgtttgcccagtgccaagtatcaaagtgcttgccctgggtgaggggaacaaaacaatttgggattgtgagagctgtaatttgccatatggggcgcgagaacctcgcaatcgggaaaaatgcgtgagcagaagaagcagattgggggaacttaatgcacagcagacgttccccctggcttccctaaagggcccattaccggcgaagggaaaaggttaaaaccaaaagggtatccggggggtaagaatca

SEQ ID NO: 81053 - DNA, 1561 bp, Homo sapiens
  misc_feature (1)...(1561): n = a,t,c or g
  sig_peptide (237)...(102): this location contains the signal peptide sequence, MLSVTAFILAETVLASQEVQGGVQVRVYLMNAVPDGLQGGSPVGG, Run with SignalP
  misc_feature (79)...(218): similar to gi1304439 in the genepept database release 114, Run with FASTXY 3.3t00, default parameters
ttaggaggcctgggngngnntnnnnaatagacccgcgctgcaggaattcggcacgagctcctcctatggccgctgttgtcaggtgccaggagcaggcccagaccaccgactggagagccaccctgaagaccatccggaacggcgttcataagatagacacgtacctgaacgccgccttggacctcctgggaggcgaggacggtctctgccagtataaatgcagtgacgcttaacattggtatcccttccctgacaaagtgttgcaaccaacacgacaggtgctatgaaacctgtggcaaaagcaagaatgactgtgatgaagaattccagtattgcctctccaagatctgccgagatgtacagaaaacactaggactaactcagcatgttcaggcatgtgaaacaacagtggagctcttgtttgacagtgttatacatttaggttgtaaaccatatctggacagccaacgagccgcatgcaggtgtcattatgaagaaaaaactgatctttaaaggagatgccgacagctagtgacagatgaagatggaagaacataacctttgacaaataactaatgtttttacaacataaaactgtcttatttttgtgaaaggattattttgagaccttaaaataatttatatcttgatgttaaaacctcaaagcaaaaaaagtgagggagatagtgaggggagggcacgcttgtcttctcaggtatcttccccagcattgctcccttacttagtatgccaaatgtcttgaccaatatcaaaaacaagtgcttgtttagcggagaattttgaaaagaggaatatataactcaattttcacaaccacatttaccaaaaaaagagatcaaatataaaattcatcataatgtctgttcaacattatcttatttggaaaatggggaaattatcacttacaagtatttgtttactatgaaattttaaatacacatttatgcctagaaggaacggactttttttttctattttaattacacataatatgtaattaaagtacaacataatatgttgtttctctgtagcccgttgagcatatgagtaagtcacatttctattaggactacttacaaggacaaggtttccatttttccagttgtaaaattggaaccatcagctgataacctcgtagggagcaaccccaggatagctaagtgttatgtaatatgcctagaaggtgatgtgaatgcgattcagaagcatagccactcccattttatgagctactcacatgacaaatgtcatcttttgctataacctttgccaagttagagaaaagatggatttaatgagataaatgaaaagatatttaacctaatatatcaaggcactatttgctgttatgctttgttatttatttcccagcacttgttccttattgtagattttttaaagactgtaaccttttactaactgtggtcttactaaaatttgtgcttgatactgcttttcaaaaagcctttaattacagccaaaaggatggaaaaggcaagatataaatgccttttatagatctcttatttacattgaaaaa

SEQ ID NO: 81054 - DNA, 688 bp, Homo sapiens
  sig_peptide (5)...(140): this location contains the signal peptide sequence, MNFSVPFICVSFSVLLSLFSPGNFLLIFPHLCFTRVPFLYCHLKM, Run with SignalP
  misc_feature (56)...(231): similar to gi4726117 in the genepept database release 114, Run with FASTXY 3.3t00, default parameters
gtcaatgaacttttctgttccttttatatgtgtaagtttttctgtgcttttgtctctcttttccccaggaaatttcctcttgatctttccccacttatgctttacccgtgtgccctttctgtattgtcaccttaaaatgtacacagcactttctaaatgcttagtattttccagaacactttgggtattacaaaataattaaatgattctgccctcagggagtttactgtctagccagggagtagcccaatatctatgttttgttttagccctgccactaaaaatttactaattcccctgagactttaactaccagtcttgatagattagctaagggaggtggggtgtaagcctgggcttggatcaaggactttcagaccaggttgtctttcgtacagattgaagaaactctggaaaagtgcccccggccatcttttgacggctaattttatgcgttagtacacagagcacctggaaggatcagctgtcccttatatggccaaactctggggggagaaaacaggatactgacaacgtttaaaaaccccaaagcctctccttgagacccggtgctaaaggaccttcccaccctggtcattccccagggggcatcgatagtcagagggattttctgcaatggtaaccataggcccctggtctgggaccattttcaaacccgcccccagcg

SEQ ID NO: 81055 - DNA, 395 bp, Homo sapiens
  sig_peptide (31)...(166): this location contains the signal peptide sequence, MGSSEFLVLGTVVLLVQSKITLALWSHHSKDPVEIMTECRHKQLY, Run with SignalP
  misc_feature (201)...(371): similar to gi1262715 in the genepept database release 114, Run with FASTXY 3.3t00, default parameters
ggtggactaatcgtagatgtgtactgcagaatgggctcctccgagtttctggttctgggaactgtagttctcttagtgcaatccaagatcacattggcactgtggtcacatcacagtaaggacccagtggaaattatgactgagtgtcgtcacaagcaactctatcactcctctctccaaccctcctgtgcagtgggtttaagggatgcacagaccttatcactattcctgtcaaaggtattactatattgcattccttttatattactctcatggcaggccacattgatttatatcatttttctttccatcaatgaatttgctgatcctccccatttgatgtgaagggtaaaagaaaaaaaattcatcactctgatttcaaagttcttgtctaa

SEQ ID NO: 81056 - DNA, 1732 bp, Homo sapiens
  sig_peptide (95)...(230): this location contains the signal peptide sequence, MVLWILWRPFGFSGRFLKLESHSITESKSLIPVAWTSLTQMLLEA, Run with SignalP
  misc_feature (591)...(359): similar to gi3875275 in the genepept database release 114, Run with FASTXY 3.3t00, default parameters
cccatccacccgcgacccacatccgatcggtaccggagcgggaggtgaggggtcggctcgcggatccagctgcagagcgacgtggggaattggaatggtgctttggatcttatggaggccatttggattctcaggaagatttctgaaactggaaagccatagcataactgaatcaaaatcgttgattccagtagcttggacatccctgacacagatgcttttggaagcacctggtattttcttattgggtcaaagaaaaagattctcaaccatgccagaaacagaaacacatgagagagagactgaattgttttcaccaccttctgatgtccgaggcatgacaaaacttgatagaacagcttttaaaaagacagtcaacattccagtgcttaaagtgaggaaagaaatagtcagtaaattgatgcgatccctaaaaagggcagcattgcagcgcccaggcataagacgtgtgattgaagatccggaagataaagaaagtagactaatcatgttggatccctataaaatatttactcatgattcctttgagaaagcagaactcagtgttttagagcagcttaatgtcagtccacagatctctaaatacaatttggaactaacatatgaacactttaagtcagaagaaatcttgagagctgtgcttcctgaaggtcaagatgtaacttcagggtttagcaggattggacatattgcacacctaaaccttcgagatcatcagctgcctttcaaacatttaattggccaggttatgattgacaaaaatccaggaatcacctcagcagtaaataaaataaataatattgacaatatgtaccgaaatttccaaatggaagtgctatctggagagcagaacatgatgacaaaggttcgagaaaacaactacacctatgaatttgatttttcaaaagtctattggaatcctcgtctgtctacagaacacagccgtatcacagaacttctcaaacctggggatgtcctatttgatgtttttgctggggttgggccctttgccattccagtagcaaagaaaaactgcactgtatttgccaatgatctcaatcctgaatctcataaatggctgttgtacaactgtaaattaaataaagtggaccaaaaggtgaaagtcttcaacttggatgggaaagacttcctccaaggaccagtcaaagaagagttaatgcagctgctgggtctgtcaaaagaaagaaaaccctctgtgcacgttgtcatgaacttgccagcaaaagctatagagtttcttagtgctttcaagtggcttttagatgggcagcccatgccagcagtgagttccttcccatagtgcattgttatagcttttccaaagatgctaaccctgctgaggatgttcggcaaagggctggagctgtgttaggcatttctctggaggcatgcagttcagttcacctggtaagaaatgtggccccaaacaaggaaatgctgtgcatcacgtttcagattcctgcctctgtcctctacaagaaccagaccagaaatccagagaatcatgaagatccacctcttaaaaggcagaggacggctgaagccttttcagacgaaaaaacacaaattgtttcaaacacttaattggaaatgttttctccatctccctaccagacttacatgtagtgaaatagaatttgtattatttaataaaattttagggtttggttttttctattgaaaaaaaaaa

SEQ ID NO: 81057 - DNA, 366 bp, Homo sapiens
  sig_peptide (82)...(217): this location contains the signal peptide sequence, MHFAQLIHCVQLLKFSSHLVGHLCEFGQRLCCSLLCSSWSVIHFI, Run with SignalP
  misc_feature (208)...(328): similar to gi928902 in the genepept database release 114, Run with FASTXY 3.3t00, default parameters
ctttttggtcttcatttcttgcccatcagaaccttttgcagggcactacaaaatgggacccttggccaagatgtgacccagatgcattttgctcaacttatacactgtgttcagcttttaaaattttcatctcacttagtggggcatttgtgcgagtttggccaaagactctgctgctccctattgtgttcctcctggtcggtcatacatttcatttatctgcctggcttctagagacaggtgagttggtgacctctgaactttggtatctcttgcttctcaaagcattcaccatgtggtgatgaccttgggctgccctattttattcatgacctgcactagttcagcaagacattcttgccctgg

SEQ ID NO: 81058 - DNA, 555 bp, Homo sapiens
  sig_peptide (475)...(340): this location contains the signal peptide sequence, MTANITCQFYKLSFSSLFSLLSLPPFLLSFLPLLCSSLMLTHPVL, Run with SignalP
  misc_feature (317)...(449): similar to gi1042135 in the genepept database release 114, Run with FASTXY 3.3t00, default parameters
aagggagcagatccactttaaaagctcacactggttcttgactgatgaccaaatggcactgtgccttatgcagagccgactcctggcagtttgcacaggctggaggtggagctgcagactccctctccctctcggccttgcctctgtaaatgggaaagccgttgacattcacaaaagaggggcagggaactgctacacaagagcagctacacaagagggtcctttggtccacacaggaaacaagccatagtgatgacatattttgaagctgttagatgttttgtttccctagctggctattatttttgtatggcttgtctttctcttttgagtatgtgtgagaacaggatgggttaacattagggaagagcacagaagaggaaggaaggaaagaaggaagggagggagggaaaggagagagaatagggatgagaagctcagcttgtagaattggcaggtgatgtttgcagtcattaatcatttgagaagtagagagagaagccaagcaggaaatcttcagactggaaaagaagtgctcaccacaaaaaaaaaaaa

SEQ ID NO: 81059 - DNA, 336 bp, Homo sapiens
  misc_feature (1)...(336): n = a,t,c or g
  sig_peptide (18)...(153): this location contains the signal peptide sequence, MTFLKTYLSNIKFACTSAWAQFYHLVLLNLLFRYPTLFYTNTHRL, Run with SignalP
  misc_feature (294)...(108): similar to gi5870853 in the genepept database release 114, Run with FASTXY 3.3t00, default parameters
ttttactccaaaatacaatgacatttctcaaaacttatctttcaaacatcaagtttgcctgtacttcagcttgggcccaattttaccacttggtccttttaaatctattattcaggtatcccacattattctacacaaatacacataggctagagacaaaaacacatgaagaaaagagagaaggcagaaatgctgggtaaaacactaactgccacttcttagtttccacttcagtgactttaagtcaaataagcctggaatcaactatcactgttgccaaagtctggcttacgtagggagtagggaacataaatgttaactacagacttagaaatn

SEQ ID NO: 81060 - DNA, 422 bp, Homo sapiens
  misc_feature (1)...(422): n = a,t,c or g
  sig_peptide (78)...(213): this location contains the signal peptide sequence, MPLTFLHEGVFLWFSHSLTSYTEFIYVKGSQPFLFIKALKLAEPS, Run with SignalP
  misc_feature (360)...(253): similar to gi4235029 in the genepept database release 114, Run with FASTXY 3.3t00, default parameters
agaatttattttcagcaatttttatagaagttgctttatgacaaagaaagctttggttaactggcatttggcatttcatgcccctaacttttctacatgagggtgtatttctctggttctctcactctctcactagttatactgaattcatttatgttaagggctctcaacctttcttattcatcaaagccctgaagttggcagagccctctctggtacctgattagaagtccgtcttccgtctcatagggaagtgttagagatggataatgattctgtgtagcagaagtactcattatgtcctcttaaattcggtcactttgactgcagtagagcttcttagtgagcagtctatgttggagtgtactttcagagaagctcgtggtgggggaaatctggaatttgtctaaatatttcatttn

SEQ ID NO: 81061 - DNA, 403 bp, Homo sapiens; identical to SEQ ID NO: 18275
  sig_peptide (265)...(400): this location contains the signal peptide sequence, MISLIFNLWLKITIWFDLNTYVCNNILFDLNTYEVGICFFKNVSV, Run with SignalP
  misc_feature (34)...(119): similar to gi406975 in the genepept database release 114, Run with FASTXY 3.3t00, default parameters

SEQ ID NO: 81062 - DNA, 376 bp, Homo sapiens
  sig_peptide (175)...(310): this location contains the signal peptide sequence, MLLLKHLMMSYHSLLHVPLRCLHCNCVSKGKQPCVNCLDSVLSSS, Run with SignalP
  misc_feature (157)...(54): similar to gi984331 in the genepept database release 114, Run with FASTXY 3.3t00, default parameters
cactgttaacagtaattatctccaggagtagatatgaggacatgaagtacagtaggaactttttgtttttgggctttttttggttgtttacgcttttttgtttaacatgaatgtatgttatgtttgcaataacagaaataaagatagaaacaaaagatatgtatttcctaacatatgcttttgcttaaacacttaatgatgtcttaccactccctgctccatgtcccacttcgttgcctacattgtaattgcgtgtctaaaggcaaacagccctgtgtaaactgcttagattctgttctctcatcttcctttactttactgtgtgtcccacttttcttgagctccatcatctagtattcacctgaaataggatcga

SEQ ID NO: 81063 - DNA, 335 bp, Homo sapiens
  sig_peptide (124)...(259): this location contains the signal peptide sequence, MFYLKSSFHLLIICLHCGYVVIAKSMRVILSKQMITWDIDSIKHL, Run with SignalP
  misc_feature (43)...(183): similar to gi2258374 in the genepept database release 114, Run with FASTXY 3.3t00, default parameters
gggattttgtacagtattcttacctcatctctggtttggtttgtctctgaagataactatcgtcactattaagctagaaaatgtagacaaaaagactgtcacttaaattttatatgtagatttatgttttatctcaaaagcagttttcatcttctaattatatgtcttcactgtggatacgtagttatagcaaaaagcatgcgtgtaatcctgtccaagcagatgatcacttgggatattgattctattaagcatttgtgaaatcagcctgcctttgcagatttagcagtctgtgacagagcagacgttttatatgtttttaggaaggttagctg

SEQ ID NO: 81064 - DNA, 832 bp, Homo sapiens
  sig_peptide (12)...(147): this location contains the signal peptide sequence, MCLAHLFKLLVYFNRSNSWVQAPFVLETTTGLFSSSVSLICILNL, Run with SignalP
  misc_feature (209)...(288): similar to gi5360853 in the genepept database release 114, Run with FASTXY 3.3t00, default parameters
aacttgtttacatgtgtttggcccatctgtttaaacttcttgtttattttaataggagcaactcttgggtgcaagctccttttgtgcttgagaccactactggcctcttctccagctctgtttccctaatctgcattctaaatctcttctgtaaacaaaacttgaataacaactttttatgataaatgctgaacacctccaagatgactgctgcaaaataaactacttttacaaccagaaagcattctaaacacacagaaaatacttttttaatgctgtccttttcttaaaaaaacaaaaagcagaaacaaaaacacacacaaagaattttattttctgtgtgtgtgtgtctacatatatatgttcttgacgatccttctgaagtgtgtgcattcccatcatgctccagtggttttccagccccgtaaggccctcacttttgattgtggagatgatgttgaagtgcacagggtatttactgacccgcctatcttgttctgtgacaggcagaatcaatcaatcaagaggccagctttgcacttacatattccaggcacatctcccgcacttcaggatacgagatcacagtgttatccagccaaatttgatcaacaaatgcagttcccctgtgccacagcaatctcagatgaagatggtattatgtgggactgagcaaagtgataaagacagtacagcagagcctggagtaagcccggctgggcccgctctgtcagcttttatatacgaaggcgggggaggcccctttctttcagattaaaaaaggtccctttgattggaaggaaaatcactcttggacataatacgggtggcc

SEQ ID NO: 81065 - DNA, 317 bp, Homo sapiens; identical to SEQ ID NO: 40274
  sig_peptide (101)...(236): this location contains the signal peptide sequence, MPLLYIICLRQLVLFHSKCHSQHSCRAGGIQYSMHVSLFLSSPIN, Run with SignalP
  misc_feature (57)...(185): similar to gi4019254 in the genepept database release 114, Run with FASTXY 3.3t00, default parameters

SEQ ID NO: 81066 - DNA, 636 bp, Homo sapiens
  sig_peptide (202)...(337): this location contains the signal peptide sequence, MATIDIFLLLSLFFKCAFAVYGIFFLHIMTLKFFTYFPNPFLKMV, Run with SignalP
  misc_feature (550)...(313): similar to gi169728 in the genepept database release 114, Run with FASTXY 3.3t00, default parameters
ctttatttttcattacttgtcttctgctatttagctataaatccttatagaagagtataaataaataaaagtaattatgcaggaggcagtcatagtgaaatgctgcccactgtgatagcctgtgggttttttttaataaaatgccaactcagtttttcttaatattctataaatatctgaagtgaaattaaaccattgcgcatggctactatagatattttcttgcttctatccctgttttttaaatgtgcctttgctgtttatggtatatttttcctgcacatcatgactttgaagttctttacttactttccaaacccatttttaaaaatggttttattgtatgtcaagagaagaaggaagaaagcaaaaatgttacccaggattccaccatccagaaatagccattagtgaacatcattagcaaagtggaaaacactgaggtcatcgtgctaaataaaaaggaaagaaagaagcttgttatctgtggaacacaaagatcatctttatgcacgaatatcaattaaaatgttggatgtgtctctagaaatacttacgttaaagtggaaataaacttaattttacttaaacagaagagcctgcaatctaaaaatgaagtaactgtcgaacttcgga

SEQ ID NO: 81067 - DNA, 335 bp, Homo sapiens
  sig_peptide (22)...(157): this location contains the signal peptide sequence, MTAGSLRRGCGLCLLLPCVFSPFPRCIMIAFICVRYLNSLVLCSL, Run with SignalP
  misc_feature (61)...(204): similar to gi3493216 in the genepept database release 114, Run with FASTXY 3.3t00, default parameters
gaaaaaacagctcagatgggaatgactgcagggagtctgaggagaggatgtgggctgtgtctcttactaccctgtgttttcagcccttttcctcgctgtattatgatcgctttcatttgtgtaagatatttaaactctctggtgttatgttctctccttctgttaatggctgtaacggttctcatgttgtaaactgctaggacttagctgagattacctgatagcgtaaggtactggttagcatggtgcctattgtccatgaggtcatcaacagtgtttacactgatgctccagtcacgtatccttattatgctcaggtctcaggtgcttatgat

SEQ ID NO: 81068 - DNA, 3215 bp, Homo sapiens
  sig_peptide (2133)...(1998): this location contains the signal peptide sequence, MVRPLLLLNLHFHLPSLVSLSLSLLLSVSLSLVNAVRLLRASFCS, Run with SignalP
  misc_feature (2264)...(1959): similar to gi2313651 in the genepept database release 114, Run with FASTXY 3.3t00, default parameters
ggaattcccgggtcgacgatttcgtgttgtatctgctgttcgctggctgggcctccgcagcaggcttggccagccgctgacgggtcggcgggcgggtttgtgtgaacaggcacgcagctgcagattttattctggtagtgcaaccctctcaaaggttgaaggaactgatgtaacagggattgaagaagtagtaattccaaaaaagaaaacttgggataaagtagccgttcttcaggcacttgcatccacagtaaacagggataccacagctgtgccttatgtgtttcaagatgatccttaccttatgccagcatcatctttggaatctcgttcatttttactggcaaagaaatccggggagaatgtggccaagtttattattaattcataccccaaatattttcagaaggacatagctgaacctcatataccgtgtttaatgcctgagtactttgaacctcagatcaaagacataagtgaagccgccctgaaggaacgaattgagctcagaaaagtcaaagcctctgtggacatgtttgatcagcttttgcaagcaggaaccactgtgtctcttgaaacaacaaatagtctcttggatttattgtgttactatggtgaccaggagccctcaactgattaccattttcaacaaactggacagtcagaagcattggaagaggaaaatgatgagacatctaggaggaaagctggtcatcagtttggagttacatggcgagcaaaaaacaacgctgagagaatcttttctctaatgccagagaaaaatgaacattcctattgcacaatgatccgaggaatggtgaagcaccgagcttatgagcaggcattaaacttgtacactgagttactaaacaacagactccatgctgatgtatacacatttaatgcattgattgaagcaacagtatgtgcgataaatgagaaatttgaggaaaaatggagtaaaatactggagctgctaagacacatggttgcacagaaggtgaaaccaaatcttcagacttttaataccattctgaaatgtctccgaagatttcatgtgtttgcaagatcgccagccttacaggttttacgtgaaatgaaagccattggaatagaaccctcgcttgcaacatatcaccatattattcgcctgtttgatcaacctggagaccctttaaagagatcatccttcatcatttatgatataatgaatgaattaatgggaaagagattttctccaaaggacccggatgatgataagttttttcagtcagccatgagcatatgctcatctctcagagatctagaacttgcctaccaagtacatggccttttaaaaaccggagacaactggaaattcattggacctgatcaacatcgtaatttctattattccaagttcttcgatttgatttgtctaatggaacaaattgatgttaccttgaagtggtatgaggacctgataccttcagcctactttccccactcccaaacaatgatacatcttctccaagcattggatgtggccaatcggctagaagtgattcctaaaatttggaaagatagtaaagaatatggtcatactttccgcagtgacctgagagaagagatcctgatgctcatggcaagggacaagcacccaccagagcttcaggtggcatttgctgactgtgctgctgatatcaaatctgcgtatgaaagccaacccatcagacagactgctcaggattggccagccacctctctcaactgtatagctatcctctttttaagggctgggagaactcaggaagcctggaaaatgttggggcttttcaggaagcataataagattcctagaagtgagttgctgaatgagcttatggacagtgcaaaagtgtctaacagcccttcccaggccattgaagtagtagagctggcaagtgccttcagcttacctatttgtgagggcctcacccagagagtaatgagtgattttgcaatcaaccaggaacaaaaggaagccctaagtaatctaactgcattgaccagtgacagtgatactgacagcagcagtgacagcgacagtgacaccagtgaaggcaaatgaaagtggagattcaggagcagcaatggtctcaccatagctgctggaatcacacctgagaactgagatataccaatatttaacattgttacaaagaagaaaagatacagatttggtgaatttgttactgtgaggtacagtcagtacacagctgacttatgtagatttaagctgctaatatgctacttaaccatctattaatgcaccattaaaggcttagcatttaagtagcaacattgcggttttcagacacatggtgaggtccatggctcttgtcatcaggataagcctgcacacctagagtgtcggtgagctgacctcacgatgctgtcctcgtgcgattgccctctcctgctgctggacttctgcctttgttggcctgatgtgctgctgtgatgctggtccttcatcttaggtgttcatgcagttctaacacagttggggttgggtcaatagtttcccaatttcaggatatttcgatgtcagaaataacgcatcttaggaatgactaaacaagataatggcagtttaggctgcacaactggtaaaatgactgtagataaatgttgtaattagtgtacacgtttgtatttttgttaatatagccgctgccatagttttctaacttgaacagccatgaatgtttcatgtctccctttttttttgtctatagctgttacctattttagtggttgaaatgagagctagtgatgacagaaggatgtggaatgtcttcttgacatcattgtgtattgctggtaatcaagttggtaacgactacttctagcagctcttaccactatgacttaagtggtcctggaaggcagtaagtggaggtttgcagcattcctgccttcatgagggcttctaccactgaccactttgcacgtacctggctcccagatttacttaggtaccccacgagtcgtccacataagcagcttcatctttaccttgccagagttgacaattatgggatactctagtctacttatacttgtgttcccatctgtctgccatcctctgaaggccaggacccagtcatacatccttagaaaccaaagtatggtttttgttttctcttggaatgtcaggtcttaaggcatttaattgagggacaaaaaaaaaa

SEQ ID NO: 81069 - DNA, 367 bp, Homo sapiens
  sig_peptide (179)...(314): this location contains the signal peptide sequence, MICTYFLLFLNCHILLISSHSVHQLFNLKIFWSSIISLAHLAIEI, Run with SignalP
  misc_feature (49)...(293): similar to gi2735941 in the genepept database release 114, Run with FASTXY 3.3t00, default parameters
ggcacgagcggcacgagggctttcaataataataattgacattgagaattttttatgtatctgttggctctatgtatgtcttttgaaaaataagcattttactcatttttaatttgttttttgtgatatagtcatttgaattttaatatatttttgatattaaccctttgtcacatgtatgatttgcacatattttctcttatttcttaattgtcacatcctgttgatttcatcacattctgtgcaccagctttttaatttgaagattttctggtcatctattatttccttggctcacctggcaattgagatccaattagagggatctttttaccacgtgcccctaacggggcctcagaaaaaaccc

SEQ ID NO: 81070 - DNA, 370 bp, Homo sapiens
  misc_feature (1)...(370): n = a,t,c or g
  sig_peptide (217)...(352): this location contains the signal peptide sequence, MTSWIHSLTCLLSSTPLAFQGAYGWPTGSGSKNKAVPEGGRAYDP, Run with SignalP
  misc_feature (257)...(154): similar to gi3986568 in the genepept database release 114, Run with FASTXY 3.3t00, default parameters
ggcacgaggttgtgaacattttctgctgtcaacatgtttctggtttttgtaactgggaactttcttgcacatctctagtacacacgtagaaggatttctctagagtatgtaaccaggactaattcccgagggccatacgctctgaccttattgtacactccgaatacccactgttttccatagacgctgtaaagaggagtgccgcaaaaactgtgcatgacgtcatggattcacagcctcacttgcctcctttcgagcacaccgttagccttccaaggtgcctatggttggcccacaggttcagggtccaagaacaaggctgtccctgaaggtgggagggcttatgacccatgttccaaacctttgcgcn

SEQ ID NO: 81071 - DNA, 730 bp, Homo sapiens
  misc_feature (1)...(730): n = a,t,c or g
  sig_peptide (141)...(276): this location contains the signal peptide sequence, MADRAGTESFVTFLGSQFWLVSWPLLTLYCTGTCQPFLSLKSFSK, Run with SignalP
  misc_feature (241)...(159): similar to gi1336461 in the genepept database release 114, Run with FASTXY 3.3t00, default parameters
cggcacgagcgcaaattaaatcagagatgatgacgtaccctttgggaattacattacaacacctttctgtttctggaatgttctttatagaacagcgatgtgattgatctctgatgggcagcacggcctctgggtgagtgatggccgacagggctgggacagagagcttcgtaacatttctaggcagccagttctggctggtatcctggccactgctcacactctactgtactgggacatgccaaccattcctttctctgaagagcttcagcaaagcccaggcctcccaaatgatgtttatcaaccctagagagacaagtgaggtctagtggttcgagtcagcaagggtggggagccatgagggttcaggtgctcccctgacactcgggttttttcttctttcagggtcactgggcaaatcatttaaggaaatctctccttctttctctctgcctggctctccctccctccctccatcagctctccatgcatatacatcaagaaaccattctaccatctaagacagggcggaaggaggctgngctggttggttatttggaactccttcagaatgagaagctgcccagcaccaattataatggggacttctatgctgaccccataaatgagaaaacgtgtctgctaaatcccaacaccctttaggcccagagtcccggaccggcttaaaaattttgggaaagattttgaggttccaacggttaagaccaca

SEQ ID NO: 81072 - DNA, 456 bp, Homo sapiens
  misc_feature (1)...(456): n = a,t,c or g
  sig_peptide (299)...(434): this location contains the signal peptide sequence, MKLYGLAIRILTECIATQCMALVVDEYSMASVICGWSILYMSYSP, Run with SignalP
  misc_feature (243)...(393): similar to gi5924126 in the genepept database release 114, Run with FASTXY 3.3t00, default parameters
gatcttcactactcgaaggcttgactgtacgtntacattgataccttcggaatttcgccctcgatgccaagaattcggcacgagcgagatcaaaggtgttgctgggtgcatggttctgctttatttgcgggcactgctgttaattagaaaacgagatcagaggcagtattaaaatccaattaaattgatatgaacagattgccaagtgatgttcactaatgtataattgagcaccatgcaaatttcggtggctggcttttgtttttttcccccacactctggaatgaatgatgaggctatgaagctatacggtcttgcaatacgcatactaactgaatgcattgccacacagtgcatggccctggttgtggatgaatactccatggctagcgtaatctgcggctggtccatcttatacatgtcctacagccccgtcagcgacggagtcgacggcgg

SEQ ID NO: 81073 - DNA, 995 bp, Homo sapiens
  sig_peptide (245)...(380): this location contains the signal peptide sequence, MDFLMLAVCAHRLCFLYLFILYESKNKRECEQFRRLQIYLVRLLS, Run with SignalP
  misc_feature (213)...(311): similar to gi1142588 in the genepept database release 114, Run with FASTXY 3.3t00, default parameters
ctcacctgcttctggctttcccctttatttcactgggaggtattatatttttagtgtatcttacggcctttgaggacttcttagtttgagtatattttagctgtgtgcataaatgtctttacagtgtacttaaggagttggatttttagaaacttgccatatttagaaatctattggattgaacatagtttgaaaagcaaagtataagttaattcctttactatatacttgtactattcttttcatggactttctgatgcttgctgtttgtgcacataggctttgctttttgtatttatttatattgtatgaatctaagaataaaagagagtgtgaacaattcagaagactacagatatatcttgttaggttgctttccaaaaggttcccagttgtagtcataccagcagtgtaacaagcaggttttttgtttaaccacactccaattagcatggaggatcctttaaaaatatttgctaaactgataaataaaaaatactatctttacttaaatttgcattgggaaagtattagtgaagttgaacattctcatatgttgtaatgttttgttttgttttggtttgatacagtctgcagtcttgctctgttgcccaggctagagtgcagtggcatagtcgtagcttgctgcagcttcaacctccaggactcaagtggtcctcacaagtagctgggaccacaggagtgcacccttatgccccccttattaaaaaatttttttttctttgtagagatggggttatactctgtggtccaggctggcctgaaacttcaggactaaagcagacgtccttccttggccttccaaaccccttggcattaagaaagtggcctatgactcagggtggctccttggatttaggaggctgcccgccctaggattttgaaatattggttcaacccttgtatgacgagaatgagaaaattgtcgttggcgattgggaacggtttctccgacgtcctttgaccatatcgcg

SEQ ID NO: 81074 - DNA, 5838 bp, Homo sapiens
  sig_peptide (987)...(852): this location contains the signal peptide sequence, MFLSLCLLSAALTKISSKILYKPGTKVTSLQFIPTSSSYTHMNCV, Run with SignalP
  misc_feature (694)...(5488): similar to gi37231 in the genepept database release 114, Run with FASTXY 3.3t00, default parameters
attgaaacacagagcaccagctctgaggaactcgtcccaagccccccatctccacttcctccccctcgagtgtacaaaccctgcttcgtctgccaggacaaatcatcagggtaccactatggggtcagcgcctgtgagggatgtaagggctttttccgcagaagtattcagaagaatatgatttacacttgtcaccgagataagaactgtgttattaataaagtcaccaggaatcgatgccaatactgtcgactccagaagtgctttgaagtgggaatgtccaaagaatctgtcaggaatgacaggaacaagaaaaagaaggagacttcgaagcaagaatgcacagagagctatgaaatgacagctgagttggacgatctcacagagaagatccgaaaagctcaccaggaaactttcccttcactctgccagctgggtaaatacaccacgagcctccaaaaaggaatgcagcgctgccaaattcttgatcttagttcagtgagacccattgtggacgtcagacctccagaactacaagatagtaaacttgtgttagttcaagccgctaaatgtgcgccacttgctgatcactgctctaagcccgtgctgctcaaagaaggacctgaggaccagaaggatcagcacgatgtaggagactgttggaatccagaatgtcagactctttttgatcagaacaatgctgcaaaaaaagaagagtcagaaactgccaacaaaaatgattcttcaaagaagttgtctgttgagagagtgtatcatataaagacacaacttgaacacattcttcttcgtcctgatacatatattgggtcagtggagccattgacgcagttcatgtgggtgtatgatgaagatgtaggaatgaattgcagggaggttacctttgtgccaggtttatacaagatctttgatgaaattttggttaatgctgctgacaataaacagagggataagaacatgacttgtattaaagtttctattgatcctgaatctaacattataagcatttggaataatgggaaaggcattccagtagtagaacacaaggtggagaaagtttatgttcctgctttaatttttggacagcttttaacatccagtaactatgatgatgatgagaaaaaagttacaggtggtcgtaatggttatggtgcaaaactttgtaatattttcagtacaaagtttacagtagaaacagcttgcaaagaatacaaacacagttttaagcagacatggatgaataatatgatgaagacttctgaagccaaaattaaacattttgatggtgaagattacacatgcataacattccaaccagatctgtccaaatttaagatggaaaaacttgacaaggatattgtggccctcatgactagaagggcatatgatttggctggttcgtgtagaggggtcaaggtcatgtttaatggaaagaaattgcctgtaaatggatttcgcagttatgtagatctttatgtgaaagacaaattggatgaaactggggtggccctgaaagttattcatgagcttgcaaatgaaagatgggatgtttgtctcacattgagtgaaaaaggattccagcaaatcagctttgtaaatagtattgcaactacaaaaggtggacggcacgtggattatgtggtagatcaagttgttggtaaactgattgaagtagttaagaaaaagaacaaagctggtgtatcagtgaaaccatttcaagtaaaaaaccatatatgggtttttattaattgccttattgaaaatccaacttttgattctcagactaaggaaaacatgactctgcagcccaaaagttttgggtctaaatgccagctgtcagaaaaattttttaaagcagcctctaattgtggcattgtagaaagtatcctgaactgggtgaaatttaaggctcagactcagctgaataagaagtgttcatcagtaaaatacagtaaaatcaaaggtattcccaaactggatgatgctaatgatgctggtggtaaacattccctggagtgtacactgatattaacagagggagactctgccaaatcactggctgtgtctggattaggtgtgattggacgagacagatacggagtttttccactcaggggcaaaattcttaatgtacgggaagcttctcataaacagatcatggaaaatgctgaaataaataatattattaaaatagttggtctacaatataagaaaagttacgatgatgcacaatctctgaaaaccttacgctatggaaagattatgattatgaccgatcaggatcaagatggttctcacataaaaggcctgcttattaatttcatccatcacaattggccatcacttttgaagcatggttttcttgaagagttcattactcctattgtaaaggcaagcaaaaataagcaggaactttccttctacagtattcctgaatttgacgaatggaaaaaacatatagaaaaccagaaagcctggaaaataaagtactataaaggattgggtactagtacagctaaagaagcaaaggaatattttgctgatatggaaaggcatcgcatcttgtttagatatgctggtcctgaagatgatgctgccattaccttggcatttagtaagaagaagattgatgacagaaaagaatggttaacaaattttatggaagaccggagacagcgtaggctacatggcttaccagagcaatttttatatggtactgcaacaaagcatttgacttataatgatttcatcaacaaggaattgattctcttctcaaactcagacaatgaaagatctataccatctcttgttgatggctttaaacctggccagcggaaagttttatttacctgtttcaagaggaatgataaacgtgaagtaaaagttgcccagttggctggctctgttgctgagatgtcggcttatcatcatggagaacaagcattgatgatgactattgtgaatttggctcagaactttgtgggaagtaacaacattaacttgcttcagcctattggtcagtttggaactcggcttcatggtggcaaagatgctgcaagccctcgttatattttcacaatgttaagcactttagcaaggctactttttcctgctgtggatgacaacctccttaagttcctttatgatgataatcaacgtgtagagcctgagtggtatattcctataattcccatggttttaataaatggtgctgagggcattggtactggatgggcttgtaaactacccaactatgatgctagggaaattgtgaacaatgtcagacgaatgctagatggcctggatcctcatcccatgcttccaaactacaaaaactttaaaggcacgattcaagaacttggtcaaaaccagtatgcagtcagtggtgaaatatttgtagtggacagaaacacagtagaaattacagagcttccagttagaacttggacacaggtatataaagaacaggttttagaacctatgctaaatggaacagataaaacaccagcattaatttctgattataaagaatatcatactgacacaactgtgaaatttgtggtgaaaatgactgaagagaaactagcacaagcagaagctgctggactgcataaagtttttaaacttcaaactactcttacttgtaattccatggtactttttgatcatatgggatgtctgaagaaatatgaaactgtgcaagacattctgaaagaattctttgatttacgattaagttattacgggttacgtaaggagtggcttgtgggaatgttgggagcagaatttacaaagcttaacaatcaagcccgtttcattttagagaagatacaagggaaaattactatatagaataggtcaaagaaagatttgattcaaatgttagtccagagaggttatgaatctgacccagtgaaagcctggaaagaagcacaagaaaaggcagcagaagaggatgaaacacaaaaccagcatgatgatagttcctccgattcaggaactccttcaggcccagattttaattatattttaaatatgtctctgtggtctcttactaaagaaaaagttgaagaactgattaaacagagagatgcaaaagggcgagaggtcaatgatcttaaaagaaaatctccttcagatctttggaaagaggatttagcggcatttgttgaagaactggataaagtggaatctcaagaacgagaagatgttctggctggaatgtctggaaaagcaattaaaggtaaagttggcaaacctaaggtgaagaaactccagttggaagagacaatgccctcaccttatggcagaagaataattcctgaaattacagctatgaaggcagatgccagcaaaaagttgctgaagaagaagaagggtgatcttgatactgcagcagtaaaagtggaatttgatgaagaattcagtggagcaccagtagaaggtgcaggagaagaggcattgactccatcagttcctataaataaaggtcccaaacctaagagggagaagaaggagcctggtaccagagtgagaaaaacacctacatcatctggtaaacctagtgcaaagaaagtgaagaaacggaatccttggtcagatgatgaatccaagtcagaaagtgatttggaagaaacagaacctgtggttattccaagagattctttgcttaggagagcagcagccgaaagacctaaatacacatttgatttctcagaagaagaggatgatgatgctgatgatgatgatgatgacaataatgatttagaggaattgaaagttaaagcatctcccataacaaatgatggggaagatgaatttgttccttcagatgggttagataaagatgaatatacattttcaccaggcaaatcaaaagccactccagaaaaatctttgcatgacaaaaaaagtcaggattttggaaatctcttctcatttccttcatattctcagaagtcagaagatgattcagctaaatttgacagtaatgaagaagattctgcttctgttttttcaccatcatttggtctgaaacagacagataaagttccaagtaaaacggtagctgctaaaaagggaaaaccgtcttcagatacagtccctaagcccaagagagccccaaaacagaagaaagtagtagaggctgtaaactctgactcggattcagaatttggcattccaaagaagactacaacaccaaaaggtaaaggccgaggggcaaagaaaaggaaagcatctggctctgaaaatgaaggcgattataaccctggcaggaaaacatccaaaacaacaagcaagaaaccgaagaagacatcttttgatcaggattcagatgtggacatcttcccctcagacttccctactgagccaccttctctgccacgaaccggtcgggctaggaaagaagtaaaatattttgcagagtctgatgaagaagaagatgatgttgattttgcaatgtttaattaagtgcccaaagagcacaaacatttttcaacaaatatcttgtgttgtccttttgtcttctctgtctcagacttttgtacatctggcttattttaatgtgatgatgtaattgacggttttttattattgtggtaggccttttaacattttgttcttacacatacagttttatgctcttttttactcattgaaatgtcacgtactgtctgattggcttgtagaattgttatagactgccgtgcattagcacagattttaattgtcatggttacaaactacagacctgctttttgaaatgaaatttaaacattaaaaatggaactgtgaaaaaaaaaaaaaaggggcggccgt

SEQ ID NO: 81075 - DNA, 676 bp, Homo sapiens
  sig_peptide (477)...(612): this location contains the signal peptide sequence, MGLFLLFFVLRVRSNVLKGAIQDRVGLLYQFVGATPYTGMLNAVN, Run with SignalP
  misc_feature (571)...(228): similar to gi5456964 in the genepept database release 114, Run with FASTXY 3.3t00, default parameters
ggtattatggccagtactcctgtaccaattgtatatccatgtacatacatgcatttaaaaacacatgggtgacatcttttgggaaaaacttttagtggacctgacgtcagtggatacccaaagcaaggaacgggaaatagaaacctccaagagagtccagatgatagaatctgcctacaagaaatcagcaatttgtcataaaactttgaagaatattgaaagaatgaaacacctgaaaacgttaccaatggttcctttcaaaaccaaagattctcctggagttttctctaaactgggtgttctcctgaggtaagaggctcacaaatgtgagaaatgcctgttagaggtctttagccatcccccaataacaattctgaaaaggaattaaaacagggttgtttgttttcaggagagtgacaagaaacttggtgagaaataagctggcagtgattacgcgtctccttcagaatctgatcatgggtttgttcctccttttcttcgttctgcgggtccgaagcaatgtgctaaagggtgctatccaggaccgcgtaggtctcctttaccagtttgtgggcgccaccccgtacacaggcatgctgaacgctgtgaatctgtttcccgtgctgcgagctgtcagcgaccaggagagtcaggacggcctctaccagaagtggcg

SEQ ID NO: 81076 - DNA, 369 bp, Homo sapiens
  sig_peptide (161)...(296): this location contains the signal peptide sequence, MKAEIVSFMFIIVSPALTQFPNCVTLVTCRCSIEPCLRILLCTIY, Run with SignalP
  misc_feature (137)...(269): similar to gi4501839 in the genepept database release 114, Run with FASTXY 3.3t00, default parameters
ggcacgagagaaagtgttagcttactcatttaacaacaggtaagatgaggtcactattatatacaaccatagtgtaattttttctcatattacgttttccaactttaaagaataacttaattttcatactcaccccacccccctatagattctgacctctatgaaggcagagattgtgtctttcatgttcatcattgtgtccccagcactaacacagtttccaaactgtgttaccttggtaacatgtaggtgttcaatagagccttgtttaaggattcttctttgtacaatatacaacacacatgcacacaggcatgtgcacacatagtgtagttgatcgaatgggggtcctgccagcagatttgtcca

SEQ ID NO: 81077 - DNA, 483 bp, Homo sapiens
  misc_feature (1)...(483): n = a,t,c or g
  sig_peptide (299)...(434): this location contains the signal peptide sequence, MHIGLGSMWSLPLSCPACVCAILANFMCTHVWGNLCVFRKDILQL, Run with SignalP
  misc_feature (302)...(140): similar to gi4235281 in the genepept database release 114, Run with FASTXY 3.3t00, default parameters
ggcacgagcaggggtgagccactgcgcctggcctatccttttgtttcttcacgttatattaatatatggtggtcatgccagcaccatactgttttgtaagacatgttacagttacactgctgtccagtttctctaacaacttgactttctgtgatataaacataaatgccttctctctttttaataaccgttacccgtaggaatatctgaaggactttttgacattttcaatagtatctttacaccacagagcagagaataagtaataaaacaaaaaaccacacacacacagtgagcaatgcacataggtcttggctccatgtggagcctgccattgtcatgtcctgcctgtgtatgtgccattttggccaactttatgtgcacacatgtgtggggtaatctgtgcgtattcagaaaagatatattgcaactaagggggctgaaaggggcttttttttcctcaaggttgctgataaactgtgn

SEQ ID NO: 81078 - DNA, 316 bp, Homo sapiens
  sig_peptide (83)...(218): this location contains the signal peptide sequence, MNYYVLLEVSCFLSFSCFLCPYINICTSDVKVTLQPLLPILSIGF, Run with SignalP
  misc_feature (42)...(238): similar to gi5616205 in the genepept database release 114, Run with FASTXY 3.3t00, default parameters
ggcacgagagttttcttaggatcaatattttaaatttttttgaggcatttaataatttctttttcttaggcgtctgttactgatgaattattatgtccttttggaggtatcatgtttcctttctttttcatgtttcttgtgtccttacattaatatctgcacatctgatgtaaaagtcactttacagcctcttcttccaatcttatccattggctttggtgcgccaagatattgccttcgtcgcgcgattttttcgtcccttctcttgaatatataatggttactttggtatctttctacgtcccttctctccctg

SEQ ID NO: 81079 - DNA, 368 bp, Homo sapiens
  sig_peptide (104)...(239): this location contains the signal peptide sequence, MCLSVFMHLLINIWIVYLLLNVFTNLCIHRLDGRTLMAQQTVLLE, Run with SignalP
  misc_feature (72)...(161): similar to gi862343 in the genepept database release 114, Run with FASTXY 3.3t00, default parameters
ggcacgagctgaaactccaacacagtatcttggagatctttccatttagtacatatggatttaccccttaattgtattggctgtgttgtatttcgtagtatagatgtgccttagtgtatttatgcatttacttatcaacatctggattgtatacttattgctcaatgtgtttactaatctttgcattcataggttggatggtcgaacattaatggctcagcaaactgtgctcttggagatgccctggctcccctctctctgctccttatcagacaaggttctaggcagctgatgaggctttagaaaggagagagacctggataaattgggtcccaatgtatgtcggtttaggcggtgagcgtcgccgg

SEQ ID NO: 81080 - DNA, 348 bp, Homo sapiens
  sig_peptide (187)...(322): this location contains the signal peptide sequence, MLCRCLFKVCGLYFDVLHLGYSYTKLRSGQHYKCFLLRSVLSLRD, Run with SignalP
  misc_feature (245)...(350): similar to gi215336 in the genepept database release 114, Run with FASTXY 3.3t00, default parameters
ggcacgagatagggctcggcgtggttgttctgagcatgtttaaggtaggctaggctaagctatgatgttccataggttagatatattaaatgccttttccatttatattttcaacttacaatgagtttatcaggacataatcccttcgtaaatcaaggagcatctgtactaataattcactattttatgctttgcaggtgtcttttcaaagtctgtggcttgtattttgatgtacttcatctggggtactcctatacaaaactccgatctgggcaacactataagtgtttcctcttacgatccgtgctatcgctgagggacttttgatcttaaaattgctggtctgag

SEQ ID NO: 81081 - DNA, 657 bp, Homo sapiens
  sig_peptide (247)...(382): this location contains the signal peptide sequence, MYFLIVVLRHGFGLFHFKAWVMVKRKCHLNDVYVYVPISYSGHRI, Run with SignalP
  misc_feature (92)...(242): similar to gi1780836 in the genepept database release 114, Run with FASTXY 3.3t00, default parameters
ggcacgagatctcaacaattccatgaaaccacacattagaaaatgtaaatagttaagtagtaaattttatttttgcttaactggtgtttgactacattgtaaacctcccaacaagcattcaagtagttttagtccttctaaattttttaaacttactgctccaaatgctattttcaatgtttcatgaccacaatgtcagattatttggacaaaaaccttcaaacgcaggacttttccttaggcagaatgtatttcttgattgttgtcttaaggcatgggtttggtttatttcattttaaagcatgggttatggtaaagagaaaatgccatttgaatgatgtctatgtctatgtccccattagttactctgggcacagaattagcaagaaacacccttataagtaaagcagttagggaagcattttcctacttccagagaaaaatcagagattgaaaaatatttctttgaatgccagtgacctgggctatagagaaagaatgtgccctggcatagccacccaccctggtgttgaccaccgaagagcaccacctgttcctgggcgtttatgtgttgtgcaaacatcatgcacctattaattgacctaaaattaagctgggcccccctaagggcggatcagttaaacaaccccctgctaa

SEQ ID NO: 81082 - DNA, 648 bp, Homo sapiens
  sig_peptide (50)...(185): this location contains the signal peptide sequence, MWSAHPLAVLSLKLTLFSLTSDWLSSKDMAISLAFKISQILCSVL, Run with SignalP
  misc_feature (81)...(195): similar to gi436130 in the genepept database release 114, Run with FASTXY 3.3t00, default parameters
ggcacgagggtgcatttgggcctcaggaaccaggggaatagaggcttgaatgtggtccgcacaccctctcgctgtcttgtccctcaagttgactttattctctctcacttcagattggctttcttcaaaagacatggcaataagcttggccttcaagatttcccagattttatgttctgtcctatctgcccctggaaaaaggctaatttcagttctgtggaacacaagttctttgaaaaggtcctgaatgaggaagagacctactgttgtaggcaaataatatgaatcatattacatatgtcttttcccttcatatacatctgtttagttttgcagtggctcctgggataagatgctaaagatctggtctacaggtaaattaaatatttattttaccttgacttaataatgctgcttcaaaaatttaaattcggaggctatatggtggcttacgcctataatctcagcacttcaagaagccagggtaaaaggatcacttgaggccacgagttcgagagcaccctaagccacatagtgagacccccgctctactagaggagaaaataaaattaccaggtgtgggggaggcccccggaaacctaactccttgggagttgaaggaaggaaatgttaaccccccgggggggg

SEQ ID NO: 81083 - DNA, 385 bp, Homo sapiens
  sig_peptide (63)...(198): this location contains the signal peptide sequence, MTTSSLVLPPLFVLKCQRFYPPLYLHPYSICQHVSILVKIVWTWG, Run with SignalP
  misc_feature (30)...(268): similar to gi2648749 in the genepept database release 114, Run with FASTXY 3.3t00, default parameters
ggcacgaggatcttttgttgcccttcctttttaagcctttcctgtgcatagtgaagaataccatgactactagtagtttggtgttaccgcctttatttgtgctaaagtgccagcgtttttacccaccattgtatctgcacccttacagcatatgtcaacatgttagtattcttgtaaaaatagtttggacctgggggtctgaggtccccactttgggaaccattgaaataggtacttagatctacagtgtatcatatcttttcatctacaagattaaaaacatgatttcagttaattgtttttgtaattttcttaatatggttttgaggggtttcagtccagagtgaagacatgtatgtttcttggcttatgctgaagtttactt

SEQ ID NO: 81084 - DNA, 373 bp, Homo sapiens; identical to SEQ ID NO: 54473
  sig_peptide (204)...(339): this location contains the signal peptide sequence, MYILNFSFFFLFLFFLILVVRRRPYDLVELSNIDKDCRYKFIFRF, Run with SignalP
  misc_feature (248)...(184): similar to gi10229 in the genepept database release 114, Run with FASTXY 3.3t00, default parameters

SEQ ID NO: 81085 - DNA, 942 bp, Homo sapiens
  misc_feature (1)...(942): n = a,t,c or g
  sig_peptide (31)...(166): this location contains the signal peptide sequence, MFFFVGDFFAFLGNILKIVYSYQDPVNKKFYLMGKGYTGAFHICN, Run with SignalP
  misc_feature (817)...(721): similar to gi553835 in the genepept database release 114, Run with FASTXY 3.3t00, default parameters
ctggaagaatggataaaagaatttggaaacatgttcttctttgttggtgatttttttgcgtttttagggaacattttaaaaattgtttattcctaccaagacccagttaataaaaaattttaccttatgggtaaaggatacacaggagctttccatatctgcaacttttccgtaaatctgaaattatttagaaagaaattatctaaaagaatttagtctgtaatgaattttccacattatagaccactctcccaagtgtttgggagagggccaatgaaaagatgggacattttggcgtcatcaataattgcttggcctagacctgtgcattcttggagatctggtatgggcatataactcctaactgaaaatcagtgttatggggagcaattcttagtaataagaacatgtccttgttgttaggtataatgcagcaaaaaaaatgttgtgagccgctgaaccagattatcctcaaggttctcttcagcctaaagttctatagttttaataatttccagaaattctgagaaagatataaagttataaaatgtacctttgtactttcaactcatgtattttaaatatttttatctctggaaataatttttttaatctaggaaatattttttaaataatttcttcaataaaagttcttacattatttctttttttggctcaagttaaaaagaatttggaaatcanaaggaaaatactccttttcttaatcatgcattctaaattattaaccccaatggaaatttgaagactaagccctgtgggttcaaacctggattacctaaaaactcttggaagctttagggcaggaagaatccttttaggcccaagaattccaaaccaacctgggcaaatttttgcaagaaccctggttcttttaaaaaaaaacgcaccaaaaaaaaagaatttcatttttaggcggcccca

SEQ ID NO: 81086 - DNA, 358 bp, Homo sapiens
  sig_peptide (169)...(304): this location contains the signal peptide sequence, MVPSGTVLFGIKVLHCVSCMTHTLSLSASIISNAMSIFPSHLTGG, Run with SignalP
  misc_feature (52)...(293): similar to gi3328882 in the genepept database release 114, Run with FASTXY 3.3t00, default parameters
ggcacgagaaacacgtttattacaatggcaagggacataaggatcgaggacggaagtcctttccagctgccgaacaatcttcccattagatcagtgaagagatcgtttatcccagaattttaagctagctcattggataaagcagtaagaccttgcagtgcctttgttatggttccgtcaggaacagtattatttgggataaaagtactacattgtgtatcatgcatgacacatacgctatccctctctgctagtatcatttctaatgctatgtctattttcccaagccatttaactggtgggtcctagttggtcagctgttcgtttgttgttttatgttgtaggtttatgacgttag

SEQ ID NO: 81087 - DNA, 1010 bp, Homo sapiens
  sig_peptide (94)...(229): this location contains the signal peptide sequence, MLMFVNAVATGKWWIKWFPFATLEISVCIHTGSLATWGSMDCVDS, Run with SignalP
  misc_feature (598)...(512): similar to gi808679 in the genepept database release 114, Run with FASTXY 3.3t00, default parameters
ttaagggggagggagtgtggaatttatagcattttctaaacttgtgaacttgactctatttttaaaaaatatttcctattaaaattttaaggaatgctaatgtttgttaacgctgttgcaactgggaaatggtggattaaatggtttccctttgccacattagaaatttcagtgtgtattcacactggcagcctggcaacgtggggaagtatggactgtgttgattcctgctcctctgcttacttgctctctcgctgtcattcatttagtcatcaaatactgatttaaggcatgctagtggacaaagcagccactgccctgccctcatagagcttatagcctaacacaaagcaacagcaaacattaggcatttgttcataaaacctttcccacaaagacttacaggcaggaaaattaggtattaatcaaatcacagaacctcccaaatgctaagtgaggattttaccctttgagcatatcccattaaaagcctcagttttctcatctgtgaaaggggacggtacctgccttttcaggtgaaacctagtgagataatgtgtatgcagctcttagcacagtgtcccccacataattggtgcataagtttccagctgatgtaagaaaaatacagaaaccccaatctaaatctatctctgaaactctaattataacttaagtttttgttatcattaggcagtgtccccttaatgttgagttcctttgttgtgtaatagtttgatatttgcaattggttttgtacagatagtaaagaaacataccagccagtagaggtttcagtttgagagcattcatcttttttcccttactggaggtaggatggaatcaaaacacacaggccttctgaccaggcctggtgagcccagcatggacagaattactattcagtaaagctcctgccccagtgagctgttttcaccccagaccacagcttataggagctgcttttacccacccattatttctagttgttagtcttgttcctaatgcac

SEQ ID NO: 81088 - DNA, 2764 bp, Homo sapiens
  sig_peptide (2557)...(2692): this location contains the signal peptide sequence, MFPSSLPFLLPSSLSLPTYLIFICHEVFGFANDLLDIMPHVIENK, Run with SignalP
  misc_feature (1820)...(2246): similar to gi1213523 in the genepept database release 114, Run with FASTXY 3.3t00, default parameters
ggagcaaataaaccgtgctttcatgttttttaaatggggctttccttacccgagaggtattttgcctgttccaatcgaaccaccccattcaggtccatcagcctctgattaatatccgtgagagtgagtgacggagtgagagtgtgagcgagtggatgtggctgtcagtgcagaacagcatgtgtctctttccttctgatatatgaatgaatcaggtttttttttttttttctgcaaaccctgggtatagggaaacttgttctactttggaaaacaaataaccttttgaaaatgaggttgagtttcttcctttctgatgcattgatttttgaagatttttttttccccctgtcccctcttggtcagaatcaatcctttggtgaaagtaagaaccgcaggagttgagttttggtttggtcctgctcagttttggtttttagttgtccatcctcacagtcctacacactcgcctcctcctgctagggctgggggtatctgtgtcctttaaaatggatgaggacctggtcctcgacatgtgggtgagccatggaccttgccttcccttctcgtccttgagggtttagaacacacaccaacacctcccaggtccccgcccccagcttcgggtggggtgatgcggtcaccctgcaaaagacttgcactttcctcagaacccaacatgacgcagctcaataagggtgagggtcactccctcccagaagccccgtctggacgagccttgcctgacctcttcggtgctgaccttcccaaagtgatgccttactggttttgtactaactgtgttcattttacataagtgtcgtgcctgcctggggtttgttttttttgtcattgttttccccattgaaacaaacagggctaaaaagtcatctgttcattaggagaactcaagttgctgtgacttttctcatccaaaagactcatttgtgtggatgcgtgaccatgggaaaaagaaaaaaaaaaagatccattttttaggttcttttcggtctccagctggcaacccaactggacaatgatctgtctggtgcaggaaaaggcaaaagtttctacaagtctacatgaccttgctgatacttgttctaatagaaacccagtctgctgggtcttcaacatactggtattttcattacaaagtatggtaaatttttgagttgtttgtttctgttttgtaaagagaatccttattggacaccagtgaaggtgtctctgttttaatgatcagggtttttattccatcttttgcatttcttctttttctgaaggtttgtctcttggcatctttttttagtttcttaccataagagtttgacccgaaactgctcacttcacattggatgacaccatgttcttcctctttgaaaagaaaaggggaatgtgtcccactagtgaaaggaaaacttttcaacactatccctgctttagtctcagcaaactcagactattctgcttagccttcattagtcatctgggtgtgagtgtgtcttgttctgtttttctttttaataaaacttttaaaccatatatttagcctgtgaccaggggggccaaaccctaagatttctggtaaacctgaagggtgggccctcctcagacaatttatctcccagcaatgaccctactacactcgcgtactgtgaatttgggaggaggtaaagttgacttctcctcgtgggcagttttccaatcaccttgtgagtagacacctgccaatattgtttgaaacctttttttaatatgacatcctctcttgtcattctcttctcccctttcccacagacttccctcctgggtccaggttcagaaccaagacttctgtacctagtgctgcctgattggtgaacattgacttcaagtagcatagcccttgtgtgactcacaactccgtgtccttcctaaagtttcgggaagcagggttgtctaatatgcacatttcttattttggtcatatttttactttagtgtcactcaccttttacaaagtgactttgtactcatttagggctctatcggaaatgcttccattttgccttttctacagttaggccaattttgaaatatataaattctatgcaacatttatgttgagttaccaatggaagccaaaagttctcttcccaaactgccaagaatgatacaggccataattgaaatgggaataccttttaagtttcattaggggtggggtgggagtgggacaggaacaagacttgcctagatctttgttgtatcttggggacttttactttgttgtttgatgcttaaacttcaaaattctctgtattcaaatttgattgtggcgaatctacttcaaaaaggaaaaataatccaactttgtggatattaaatggaaggtttgctgttttgatctagttgtttccagtggagcagttttatgaaatatgttctataagatgtacattttttcattgtaacatagaaattgtaaataattgattaaagtgctgcattttgatgaattttttctagccatttttaaagagaaaactaggaattgagtattttgtgtacggtatgtttccatcctccctccccttcctcctcccctcctctctctctcttcctacctatttaattttcatttgtcatgaggtttttggatttgccaatgatctgctggacatcatgccccatgtcatagagaataaagctgatgattgtaccagtcttaaattattcatgattcaataaaattgatgcttatttattcagaaaaaaaaaa

SEQ ID NO: 81089 - DNA, 411 bp, Homo sapiens
  sig_peptide (135)...(270): this location contains the signal peptide sequence, MCQNYLRLYLVFCALISLPSFLGIRVLFMLFYQSTDPLLFISKFL, Run with SignalP
  misc_feature (130)...(409): similar to gi3257816 in the genepept database release 114, Run with FASTXY 3.3t00, default parameters
ggagaatagttggccatatggcaaaatgctggtgaatctccacctgtacattttaggttaaaataaaacattttcagatatatacaccatttctatgattacctgcctcgatagactttgtagatcgaccaattatgtgtcaaaattatcttagattgtatttggtattttgcgctctcatttcactcccaagcttccttggcattagggttttatttatgctgttctatcagtctacagatccccttctcttcatttctaaatttttgaaattcaacctgttatgttcaaataggctcaaatgccacattccctatcatcccacacatgtgtaagtgtatatacgcatacacatccatatccacactcacaatttccctttgatttctccgccttgatatgagttcacca

SEQ ID NO: 81090 - DNA, 353 bp, Homo sapiens
  sig_peptide (101)...(236): this location contains the signal peptide sequence, MHACYIFQCSRQLASFLITSFLMIYFLRHPTFTKLFLHVTDRYFY, Run with SignalP
  misc_feature (190)...(267): similar to gi3745933 in the genepept database release 114, Run with FASTXY 3.3t00, default parameters
aaaatatatatttattacatatatttatagaaacaagatgccattaatattggttcaatgaaaaattttagaagctatgttatagtaatagcactttaacatgcatgcatgttacatttttcagtgttcaagacaattagcatcttttcttataacctcttttcttatgatctattttcttaggcacccaacattcacaaaactttttttgcatgtaactgataggtatttctatttagctgtaaattatttcataatcataaaactggacattaattatctgcgacagcaatggatgccacattctatgaatgttaaatgtgctgagaagtttaaatttaataatccttgct

SEQ ID NO: 81091 - DNA, 793 bp, Homo sapiens
  sig_peptide (60)...(195): this location contains the signal peptide sequence, MLLCCPLVAIWETAIKNGTVSVNGTSFQSPVPRRVITPFLPTSES, Run with SignalP
  misc_feature (107)...(321): similar to gi37632 in the genepept database release 114, Run with FASTXY 3.3t00, default parameters
ctaaagtgaaatggcggcttttgggcggggctcccacaggctggctccttttaagtggaatgttgctgtgctgccctcttgtggccatttgggaaaccgcgattaaaaatggaacagtaagtgttaatggcacttcgtttcaaagtccagttccaagaagggtaatcactccgtttttacctacttcagaaagtattttgaagagataccaaattctttttatccacaagcaaaaggaagtggtaaacctttttctcatcagcatttatttttgattggaatctgaattcccagttttgacttgtatttttatctgtgcgttggattttccttttaattatttgttaagtaaaaaattataaaagttgtttgcaatttagatgttgaataattttcagatagttgtttttcgtgaagattctgtatatatgttggatagtcattcctgaaaatccaatgtttaattgccctgtaactagtaagccactggtagccagctaattttattactttgttatttaggtgaaggcttaaaggactccactcactaactcagtttgaccctttctattagtcttgtgggctttctgcctcctctactaaaccagcactaaagctacagcttagtactaatagcatttactattataattattagggattaatggcaattctacatagtcttttagaaatggcggttttttactgtatttgaggcacatatacatacgcaggtacacacatgtactgtatatatactcgcctatgtgcgcgtatccttatatgcctgacg

SEQ ID NO: 81092 - DNA, 5291 bp, Homo sapiens
  sig_peptide (2971)...(3106): this location contains the signal peptide sequence, MMQLLFPLPLWGIIPFHLHCCDIVCPLSQVEGGILRLPPALVHSI, Run with SignalP
  misc_feature (632)...(639): similar to gi862343 in the genepept database release 114, Run with FASTXY 3.3t00, default parameters
tttcgtggatctgataaatgcctgtagtcattatggcttaatttatccatgggttcacgtcgtaatatcatctgattctttagctgataaaaattatacagaagatctttcaaaattacagtctcttatatgtggtccttcatttgacatagcttccattattccgttcttggagccactttcagaagacactattgccggcctcagtgtccatgttctgtgtcgtacacgcttgaaagagtatgaacagtgcatagacatactgttagagagatgcccggaggcagtcattccatatgctaatcatgaactgaaagaagagaaccggactctgtggtggaaaaaactgttgcctgaactttgtcagagaataaaatgtggtggagagaagtatcaactctacctgtcatcattaaaagaaacattgtcaattgttgctgtggaactagaactgaaggatttcatgaatgttctcccagaagatggtactgcaacatttttcttgccatatcttctctattgcagtcgaaagaaaccattgacttaaaggtatcatttgaaaaataccataatggcatttgagactgaatttctaaaaattgaatgccaaagtacaagtagaggagttttttattttatatatcacacacacacacacacacacacacacacacacacacatatatgatacaaatgctttcaggctgcttaccttaccgtgtagtggtaactattcacttcttaatttatgacctcaatcaatttaattgtctagaatgtaaaaagtctttaagacataagaattcctcaaagaagccatacattttttaaggtggggattgacttttattccaaggaacaacatcagttcactgttgttggagacatgacaatcattttcatcccaagaacactttaaggaaacattttacaagtatgcttgaaagaatgtcactaactggtccagaattttatcttcttgatttttccagatttctctatgtttttgagaaagatgttaatgttttgccatggtaaaagatttcaaaccctcattttttttgttcccttttccttgttactttttaggaaaaactcatgctctgtttctctgaatcaaatgaagtagaagtttacaaagctaactttcttcttgtctagctattaacatgatttgtcaaatgcatgtttttttcagccaaagccttgtttccatttttgttgatgtgtactcttgctcttttagctagagtgtatgtgaaaataaagaaatatatcattgtattcacaaccatgtgtcttcatttataactttttgtttaaaaaatttttagttcaagtttagttcattgatattatcctctgaatgcagttaaggctgggcagaaattctactcatgtgacatctgccacaggtctattttgaagcttttcttctaatggcaatgtttgtccttaccaggatttaatctatagaattgtctctcaactctgcttttctccagttccagataacgtccttaagaccatctgttcaggggttcacaaaactcaaatttgtgtcattctattttatttattttattttttatttccttccctcataccttgcccattccctttgaatattaggtgtgatgtcaacagcatgttagaaggatcaatgggaaggcaatgattgaaaacatttcaatgaaccttaatagtgttcctttgaggagcacccaggagaatatctggtcatagatctttttttaaatgcagttttataaaaccctaacagcggtgatatcattagactgtatgaatcagttttattacctagtgtacaagtgtcagtcatgtatcattatatagtctgttgatctttccatttgcaaaaaattaatagttttcccccacaaatgtacaaagttgtatgcttccagtcttcttttaatgtttatagtcattccaaagtaacattctattttacactttcacatacattgttatgaatcattggtttttctcttttttccacttatcaccaatttatttcattcagccagatttggtgtcttcattttgtagaacggtgtaagtggtttccattccagcatgaatgtggtcggtcacatggcagtggagtaaccaaattccaggtgttcttggaaacatttctagggtttggtatgttccagggaaaatgtcaaagacatcagaactataaactcccctgtgcttgtattggaagctatggccgtgaaaatgtacagtgtgtaagtctatttcattgcccattcccatcagataccagttgacttcatctcccacgtgcattgtgaggccttgtaggtttccaaacattcttccattaatagcatgcattttattgctttctatgaattcctcatcatctttgtttactttctcggggtgatcagagtatgttttgatgttgtcatctaagtaccaagattcattctcatcaaaaactagaaacagaagggcaaattccagtttccttctgggattgaatactttcaagtaaggtcttcgacaaacaatcagggggccaattaatccactgtagaggtccttaacttgatccacagttgaataataagcccatggaatacaagcagaatcctctgttccagctccagatctttctgggattttccatacgtaagtgagagtttcacctggtaatgttggagtaactgtagaactctctgtttgtaccccatgggcatgtattgagtagggccttgtggccatgtttttaaagataattttgactttgtctccaacatctgcatgaagttgtggacctagaattcccagatgttcttcttcagcttttctctccactggaacacggaatgtgctatcagtatactgccgatacacaactttcttgtactttgagcctatgtaaaactctcccttatctaaaaatgcatttgaaacattctgctcttgtaaatgatgcagctccttttcccactccctttgtggggaataatcccattccacctccactgctgcgatatagtatgtcctctctcccaggtagaaggtggaatcctcagactgccgcctgcattggttcacagtatatttttgcttcatgccgcctgtgtaatgatcagttgtaaggcattcaacattaaaagtcccctctgtgtcaggccacatgtggagcgtaagacttgtttgagggaagaggtttgctgtgtctctccgttctcctctccacagatatgtgtttcctgaaaagtatattccatgtacatcggcctcatttccggcgctgaataagtaccacacgaccgaatctcctttgcacatagtgagacccggctgattcccatacatgaatccattcatggagtgcattttattagattcctgaaagtcttcatcttccttatccacctgatcaggtgcagttgtaaacattctaatattatcttccaggagtaaactctcattctcatcaaatactgtaggaaacaaatagaattccttgtctacatctttctgtctcccatttgcatgtaaacttcctttcttgcatattttcattggcccaataagcccagtgaaatatatcctttagtgggatccacagcagaataatacatcttagctagacacacaggatctgcattagtgggtcctacttctttggggacagtccattcataggtgaatgtttctgtgggtgccacatgggaggctgaaggaggcacacttctgctctgggggttgtaatttggggaatagtatgtgccctcgttgttcttattgaatctcaccccaatcggctcaatactgaggggatatgctcctttgttatggaaggttactctgatggtgtctcccacctctgcccaaatgacaggacccaggatgccaagatgctcttcttcagggcctctctcctttcgatttgtgaaggaggcatctgtgtactcacgataaaccagctttttataagagcctccaattcttgtggtaccttgttcaaaaaaacaccgctgagtcacttccaggtgctgttaagttttctttagtgaagatgtctataccagagggagcatagttccagatgatttcctcagcggcaatgtagtagtgtctaacatgcttcccacggatattatcctttgatgaagacttgttacactcctggacctggaaaaaggcttgcaaaccggctttcagatggtttagattctgacagctgagcatccattctccagggttctgggccaccatataagcatcaaacagggtagcaggaaagaggttgattgtgtcaatacggtagttcttgttagtcagtgcttgcccgtgaaagaaagctgcgtgcacatcaacttcattacccataccaaaaaggtaccattttactctgtcttcagcacacatggagagtcctgggagacttccaaaagtgtatccattcacagaatacattctgttactctcctggaagtcttcgttgtctttgtcaactttctctggttctgagcagtaggttttaatgttgtcttctaggtaccagctgaaattttcatccaccacagaaaacatcaccacaaattctcggtcaatatgtttttctttttctttatctagagaatcttttttacagattattaaaggtccgatgagtcctgaggcaatatcttttggagcatcaatgtgggaatggtaaatcctagtcacacaattgccatctccttccccaggactttgttcttcagtggcaagcaacatgtatgtatactgctctcctggatatactttgtcatctgctctttgaaaatctgtggtgttatcagggtagatggccccctcatgttccttatagtaagttattccatgtgaatgaaaggtgtggggcctaggaggcaaggttttttaagtgtacataaactttatctccagtttcagctttgataatagggcctaaaaacccaagccagaccggtttttctatagttgtcctaaaggtttcatctgtgtactgaagataaagggccttcttatatagtctcccaattctatctgggccattttgaagatagatattggaatgttccgtgtcaacagaaataagtttcttttccccatggtcagaggcataatcccaagtcgtttcaataattccaatgtaataatgcttttctttcgcccaggctggggtactacataaaaacagaaaaataccaagtatcaaaatcttcatttttttccccttcttggcggacgcgtgggcggacgcgtgggtcgac

SEQ ID NO: 81093 - DNA, 971 bp, Homo sapiens; identical to SEQ ID NO: 60461
  sig_peptide (944)...(809): this location contains the signal peptide sequence, MRKTRLWGLLWMLFVSELRAATKLTEEKYELKEGQTLDVKCDYTL, Run with SignalP
  misc_feature (847)...(194): similar to gi5706454 in the genepept database release 114, Run with FASTXY 3.3t00, default parameters

SEQ ID NO: 81094 - DNA, 771 bp, Homo sapiens
  misc_feature (1)...(771): n = a,t,c or g
  sig_peptide (127)...(262): this location contains the signal peptide sequence, MRWKVQVNSLMVLPSLTVCYSTHLSTGCRHIKVNVQVLENIQRIL, Run with SignalP
  misc_feature (427)...(295): similar to gi3808151 in the genepept database release 114, Run with FASTXY 3.3t00, default parameters
gcagagttatcacacctgagctctacaactgagctgagcaatatatacaaaactcaagcctggtttaggcaggcctgacccctgggataggtcagggcggtggttccttgggagaattcctgcttgatgagatggaaggtccaagtcaatagcctcatggtcctcccaagtctgacagtctgctattctacacacctgtccacaggctgcagacatataaaggtaaatgttcaggtattagaaaatattcaaagaattctcaatgttcaaaattctgaaaagcaaatctatgctgaatgtgtggtgggggcattctaaaagataaaaaatgatggctacaaaaagccaagtataaaaagaaacacgtacatatacacacacatacacctacacatgtacattcgaagaggcagaggagagacagagaaaataattaagacagcattagttcctaaatagccttttctataaactccatgacaacaaaggacaatgagtaaactgcagtatctaaagatttaaatctcagaatacctgccagatgccaggcatggtggttcacgcctataatcccagcactttgggaggccaaggcgggtgaatgggctgagtntcagagttcgagaacagcttgggcaacatggcgaaaccctgtctctacaaaaaatacaaaaattagctgagcatggtagcgcacacctgtagtcacagctacttgagaggctgaggcaagggggtcacctattgcccagaagtcaaggctgcagtgag

SEQ ID NO: 81095 - DNA, 403 bp, Homo sapiens
  sig_peptide (192)...(327): this location contains the signal peptide sequence, MALTYFIFAFLAVILLYFPGGWSLPVLVLQDPNNSLSLFFSPQCN, Run with SignalP
  misc_feature (144)...(289): similar to gi606881 in the genepept database release 114, Run with FASTXY 3.3t00, default parameters
caacagttctggagtttccctctgctttccacatgcaaagcctgcatctttgggctttcaacatcctaagaggcagttagttggatgtaaaactccttttgcaaaccccagagttgacgctgaggtgctcttatttgaattgctactgtgcaaagcatcacttctttgttattgtttactcttgccaatagatggcactaacatatttcatatttgcctttttggctgtcattcttttgtactttccaggaggatggtcactgccagttcttgttcttcaggaccctaacaactcactttctctttttttttccccacaatgcaacattcaatagtggtttgggctcagtggacatacttccagattgtatgaaactgcaattcttgagctatagttttgggg

SEQ ID NO: 81096 - DNA, 410 bp, Homo sapiens
  sig_peptide (39)...(174): this location contains the signal peptide sequence, MNTVSKRLMCLMRMLLTEQIINLQFQVHMEPKDHLFPVNCSHKRL, Run with SignalP
  misc_feature (329)...(183): similar to gi4193348 in the genepept database release 114, Run with FASTXY 3.3t00, default parameters
tctttgaaattgtcttttctttattcattaacagtttaatgaacacagtatccaaaagactaatgtgcttaatgagaatgcttcttactgagcagatcattaatcttcaatttcaggttcatatggagcctaaagatcacctgtttcctgtaaactgttcacacaaaaggctaaccttgggaagctcagtgttgcctttttaataagtatgccagctaactaaagaaataaaaccaagaactgtgttactagagataataaatggtcataggttgtcttaactagttggagcaaaacaatgactgtataagtactaaaaaagtaacagcggcgtttacctgaagatgtttcacatgaaatgggaatgaagaggtgacatttcagacaggtttttgaggctaatactaatg

SEQ ID NO: 81097 - DNA, 470 bp, Homo sapiens
  misc_feature (1)...(470): n = a,t,c or g
  sig_peptide (218)...(353): this location contains the signal peptide sequence, MVLKLLLFAFKKICTLSQYENNHIGKSLANAMEIIFYVPFLFLFF, Run with SignalP
  misc_feature (277)...(458): similar to gi598425 in the genepept database release 114, Run with FASTXY 3.3t00, default parameters
gtggtgaagaaatctgaggcgtcggaagtcctgatatcttcgaaacccccgcgaacgnccacgcgtccgaccacgcgtncgtccacgcgtccgtttcacgcgtccgtttaatttaggctatttacatgtgaaagacttttattctctttgtttttttaaatgggagatagttttttttccctcaatgaggattatcatatttaatacaataagtggaatggtactaaaactactgctttttgcttttaaaaaaatttgcacgttatctcaatatgaaaacaatcacattggtaaatctttggctaatgcaatggaaattattttttatgtcccatttctttttcttttttttcaattttatctgaaagtttaaatatttttagggctttcactcagtgtccattaacgtttcttcctgtctcttgtcgaattgatgtaggtcataatgattacggttatcagcaaccgtc

SEQ ID NO: 81098 - DNA, 1309 bp, Homo sapiens
  sig_peptide (484)...(619): this location contains the signal peptide sequence, MIWIYFAFIFQRLHLIPGKSSARQVSGFSLLSFNPSNTIFVKLDW, Run with SignalP
  misc_feature (556)...(833): similar to gi1334340 in the genepept database release 114, Run with FASTXY 3.3t00, default parameters
cgacccacgcgtccgatgtcattactatatttcaatgcatcatgcttgtaactggcatttcatttataataagaatgagttattcatttgtaagccgttcagtaatttatctactattcctaaattggcataatgttagataatctattttgaatcacctttaattacatgtcagaatgccttaactaccctaacttgacaaaacagaattctttggtagacgcggtgggggcggggtggggggtctggacggagtctctatttaaggagaaatcatcatgctatgataaaacacagaagcatgagtggcaagtggcggggtatttattttgcacaaactatttgcagtctctgtgtatttaaaaagtaaagaaagttgcatccagaagggttttgttagaatgaatacatttatattaggactgacaacttcagctcttttgtttaggttttcaattatttttggtaagagtatgtagccttatgatctggatatattttgcattcattttccaacgcctacatttaattcctggtaagagcagtgctcgtcaagtttctggtttttctctgctctcatttaacccgtcaaacacaatctttgtaaagctagattggtggtgttttatacaacttatttactcagcttacctttttgagaaacgattgttagaaattgacgatgtgtttgttccagtgatactgaaagtagtgggggcaagaattgagtttcacagtggaattggctttggatctggcctatagattagtgacataaaatattttctctattttcccctgttctttttgtgttatgcacttaattttatgactgccgggggggtcagctggagtgctgcttaacaagtatctctcctactctcagtggtcagaggctgtgttggacccatagtagaattttccaggtcacagacccaagcttccatgggttgttactgtgctgtaccacttggtgggtctgattctgaacctgatgtgtgtgttaattatattttaagcaacacacacacacacacacgcctcatgtaatggacttttataacaaaagaaaaaatttggatttctaatttacaaatggcaaattatttatccctctctggatgcaccaaagaccagtaaagtttatagcttttccatctatatttataaagcaatactgtattataaaaatcaatatttttatcacatgcttgaaatttttattttgttgttttaaaatgtgcactctaaacatatcagaaccttatttcttcctatgaacttaagctgcctgcgcacaaaaaaaaaa

SEQ ID NO: 81099 - DNA, 557 bp, Homo sapiens
  misc_feature (1)...(557): n = a,t,c or g
  sig_peptide (220)...(355): this location contains the signal peptide sequence, MYPRWVFGVPLCIALSTCLLITLETVLLLRRNCLFGFFMTNLKMF, Run with SignalP
  misc_feature (170)...(292): similar to gi5230851 in the genepept database release 114, Run with FASTXY 3.3t00, default parameters
taaggttcttaaactcacatgcctttcagttgactcctgcagtcagtcccaggaggacattaagtagtctatgcatatgtcctatgacttgaggagtaaattggaaagagacctctatactatcgaaccacagcagaaagtaggctaaaaatccagagcgttctagagaaagctaattcatctagataatcacagattaaaagtctgctaggtgataccatgtatccaagatgggtcttcggtgttcctttgtgcattgccctgtcaacctgcttgctgatcaccttggaaactgtgcttctccttaggagaaattgcttgttcgggtttttcatgacaaacctaaaaatgttctctgagccttgctttaggtgcattggaataatgcttgtcgacccaagtaatgagcatttatgagctcatgaaggaattgtgcttttgtttctgcctggctaacttatgaatttttgtctacctcattttcgtattaaagnttgcagcttctgtaggtaggaagagaanatgtttgataccagtattttataacctcactgctt

SEQ ID NO: 81100 - DNA, 417 bp, Homo sapiens
  sig_peptide (191)...(326): this location contains the signal peptide sequence, MVTRCLLLCVSHSHTVIPKDRLRAYDLQCLFLKSTNPFSDTLDFP, Run with SignalP
  misc_feature (116)...(19): similar to gi4155078 in the genepept database release 114, Run with FASTXY 3.3t00, default parameters
tgcatatcttatgatgttttaagttccgagtaaaagtccctaactaaaagtgattttaaaaataaaaacagttgtaaactcaacaagaaattatgtaggtcccatccatttcagtggtttcttattggtcatttggctgattgattaggttccagatcagcttttttggaatcctgttggctgtccattcatggtcacaagatgtctgttgctctgtgtgtcacattctcacacagtaatacccaaggataggttaagggcctatgatctccagtgtctgtttttaaaatcaacaaaccctttctcagatactctagactttcctgtttgattggctagatttgagttacttgtcccttcctaagcatagaggaatgggattaatcacattgggtcagactaattaagttctagctc

SEQ ID NO: 81101 - DNA, 595 bp, Homo sapiens
  sig_peptide (99)...(234): this location contains the signal peptide sequence, MASRSNYLTETLTPFPALLSLFMLYLSHTGFDNIIPTFPTKPAYT, Run with SignalP
  misc_feature (232)...(129): similar to gi485787 in the genepept database release 114, Run with FASTXY 3.3t00, default parameters
ttgaaaactaagtcagtccacatcactctactgatccaacacttccaactgctctcaccctatcagagtgaaagtaaaaaacctaacgatggcttgccatggcttcaagatctaattatctgacagagactctgaccccatttcctgctcttctgtccttattcatgttatatttgagccacacaggctttgataacattattccaacattccctactaagcctgcatacactctacacagattgctccctcactgtccagatatccatatagcttactctcttatttcttcacatctctttgctcaaggagcctctttatcaacaagaactcactgacataaatcagaccacctactccaacaaaatcataaaataggcacaaaattttaaccaaaataaaacactggtgatatcactatactgaccagtaaactatgaaaccaaatgacatctagtatgatgacaagtattagcttccttttagtcaccattcagagggcagttcaaaagaatatggaacctggccaggcacagtgactcacgcctgtaattccagcactttgggagcccaaggcaggtggacgccgcccgga

SEQ ID NO: 81102 - DNA, 384 bp, Homo sapiens
  sig_peptide (122)...(257): this location contains the signal peptide sequence, MRFRAEPKSRPLPALCHVLIACIVFRWAFAQPLPSSRSYRSSGEF, Run with SignalP
  misc_feature (237)...(75): similar to gi1054887 in the genepept database release 114, Run with FASTXY 3.3t00, default parameters
tttttttttaggtgttaccatttcttttaattaaggatgtacttaatctcttaagatcacttacaaagtggcctcccaaagctgagattccctcaaatgcctaaatacctccacctgccgaatgaggttcagggcagagccgaagagcaggcctctcccggctctgtgtcatgtcctgattgcctgcatagtcttcaggtgggcgtttgcccagcctttgccaagctccaggagctacaggtcatctggcgagtttccacggtctccttcatttaaaaaaacaaaaacaccttcctggggagaaaggagggtccttctttacagtagaatgctgagagccaacttacgaatgtggagagaatactggagtcagaaaagcattgt

SEQ ID NO: 81103 - DNA, 3620 bp, Homo sapiens
  sig_peptide (189)...(54): this location contains the signal peptide sequence, MILLMSAAIFCSAEVFTRGSFFSDMLTLDRVKAKGLQGEGAASTC, Run with SignalP
  misc_feature (1577)...(1470): similar to gi1813602 in the genepept database release 114, Run with FASTXY 3.3t00, default parameters
tttcgtgccagaggcacccgagccctgagagtccgccgccaacgcgcaggtgctagcggccccttcgccctgcagcccctttgcttttactctgtccaaagttaacatgtcactgaaaaacgagccacgggtaaatacctctgcactgcagaaaattgctgctgacatgagtaatatcatagaaaatctggacacgcgggaactccactttgagggagaggaggtagactacgacgtgtctcccagcgatcccaagatacaagaagtgtatatccctttctctgctatttataacactcaaggatttaaggagcctaatatacagacgtatctctccggctgtccaataaaagcacaagttctggaagtggaacgcttcacatctacaacaagggtaccaagtattaatctttacactattgaattaacacatggggaatttaaatggcaagttaagaggaaattcaagcattttcaagaatttcacagagagctgctcaagtacaaagcctttatccgcatccccattcccactagaagacacacgtttaggaggcaaaacgtcagagaggagcctcgagagatgcccagtttgccccgttcatctgaaaacatgataagagaagaacaattccttggtagaagaaaacaactggaagattacttgacaaagatactaaaaatgcccatgtatagaaactatcatgccacaacagagtttcttgatataagccagctgtctttcatccatgatttgggaccaaagggcatagaaggtatgataatgaaaagatctggaggacacagaataccaggcttgaattgctgtggtcagggaagagcctgctacagatggtcaaaaagatggttaatagtgaaagattcctttttattgtatatgaaaccagacagcggtgccattgccttcgtcctgctggtagacaaagaattcaaaattaaggtggggaagaaggagacagaaacgaaatatggaatccgaattgataatctttcaaggacacttattttaaaatgcaacagctatagacatgctcggtggtggggaggggctatagaagaattcatccagaaacatggcaccaactttctcaaagatcatcgatttgggtcatatgctgctatccaagagaatgctttagctaaatggtatgttaatgccaaaggatattttgaagatgtggcaaatgcaatggaagaggcaaatgaagagatttttatcacagactggtggctgagtccagaaatcttcctgaaacgcccagtggttgagggaaatcgttggaggttggactgcattcttaaacgaaaagcacaacaaggagtgaggatcttcataatgctctacaaagaggtggaactcgctcttggcatcaatagtgaatacaccaagaggactttgatgcgtctacatcccaacataaaggtgatgagacacccggatcatgtgtcatccaccgtctatttgtgggctcaccatgagaagcttgtcatcattgaccaatcggtggcctttgtgggagggattgacctggcctatggaaggtgggacgacaatgagcacagactcacagacgtgggcagtgtgaagcgggtcacttcaggaccgtctctgggttccctcccacctgccgcaatggagtctatggaatccttaagactcaaagataaaaatgagcctgttcaaaacctacccatccagaagaggattgatgatgtggattcaaaactgaaaggaataggaaagccaagaaagttctccaaatttagtctctacaagcagctccacaggcaccacctgcacgacgcagatagcatcagcagcattgacagcacctccagttattttaatcactatagaagtcatcacaatttaatccatggtttaaaaccccacttcaaactctttcacccgtccagtgagtctgagcaaggactcactagacctcatgctgataccgggtccatccgtagtttacagacaggtgtgggagagctgcatggggaaaccagattctggcatggaaaggactactgcaatttcgtcttcaaagactgggttcaacttgataaaccttttgctgatttcattgacaggtactccacgccccggatgccctggcatgacattgcctctgcagtccacgggaaggcggctcgtgatgtggcacgtcacttcatccagcgctggaacttcacaaaaattatgaaatcaaaatatcggtccctttcttatccttttctgcttccaaagtctcaaacaacagcccatgagttgagatatcaagtgcctgggtctgtccatgctaacgtacagttgctccgctctgctgctgattggtctgctggtataaagtaccatgaagagtccatccacgccgcttacgtccatgtgatagagaacagcaggcactatatctatatcgaaaaccagtttttcataagctgtgctgatgacaaagttgtgttcaacaagataggcgatgccattgcccagaggatcctgaaagctcacagggaaaaccagaaataccgggtatatgtcgtgataccacttctgccagggttcgaaggagacatttcaaccggcggaggaaatgctctacaggcaatcatgcacttcaactacagaaccatgtgcagaggagaaaattccatccttggacagttaaaagcagagcttggtaatcagtggataaattacatatcattctgtggtcttagaacacatgcagagctcgaaggaaacctagtaactgagcttatctatgtccacagcaagttgttaattgctgatgataacactgttattattggctctgccaacataaatgaccgcagcatgctgggaaagcgtgacagtgaaatggctgtcattgtgcaagatacagagactgttccttcagtaatggatggaaaagagtaccaagctggccggtttgcccgaggacttcggctacagtgctttagggttgtccttggctatcttgatgacccaagtgaggacattcaggatccagtgagtgacaaattcttcaaggaggtgtgggtttcaacagcagctcgaaatgctacaatttatgacaaggttttccggtgccttcccaatgatgaagtacacaatttaattcagctgagagactttataaacaagcccgtattagctaaggaagatcccattcgagctgaggaggaactgaagaagatccgtggatttttggtgcaattccccttttatttcttgtctgaagaaagcctactgccttctgttgggaccaaagaggccatagtgcccatggaggtttggacttaagagatattcattggcagctcaaagacttccaccctggagaccacactgcacacagtgacttcctggggatgtcatagccaaagccaggcctgacgcattctcgtatccaacccaaggaccttttggaatgactggggagggctgcagtcacattgatgtaaggactgtaaacatcagcaagactttataattccttctgcctaacttgtaaaaagggggctgcattcttgttggtagcatgtactctgttgagtaaaacacatattcaaattccgctcgtgccgaattc

SEQ ID NO: 81104 - DNA, 352 bp, Homo sapiens
  misc_feature (1)...(352): n = a,t,c or g
  sig_peptide (16)...(151): this location contains the signal peptide sequence, MFYLKYLRKCVSKSVIFYLLIKAPEKHVEKKLSFSFLIDIFEFYF, Run with SignalP
  misc_feature (351)...(197): similar to gi4379157 in the genepept database release 114, Run with FASTXY 3.3t00, default parameters
tgggacttcaaaggaatgttctatttaaaatacctgagaaaatgtgtttcaaaatctgtgattttttacttacttattaaggctcctgaaaagcatgtggaaaaaaaattgtcttttagttttttaattgacatctttgaattttattttcccaacttagcatatagtatttttattaaaacaaggtaatttccagaacatggtacgggggcgagggatgagaaattacctgttgggtataatgtacattattcgagtgatggctacactgaaaggccagacttcatcactacctaatatacccatgtgcacttgtaccctctaaatccataataaaaaaattaaaaagtan

SEQ ID NO: 81105 - DNA, 627 bp, Homo sapiens
  sig_peptide (160)...(295): this location contains the signal peptide sequence, MKMMFIITNWLNYYFLLFSPSNPQIQSILHEVAPLWFRTLYTLLR, Run with SignalP
  misc_feature (141)...(75): similar to gi45708 in the genepept database release 114, Run with FASTXY 3.3t00, default parameters
gccacgtcgcccagaatgcaggcctttctcggggggccgtcaggagaagtagggggtgatcctgggtaacttggggcacaggctggtgcagccctctccaaggatggcatctcttgaggttttacattgaattccatgatatagcatatttttaaaaatatgaaaatgatgttcataataaccaactggttgaattattattttttgctgttctcaccctccaaccctcaaatacaatcgatcctccatgaagtggcgccactgtggttcagaacactttacactttgcttagagggtgctccacctggaagggcctgagctcctaaacaatcggtaatgcagtgataaagcgttaacttccaactatcaaaaagtacctgactcattcattccaactggagctcatccccgtgagctctgggtcagagagatgagctccccagccctgccacagcgtcatgccaggaaccaaactaacacgagcctcaggctgctgatcttaaagtggggatagccttagggtcatctcggcctctggtgagccatcatggcagcctctcggcagggtctgagtggcaggagagcctcggagagccttagaactgcctctgttcttacttggaaac

SEQ ID NO: 81106 - DNA, 1503 bp, Homo sapiens
  misc_feature (1)...(1503): n = a,t,c or g
  sig_peptide (25)...(160): this location contains the signal peptide sequence, MAQLMHLIIKTLGWVWWLMPVIPTLWEAKAGGSLEARNLKPAWAT, Run with SignalP
  misc_feature (1132)...(1435): similar to gi5902972 in the genepept database release 114, Run with FASTXY 3.3t00, default parameters
cggcacgaggctctgtctaactccatggcacagctaatgcacctcatcataaaaacactgggctgggtatggtggctaatgcctgtaatcccaacactttgggaggccaaggcaggaggatcacttgaagccaggaatttgaaaccagcctgggcaacatagtgaaaccctgtctctacaaaagaataaaaaatgagctgggtatggtggtatgtgcctgtaaccccagccacttggggggctgaggtgggaggattacttgagcctgggcggtcaaggctacaatgagctgtgactgcatcactatgttacagtgagaccctctctcaggaaagaataaaaataaaaaacaacatctggtccatggattccatcaaacaagtgctattcctttttgtcttgtcataaaaactctctatcagtggatgctttctgcacgtccatttgctaatagtttcctgttccttgttttagctattttggtaaaagtgactaatggtgcagcaaccatttcttcaccagcccttcctcagctctcctctccactccctcctcctcaggattatagggtccttcttgctgctgtatcaggtctcagctcattagttgtttgaggaaagggcctgccatgccatgttcatcacttcagccacaaaggatggcttttactcagcaatcatgtgctgaacatctgctacattccactcttagcactagtgaaacaaacgcgtagcaacagagccccagggncttcaaagcttcacaatgggaggtaactggtttccaggttaagtgcactaaactgtgttggaaggtgtttattgatagtacctttacaggttctgatggaagcatcagtggatgggattgggctttcccattggggagaaggagggctataaaaaaaccttccctggaagggacggtggggctcattctggatttcaccagaccagggtccaggcccctttcactttctttacttttgaactactccatctggaatccatagaaactcattaagcagctaaagtgaagtccgtagaccctggttccctacagtttcaacaaaaccctgatggggggaattccagtgtaatcgtaaagtttctcttaccctaccaaggccaatctctctttgccaattttgcctgaaacggaagaatatcttgcccgtttggctgattgggggaccggataagaaaagcgggatcggggagcgcacataacgaacctcccttgctaggcccgccgtatgcaaaaaaagcacgagttggccggtatgcaacggcgtttctgtccacactatggggatatccaaaaggcgctaggcaccgccggatcaacaaaaaatgggggcggtacagacccccggccgccggcatgccgtcagaggcttttcagcaccacaccgncaggcgccgccaaagaagagagtatacattcggggcaccacaacgaccgcttcgctcctcccccgcgcgcacggaagccgccgaggcc

SEQ ID NO: 81107 - DNA, 1738 bp, Homo sapiens
  misc_feature (1)...(1738): n = a,t,c or g
  sig_peptide (684)...(549): this location contains the signal peptide sequence, MWLWSKQGLQGALLGPVTLLWLNSPYLSLNRHKSSLNPSFKFKIF, Run with SignalP
  misc_feature (838)...(1700): similar to gi1244714 in the genepept database release 114, Run with FASTXY 3.3t00, default parameters
agaaaatatgtgtctcagggaagcttcatgcaggcgtgagttacagtgctgtggatcatgagttcaatgtcagtgaattaacaatatacattgaataaggtacctttaaacagaaacacacataaaacaaggttatatatgattggctgatgaaaatgtagtgaacagaggcgctcaggaacctaaccccgtgtttacccagagactacagtacagcattcactaactcagtgtctgtgcaactttatagagcataactacctgtatgacaagaattgcctgaatatcatagttgaggatttagtctttccttcagattaatgatttattctttcctgagtcttactgccttagatatacagaatcataaaattttaactttacttctagctttgctataaacagcaatcttaagtatctttatttttctgggtcttctcatctgtaaaattagactacatgaactttaagatatatacacttctaatttatttacataaacatgaattatatttaaaatctgtggccaaaaatgtgacatgaatctaaaatattttaaatttaaaagatggatttaatgacgacttgtgtctgttaagtgataaataaggtgagtttagccacaagagtgtaacgggacctagtagcgccccctgcaggccttgcttgctccacagccacatgacttgctcttccctttggcagctgtatctttctgcttaaggggtcgggggcgagggaggcataggtgagaaagtgcgagaacacgtcaatatagggcaaacaactggcacagaaaaatgagcatgtggatgctctaaatccggggctggtgatcaatatcattgctacatgatggagtagccagggagctcagttttagtgccagtgtggttggggcagaaagaccaaatgagaaaaacgactgagaattcagtgaagcttgtcatggggcatgtgtctgagcctttcaacccagacagggcccaggggaggatggaggacacagctggggaagctgagaggtgcctgacctagatgacgcactggggacaccaaccctgcagacacagggtgacaccactcctatgcaggacagtaagggcacatagctgccctggctatacaacctccatgaagaaaaaaaattgcttagaatttatacttattttatacctagcaaggttctaaaaacatttaggtgtgtatcaatctaagaaaaaactatcctttacataccatctctaaatgtgcctgttagtaaaagaatttctctttgggggctctgaacaatggaagatgggcaagaggacatagatgtctttccctccttatataaactgatattcaaagtgtatttgagtaggacatttacatacacctgctctctttccaaataaagaaaaaaatacttccctgcactttgaaaaatctcattttacagccagatttccaaacaaaatatactaacaagaaaataaaaagagggatatagaggttgttttccccctaatattgtccaatttaccaaaacttttacacctagggtaaaatgcaaagacatcaatcaaaggaatcactggggatatgaaataaatttttaaatttaaatgaataactatcacatagtttaaaaattaaatatttgttgggatgaanagagatgaattcaagaaaaaaaaaaggttatttggcattaaaagcaaagttactggcgctgctccttaccaatgaactt

SEQ ID NO: 81108 - DNA, 638 bp, Homo sapiens
  sig_peptide (126)...(261): this location contains the signal peptide sequence, MYSRIGSLGSVLIYYATLIVGLAFTSHLKMFDSMEYFHIIPSMVN, Run with SignalP
  misc_feature (161)...(280): similar to gi4325244 in the genepept database release 114, Run with FASTXY 3.3t00, default parameters
cttagtagatggatatgctaagaacaaggatatatctttcataaagctatgataccaatgttacacttaagaaagttaacaataattttataatatcatataatatctttctcatttcggttttaatgtattccagaataggaagcctggggtctgttttgatatattacgcaacacttattgtggggttggcattcactagccacttaaaaatgtttgattcaatggagtattttcatataataccttctatggtaaataagagttaaacaatctaaaacatcatctcatagttcagtgttttcagatgaaggaaatgagatgcagagctgttctgtgcagagctgtgactagagaccaggtcttaagtctcagtgtagttttcttttggcattatcaaaattatcattcataatttatgcattgtttaggtatgtattaagtcttagggctaaatgctaaatacttaccagaagtatcttctgaacatttttcttaattgatacgggcgcctattgcgggttttcaaaattatattctattagattatctggattcttaatttctaggggggcctggcttaaaacatttattttttataaaatggggaggggccttcaccataaattaaaaaactt

SEQ ID NO: 81109 - DNA, 888 bp, Homo sapiens
  sig_peptide (175)...(310): this location contains the signal peptide sequence, MNIIFIYLATSLAFLIINLSQLLFTEYLHFRCCSKCSTCINLLSH, Run with SignalP
  misc_feature (389)...(260): similar to gi808680 in the genepept database release 114, Run with FASTXY 3.3t00, default parameters
attttaaaaattatgtgacattgaaatgtagattggcctaaattttaaaatgtagttgcacagtatttactgcctctagataatagtttattaaatactctcccagactatataactgagaaaatacactaacaaattcccctcccccttttctaaattaaaaacatagtatatatgaatatcattttcatatatcttgctacttccttagccttcttaattataaacttgagtcagctattatttactgagtacttacattttagatgctgttctaagtgctccacatgtataaacttgcttagtcatcacgagtgggaactattaccctcatcgtacagaagaggaagcagaagcccataaagtttaaatactttctccaagttcacatggctagtaggtgggggagtgacgatttaaacccctgctcttaatctctgtacttttctgtctgatgtaaatttcttattgccctttttttaatatcactgaacttgaggatattgtttatctttagcaatggaaaaatcatttcctcctgatattctttatccagtttgtctaaagtctaaaaaacaaaacaactctttggtttattactgggtgaaccccaaaattgggattcggccagagaggccacatgggttctcggcttcctccaggaaagaattcaagaacaagctgacagtaaagtgaaatcatgtttattaagaaagttaaggaataggcccagcacggccgactcacacctgtaatcccagcactttgggaggccgaggcgggcagatcactgggtgaggagatcgagaccatcctggccggcatggttaaaccccattttaataaaaaagccaaacatggccggcgggggggcggccctcggggccc

SEQ ID NO: 81110 - DNA, 874 bp, Homo sapiens
  sig_peptide (181)...(316): this location contains the signal peptide sequence, MLPLKKWIILYLHLVVHNNATYIMALDVSSAFHVNKNCSILRYTV, Run with SignalP
  misc_feature (427)...(533): similar to gi2351943 in the genepept database release 114, Run with FASTXY 3.3t00, default parameters
gcattttacaattccttccaatgaaatatatcttgtaacttccttaagaatcagtgaacagcctactgacacaatgctttcctgttattttgtgatcgtacctagtagacaaaaatgagtattacaactaacttcaccttccaacgcattttccaggcttgtctctaaatggcttgaggcatgctgcctttaaaaaagtggattatattatatttacacctagttgttcacaataatgccacatatataatggctctagatgttagttcagcttttcatgttaataaaaattgtagcatcctaagatacactgtttcagtgcaaaagagcaaaaaagaaagattctagcgaacttccagcttggaaacatttattgagtgtctaaaaaggccaggcactatctctatatatttaatatttttttctcctttcaacaaccctaatactttactagagaaggaaattaaggcttaaaaagcttaactttcacaatgtcatccagtgatgaggtgatgaagatgtgagacctaagtccaggttctgttcactgcacaacgctccatttacctgtataatgctgagcaccaaagaaagcaatccacaagggaatcattttgcatttaagccctccctgcaagttaggatcagagggaaggaaaaagctgactgtcattttgtttccctcacaaaggtacagactagcctagaaacggcactctttatcacttaataatcctgaaaaaatgttcccagatttcaaggctggatacatatctgcttactactagaggtcatgttccaattagaacaaaagccttgtgatgtgtaacatttttggggaaaagccttgttctgctatcattcaatagctact

SEQ ID NO: 81111 - DNA, 380 bp, Homo sapiens
  sig_peptide (83)...(218): this location contains the signal peptide sequence, MTLLLGSLHCTLHTNVILLGKYDQLLEVHHSSFAILMSSELLQGK, Run with SignalP
  misc_feature (157)...(258): similar to gi5870117 in the genepept database release 114, Run with FASTXY 3.3t00, default parameters
aaaagttctagtctctgtgactaagaatgttaacattcttcctttatttgatttttagctattatgcttggtgggtttaaagatgacattgttattgggcagtcttcactgtacattacacacaaatgtaattctcctgggtaaatacgatcaacttttagaggttcaccattcctcctttgcaattcttatgtccagtgagctccttcaaggaaaaggtttcccccccccccaggcttgttccaacccccccaaaacaaaaaaagaaacatgtaggtccaataaagaaaggagtgtcatggagctctcatgggtacaggctggaagctccaggcctggcgtgctggagtcacgaaatgagctgtccaggcagcatggct

SEQ ID NO: 81112 - DNA, 485 bp, Homo sapiens
  misc_feature (1)...(485): n = a,t,c or g
  sig_peptide (216)...(351): this location contains the signal peptide sequence, MVAATLSLFFSGYAGATQIDTGLVLIELINQQGEYTKPVNKQKDN, Run with SignalP
  misc_feature (320)...(210): similar to gi633614 in the genepept database release 114, Run with FASTXY 3.3t00, default parameters
ggcacgaggattatccataaaaactgtataatcccaccctccttgttaataccttgatttatttcctttacagtcttttctagacatataaaaaatgtacatattcaaaactttggcatcttcctgcttatacaacatatagttttgtaaactgttttctcacatagcatggtatcttaaatgcttttccatgccattaaggtgcctttgaaagtatggtggcagccacgttgtctttattcttttctggatatgcaggagcaacccagatagacacgggtcttgttctcatagaactgataaaccagcaaggggaatatactaaaccagtaaacaaacaaaaggataacttacnaatagtaataagtgctatgaagagaaagagcagagttcccccatacgggaaatggaaatgacgtgtccaagtatgtgggtggtcacagggaaggcactctatggggaagatagctttaagcaagatcaan

SEQ ID NO: 81113 - DNA, 492 bp, Homo sapiens
  misc_feature (1)...(492): n = a,t,c or g
  sig_peptide (296)...(431): this location contains the signal peptide sequence, MAWGKAAITVICVLSFTVLKQSNMQSGLRSSVYPIQVLHQTDCTP, Run with SignalP
  misc_feature (313)...(409): similar to gi3287084 in the genepept database release 114, Run with FASTXY 3.3t00, default parameters
gtaagaggtaaagtcagaaaaaaaatgcactgtggtctcctntgctatataatattctgccttctctgaaataaattccgtacactagcccccctcctggcccagtttctgcactactgtggaaataaaaagaagaacctggcaaaaagaattctcacctcaatattgaagtctggatattccagaaatgaggacctcagccccacagtggtcctcaacttatactgtgaatcagaataatctgggcagcttttaaaaaatataaacgtcggtgcctcatcagagatctgattcaatggcgtggggtaaggctgccatcactgttatttgtgttttgtcttttactgttctcaagcaatctaatatgcaatcaggactgagaagcagcgtatacccgattcaggtgcttcatcaaactgactgcacacccaaatcacctggggatcttgttaaaaatatgtatgtggtgggacctgagactctgctcgtgcc

SEQ ID NO: 81114 - DNA, 1130 bp, Homo sapiens; identical to SEQ ID NO: 60391
  sig_peptide (846)...(981): this location contains the signal peptide sequence, MLIAVIACICYLSLLHSYDILFGHFSVLSQGLDKHCLTLFLSLGG, Run with SignalP
  misc_feature (17)...(556): similar to gi807646 in the genepept database release 114, Run with FASTXY 3.3t00, default parameters

SEQ ID NO: 81115 - DNA, 1638 bp, Homo sapiens
  sig_peptide (1117)...(1252): this location contains the signal peptide sequence, MPFSLQFLTVSGFVLILVWFSKGIQLKQREERIILFKSNFCPRYL, Run with SignalP
  misc_feature (527)...(425): similar to gi34009 in the genepept database release 114, Run with FASTXY 3.3t00, default parameters
tatggaaggcccatgaagttcttagaaaactgatacatagttacatggcaatgtttcctttccagaaagacatgggtagtttttaagctgcttgcattctaacaaggaaagctgatgtttccttcattggaaaggctcccattaaaataatactcaacaaagtaaaatattggtgtattacaattactttattcagatctattacacaaagagatggtattaagcaacactggcttgagtgatatcttgcaacacagaacaggttcacggatgtcggaaaaccaagaatgctcagggcctcagaaagctgagctctaaagaccctgcacagtcatgctgtcccaataggtttcatgttgtcatgaatgatgtcaaagaaaaaaatttttcaatgctacctattaaagcacagtaagactttatttaggaccatcatgacaggtacggggaccacagcaatggggacttgtagtaggggagagagactggactcagctctgaatacaccatggaaaactggggatttatagacagggaacagggtcaggggcagtggatggaagattaccaagaggaaatatcagggagcattcatctaaaccgacctaacaggattctagctgaaggcaggccagttgaccagacatcacctgggggatggtggaggctgaggagcctgatcagatactgaggttgaacagatatgggggggttaggtgttcttgctaaactgacctaatagacttcttgccaaaactagattttacaaggaagtgcccagattgggcctgggagaaggttgaggagcttggctaaagtttggccaagtggagaatctttgtccatgaagcctcagatggatgtgaggtccgtagaggtcagacagctatgatttaagaggttttgagcatttgcatcacacatcccattctctaggcattaaagagaaggcaacaaggctttagcttttagaagtatccatgtaatcaacacctttcctcccgggcatgtcggctccctatggccacgcactctccagcagcctctttatggacactttttgtcattttaagagaatagctcgatcgaatgagagccgatcctagtcccaataccatgcccttctcactccaatttcttactgtttcggggtttgttctgatactagtttggttttccaaaggaatccagttgaaacaaagagaagagagaataatacttttcaaatcaaatttctgccccaggtatttgtagagcaaagcagctgcttcaccagggtaggataccttccccagggcccagtaagactttcatgggccacaaaggcaaaacatattaaatatattttaatatataaatatataaagtaaaaacatattaacatactattttatgactatgttggtgcaaataccaatatgattttcaatccccaatgttcatttccttttcttctgattataaaataaaacatttttgtaggccccttaaaaggccttagagagtgtgccttatgggtaataatcgggccttttcccactctcggatcatggaggtcggagctattttatgtcttattcttctctgcatttctcagcctctctcttgagctaagaaagttgacgaatctttgcagaa

SEQ ID NO: 81116 - DNA, 445 bp, Homo sapiens
  sig_peptide (81)...(216): this location contains the signal peptide sequence, MLFIFGISELFGCFRLSFSVFPEISIFLFGYLTLSMSHTTLSFSA, Run with SignalP
  misc_feature (200)...(351): similar to gi2735941 in the genepept database release 114, Run with FASTXY 3.3t00, default parameters
atagttttcgttaagtgggcttggcatactttcaccccttagcttccatactctataatttctcttaatctggaaattcaatgttgttcatctttggaatatctgaattatttggttgttttcgcctatctttttctgtttttcctgaaatttcaatatttttatttgggtatttgactttgtcgatgagtcacacgactctttccttttctgcctttttaaatattaccccgtcacctgatttaaaattctttatcttcctagatctattaatagtttttaaaaaattgcagtttctattttctcgagtgctttatttttgccattttgatctttcacattacaatctttccttgggtgacagttaaatatgggttttctgctcatgtttacctggggactggttacacttggagagttttctactcggggcgtgttgactgtg

SEQ ID NO: 81117 - DNA, 1012 bp, Homo sapiens
  sig_peptide (214)...(349): this location contains the signal peptide sequence, MIFTNHLKKILLGVLVSLGYLHILYDEINIFYLINLIEASCLKEE, Run with SignalP
  misc_feature (48)...(178): similar to gi2664262 in the genepept database release 114, Run with FASTXY 3.3t00, default parameters
aaagaatgaagaaaagaacaaagtaaactgtatagaaaacagatggcaaaatggtagacctaaacacagtcatattataaattactttaacggtacacttgtttttcattgctttaattgatcaaatgataggtaaagtattttaaagtctctttgtagttttctttaaatcttaacattttgtgcaatgtttgctttgtgaagattgatgctatgatatttaccaatcatttaaaaaagatattgctgggtgttttggtaagtttaggttacttacatatcttatatgatgaaatcaacattttttatttgatcaacttaatagaggcatcctgtttgaaagaagaaaataacagatctacaaaattctgattcatgtaataagtaaccattatgataataaatgtttttatttattgagtgcatactgaaaagtggtaggaagattttgtgctgaaatatttgtaaacctagtaattaaaaaatgttttggctgggcttgttggctcacgcctgtaatcccagctctttgggaggccaaggggggtggatcacttgaggtcaggagttcgagttcgagaccagcctggccaatatggtgaaaccctgtctctactaaaaatataaaaattagccaggcatggtggtgcacgcctgtagtcccagctactcggcaggctgacatgggagagtcgcttgaacccaggaagcagaggttgccgggagtcaaaattacaccattgcactccaacctgggtgtcgcaccgaaactttgcctttttgtcgggggactaagaaacctttttttcgccggccgaaggtttgttcctttaacgggggggattttttgccttggccgcgtgccgcgtttttacgaacggcgcggaagggaccgatcttttggatcgaccgggttttatggggggggatgggatgccccggtcccatcgcccccagctgacagtgaccgaaggccttggacggactgcgtcgggtcggctcccgaagggac

SEQ ID NO: 81118 - DNA, 443 bp, Homo sapiens
  misc_feature (1)...(443): n = a,t,c or g
  sig_peptide (228)...(363): this location contains the signal peptide sequence, MLVCVRDAFCFHFSSLIFLLLGVQGPLVTNEHFPVTQRGLSREGI, Run with SignalP
  misc_feature (381)...(116): similar to gi1490346 in the genepept database release 114, Run with FASTXY 3.3t00, default parameters
ttcccagagccacacaacacccagaatagcccgtggccatggggcctcagccttactcattctggagctcccaatgccacttccatggtggcctttcctggtagatgctaggaggctggcctctccagggtgggaaggcatagggtccactgtgcagacacagccccacaggggatttggcttatgggctgggtagcagcctctggccctgtggacggtcagggcccatgctggtgtgtgtgcgtgatgctttctgctttcatttttccagcctcatctttctattactgggtgtccagggtcctttggtcaccaacgagcatttcccagtgacacagcgcggcctttccagggagggcatctcttgggcaaggactgggtgctgcaaacatcagccctttcattcccttgtctcttcttttctcagagctctgcgtgccttn

SEQ ID NO: 81119 - DNA, 2762 bp, Homo sapiens
  sig_peptide (733)...(868): this location contains the signal peptide sequence, MYLSVAVILSSSPILSIFILLISCSFLCALILLFLLLFNVMVSSC, Run with SignalP
  misc_feature (736)...(981): similar to gi467868 in the genepept database release 114, Run with FASTXY 3.3t00, default parameters
accttgtccaccctgtcgtgattattccagtgagatgttactgttctgctctgaagaagatactgtcagacgaatcctgcatttccttcagctggcatgcatgcctttggactcatggacagagttctttggattgtcactgaattttcaatgtttaatcagtatggatctgatcttcgcatgatcttttttgtgaatgctaacaccattttgcagttttttttttctattttaaacatttttcttttcactgccgaccccctgccttacgattttattggaaagcaaggacctgctattatttgttaatttgccatcatttatgtatattttggaaggtatgagacccacaagcacaatgatcatttttatttgtttgtttgtttgaaacttcagcagaatagatatctgcatgctttatgaagttgttgcttcggtaagagcccatgggatgccagaaattaacatttctttgctgccatgggctgatgatgctgctattagataaagtttagctgtggcaccaagtcacatcattttcatagaaaaagattacttgtagcttattttagaagtatgaccttttggtctgtttgattgattgattgattagaattgcaataaaagaaaagcttgcattcataaggcattcattctgttgtaaatgttcaatatatttattttgagagcaaggacctgtggttgtaaacaggtgtggttacaggtgtggttatgtatctgagtgttgcggtcatactctcctccagtccaatcctgagcatcttcatcttattaattagctgttcgtttctttgtgcactcattcttttatttttacttctttttaatgttatggtatccagttgtttccagtagcagtttcttgaacttctggcctgtactactaactgcagacctccagagtcactggcctttctgtgctctacatattattttaggggccacatcagttgccaagagcaacatacataccgacctggctgaattattgccagtgaaaacaacctgtacgaaggcctttgctcaggttctaaaatatgtttgtccttgcacgaattttgtatatttcaaatatttctgtaaaggtttcttcttttctgttagagtgtggtgttaagccagagtcagtggtttgtgttctcattaaaatgtttgtttaaatcctatgtccaattcaagcctatctaactacatttggtaggattaacatttcatataacaaatggggcttaattaaaaactttaacttggaataaaggaacagggatcactttatcttctgccttcatttaccttagtccaagattcttgcaaaacaggcaactgaacaaacattaggtttatgtaggtaaaatgtgaaagcatttctcctccactttttaaaatttaatttacccagtacagcggggcaccagattacttgatctttgtattttgcagttttgagcctttgtgtcaatcccaagcacagagaggatctgccaaggaaaaacatttgcatcttcggagtagacattttgcagtttgtttaataacaacttctaaagtaagttgaattcatccattgtcactgattcaccaagtggatgttgcattgtggaatttgcctgagtactgttgtcattctgctcagccaggcacggtcagtttcttggccagggacattgctatgtgctgtgtgcaagctctttagaagagagattggattttcttggcattatcagcactcatgctatttagtctacttctattttgactgactctttaaattagtacaatttttctacttgtcatataactcctggaacaatagtacgggaagccgtgatccttttccctgactcatgattttagtctttttccaaatcgctgtaattaaaaagataattttttttttttgctgctccaacgaaaagcatgttgttggagcagaatctccatggtaagccaaaagtgggacttgtcagcctataactactctgcagctgccactaactctacaggcagagtagttacactttatacaggagcacatgccaaagtgcctgggaggtgccaataaaatcaagaaataagaaaactacaaaaaaagatacggtattaaccttggacataattttttttagggaggcagctttcccacttttataaagggggttgtaaatctcaagaggtcatttgttccccatagcagcatatctcatttttaaattgaagcgaattaaataggattttactactcaacattcattatactgttaatctttgctgaaatatatgctaacaaatgttaagcaagggaaactgaagacttagtcatgtggattgttagcagtgatctgcattctgtaaaagaggtactttcccatgatgtaggcatgaagtggtgccagtaagcgtagagcggaaatgttgactttagttaacattgggtttagcatttccagtgcagcattatcagtgggcctttaaaaatacttcgtaagtacattagctttcactttgttgttaaattatagcagactcattatagagaacaagtttgccttgattttgtttaaaatgacttctgctaagcacccagaagataaaattgacatatttttataatataagcatactttttttgtacattgtgttcattcttgaataaaatgagttctgtgttggcttgtagatactaaaaagaaagtattgattttgattcaataaatgttttctttcaatcctgaaaaaaaaaa

SEQ ID NO: 81120 - DNA, 675 bp, Homo sapiens
  sig_peptide (84)...(219): this location contains the signal peptide sequence, MQNRTGLILCALALLMGFLMVCLGAFFISWGSIFDCQGSLIAAYL, Run with SignalP
  misc_feature (232)...(130): similar to gi553623 in the genepept database release 114, Run with FASTXY 3.3t00, default parameters
tggttgacttcccgggacgacccccgcgtccggggaagcagaggagcagcagggtcagggtgctgggttcctaaggtgcaaggatgcagaacagaactggcctcattctctgtgctcttgccctcctgatgggtttcctgatggtctgcctgggggccttcttcatttcctggggctccatattcgactgtcaggggagcctgattgcggcctatttgcttctgcctctggggtttgtgatccttctgagtggaattttctggagcaactatcgccaggtgactgaaagcaaaggagtgttgaggcacatgctccgacaacaccttgctcatggggccctgcccgtggccacagtagacaggccagacttttaccctccagcttatgaagagagccttgaggtggaaaagcagagctgtcctgcagagagagaggccccccggcattcctccacctctatatacagagacgggcctggaattccaggatggaaatgactcccacccagaggccccaccatcttatagagagtccatagcccggctgggggtgacagccatctcagaggacgcccagaggcgaggccaagagtgctgaggcagagaaaacttttccagcactcatgatgccaccactgtggggagcagctactgttattaaaggccaacgagggac

SEQ ID NO: 81121 - DNA, 379 bp, Homo sapiens
  sig_peptide (188)...(323): this location contains the signal peptide sequence, MMAIKPTILVTQGLILCWKCHKMICSYFNLQLERHFLETIQSDSF, Run with SignalP
  misc_feature (169)...(365): similar to gi2689668 in the genepept database release 114, Run with FASTXY 3.3t00, default parameters
gctgggaagcggacggccgagcagtgccctgtattgactctcatcttgcccgaagccgggcggcggaaaactcattctcctggtgatcagcccatgacctacacctccagacaaaataaaacggaaaatttgctacaatcactaatgagggatccatgtccagtgggagtccagcttcgaactacaaatgatggccataaaacctactatactcgtgacacagggtttaatactttgttggaaatgtcataaaatgatatgctcttacttcaacttacaactggaacgacactttctggaaacaattcaatccgattctttcatggagaaacttacattgacagatttgacgatttacagaattcatgttgcgacccat

SEQ ID NO: 81122 - DNA, 587 bp, Homo sapiens
  sig_peptide (17)...(152): this location contains the signal peptide sequence, MGNPTRLQLLFTHWPSSLPGSYFTVLLILAVSHISLIDSVFSRAD, Run with SignalP
  misc_feature (115)...(234): similar to gi3152967 in the genepept database release 114, Run with FASTXY 3.3t00, default parameters
ctgacctgctgtcggcatgggcaaccccaccaggcttcagctgctcttcacacattggccttcctcattgcctggtagctattttacggtcctcctgatcttagctgtatcccatatctcattgattgattctgttttctctcgtgcagatgctcatatccagagatcttatggctgatggtagtttatcccttccaacctgcttatattttgcggtttgtagagatgccttatttctgaattttgttgtgtgtcagcaggaatttgctttgactctctaatctgtttttgtgtggggattaagggacatttgtaaactatgctgccaatgctaccatccttctagtacttctagtatgttagtttttattgaaccagagttttactaagccccaggaccgcagacacttgagttcttaaatcttaacccattatctctcatggctgccaccattcctgtataaaccatgagggagaaatagatactgaagacaagatcagacagaggaatcgttttatcctttgctagttggcttttgtccccaacccccattgatatgatctaatctgtgtcagaggtacaagca

SEQ ID NO: 81123 - DNA, 380 bp, Homo sapiens
  sig_peptide (212)...(347): this location contains the signal peptide sequence, MIVLPGTFGLYYFLYFRVLLGYTHTLTQWKYNIYGELIYNTRLPV, Run with SignalP
  misc_feature (203)...(141): similar to gi622987 in the genepept database release 114, Run with FASTXY 3.3t00, default parameters
caaaggctgtgaaaaactttaaccatgaaacaacatggagttagtttagtaggtaatgatgaggaaataatactcagaaaatagacattaaaatcactgacatgactttaccacagaagtcatacggttacactctctgaaaatgtgtttttccacttatttatatgagaaaattaggggggaaaatagcactttctgttatctgggtgccatgatagttttaccagggacttttggcttatattacttcttatatttcagagtccttttaggatacacacacacacttacacaatggaaatacaatatatatggggaactcatttacaatacgcgattaccagttttccatgttagttgttctacccttacctgatcat

SEQ ID NO: 81124 - DNA, 620 bp, Homo sapiens
  sig_peptide (144)...(279): this location contains the signal peptide sequence, MVLTCLVSLDNSLCVCRPPWHLWQHGIMGGQSHAGTDTSKEARAI, Run with SignalP
  misc_feature (335)...(156): similar to gi853974 in the genepept database release 114, Run with FASTXY 3.3t00, default parameters
ctatttcattattcttgcagccagctctttgtgtacatggaccaggtttgttaatcaaggttacaattgttggctcagtctcttttgagtgtggggtgctggaaatagcgctgagtaggaataacagccttaggttccaataaatggtgctcacctgtcttgtgtccctggataattcactatgtgtctgtagacctccctggcacctgtggcagcatggtattatggggggtcaaagtcatgctgggactgacaccagcaaggaagccagggccatcacagagcagccctcctctggagccgtgacattacgcaccccatggcagctggtgtaactcagagacctgtggacaaattcattgtcagagtcaggtgaagactgggcacacggcagatctggccagacctgctctttctaatcagtgagatgtatagtttagggaaaaagagatgggacttctgggacagggtaatgactgatgttgactataaacatcttactgggttggggttccatttttcttctagcacatagacagtagttgcacttttgtttccactaacttgtttcccatttgggaatgtgatttccaggtgatggctttggaggaggcgctcgc

SEQ ID NO: 81125 - DNA, 307 bp, Homo sapiens
  sig_peptide (156)...(291): this location contains the signal peptide sequence, MSLYLFFCSISLTISNYNSGNTSSSSNLWNQLGTSLYGCRASDYN, Run with SignalP
  misc_feature (257)...(190): similar to gi1903338 in the genepept database release 114, Run with FASTXY 3.3t00, default parameters
gttagtagaagctttattaattaagagcaacatttttattatttaattaataaagcttctactaaccaagatcttaagaaagtaaattaatcttttagccctgattttactcttctgtattttttgtctaaatagttaattgctaaaagactcacatgagtctctatttatttttctgcagtatctcactgactatttcaaattataattctggcaatacatccagctcctcaaatctctggaaccagttaggtacgtctctatatggttgtagagcatccgattataatcctggtcgacgcggccg

SEQ ID NO: 81126 - DNA, 935 bp, Homo sapiens
  sig_peptide (560)...(695): this location contains the signal peptide sequence, MRIWHRWLLVRILFPAPGLQTATFSVCFHVAESELWHLLCFFFFL, Run with SignalP
  misc_feature (419)...(285): similar to gi4929026 in the genepept database release 114, Run with FASTXY 3.3t00, default parameters
aaaaaagtcccatgagattctcatttaggcagaaaccccatgtaagatgccctaagacaatgtttctgtatgctatcatgagtcctaatcaaaatcacttcctaactgaaatgtcaattagtccttctgaataaaacatagttgtttataagtcttggtgtacctgactcactcattttagtgcatcgaggtaggtagattggagggtgactgaggggagggcactgtcagttgtgaggttgtcttctaacagagtatgtacaggaaggtaatagttgctttaacagtgttcagacttcaaaagtgtagctgttggagaagtaagagcatcaagcaaggagtggaacacttttggttgggagtggagagtcttgatagagaatactgctgcatcagatgtctttttacatgtgtatttggttatgtggttatgagattagagcattctcctattggttggtgtcttagtcagctcagggtgccatacaaaataccatagactgggtagcttaaacagcagaaatgtatttctcacagttctagaggctggaaattcaagatgagaatctggcatcgttggcttctagtgaggattctcttcccagctcctggtttgcagactgccaccttctcagtgtgttttcatgtagcagagagtgagctctggcatctcttgtgcttctttttttttttggcccttttgccccccaggtggaaggccagggggccaatttgggttcatggaacccttggcttccgggttggaaggaattttctggcttaaccttcccaagaactggaaataatagggggggcccccctgcccggcctgattttggatttttaagggaaaacgggtgttccccatgtggcccagcttggctttaacctccggccctcaggggatccccccacttaagcttcccaaagggtgg

SEQ ID NO: 81127 - DNA, 702 bp, Homo sapiens
  sig_peptide (117)...(252): this location contains the signal peptide sequence, MAKSRGRVCLHLLQQHVAQLLVFLLKQSSLSFRDATSSWFCSPAL, Run with SignalP
  misc_feature (202)...(346): similar to gi705389 in the genepept database release 114, Run with FASTXY 3.3t00, default parameters
ggcacgaggagcctcaggtttgttttcactgtgtccaccgccttgtctccagttctctctcaaacccactggtcaaggattcacccctattgcttaaagtcaatgatgacattcctatggccaaatccagaggtcgagtctgtcttcatctccttcagcagcacgtggcacagttgctggtcttcctcctgaaacagtcttcccttagcttccgggatgccacatcctcctggttttgttcccctgccctggttgacagcactttctcctgcccttggctagttcctcctcccctaacctgcaaggtgtcccagggtcttctctatctgccctcactcatctccctccatggctttagaaaacatttctctgtggctgagaaatgtgtatatagggctccaacctccactgaactcctgaagtcccgacacacgtcactggctcctgctgtcatcccacctggacatctgaatggcttctgattcccctttccagtcccctcccccatgtttcaaatggcagtcaaccaggccgggtgcggtggctcacgcctgtaatacccgcactttgggaggccgagcgggtggatcacgaggccaggagatcgagaccatcctggctaacatggggaaaaccccggctcttacttaaaataccaaaaaattaaccttggcccgcaacggttggacccctataagtccc

SEQ ID NO: 81128 - DNA, 381 bp, Homo sapiens
  sig_peptide (75)...(210): this location contains the signal peptide sequence, MCGLHAFWLTALALGVWSARRIDSENCRRHPFSLIYREIGAQRIN, Run with SignalP
  misc_feature (201)...(311): similar to gi466924 in the genepept database release 114, Run with FASTXY 3.3t00, default parameters
ggcacgagagaatgtgtgttttctgccacaggcctccctactccctaacgtctctctcctcagccacctgtcatatgtgtggcctgcatgcattttggttgacagcccttgccttaggtgtttggagtgctaggaggatagactctgaaaactgtaggcgccatcctttttctcttatatatagggaaattggggcacagaggattaatgatttatccaaaactcactgagattcatgcttctggctctagggccctgctggtggggtatagggatgagggtgaagtcagagggaagggggatctaaggtcagctacttggtgctttctataagagcagttaggccgaagcatcgaccaggattgtggttttggctatgct

SEQ ID NO: 81129 - DNA, 712 bp, Homo sapiens
  misc_feature (1)...(712): n = a,t,c or g
  sig_peptide (331)...(466): this location contains the signal peptide sequence, MFYAFTLVFXYFHIFKKSHYLIYYKFKILYKKCKQLLDSLLPSRE, Run with SignalP
  misc_feature (444)...(505): similar to gi2689977 in the genepept database release 114, Run with FASTXY 3.3t00, default parameters
ggcacgagtgatgtgacccatgcccacctctttattctcccttccattattcttccatgatatgggacttcttatagctcccctgctgccacttagatattgttcagaaggtgctgttgagctgtaagatacattacattgaatattgcctttgtgttgcccattccctttgttagtattaaatataataggaaagataaaacgcaagttttaaaaactcagaaaatgagtaaatgataaacaacagctgagattttaaaaattcaacagatgtctgtaggaacaaagagggctctacttgaattaaagtggggtgagtacagcttacaaatgttctatgcatttaccttagtttttagntattttcacatttttaaaaaatcacactatttaatatattataaatttaaaattttatacaaaaaatgtaagcagctattggattcgctgcttccttcccgtgagtcctccagtccagacatgtcctcagagctgccacttctgatgtactccttgcagcgcttagctccccacagcggagcttggagggtgctggcctaacatccctccttccatgatagggatccggccattatcagggatacttcctgctggccttcaaactgagccctcattttttgaattggtaacgcatcaaggcccgcgggcctgcgcgctccctttccccgcgccccttccaaaacgcgaaccg

SEQ ID NO: 81130 - DNA, 2283 bp, Homo sapiens
  sig_peptide (1824)...(1959): this location contains the signal peptide sequence, MKLGDVFVKLLVSLAGEILLAPLVSASGMGPAGVEALEEVSALSV, Run with SignalP
  misc_feature (1933)...(1154): similar to gi5104507 in the genepept database release 114, Run with FASTXY 3.3t00, default parameters
ttttttttctgggccacactgagtgaattttaatgcaggatggaagcacacagatgggtgatcaggtcttctctttactgaaacacagaacatgtgccaaggtgagtccaaggacacctctgggaacaggtgaagcccctccccacacatacactccggtggatgtgagcgagggtcctgttgccacatctggggtcaggggcttggacatgctgcccttcatgggaaccttctgggtacctctcagcacagtaacgcagctgcagtctgtcggtgggggcccaggctaggggcagcaccctcttttggcatacgggacatgcctggctgcagctgatgtccgttagcctctcctgacacgcagtaaggagacctggaagtgaggcgcgtgggcgtggagttcccggtggagctgctgcatcagcctttctgccactctggggtcagtgaggtcttccggggaagccacactcagccgcaggaggaggaaacctccattttcacctgcactcacgtctgtggtcggcctcgtccgggcagtcgtgggcgtggctgttgggggcttcatcgtggtcttcgctgaggttgtgatcttggctaaggtgctgttcgtccctcggctgctgttggttgtagtcggagggacagaaggaagagggtccctgctggtggggaagggccccttggttgtgatgtccatggtcagtgtctctgaaggggtgaagttcttgagggcggcttccgaggggctgtaggaggaagcagagctcccagcaaaggaagttgttttgcccactgctgacccagcctctatggagaccggagctgctcctgagactttgacgtaacttggtgtctcaacagagagggctgaggtttcttccaggggattcctgctaactgtgaccagagctccactgagggtcgtggccccgggtgctgtcacttctctttctgtggcgctgttagtggggagtggggtcccaaccgtggcatgaggtgcagctgactctgtggtgccggctgtggacagggtctcggcagaggctgtgacctcagtgatgtgtggttttgcttcagtggagtcaggcagagctggtggatcggaggtggacgaggccttcaccccttccgtggggatgagatctgtgtctgaggccccagggatgctggaagtcgttgtttctatttctgtgatgctgcaattaataacctcgatgtttgtgacagtcaccagggcttcagcgaggagagtgacgtcagatcccggggaccatgagggggtgatgactggatgggggccgtcggaagaggcgctgctctctgaggcccgtgacggggtgatgactggatggaggccgtcggaagaggcgctgctctctgaggcccgtgacggggtgatgactggatgggggccgtcggaagaggcgctgctctctgaggcccgtgacggggtgatgactggatgggggccgtcggaagaggcgctgctctctgaggcccgtgacggggtgatgactggatgggggctgtcggaagaggcgctgctctctgaggcccgtgacggggtgatgactggatgggggccgtcggaagaggcactgctctctgaggacaggcccttagcttctgtggaggtgtgagccaatgtcaatatgtccattgtgagtgtctttgcctcttcagagctgtcatcggtgcaaagggtgtcaaagatggcttcctcgggatcactgcctgtgatggtctgaactgtggtcattccagctccctcggggctgccactggcggctgatgtctccacggaggtggcgatcagcaccatgaagttgggagatgtttttgtgaaactcctggtctctcttgcaggggaaattctcttggctcccctggtctctgcttctggaatggggccggctggggttgaggccctagaagaggtctcagcgctcagcgtttgagtttccagagcggcgtggcccggtgctagagtcatagcgggcacttctgtgtcgtccgttgtcatcgcagtgtctgctctgcgggtgctggggcctgtgttggttaagactgacttggtgagcttggggccagcaagccccaggatctgctggctatcggcctgcgtctttaagaggggatgtgtggggccagcgtccaccttccagggtgagccaagaaggcagaccagcgtccaggactcgcagagctttctgaacctctgtcgccttccccgggtacttttctcatccaacacatagttccccatggaagtaaaaaacc

SEQ ID NO: 81131 - DNA, 413 bp, Homo sapiens
  misc_feature (1)...(413): n = a,t,c or g
  sig_peptide (97)...(232): this location contains the signal peptide sequence, MYWVTVITLIYGYYAWVGFWPESIPYQNLGPLGPLTQYLMDHHHT, Run with SignalP
  misc_feature (257)...(6): similar to gi3483048 in the genepept database release 114, Run with FASTXY 3.3t00, default parameters
cagacgcgtgggcggacgcgtgggcggacgcgtagactgagaggtattgcaaccatggctacggtcgccggtgcgacctactactaacgaggcagtatgtactgggtcacagtcatcaccctgatctatggctactacgcatgggtaggcttctggcctgagagtatcccttatcaaaaccttggtcccctgggccccttaactcagtacttgatggaccaccatcacacccttctgtgcaatgggtattggcttgcctggctgattcatgtgggagagtccttgcatgccatattattgggcgagcgtaaaggcatcacaagtggccggtctcaactactgtggttactacagactttgttctttgggataacgactctcaccatctttgatgcttacaaacggaagcgccn

SEQ ID NO: 81132 - DNA, 681 bp, Homo sapiens
  sig_peptide (151)...(286): this location contains the signal peptide sequence, MKGKWCCSLLCQSPQVQTALVCPLSLSLGPPGPQCPLLWLGQEDL, Run with SignalP
  misc_feature (156)...(339): similar to gi9451 in the genepept database release 114, Run with FASTXY 3.3t00, default parameters
cactggtggaattcgttctgaggagccaaaggaggaagagactttcggggaaagaggagaaggagctggtgacaggggtaggaaggtagacagggtcatgacctgaaacggtgtgacgactgctgacttccctttcctggacttgagctgatgaaggggaaatggtgttgcagtctcctctgtcagagccctcaggtgcagacggcacttgtctgccccctcagcctcagccttggcccacctggtccccagtgccctctcctctggctggggcaggaggacctgccggacatagccagatgtattacggatgactgcagtcagctcccccaggctcctgcttctcttgcctcctgcttttttccccagagctgtctccttatctccattcacttgtctatgggttactcctggaccctggggttaggagttggaatcaggctgttaccgacaaaaggggtcaaggtgactcattttccttatcacgcttaggagttcaagcgacttgctgatcttcctaattcttacaaaacctgccatgaacccagctccctttgtatgactgaccctgccagcctgggagacatagagtctgattgcccggtctgggggttataaccccccggggtttggacctggaaatccaaagcaccctttggggctaagacctgggccaagccg

SEQ ID NO: 81133 - DNA, 360 bp, Homo sapiens
  sig_peptide (172)...(307): this location contains the signal peptide sequence, MAIRQATGWSLPRAPWPFFVMMVFVLDPILDIWAPLWYPYVLVLL, Run with SignalP
  misc_feature (208)...(67): similar to gi3341646 in the genepept database release 114, Run with FASTXY 3.3t00, default parameters
gacagagacagaaagcaatgtccccagatacccttagttttccatctcataagccagaatgatgtcacgtggcatccctggatgcacaggaggctgagagatagtggcgtttgttagctggtctcctagccatcctgaatgccaagtttgttataaagaaacagaggcaaaatggcgatcaggcaggcaactgggtggtctctgccacgggccccttggccattctttgtaatgatggtctttgtcttggaccctattttggatatttgggcacctttgtggtacccttatgtgctggttttgctgttgtctgcccttcaagaatagcagctgagtcaagctgtccttggctgctccaat

SEQ ID NO: 81134 - DNA, 4000 bp, Homo sapiens
  sig_peptide (1275)...(1140): this location contains the signal peptide sequence, MGRKEDIFLNILFVPSLKCINILIWFYFNFSFIISQLSFWVALQH, Run with SignalP
  misc_feature (378)...(122): similar to gi1294789 in the genepept database release 114, Run with FASTXY 3.3t00, default parameters
ccttgagggtcctttagacggccgcccctttttttttttttatttaggtattcattctgtttattggattgaaagaaagggaatacaaacgactggttaagtgctgcgccgatgacatggaaaaagtgtctttaaaaaaaaatcccagtaaagcaaatcaaagttaatgtagtttcagttgaacaaaaatttaaagacgtttaatacattacacatttataaaataaaagtcaacaaagggtgttttgtaaataattagtaaacaagtgaaaataaatatcagagacctgaagtttttatactttaatgaataaagcaaagaaatttaaactaagtaaatataatctgagaggcagttaaaaaaacaaaaatcaaaacccaccaaaattgaagaacacaatcttttgaaacatttaatcagtccatagcaaatagttattacataccaaaagctctaagtgttaactagttccaccacaatgccatgtaaatcttgacaatttagaaatcttgagatcaacacttaagttcttttcttgatctctacagcttggtttgtaagtacatacatgcttttgtggatctattcccctcgccacacacacacattttcaaggagccaataacatttttttccatctgtgcctaaaaatgttacaattcagttctagcacattgaccctgataatgaaaatgtttaagttaaagatggggacacaatttcaatcttataaaaatataccagtattaaccaaaccttaaactcagagggcacttcacatgtgcacgagactttcagtaaaaatgacaagatcctagaacagctgtttccaggactttttaatgaatcaagtactctctctctcacacacacacagaacacacacacacatttttatactattggttttgttaaatccaggctatctggattaagtagataggggatgggtttttatagtttttatttttgtaactatagggcagctactataacaatagcttaacaacactgaaaaatttcaattaagttcaccctgtttttagaaagtgtctaagtgtaaatgcaaattcacctcttcttaagttagcagtttatattaaatcagatatggtttctgaaatggaagtaatgtgttggagggcaacccaaaaggacagttgcgaaattatgaatgagaaattaaagtaaaaccaaatcaaaatatttatacattttagagatgggacaaaaaggatattaagaaaaatgtcttctttcctccccattcaaaagcagccattcttctactgtgaaagaaactgacatggatattttccctttcaagagatgtatgatatatttacccactgtgaggcagaggtgatagggtcagttcttgtttgcaggaaccaacatcctaaaaaagaaaatgtcaagatggggaggggtgggaaagaagggttttctattaatgtcatggaatatgccactgtagaggcagaacactcctaataataacattcaccagattactactgctgtttttttcagactaagaaaatactgacaaaattggatttttttctcctttcaattgcaggatattctgattatttaaagttagggaatcccttttttatccccccacccaataaaatgggccaatttgtagggatatatgcaaataaaatgttctctgtttaaaatacttacctggtttaatataacacatttatctggccaataagagcaacagaaatgtagctgttatgaagactaaaaaaatacaaaaaccaaagctgaagctttgtcatccctccccactaactcccactccaattctttactacccacatactaatctcagtaatccccaagtccaacattttaccattaataaccaattatttggaggaaaaagacatttaattttatatttgctctagcccttaatcaatgcataacaacaaaaacatttttaagcacatggaaatgagcctactaacctgatttttggagcccaaattctccactctattttgatctatgtgcaaaaagtattggtacttttcaatttatacatttgttagtatcttgtggctggcttcatagtataagactcactcttaagcctactatagagcctacagcactatcagaagttttcaattaatagctatggatcagaaaatcctgcgatcagtttctcataccataaaatcctaggcttctttaccattgatttcacctttcgagcacagtcactgcatggcaaatgtatgaaacagacgtttacagcaaataagtaccagtatgtacaggaagctgccagttaagacagacccggaaaacaaactcacctagctgctatagaaacctttgcatagttgttactccgttttaataggagttatgttcttgtaaaatgtgcctcacttttactccactttttaaaaagtgtttttaaactgtacttcagaagcactctgaaaactcagatctaggggtggttaggtgaagtagagtagaatctgagtgccaaattgcccctgaatgggcacaaatctgagtgttacaaatgcaccatagcacactgtaaccaaatttgtaaacagctgtggagtttctatgcccacatttagtgatgttaccatagagactggggtgtattaacggcttcagggtatacatgaatcacttaaaatatgaatggtttttaactatactgaggtaaagagaagttgccacttaattacatacagttaccaatgaagatttttattcaagcttaaagtaaaaagtaattttagttaagaaaaatgaagtaccagataaactgtaacatatattttaacttagaagtatcaaaacaggaattttttgattctctaagtggtggtctctgcaaaatggagcttgaagaaatcttttacataccaatttgataagagtctgctgaccacgatctgtcattttctttactatgggcttctgggagaatgcatgctattttaaggccaaatgtgtttttctttcttctcccctttccctgacttttccctttctcccatccccgaccacctaccccacaatggaagaatttttgacatccaagccctcttctctttgtggattctggagtctattcatgatcataattatattatagacttggctacacctaaaggggaacttagtacaagactttttcttcaccagaatcttattttgggggtatccccattctcattccaacagctggagtcaccctatttatcctctactgaaaaagggagggaatttcaagggagactatgttatgttgtattcagctgttacggagtttaaaagcacaatgtgaacatcaggcttttggcttattttaaatgtgaaattctcaaaattaaaagtgcttttccatgaaggaaacctttccttaaactaaaacaggaggggagagggaaagactatccacagcaccagtttagaatgaggttcagtatggcaatatctgaaaaaactgagaaaaaatattctttaaatttatgtatccctatatgtcaaaatattaagggcaattaagaaaaatgactatgaggttttaatcccagtttaagtatgtctgtaacctgctgaattcttctaataatttcaattatactataaacttccaaagtggttgtatcgctgattcctactcttttgctagatcacaccaaaattacttcctaagttgagaacaacttggaacaagctttactgaaaaccaactgactactgatgtctcatgttggtgtatttaaaattctttttgaatcttgaatttcttcaagatcgggtactgatgttccttcaggaataaaacaaaaggggggaaatcttcaaagcattactctgaatttcttgtgtaatgtccttccaagcactgtttctgaccatgtctcatgtggtattccagaagagcatcagttatactgtgtatctaagtcattgaggaaactgtttttaaccttcgtg

SEQ ID NO: 81135 - DNA, 1106 bp, Homo sapiens
  sig_peptide (363)...(498): this location contains the signal peptide sequence, MMTVITVTTIIINILFCRGGNQNQEGLFLSPNPKLARFPDPPSMP, Run with SignalP
  misc_feature (675)...(812): similar to gi1334045 in the genepept database release 114, Run with FASTXY 3.3t00, default parameters
cgtgcggcggaattcaaaggattaccaaactgcactagtatgaagagagccatgttcctcagctgtacagggctgatgaatggggaggaggcctgcgagcctaccaggagaaccggggagactctcggtctaccgagagcctggatatcctcccgagtggcccctcatgagactatctaccaacgtgtaacagactgtctgtgacaggtcatgggcataatatgtattagtatctctaagaaagaggtggcttttcctatacaaaatttgttggtgacagttggtcaacacttatgtacctgataagccatgtgggtacagtcgatcctcagtacaaatggcagtggtatgctgggtagctaatgatgacagttattaccgttactactattattatcaatatcctgttttgcagaggaggaaaccaaaaccaagaaggattgttcctttccccaaatcccaagctagcaagatttcccgatcctccctccatgccctttcctaacgtctctgtgatttgggagcttctgagctggagttctgtaaattcccaaggaatgggcagttcagaaaaataccaaaaattctaacattattagactttaaagagatttattgattccttttgaatggcagcagatgggaacattcctggactgggggaaggacagtcctgtgatgtgaaaccccttcccccaaggtagacaacaaaagccgttttttaaatgaacaccttagtagaacaatcctagaagaggaaaaaccctcataagtaggaagccctagctgggcggttgggagaaggagtataagtgatttattacagcttatgaagagactgtgtgtgggctgcccagggtcccagctctttctcagccccaactgagaaagggtggggtggtttgcctctgcctttgctgtgggtcacaaaccttcagtggcccaaaaggtggcaagcctgacagatgacctggaaaaatcaaggatatcaacggtttaaaggcttttaattcctaaccagggaattgtgggtcgggcctcttggacacacccctgtccaaaaaacgctctttccttcccttcctaaaacttttccctgtgtagcc

SEQ ID NO: 81136 - DNA, 449 bp, Homo sapiens
  sig_peptide (202)...(337): this location contains the signal peptide sequence, MTLLFIYFCILLNNISRTVSYHYCSLEITFYWLHSIPSFGYITIY, Run with SignalP
  misc_feature (196)...(387): similar to gi5616288 in the genepept database release 114, Run with FASTXY 3.3t00, default parameters
agcttttaaaacaatatttgtttacctttttctaagtatataaagtaatacatattcatagtagaaaatgtagaaaatttaaaaatgtttaagaataatatcatctgtaatccctctactcagagaaaatatattggtgcatttacacccagtttttcattaataaatattttgtaacaaaatttttgtgacctagttagtatgaccttattatttatttacttctgtatcttgcttaacaatatatcaagaacagtttcatatcattactgttccctggaaataactttttactggctgcatagcattccatcatttggatatattactatttatttaacccattctccaccttggaacatttaagttgtctcaattatcttgcagtagacagtaaatgtaagtgaatgctcttatatacaggtttttgtgagtttctgattgtttct

SEQ ID NO: 81137 - DNA, 318 bp, Homo sapiens
  sig_peptide (25)...(160): this location contains the signal peptide sequence, MPAFTCCCSCRGLIWYLLPGPCTNIHDIEARLMAMARVNYKIIHL, Run with SignalP
  misc_feature (41)...(80): similar to gi46613 in the genepept database release 114, Run with FASTXY 3.3t00, default parameters
gaagaatctaatttttggagtcccatgcctgctttcacctgttgctgcagttgtcgtggtttgatttggtatctactgcctggtccttgcaccaatattcatgatattgaagccagactaatggctatggccagggtgaattataagataattcacttgtcatcatttccagtggaatgatttttttcaaatattacgtgctggaaaacatgtacaggcaaatttggctttataaaacttctgctaaggaaatcaatgaaacatagacaatgttaaatgttaaggttattttttaaagcaatatttccctagattttc

SEQ ID NO: 81138 - DNA, 374 bp, Homo sapiens
  misc_feature (1)...(374): n = a,t,c or g
  sig_peptide (101)...(236): this location contains the signal peptide sequence, MKVSVLLLLLQILLQGLTTKPGPKGSFSPSLPTALCLLGSAIFFG, Run with SignalP
  misc_feature (108)...(209): similar to gi3093377 in the genepept database release 114, Run with FASTXY 3.3t00, default parameters
ggcacgagaagaatggctgatttgatggaaatctattatcaccactggggaaagagctctaagagctatgtatggtgagccagcaacattatctaagcttatgaaagttagtgtattattattattattgcagatattattgcaaggactgaccacaaagccaggtcccaaaggctctttctccccttcactgcccacagctctgtgcctcttaggatctgctatcttctttggcatcatgcctcctttttaaaatcttaattatcttgccataatcattacttagtttacatgagaaagttaaccaatactttttaatgtcaagtaagcttctttcactatggtcaagcttcttcattagtcagagtaaagan

SEQ ID NO: 81139 - DNA, 350 bp, Homo sapiens
  sig_peptide (113)...(248): this location contains the signal peptide sequence, MFSSHKVLYLFLDVFIVCSFLNIRKIRHYFLLQVCREVLVGELRV, Run with SignalP
  misc_feature (320)...(132): similar to gi5302754 in the genepept database release 114, Run with FASTXY 3.3t00, default parameters
ggcacgagattttctgagggtaaaatagcacaataacgtttctatttccaaaattgtgagcattggttgggagagcagttcaaccttagttcttgcctggtaactgtggacaatgttttctagtcataaagttttgtatttatttcttgatgtgtttattgtatgttcctttttgaacataagaaagataagacattattttctcctccaggtttgccgagaagtgcttgtgggtgagctgagggtagggcatctgtggctcagttttcaggctatggaggaaatatctgctgggctgctatttccctgcataagttctcattgcgggagggagcagaaggtaatttcag

SEQ ID NO: 81140 - DNA, 514 bp, Homo sapiens
  sig_peptide (154)...(289): this location contains the signal peptide sequence, MVIINCSPRFWFLFPFTIQHTCKCPLGVRYHTRHLEQIAANKKHC, Run with SignalP
  misc_feature (315)...(38): similar to gi5103227 in the genepept database release 114, Run with FASTXY 3.3t00, default parameters
ggcacgagaactggcttgtacatagaagacgtcacacagttttttcttccttgcattttctctcttatttctcaccctcacttcaaattgtttaagtagtgaaattcttttgcctatttcacctaaaactgagatgaagaggaatgagggagaatggtaataattaactgttctcctagattctggttccttttccctttcactattcaacacacatgtaagtgcccattaggtgttaggtaccacactagacacttggaacagatagcagcaaataagaaacactgtccctatccatatgaagtacattacaatagcagctactggagggcaggcattatattacatactttgcatgcgtatctcacatcatacccacattattattctttttttttttttttttttggaaaaggggtccccttttgcccccagggggggggggcggggaaaggatctgggttaatgggctcccaccgggggacaaaaccaaaatcctttctgaaaaaaaaaa

SEQ ID NO: 81141 - DNA, 354 bp, Homo sapiens
  misc_feature (1)...(354): n = a,t,c or g
  sig_peptide (172)...(307): this location contains the signal peptide sequence, MFPWKNLFFLAWCIPLSLASRSRKHYSHERDGVSRPCWLFGCGHV, Run with SignalP
  misc_feature (336)...(201): similar to gi3414946 in the genepept database release 114, Run with FASTXY 3.3t00, default parameters
ggcacgagagcgcacttttatagaaaccatgattttgctaaataaatgctcaacctataataagtaatttgaattggcttgaattgctgacatcttttcttaactcctggagataatactagtcagagtgctggggtcttcctctgattgaactgtgaatgagttcataacatgttcccttggaagaacttgttctttttagcttggtgcatccctctgagcttagctagcaggagtagaaagcactattcccatgaaagagatggtgtgagtagaccatgttggctgtttgggtgtgggcatgtggtaattgactaacaaatgctttctctggcctctggngcttttatcttt

SEQ ID NO: 81142 - DNA, 401 bp, Homo sapiens
  sig_peptide (168)...(303): this location contains the signal peptide sequence, MNLKLNLKLTSLMIRFSCAVFENELQHSVSFSQQIFFNKVQPCIA, Run with SignalP
  misc_feature (218)...(33): similar to gi552132 in the genepept database release 114, Run with FASTXY 3.3t00, default parameters
ggcacgaggtagaatttctgagtcatagggtaggtgtatgtttaacattacagaaactgccagactaacctgagcttcaacaacaaatgtgattttaaaataaatttgggtacaaatatagaaatacaccttcaaattaacaagggaaattcaggtgaaacttaaatatgaacttaaaacttaacctgaagttgacctccttaatgataaggttctcctgtgcagtatttgaaaacgaattacagcactcagtctctttttcccaacagatttttttcaataaagtacaaccatgcattgcttaaagacagggatacaatctgaggtgtggtgttaagtgattttgtcattgtgtaaacatgatagagtgtattttaacaaacctggatggaatagcctac

SEQ ID NO: 81143 - DNA, 815 bp, Homo sapiens
  sig_peptide (359)...(494): this location contains the signal peptide sequence, MTVCFILLACACVFISETDFFSLLCLHPVWESNFTWLTRELGSGP, Run with SignalP
  misc_feature (670)...(479): similar to gi5230853 in the genepept database release 114, Run with FASTXY 3.3t00, default parameters
ttttgtcgcctcggaccgccttgatttcgtggcgacccacgcgtccgctccttgctagttctaggggcgtcttggtttctgtctgggcctctgcagacctttccctttgtcctctcatcggttttcttcctgtgttgcagcgaatgggcctctggtgcttttggatcgtggcgatcttagtagacatccttccttgtcttgatcggaacaggaattactagtcatttctctgccaaggatgatgtgtgctataaaaagcctttatcaagcagagaaaggtactattcctaactttctgacatttaaaaaaatcttaagtgggtgttgaaccgtttcagtgttttcagcatcaatggagatgaccgtatgctttattttattggcttgtgcatgtgtgttcataagtgagacagactttttttccttgctctgtcttcatccagtttgggaatcgaatttcacctggctcacaagggagctgggcagtggcccctcttttctgggttctggaagttctccgaaggttatggccactgctcactgcagactacacccaccactggggcactgggcccttggcggggagtgcatgcaggcaggcggccaggtgctgacctccgagcatgcctgtgtgtggctgtggcctgaccctctccctcacgcctccccccaaccggggggacctcgtgtctgtgggggccctggccctgtggctgacttttcctttgtccctgtactgaccccgcatcagagccctgcacctgggctgctgaaacctgacttcctcagcttcctcacctgcagaactaaggtgg

SEQ ID NO: 81144 - DNA, 967 bp, Homo sapiens
  sig_peptide (174)...(309): this location contains the signal peptide sequence, MLFVLCLFLFHLLPVPLHFQIPAPLLLFLFCLSPSPPLPCLVPFE, Run with SignalP
  misc_feature (310)...(96): similar to gi3135267 in the genepept database release 114, Run with FASTXY 3.3t00, default parameters
tcatagatagtcgtgccggaccgcccgggtcgacccacgcgtccgatctgctctcgttcagttccgtgctgaaaaaaggacttaattcatttgtagactttgtttcccttgtttctgcttctccatttcttgtattattttcttttcctcctgttgttcctttctcactttttatgctttttgtcctctgcttgtttttattccaccttctccctgtccctctccacttccaaattcctgctcctctcctcctcttccttttttgtctttctccgtctcctcctcttccttgcttggtcccttttgaagttgagcccagtggcgggactccacgacgtagacctctctccttctgcccttgctgtgtccaggaaggtaacgtaacctcgccaaccccatccccactgcctcggagggggtgtagcaacactagtcaaacacagagccagaacccacctacctctctctctttctttctctctgaccctcaatagtcctgttacaaaatgtcatgagtctgtggcagtttctaaaggtacagtatccctttgactgtctatggggaggaccagggtgcagagtaaagccagagagcctccaggtctgggtccttcagggctgcagcattggctggcccttcgtggctggggctttaagtctcagatccatcagatagaggggcaggcatgcaggtgaggagcctcccgcctgcgtgcagcgatttggatgggagagtcaaggaatactgtccttacaaagactgatctacaccagtgccctcgggcccctttccaaacaaccactgaaagcaaacctctctacctcgtgtcttgctgagtgtgcgtggatttaagaattgcctgatttgagagcctgttggtggtggataaaggattgggcgattgaaaaggccatggtgggccggtggtgttggccccggggaaactagaacgcccgtgggctaaaa

SEQ ID NO: 81145 - DNA, 776 bp, Homo sapiens
  sig_peptide (608)...(473): this location contains the signal peptide sequence, MVSISHALFCIIFPATLCSMHYYSLFIQEEMKVLESEVIFPTRSH, Run with SignalP
  misc_feature (287)...(33): similar to gi2313361 in the genepept database release 114, Run with FASTXY 3.3t00, default parameters
ctagtaatgaggaattgtggagggaaatatccagttcacatcacctaggaaaggatggagtagatgaactaggtctttgttaatttgatgccctacttgggtctaaatcagtgattattgctctgagagtgatttaaggaaactaatttggggaagggggaggaaatgaaagctaaaaagctgatttaaaatgccaccgtatttctattatatggggataattgtcagaattatggtgctggcagtgagaatggaaatgaggggattaataaaagagtcatttaaaaaacaaagtgaaaacaatactcaggtcttaaagagtgattaggtatgacaggtgagaaaaaagaatagttatcatttatttgtgaagtgacatagcagattaaaaaacaaaaacaggaaacaaacaaagccaggtgttcgtggttgaagaaatcctagagttgaagcttagccctccacttccaagatgggagcgtgtggggaaaattacctcactttccagaactttcatttcctcctggataaaaagggagtaataatgcatagagcacagggtggctggaaaaatgatacagaataatgcatgggaaatactcaccatggacgatctcctttgctcctattgagggccaagccgggctcaaaccctttatttacctgacctcctgaaactttttcagcaatgggggattcccctcccctctggcaaccgccatagcaaaaaccacctgatttactcacctcgccagagtcctcatttttgcgttctc

SEQ ID NO: 81146 - DNA, 1403 bp, Homo sapiens
  sig_peptide (191)...(326): this location contains the signal peptide sequence, MKMETVVWLMMGHHCCVCLQALCTLCPTPPHPPVWRRAEKKLSLQ, Run with SignalP
  misc_feature (1306)...(743): similar to gi1213132 in the genepept database release 114, Run with FASTXY 3.3t00, default parameters
cagatctgagctcttccccaaagggtggtgacttccatcaccctgcttctttggggtcacagtctggtctgggtaatgtgaaccccccaggctttggacctgggactaagaggctctaggaggctccagcctcatctgcctcctatcccctgccttgttcagaggcccagagctggggccggaagtgatcatgaagatggaaactgtggtctggctcatgatggggcatcactgctgtgtctgtttgcaggcgttgtgcactctgtgccccacacccccacaccctcctgtctggaggagggctgaaaaaaagctgagtttgcagctggtggaggaggagccaaaagaagcttccctgcccccaagactcatgctggggaggagaggggacggtgggatcaaccttgcttctattagcccagatgcccctcagtaatcaagcatagtcatctctgagacctgaggtttaggattattgtcccatttcatgggtgagaaacctgagattcaaagataggaagtcacttgcctatggtacccattaggtggagctgggactagaactcagggctttgggtcccagaccttctgctggagggacgaagccctgtctcttacattctggttaggaaactaagacccagagtgggcaaaggcacagcccaagttgcactccgggtgctggcctcctccccgctgcctctctgcctgtctcccacagtgatgtttgcttcgtggttggtcaagaacggcaggaggtatttgcccatcgggtgcttgttggcctgtagatgcaacttcttccagcgacttctgggcacagagccaggccccggggtgcccagtccttgggtgctaaaccctgggccaactggagccttcctggcaatgcttgagttcctatataccaacaggcgtcagccgtaccggccactctgtgagcctgctgccaggggccctggtgggataggtggggggcgctcgagcccctacctgctcatacagtatgttccacgtccggtgtggtgctgtgtgtcgtccctccaaccactctgcttgcgcgtcgatggcgcagggggcgttgttttgctgttgccatgtggggtggcccgtgccgagcactccgtggtctctctaggtctaccactacctcaccgcgcgcgagttggcgtctctatctctgattcctttgactcgcgccggtactgggtgcactcgagtccctccagcggggggcgtcccagccgcccccgcctccggtcgcccattccttacatgctcatacggatgtccctgtggccttaaggtcgcttgccggtatctcctccctcctcccccccctgtttatcgctggtcgcacgccaggcttctgcgttcctgcacactagaaagttaagatgatt

SEQ ID NO: 81147 - DNA, 765 bp, Homo sapiens
  sig_peptide (260)...(395): this location contains the signal peptide sequence, MSIIPLLAISAHVTLCKAQIIGRQSLDLFFIIILPIQFGFLSQSC, Run with SignalP
  misc_feature (205)...(100): similar to gi619498 in the genepept database release 114, Run with FASTXY 3.3t00, default parameters
tgtaaaaggagccctgagaatatataacctaatctggggttccagagaaatctttcccaaggaagcggacttcgacttgagagctgaggtcgacattataccatttaggaagatggttggagctaagttttggagtgactcttgatgctaccgcaacgcacttctcagcagataccagtgatgccatacaattggagaggatgctttcataaagcgtgaggtttcctggtcacattcttggctcacagctgaattccacatgagtattatccctctcttggctattagtgctcacgtgactttgtgtaaagcacagataattggaaggcaatcattggacctctttttcatcattatcctccccatccagtttgggtttctaagccagagttgctaaccactagtagttagcactactagtgatttggggtttcccatctgccctggctcatggacatgactcagataggctggaagacatgaggcgcgtggataacacacagattatctgagcattctgggatcactgagatgccctgcggttactgtggaatcgcatcccagaagctctgaccacatccatccatgccgagaaacccattttccagcactcacaggaccattgttaatttttcccaaccatccgggaaaagtggtatcttcctgctccacaaaaaataagctggaggcaggggccatgcctcacgcctgaaaattgtacattttggcgggccagggggccaatacttgggcccgcacccaacc

SEQ ID NO: 81148 - DNA, 359 bp, Homo sapiens
  sig_peptide (57)...(192): this location contains the signal peptide sequence, MLQAIFLICLLVHLEGELFFKIYVGIGDSDGHSKLTVTVLGGLLF, Run with SignalP
  misc_feature (48)...(140): similar to gi2224439 in the genepept database release 114, Run with FASTXY 3.3t00, default parameters
acatatctgactcaattgacagtatgttgcaaacattatgacacatcaccccctaaatgcttcaggcaatatttttaatttgtctattggtacatttggagggggagttgtttttcaaaatatatgtcgggataggtgattctgatggccattccaagttaacagtcactgtgctgggaggtctgttatttgtgaatgcctgaaaacatcttattatttcctacttaggttttagtttaactcatctccctttttcagcactgaagaaattgctgagtaactgattctggcaataatgtacacttttatggtatggataatagtacaacttatatagtgctttttacccagtatggtgt

SEQ ID NO: 81149 - DNA, 358 bp, Homo sapiens
  sig_peptide (81)...(216): this location contains the signal peptide sequence, MPNRIELSALFRVPFHVDWLLFAFVFFPLCYVLGFCLPSTVKTHS, Run with SignalP
  misc_feature (307)...(347): similar to gi3095109 in the genepept database release 114, Run with FASTXY 3.3t00, default parameters
atcactaagaagatgaattaacttagtctctgatatttatctaagatggactcctgtcaaaaatctctaaccagtcctccatgcccaaccgcatagaactctctgctctgttcagggtaccatttcatgttgattggcttttatttgcttttgtttttttccctctgtgttatgtccttgggttctgcctaccttccacagtcaaaacacattcgttgattgtgggtgctgtttttcaaagtgagattgtcactaatgtttgccagatttataaatgtaaaacaacttgacagattttgtatgagttttttgggtgcagatgacttaagttctggaattattaacatgtgactgagag

SEQ ID NO: 81150 - DNA, 340 bp, Homo sapiens
  sig_peptide (76)...(211): this location contains the signal peptide sequence, MDFLPGPLALLVGYQVLLLTHSRASGKAVRKWLSESHFCPRGERS, Run with SignalP
  misc_feature (157)...(33): similar to gi386963 in the genepept database release 114, Run with FASTXY 3.3t00, default parameters
accaaagtgagctttgttagtgagcattcacagagggtaggagctgagtccacgaagttcacatcatgccaaggaatggatttcctcccagggccactagcattacttgtgggttatcaagtgttactgctcacacattccagagcttctggaaaagccgtaaggaaatggctttcagaaagccatttctgtcctagaggagagaggtcctggatttcactgaaccagaacttgatgggtggttttggtattcatggacctaggtagtggggagctccttcctttggatgtttcctttatgcccacagtcgaaccatatcctagttgtacagccaagaag

SEQ ID NO: 81151 - DNA, 405 bp, Homo sapiens
  sig_peptide (57)...(192): this location contains the signal peptide sequence, MIFGCFIKMWLKALFNGWHIHNKVHSAVADSTWLKSHISHECLLH, Run with SignalP
  misc_feature (320)...(191): similar to gi2706947 in the genepept database release 114, Run with FASTXY 3.3t00, default parameters
tcaggtcaactccattctatgttaaatttcataatatctgaaaaacgtcttgcaatatgatctttggatgttttataaaaatgtggctcaaagccctatttaatggctggcacatacacaacaaggtccactctgctgttgctgactccacctggctaaaaagtcatatttctcatgagtgtttactacacaagaatcgggcatttaagaaagtagaccgaaaaatatattactgtagaaggagaagtaatgactgataattatataaatggcaccggaagggatttttttccctgcatgctatatattaaaagatctattaaatttacagctggttctagctggaatttatttcattgaattgtgctgatgtgctaatttggccatttatctggacaataatgg

SEQ ID NO: 81152 - DNA, 652 bp, Homo sapiens
  sig_peptide (93)...(228): this location contains the signal peptide sequence, MPKGHILWGHILISFICFRAAGCSSGFSRGLQVGSRLLSPGCWNL, Run with SignalP
  misc_feature (302)...(145): similar to gi168789 in the genepept database release 114, Run with FASTXY 3.3t00, default parameters
aaaaaaaggaagaagtagtttctgcttttagtcagataaacaagctctgggaagacttccttctacatctgaaccagctcaaaacaatccttatgccaaaggggcatattttgtgggggcatattctgatttccttcatctgctttagggcagctggctgttcaagtgggttctctcggggtctccaggttggttctagattactcagtccgggctgttggaacctgacccctcaggcagaaactataggcatcgtagaacccactcttgtaggatttgaggcggtgtagagcacaggctttcctgggagacatcccagtccccgttctgaggcagcccccaatcagctgagttactgtgaccaagatgtcttacccctcagagactcagtttcttcaactgttaaatgcaaatggggttaaatgagatagaatcatgggagatggtgctggttatccccacagtcactgtattatccctgccacagagtgagcacttaatcaatttcagtttaaaaacacaggaggaacttgagccctatagagttcagtgtcttgcccagggtactactagagcagtcccctgactccgagaccaggaccctcccacagcaccacctgggccacctggagtcaatcagggctctgtcgct

SEQ ID NO: 81153 - DNA, 476 bp, Homo sapiens
  sig_peptide (46)...(181): this location contains the signal peptide sequence, MLSEHSHTHLLLCLLWLLLQCDGRVEELQQAMTCKAENIFWPLNK, Run with SignalP
  misc_feature (378)...(433): similar to gi414521 in the genepept database release 114, Run with FASTXY 3.3t00, default parameters
ggggtgggcagtctacagttggctgagccctgtttttgtgaataaatgttatcagaacacagccacacccatttgcttctatgtcttctgtggctgcttttgcaatgtgacggccgagttgaggagctgcaacaggcgatgacttgtaaagctgaaaatattttttggcccttgaataagaggttggctgacttctgacttagggcatcagttgttctgttatcccagtaaaactcaaggcattaggggagaaatgttaatattaatacttaagttgatttgatttagggaaatctttgaagatttctaagtcttaagcagtagaacctgttaatggttttagtttcagcagtaaggacattttacaagtaaagttttaaatgaaaacattttgtatgaagccacaagtcgtctggcctcttgctggtgccagatattaacactgatcctatttctccttgctgaccaagtctgtg

SEQ ID NO: 81154 - DNA, 846 bp, Homo sapiens
  sig_peptide (16)...(151): this location contains the signal peptide sequence, MSVAVFVLLKLLCHLHLKKRGEPPVCAHVAVGTSAPCKGCLRTQS, Run with SignalP
  misc_feature (139)...(707): similar to gi619347 in the genepept database release 114, Run with FASTXY 3.3t00, default parameters
ggcagcaatcctcagatgagtgtggccgtatttgtgttactcaagctgctttgtcatctgcatttgaagaaacgtggggagcctcctgtgtgtgcccatgtggcagtgggcacctctgccccctgcaaaggctgtctaagaacacagagcctgcagtacaggccctgcctcctgacatgccccaggccggctggaagaaagcgcgggactgtcctattgacgtggggaggggacggctggactctgtgatgctcactgtgttctctgctgggccatgtggctccccacagagaccctgggtgcccagtcattcgcgttctcctatgtgtgtatatatattatatatacatgtatttactaactttagaaagcccccaagggggccttgtttctgcttggacagtcagcgtccatagcgtgtcattcctaagcttcattaaggagattcagaagcaagcagttaccccctggagtctgcacgctgggcacaagggtcacaccttcgttgagagctcctgaccccaggagccgagggcaggacacggtagtgtttacaggacctggcaaaggggcactgccttgtgtgtgaggttttttcaccagtcactccctttttaaaaacagcatatcttttgaagaacaagaagcttacgcaggcctaagcaaaccactttgcacgtggagcttttaggaccttttcattgtctggttaccgtattaccctctatccccaaggcgggctttgagttcaacagggcctcgaacttgttaacctgttttttcaaaatttttaataatgaaaagtgacccccctggcccccacccgggataaattttcatgctttt

SEQ ID NO: 81155 - DNA, 850 bp, Homo sapiens
  misc_feature (1)...(850): n = a,t,c or g
  sig_peptide (415)...(550): this location contains the signal peptide sequence, MVGILYTTYFVKCLICISKLISFNGXRSLTSTYKLCDMQLFYVAG, Run with SignalP
  misc_feature (209)...(52): similar to gi1788948 in the genepept database release 114, Run with FASTXY 3.3t00, default parameters
ggaatagcaacttaatttttgaggaggagtagattgtgtctttttttaattgagaaaatctgattattttgtctttggattttaaagtttgctttttagaactgcaagctagcacatacacagttaatgatgtgtgtctgtgtatgatatgaattcagttaattttgatttggtttccagtgctaaccttcacaacatattgtttgaaacacatggtaacattttttctgagaagagtgaaggtttactctgtgccatttgtctcatagcatgttgttgtttgtagacttctattgggataaggttcatgccctgataaatagtaaatagtgatgacaatatataataaccgtttttaatcaatatcagaattaaatgggccaatagtacatacacataaagagcctactattaatggtaggcattttatataccacatattttgttaaatgccttatttgtatatctaaactgatctcatttaatgggngcaggagcctgacttctacttacaagctatgtgacatgcaacttttttatgtggcgggatttcagctgctcattggtaaagcctggatactaaataggatttccttaacgcttttaacaaaaggatgaaatgaactaatctttataaaaacttacggccaaaggccttactaactatttatttgagcattttacatacccagcctaaaaggccaaagggctccttcttttgtcgggcatttttggagaaaaacaaaagttgccacatctttggggacctaccacttttgggaactaaggggagacaggccggaaaaccaaaaaattataattctattttaaaggggctgaattcgcccca

SEQ ID NO: 81156 - DNA, 362 bp, Homo sapiens
  sig_peptide (104)...(239): this location contains the signal peptide sequence, MFIFFSYLSLPLISSQHLSGGAQYSEANAMYPQCCNVVGCQTLGW, Run with SignalP
  misc_feature (187)...(333): similar to gi192099 in the genepept database release 114, Run with FASTXY 3.3t00, default parameters
gaagccccctttgggagtcctaattaaccttaacttgttaaagctaattgaatttttttctgggaagtccttcaataattttcccacgtttaaaactagtggcatgtttatatttttttcttatctatctttgcctctcattagcagtcaacacctgagtgggggagcacagtattctgaggctaatgctatgtatccccaatgttgtaatgtagtgggatgccagactctgggatggtaatgagattacttttatgcattttgttgttcttgtgtcttggctggtttggaaagccctctagaagctgtgattaaaatgctcaagtctctttgttgggtgcctttgactaatgcttttgtcg

SEQ ID NO: 81157 - DNA, 421 bp, Homo sapiens
  sig_peptide (125)...(260): this location contains the signal peptide sequence, MVHVQSFAYTVLCALSSGEISGSRIINAKSVGILRLSIPIGKLLH, Run with SignalP
  misc_feature (133)...(254): similar to gi930093 in the genepept database release 114, Run with FASTXY 3.3t00, default parameters
ttccaaaccatgatttctaatgaatgcacggtaaatagatttgctatcagttatggagtttttcttctttcttctaaataaccctaaataaccttctaactttcttctaaatagccctaaatagatggttcatgtgcaaagttttgcctatacagtactttgtgctctttcctcgggagaaatttctggaagtagaattattaatgcaaagagtgtgggcattttaagactctcaatacctattggcaaattgcttcacataaaagttgaaaggtctgtccttaagtcctgctgcatcttttacacattgagcagaacttttatcctttttattgaaaaaatctttgtgaacttgacagatgagaaaaatgccgtctcggagctattttatttccatttttattgttagtgacaatgaact

SEQ ID NO: 81158 - DNA, 409 bp, Homo sapiens
  sig_peptide (82)...(217): this location contains the signal peptide sequence, MREPGLALCCCCLCLVFRSPVAGRVWYRSPNGTESGLGCLVQMEE, Run with SignalP
  misc_feature (373)...(243): similar to gi1881294 in the genepept database release 114, Run with FASTXY 3.3t00, default parameters
tgaaatgttagctgtcattgcttccctgaaaagttggtgtgaacccaggagggctggctgcacactgctggtgttggggggatgagagagccagggcttgctctttgttgttgttgcttgtgcttagtgttcaggtcacctgtagcaggcagagtgtggtatcggtccccgaatggaacagagtcagggctgggatgcctggtgcagatggaggagggagcccttagctgggccggaaaacctcgaagggtactttgtgtgaaaagaggagtgaaagaggaagtggaaaggtactgttgacctgtgtccttccccagtcaccttcctctgaaagctcctcccttagtatgaatgaggtagggatgccggccagcaggcaggtgtgttccccagtgaggtgaggtcctca

SEQ ID NO: 81159 - DNA, 609 bp, Homo sapiens
  misc_feature (1)...(609): n = a,t,c or g
  sig_peptide (68)...(203): this location contains the signal peptide sequence, MGGRLWIFLQLCQSLGLSTVVSSRPVACLESVPGMCMSVCMPLNY, Run with SignalP
  misc_feature (177)...(30): similar to gi2905630 in the genepept database release 114, Run with FASTXY 3.3t00, default parameters
acagggtgtttctggtgagcccctaaacaccagcatggtgatatccactcagtatctttttacccatatgggtgggaggctttggatttttctccagctatgtcagagcctgggtctgagcacagtggtcagcagcagacctgttgcctgtctggagtccgttcctgggatgtgtatgtcggtctgcatgcccttgaattaccgtggaagtaacttctctgagacagatgtctggatggatctttccagagctcatctttgaatccttgttattataaaataagaattaaattgttgaactataacacttagggttaacgggcacataaatactttttttaaattttttaacatatatatatttttttcatcacattttcattgtattaggtatcagaatttttttttttaattcagtacagatttacggcctggggggggggctcacgcttatagtcccaaagttctgggattacaggcgtgcacnctgtgcccggcctaacattaattcttagttatgtgcacagtcttatgggcacaaaagccaaatactctcatgcctgaagaaagtaagcatttttaatgcaaaggtatgagtagacaatgatg

SEQ ID NO: 81160 - DNA, 390 bp, Homo sapiens
  sig_peptide (239)...(374): this location contains the signal peptide sequence, MSAAPWLGHVARPFINHLLCVLNAVPNSPKHELSACREEGAASVG, Run with SignalP
  misc_feature (58)...(202): similar to gi4756710 in the genepept database release 114, Run with FASTXY 3.3t00, default parameters
tttcgtggggccaacgagtgaccgctgctcgtagtggcccatggcctctcaagctcccctaccacacccaaggccattcccccagtgggatcacgccagcccccaatgtcccggccgtggagcctgaagtcacccttctgaaaggacctggatctgggcggccccatgtggggtccgagtcactgtccagatgctgcctccagtttgtagttaagttgtcctcttccagaacacctagatgtcagctgctccctggcttgggcatgtggccaggccatttattaatcacctgctgtgtgtgctgaatgcagtccctaactctcccaagcatgagttatctgcctgccgggaagagggtgctgcgtctgtgggccacgtggggacccagca

SEQ ID NO: 81161 - DNA, 487 bp, Homo sapiens
  misc_feature (1)...(487): n = a,t,c or g
  sig_peptide (26)...(161): this location contains the signal peptide sequence, MIALRXPPRRIKRRHFSLWALLPQCLLLNHDSPKKSLDCLLPLNH, Run with SignalP
  misc_feature (325)...(462): similar to gi222161 in the genepept database release 114, Run with FASTXY 3.3t00, default parameters
gcaggtcnnnaaatgaagcatcgaaatgatagcactccgggnccccccgcgtcgaataaaacgccgtcatttctccttatgggcacttttgccccagtgccttctcttgaatcatgacagtcctaaaaagagtctggattgcttattgccactgaatcatgccatggaacgattctgcatttcactttcaaacttgtctgtgacacgaaaagcactgcttcatggcttcttgcccatggattttatatggacacagtgggtaatacttggaggaatttttggttgggttgaagaatctctctgagaagttgacacgtgggggcaatggtttgtttctcttgtatttctgaagttgcaaataatcatgtaagcagctcaaccaggagtttacaccaaacttttaataggcgatatatcattattttttttcccattggtttggataacatccactctaactggcagttagtcatacttagctattttg

SEQ ID NO: 81162 - DNA, 608 bp, Homo sapiens
  sig_peptide (43)...(178): this location contains the signal peptide sequence, MLIPIPVHIFPLSSLLGDGTMRLLPDISSDWLCLNQEFAPVQSAI, Run with SignalP
  misc_feature (316)...(89): similar to gi5912094 in the genepept database release 114, Run with FASTXY 3.3t00, default parameters
tgaagttctctcaagaagctgacttgtccttgttctctctggatgctgatccctattcctgttcatatctttcccctttcttccctgctgggggatggaacaatgaggcttctaccagatatcagctccgactggctttgcttgaatcaagagtttgcccctgttcaatcagccatagccatggagtgggggtcatgtgtgggggatcaggatgacacccactggatatgtctgaggcagaccagtggggtgtaatcactagggacacctacatttgcctgtagtgtagagagggactgatgtcactttggtgccaggactgagtggccttctcaggaaccagagccttttgccgaaaaaaggtttgggatcctgaggccagaccagtcaggcagtccaccctgaacagagcccatgcaggacagtgggcatgagaccccaaacctctggctgagaatattgccctcacttaaagaaggagctggaacccgagtgcagtgcctcacgcctgtaatcccagcactttgggaggctgaggtgggcagaacatctgaggtcgggagttcaagaccagcctggccaacatcatgaggcttcatctctactaa

SEQ ID NO: 81163 - DNA, 790 bp, Homo sapiens
  sig_peptide (674)...(539): this location contains the signal peptide sequence, MDASTWRGPLKWQLFIFNAVFLNLQAKEAHSHHRDWRTPKCKKLG, Run with SignalP
  misc_feature (373)...(168): similar to gi4529888 in the genepept database release 114, Run with FASTXY 3.3t00, default parameters
gtgctttgcccaggtctctctgccagtgaggaaagacctttgcccttgtacttcatgtgaaatcacatggacaccatattaatctctggtaacctgtatggggcactgagttagtgggtcagttgcagggcagtgaccttaccatgaggattagacaggataggacatccgggtctctgaaggcagcgaaatgcatgacaacagagtcattccgaggacaggctggtggtaacttctggaagtttctttcactgaggtgctgcctgcttccctccagccccaggagtcagcaatctggatgagaagacaaggatggaaggcggggaccttgtcagtagtgtgctctgttgcatcctcacagcgggacacatagcaggctctcaggaaatatctgttgaagaagtgaagggctcaggatgcatggtttggctttctggacaagaggaagcaagaacttctgtgagctagaaccatccaggcaggcatctctttcctcctcatcctcctccgcccatagccacctgggagagacttagagcccagtttcttgcacttgggagtcctccaatccctgtgatggctgtgggcctccttggcctggaggttgagaaacactgcattaaagatgaaaagctgccacttcagggggcccctccaagttgaggcatccataaaacaaacacatgtgaaagcaaggcttaaaattggatgcggccccagaagagtggtaatttctcatataggatttgatggactaaaaaaaattgtaccagtacctagaaccccaccg

SEQ ID NO: 81164 - DNA, 1391 bp, Homo sapiens
  misc_feature (1)...(1391): n = a,t,c or g
  sig_peptide (1182)...(1047): this location contains the signal peptide sequence, MMVWNLFPCFPPLLLLQFIDCQQSSEIEQGFTRSLLGHPIFFCPD, Run with SignalP
  misc_feature (358)...(209): similar to gi805044 in the genepept database release 114, Run with FASTXY 3.3t00, default parameters
tttacaaccaactttttttttatttttttttttaaatttttcattttattcaaagttggtacagaattgctaacatttccataaaataattactatacttcagttacaggacaaaataccacagaaaggaatgtactttgcaagaaatggtagttcatcctaagtttccaaatacttttggaaggctaatgcagcagctgggcaaaataacacacagtacacaaagaacagtgtatttcacagagtcagtaatgaaaaactgacagctctttaggcaggatatgctttttttcatttttttaaacaataaccactttcaaaaacacatggaaccaagatcatacatggttttacaattttaaaaaatcagattgtacacaataggttagaatagacaagttagaattgtcatgattttaacaatcttaaatctacaatttcaactgtactcctttcaatatagaaataacctgctttataccaaattctactttctgcttgcaactaaaacactgtacaatgagatggatacaattagtcaaaccttaaaattaaaaaagctgtagacaacagaaggtaaactggaaatccatttacaattcaaaaaactcactaataacaaaattaatgttcatcaacttcatttataatcacatttggcctacaatgcctaactaaaatgacacatgtacacaatatacacccccagtgtactaactggtctcttacaaaaaatctgaacaaagcatcataagcaggacactgggaagaacatgtttcaatgtagacatcttttaaaaatgcattaatacttacatatcaaaattactagataaaagcagcagcactctgctgacatttggcttaaaaataaatgaatgaatgaagcaatttcacaggatattattagaaaaagaattggttttcttcttgaagaagactactaacttttgcacagcaactatttttgatatccatcttatcaaaaagaaaaaagaaagcactgagaagtataacacagttcatacatgattgccaacatgggtctggacaaaagaaaatgggatgtccaagcaaagaacgggtaaatccctgctctatttctgaactctgctggcaatctataaactgaagcagtaacagtgggggaaagcaagggaacaaattccataccatcatctgacactaatggagtatggcattattaaaaaaaataaagcttttgcattttaataaccccacagaaaagtctatgagcaaaagacttgatctgtttgccactcaaaagttagagatctcacagtgaaattagaaaactctaattatacatatttcggacgcgtgggtcgnccctgcagatggngatcatnccgacgggatcagtgggggcc

SEQ ID NO: 81165 - DNA, 447 bp, Homo sapiens
  misc_feature (1)...(447): n = a,t,c or g
  sig_peptide (159)...(294): this location contains the signal peptide sequence, MNRASSKTKVTWGCLAGLFSMFTAFESFSLLSTTLPQPQPLPPQT, Run with SignalP
  misc_feature (272)...(122): similar to gi64305 in the genepept database release 114, Run with FASTXY 3.3t00, default parameters
natcgagttcgattacccangcggnggaattcctcctaataacaaagctttctcccagacagtagaaaggatgaaccacataagcctttatcaattacacaaagcacagcagcttcatcaatgggacaaaacccttctgtacagtttctatgtacaagatgaatagggccagctctaagaccaaggtcacatggggatgtcttgcaggtttgttttctatgttcacagcatttgaatctttttctctactcagcaccacccttcctcagccacaaccactcccaccccaaacacacacacccagaggcaccctgtgggagtccctcttaagctctccccactggctcattcgctactgatgacatgtggacccagacactttcatcactctcaaccagtcttttatgtgtgagtcagataggctcttacctttcctaaagaaatttc

SEQ ID NO: 81166 - DNA, 454 bp, Homo sapiens
  misc_feature (1)...(454): n = a,t,c or g
  sig_peptide (117)...(252): this location contains the signal peptide sequence, MFIRFFLYITLERMLIPLLILLAHTFSCRHSTIYPYNFIYVQLRG, Run with SignalP
  misc_feature (439)...(274): similar to gi862343 in the genepept database release 114, Run with FASTXY 3.3t00, default parameters
natagaagactgnagcccttgcggnggaattcagcactctgagntttcccttcctttttttctatatgtaaccttatatattattaacaatatataacattctttcctcatggcatatgttcatcagatttttcctatatataaccttagaaagaatgttaatacctctgctgattttgcttgcccataccttttcatgtagacattctactatatatccttataatttcatatatgtacaacttaggggatgtattttatgtgtgtgcatttagctactggtatattgcacagtaattttctaattacacaaatacttatttcagataaattagaaaataaatatgtatgtgggggttaagacttataatcccaattcttagagacaagcattagcactgtactataccttcttccagaattttctgactattataatatatgtattccatta

SEQ ID NO: 81167 - DNA, 718 bp, Homo sapiens; identical to SEQ ID NO: 80937
  sig_peptide (103)...(238): this location contains the signal peptide sequence, MASAPKLGFSVFTSLFSFGGGCLPCDFNFLVDLRVVDSAFIQPLY, Run with SignalP
  misc_feature (113)...(240): similar to gi2547192 in the genepept database release 114, Run with FASTXY 3.3t00, default parameters

SEQ ID NO: 81168 - DNA, 738 bp, Homo sapiens
  sig_peptide (19)...(154): this location contains the signal peptide sequence, MMSIWPFYVLFFLGVSFARIEGWPSDIHPTGLCGHQEQSWSQNPR, Run with SignalP
  misc_feature (351)...(249): similar to gi2160134 in the genepept database release 114, Run with FASTXY 3.3t00, default parameters
aattttaattcggaagccatgatgagcatttggcctttttatgtcctgttttttcttggtgtatcatttgccagaatagagggctggccatctgacattcaccccacaggcctgtgtggacatcaggagcaaagttggagccagaatccaagatgaggtgtccatggtctggtggtcctggtcttgcaggggaaccgctttgctagtagcatcctgaaccagcgggggagaacagcacaggagggcagctgctgaggcttgggtctgtgttgcaaagtggcattcactggcctggaggaacaagtgtcagaggtggaggctggcttaagggcatgtgtggaattgacttaatgtgcattactgagcacagagcagagccttcggatgttaaatgaagaacaaagaactttccccaaaaaatctgttataaagttttaatataaactgcacatggaaatagcatctcttcttcagtgaataattttaaagggtatttaacactgcagcctcattaggtgccaaatttgaaagatttaaaggtcccagatatgttcgtcttaagacttggctttccagcaggctgctaaatctttggggctttcccgtgagagcaccttttttttctttttaacccaaaccttgtttttgcgcctgaacttaggcttacctgcaatcccgttaaggtagcttcttctccctctttctttaaaccactcccatgctccccgcgcgctatac

SEQ ID NO: 81169 - DNA, 874 bp, Homo sapiens
  sig_peptide (581)...(446): this location contains the signal peptide sequence, MLPLISSIKILKLLYYFSVWGWGFFFFETEFRSCCPGWSAMVRSQ, Run with SignalP
  misc_feature (695)...(50): similar to gi485162 in the genepept database release 114, Run with FASTXY 3.3t00, default parameters
aaggaccagtaaataatgatcttacttccaaatctccttggaatttcacgacagcacagactgactttataccttcatttcagcgtggtaaaaatcgattaacacttctaatgagtcaagtcctagggttttttggttttgttttgttgccaacgaggaacacagctctgggggaatggtgtcatccacctcgctttaaaaataagcacatgatggctgggcaccgtggctcacgcctgtaatcccagcactttgggaggctgaggcgggtggatcacctgaggtcgggagtttgagaccagcctggccaacatggtgaaaccccatcgctactaaaaatataaaaaattagctgggcatggtggcgcacgcctgtagttccagctactcaggaggctgaggcaggagaatcgcttgaacccgggaggtggaggttgcagtgagctgagatcgcaccattgcactccagcctgggcaacaagagcgaaactctgtctcaaaaaaaaaaaaaccccacccccaaacagaaaaataataaagtaacttcagaattttaatgctagaaattaaaggtagcatccacacataattccacctgcaaaatctttagtgagaagatgacaatacgatcttactccaacagttccaatcctaaaagacatccaaattatgataaattttagtcttatgaatgcgaggaaagggtgaaaagaggtgctggaaatacagcatgcagaccaaacaaaaatctccacagtcactgaactcatattctagtatagggagcccgaaaacatttacaagtgaatctacatcactttgatagagtaagaaggcaagtgggaattccgccacacgaactagggatctcgat

SEQ ID NO: 81170 - DNA, 500 bp, Homo sapiens
  misc_feature (1)...(500): n = a,t,c or g
  sig_peptide (80)...(215): this location contains the signal peptide sequence, MSLLFLGFKQYSLQAALVKPSICSACGEGRGALKWRKVEFSHVKS, Run with SignalP
  misc_feature (457)...(278): similar to gi1334496 in the genepept database release 114, Run with FASTXY 3.3t00, default parameters
gcncgatagagaccctnnnnnctctaggggctacagcanagccncnaannnnnnnnactcacctgcttcttgccttcccatgtctctgctctttcttggatttaaacaatatagcctacaagctgcgctagtcaagccaagtatctgttcagcatgcggggaaggtagaggagctttaaagtggaggaaagtagaattcagtcatgtgaaatcaaaggtgaaatgataaaaagaatatggacagagcacaacccaccagatcaatgaaataatgtctgagaaagcacttcaaagagtgtccagcacaataaaaatagattgtcctggagaagcagtttctggagtaagaaaaatgtgacttttagatggatcttgaagaattaatggaacctggacctatggaattagagacgatgagtaagcaaagaagaaggaagttgagatggcagtaccagcaggagaaagattctgtgcaggaaagggttgggtgtgttcaagga

SEQ ID NO: 81171 - DNA, 1010 bp, Homo sapiens; identical to SEQ ID NO: 81087
  sig_peptide (94)...(229): this location contains the signal peptide sequence, MLMFVNAVATGKWWIKWFPFATLEISVCIHTGSLATWGSMDCVDS, Run with SignalP
  misc_feature (598)...(512): similar to gi808679 in the genepept database release 114, Run with FASTXY 3.3t00, default parameters

SEQ ID NO: 81172 - DNA, 802 bp, Homo sapiens
  sig_peptide (56)...(191): this location contains the signal peptide sequence, MVTLLIAKQFWIFTVDLHLSDYVLELSRYLINACFYSPCSQPIEK, Run with SignalP
  misc_feature (90)...(175): similar to gi62180 in the genepept database release 114, Run with FASTXY 3.3t00, default parameters
tagtccagtgtcgtggaattcctaccgtttagggcattctgcttaaagagagattatggtcacactcttaatagcaaagcaattttggatattcaccgtggacctacatttgtcagattatgttttggagttatctaggtacctaataaatgcctgtttttacagcccatgttcacagcccattgagaaatagacaaagtgggtaaggcagatgaatgaaaacatgtcagttttattactgataatgtactgcaattggagaatgtggtcagatattccaaacttcctatgactgcacactgaagagtcttctctttggaggggagaaaaataatgctcgtggctgtttttaaaattatgtttattatatatttattaaaagaaagataatatttagaaaaaaatctcattagtcaagtaaaattttagatactctatcttgaaaaaccttctgaaaacagtataaaaaatatttgagatatgtcagtataacatagagcaatattcgattctccctccttggggcagcaaatattttctgaaaatcaaaagtacagaatcttttaggcaggaaatacattttggccaattataattttagaagtcaaaattgttaaggtttttggaccaagcacaatggctcacgcctggaatcccaacactttgggaggcttgaggcaggcacttcacttaaggtcaagagttcagaaccagcctgggcaacatggtttaacccccccctcccttaagcattacctaatttattggggcatgggggaacactacgcctgaaaccccagcg

SEQ ID NO: 81173 - DNA, 1039 bp, Homo sapiens
  sig_peptide (376)...(511): this location contains the signal peptide sequence, MKKGRLTAYLLFLFAFPCSHQPDSLSLIRTPHECHQLLEPINMPC, Run with SignalP
  misc_feature (1016)...(735): similar to gi4160357 in the genepept database release 114, Run with FASTXY 3.3t00, default parameters
agtattttgagtggcaactatctggggccagtgtcatgcaggcagtaaaaagaattttccaagacagttgtaggtaaagaaaggcatatttatttattagcgaaagtaggaaaatatgttgtaagaaagcaaacgacaagtcagcaagagaagaactggctgccaggagacacaaaggcttgcttgctggggattctataagatggtgcttgtgctgtgtgctgaagagggttaatgataacaccttgtgcagtactgacaatgtcaaggttgcagtgagctaacttgcatttttctatcagctgagggactggtgatagctgggtgcaggaagattgtgagctatttgcgcaggagggctatgtgtcctggaccatgaagaaaggcagactcacagcttatctgctttttctttttgctttcccctgctcccaccagcctgactccctttctctaattaggactccacatgaatgccatcaacttttagagccaattaacatgccttgtactccccttcagaaatcacacaaatgcctaccatcacctttctccacctctttatactaacagtactttggtgaggtgtaatttatgtattaaaaatgaatacatttaagtgtaaagcttgatgaattttgacaaatatatacacttgtgcaaccatcatccagatcaaggtaaagaaatttccttaacttcgggaaattcctgtatgtctccttcctgtcatcttccccccagaccccacgagacacaccactattctgatttctatcaccatagcttggttttgtctgttcttgaccttcttataaggaatcatgcagtgcgtactctttcattccgtgaatgagctgttcatttctttatattggcataatagattctactgtgtgaatacccctcaatttatttatctggtcttctgtcaataaacacctgggttatttccagtgggggctattatggaaaaagctattataaacctttcctgcacaaggccttttttgaaaatacacgagaacttttttaaacg

SEQ ID NO: 81174 - DNA, 1052 bp, Homo sapiens
  sig_peptide (710)...(575): this location contains the signal peptide sequence, MERHGFFLDVCLILGLIPLSIKYSLQKRGKNSAADNAGWSDLSLG, Run with SignalP
  misc_feature (912)...(607): similar to gi870913 in the genepept database release 114, Run with FASTXY 3.3t00, default parameters
ttttttttttttatttttaaccatcatttatttaactcgtcatgtttgaactgttaggttgtatttatcgttttctgtattacagacgacttgatgacaaatgaccaatcctctaatgttcaatataaaaatatcaattgcataaggagataaggggcatttggctaaaataaaattcagtgtgccccaccctctccacatgtaatttgctctaaaaaggcatgaatgactaaattagcccttctattctccagcgcagctcctgagcccagcggtgggtgcaggtgcttagagcccgggctttgctcttctgccgccagaaaggcgaaggggcaccccaaccccgggattctccctctcccttttttataaatagaagagtgctcagggtcagtgcatgagaccagcgctttttgactttgcacttatcagagtaacttagggggcttgtttaaaaatacacatttccctggctgagctcccagaaattggacttcagtggtttagcgggagtgtgcataggccaggtgattctgaggaccaacaggggttaggaattgccccgttaattctggccaagggagagatcagaccatccagcattgtccgcagcagagtttttccccctcttttgcaatgaatatttgatgctcagagggatgagccccaggatgaggcacacatccaagaaaaatccatgcctctccatcttttccccaggattgccctaaggcgagccgctctttgtgattccttcactttccccggttcatagaacaggcctcttcttagtctgttttgttgtctcttatctgttcaacaaacacccactgcgcaggaccatcctccggtgagccgtcgagtggggccgtttgggagcccttcttcgtgggtgagcactgaaggaacccgggtcccataagcccgtgcttctatgggggctgccccctctcccatcgcagggtaaaaggcaccaggctgttaagcttttcccaccacctggaggatccactctccgtccgtccttcccggaattacaccacagtggtacg

SEQ ID NO: 81175 - DNA, 786 bp, Homo sapiens
  misc_feature (1)...(786): n = a,t,c or g
  sig_peptide (30)...(165): this location contains the signal peptide sequence, MFACLFHLKLYFSWILYFPVVLHMIIQMSQKCPFLFFTTTLGSMP, Run with SignalP
  misc_feature (248)...(20): similar to gi64787 in the genepept database release 114, Run with FASTXY 3.3t00, default parameters
gtaccactgtgtagtaattcctgcctcttatgtttgcctgtttgttccatctaaaactctacttttcctggattctttactttccagttgtcttgcatatgatcatccaaatgtcccaaaagtgcccatttctcttcttcaccactaccttggggtccatgccactagtgttttcttgcttgatctgttacagtgacctgactggtctttctgctttcactcctacacactcccccaaccctctgtgtgcaagagcagagcgagctttttaaaataaaagtcacatgccttaggtaatcctcccatgttccactatcttggctcattgaattcctgtcttcaggaatcttgtcctctgccttacctcagcctctcactctggtcttattcatttccagtaatcgaaccccctccctaattgtgtgtatccttctctctgaccatagctcctgtctttccagctcactttctgtagtatcccagatccagtaatccttggatcctactaggaccttcaagccactacagacaggctattacctccatgaccccaccaaagtatgccctgccctccttagttacgggggacctgacttaacaaccacacctcaacctgggcccctggctgttccccatgtcccttaaccattgggaatagcaggtgaccccaaccccacccttcccttgtttgtttggnccagnaaaggaattttcccttggaaatgaaaggggggccccttacctggcctggtttgaaaaaattaaaatttggaactccttgtaaag

SEQ ID NO: 81176 - DNA, 466 bp, Homo sapiens
  sig_peptide (78)...(213): this location contains the signal peptide sequence, MGSRVEAIRLFLHSAHPGLGTAVLLFRVTLQTAVGLAGGDSKQTP, Run with SignalP
  misc_feature (96)...(452): similar to gi64238 in the genepept database release 114, Run with FASTXY 3.3t00, default parameters
gtatcccactgtgtgtgtaattcggggagtaggaatcaagggaagcaatcagcatcaggggcaagctgactgtttagatgggcagcagggttgaggccattcgtttattccttcattcagctcaccctgggctggggacagctgtgttgctcttcagagttaccctccaaactgcagtgggattggcaggaggagattctaaacagactcccaaaggtttagaccatcaaatatcagagccacaaaattaccaaacgaaatttcttaacagttttaaaatagaaatctattttttgactcagcagtacatacatatggttctaaatgagacaggtggaagaggacacagtgaaaaggctgttggataacttccactaggtcaagaaattaaattgaaaaaatagcagctactattggaactatgtgatatacaagaaaaacaaactatggaactagtaatatgaca

SEQ ID NO: 81177 - DNA, 381 bp, Homo sapiens
  sig_peptide (141)...(6): this location contains the signal peptide sequence, MPEIGPTLILLLPILLGLTGYFTPPDHKLDLSLEKFLITNAWADA, Run with SignalP
  misc_feature (324)...(282): similar to gi1549357 in the genepept database release 114, Run with FASTXY 3.3t00, default parameters
cccacgcgtccgcccacgcgttcgtaatcaaaaatttctctaatgaaagatcaagcttgtggtcaggaggagtaaagtatccagttaatcccagaagaatgggcagaagtaggataagggtagggccaatctctggcatgtatttatcaacattctttctgataatagaatgtttagcatacaatagaatggagtgtttaacatacaagttgagttcaaagtttaaatttcaaatggtaaatggttttccaatattgggatgtaatgatggaccaaaaaagaaaaagaagaaagtaatacattatagcccaatactttttaatcaagatatgaggacttaattatttttttccagtaaagtcgagcatttttataaatggg

SEQ ID NO: 81178 - DNA, 531 bp, Homo sapiens
  misc_feature (1)...(531): n = a,t,c or g
  sig_peptide (171)...(306): this location contains the signal peptide sequence, MWHLVNSWICFHCSVLGWEVLSGSPWEENSILATLAKECHFVKIT, Run with SignalP
  misc_feature (466)...(343): similar to gi3806153 in the genepept database release 114, Run with FASTXY 3.3t00, default parameters
tgcgagcnnnncnnaattgacgcctgctggaacggtcngtagaacccggctcgacccacgcgtccggagtgattctcttcaatctatgtatttgtatcactttcatatttcttaccctctcttcctccaattctatggcctatggaaaatgggattagaccctgttgttaatgtggcatttagtaaatagttggatctgtttccactgttctgtattgggctgggaagtgttatcaggtagtccctgggaagagaacagtatattggcaacattagcaaaggagtgccattttgtaaaaattacctcattgtataactttctttaacttggtacactcaagctttgttccagactctggttaaaggtggggctaaatttcaacctaataattctaaaagagagcttcagaagctaaaacaattcacatcttggtgacaggggatactntttcctgctaagatgccctcaaaatgtttttctctttctttntttcttgggtggngaagacagggtagataggtggggtggga

SEQ ID NO: 81179 - DNA, 380 bp, Homo sapiens
  sig_peptide (6)...(141): this location contains the signal peptide sequence, MWTVGLFALLSCLHAAGIQAFLAQEAHHPVLQQGGGPVLFPLRTH, Run with SignalP
  misc_feature (196)...(95): similar to gi4760909 in the genepept database release 114, Run with FASTXY 3.3t00, default parameters
aagagatgtggactgtgggactctttgctctcctatcctgcttgcatgcagcaggcattcaggcatttctggcccaggaagcccaccaccctgtactgcagcagggaggtgggccagttctgttcccactgaggacccaccaacaacaatgatgcaagcttgtttacagagtatttttagttattgtacaccacaaaacttaagaacgtgagcataggttaatatttatcttcagggaaaagagtttcctttagaaggttctagaattaggaactgctgcacgcatattcactcaggaatgcttgtgtgtgcagccataaaggtaggctgagagaaacgttgcggagctgagtgcagatggccccagggaatgatgcctt

SEQ ID NO: 81180 - DNA, 704 bp, Homo sapiens
  sig_peptide (167)...(302): this location contains the signal peptide sequence, MVLHILAYKYSVLFFRCIPIYLIFLNPKANFVIVILYAFSYRGLF, Run with SignalP
  misc_feature (140)...(244): similar to gi4886403 in the genepept database release 114, Run with FASTXY 3.3t00, default parameters
cttaggaattttagaatcagcttttcagtttccttaaaaacttctcttgggggagaaattttattcaggattgcattgatctctatggattgatgtgcagataattgaaatctttaaaattgaatcttttaattcatagacatatgtccctttatttatttaggtcatggttttgcatattttagcatataagtattctgtacttttctttagatgtattcctatatatttgatatttttaaaccctaaagctaattttgtaattgtaattttgtatgctttttcttatagaggactcttttttaagctgtaggccctacaaaacctcattctatccctgggcagaatgttttcactcacatgaatgttgaaaatcatgtgggaagctagtcatttcttaattgtgcaggactcgaaggttcccacaactgtgggtcgtaggatgtttggcattcttatttttcccaccactgaatgtcagtgaattctcaatcattgtgacaaccccagagacattaccaccaccatcattcttttgagactcaattgttaaagacattttgctcttattatgacagttattatagttcataaatgtaagcatgcttgaatgtccccaagtgcgtgtgatttttttgcaggaagagacctaaaataagtcaacagtttcaagtgttgccatttattaatacaacctagacttt

SEQ ID NO: 81181 - DNA, 478 bp, Homo sapiens
  misc_feature (1)...(478): n = a,t,c or g
  sig_peptide (168)...(303): this location contains the signal peptide sequence, MPCVSAFCYCSTLFLVSESVPIIFCHVTTTTKFHGLKQQCGQAWV, Run with SignalP
  misc_feature (148)...(264): similar to gi2292866 in the genepept database release 114, Run with FASTXY 3.3t00, default parameters
aggtagatcnccnntnnnnnnnnnaattgacccgcgctgcaggaattccggcacgagaaaaaaaaacctttaggcttccattaaaactctcctcgagtctccttcagttttcactgacactctgtgtggtcctttatgcttctttctgctccccaggtccagagccaatgccatgtgtgtcagccttttgttactgcagcaccctatttctggtatcagaatctgtcccaataatcttttgccatgtaacaaccaccacaaaatttcatggtttaaaacaacaatgtgggcaggcctgggtggagacagcttgtctctgttgcatgcagcgtcagctggggtggcttgactaggactgaaggatccactttcaccacatggccaaccagctcgttctggctgttggtttaaatggacctccctgcagggtggctttgcttcctcacacatggtagttggggtctcaaagcaaatgtcc

SEQ ID NO: 81182 - DNA, 464 bp, Homo sapiens
  misc_feature (1)...(464): n = a,t,c or g
  sig_peptide (139)...(274): this location contains the signal peptide sequence, MPCVSAFCYCSTLFLVSESVPIIFCHVTTTTKFHGLKQQCGQAWV, Run with SignalP
  misc_feature (395)...(237): similar to gi2292866 in the genepept database release 114, Run with FASTXY 3.3t00, default parameters
ncctgatcgcctgcggaattcctttgatagcccatcaaaccgcacgcctccatggggagcctctacagccttcttcatatagagtgacactctgcgtggaccgttacgcttctttctgcgtcccagagtgcagaaacaatgccatgtgtgtcagccttttgttactgcagcaccctatttctggtatcagaatctgtcccaataatcttttgccatgtaacaaccaccacaaaatttcatggtttaaaacaacaatgtgggcaggcctgggtggagacagcttgtctctgttgcatgcagcgtcagctggggtggcttgactaggactgaaggatccactttcaccacatggccaaccagctcgttctggctgttggtttaaatggacctccctgcagggtggctttgcttcctcacacatggtagttggggtctcaaagcaaatgtcccaagaaacaggaagg

SEQ ID NO: 81183 - DNA, 1267 bp, Homo sapiens
  misc_feature (1)...(1267): n = a,t,c or g
  sig_peptide (230)...(365): this location contains the signal peptide sequence, MICFCLPVCPKTHLAHPMLATLAFVSLLEYAKHCLRDFILVSFLL, Run with SignalP
  misc_feature (114)...(11): similar to gi38735 in the genepept database release 114, Run with FASTXY 3.3t00, default parameters
cgcctactcatctaaatttctgcatttcttgccaagataattgctatcaactcctaataattttttctagttctgcacattcccctgatgtattctcaatgtagcagccagagagagcctgcaaaagtgcaaatttgatcatgctgttcttctgctccagatttttcagtggcttctcaactcattcagagtaaggccaaaatccttacgaagtcctataatcatttgaatgatctgtttttgtctgcctgtctgtcctaaaacacacctggctcatcccatgctagcaacattggcctttgtgtcacttcttgaatatgccaagcattgcctcagggacttcatacttgtgtcctttcttcttggaatgctctttctcagatatcaacactaaacactaccactcctcaaatatcactaaatcactaaatcaatcctgccttatttaaagagaaatctcacttctctctgcagttttaaattttttttagattttattttaggttcagaggtatatgtgcaggtttgttatataagtaaattgcatggcatgggaatttgctgcataaaatatttcatcactggggtgataagcagaatacctgatagggaactttttgatcctcacccccctcctgccctccgtcttcaagtgggccctggtgcctgtacctcccttctttgtgcccatatggatttaaaggtcacctcccacttggaagtgagaacatgtgggccttgccttggtggtccctggccgagccttcgcgaccacgggaattaaaacagtgtcttttctctcaccgtgagaagcctgcaaactgccggtccgcgaggggggcgccctgtcgcatgccgacatttggggaaccgcgcatcaacaccttacgccgaatctccgcacactacgcgacagtgagacatcgtcgacttcccccgatacgcggatctcgccgagtcgcgtcgcactccgcggctcaccgccacgttggccaaccggtggcgacctccgctatggtgacgacctcggcattttctgcgttcctcgctatcccaccgccctgtgggaaaactccggtcgtccggcgnccggcgcggtctcacctataacgtcccgcatacgccggagagacagacctataacctcgcatattcgcgccatccgcgcaattcgcacgcaaaccgatcctaaccacccgcgccatcgcgcgcgattccaactgcgctcgtggccctagggcgcgggaaactccgcggcttcgcgtct

SEQ ID NO: 81184 - DNA, 1927 bp, Homo sapiens
  sig_peptide (1779)...(1644): this location contains the signal peptide sequence, MKIAFGNLWMEILYLKPPWTLLHLLQCFKKHWLAVFGLVMEKNLL, Run with SignalP
  misc_feature (491)...(15): similar to gi984222 in the genepept database release 114, Run with FASTXY 3.3t00, default parameters
ttttttttattgctttaaaaaataaacatttataatagaataccaaattctatttaatctaatgtgttaaccaaaagcataatatattcccagtaaacaaggacttccaacttatcctataactaaaaagtcaactaaacagttggttttagctagagacaaacatcagtcactgccaccaaattccattatataaatttattttgcttcacatttaaggagaaacccagcagaggggtcgccctgctcttccccactagaaatgtactgaaaagtgacaagcccacagaaggaaaggctgtataaggaagtaggagcttcagtcaaatttctactttcattaccctgagggaggtgaaggagggtgttattttcatcaggtcaacatggatgacagtttgatcataaaaaacagcccacattaagatttcatttgtgaaatatggtgagcatgatcatgccctaatgatttcttagggtttggcagtgtctctggtcacatgcccatacttagggttgaaagaaatgctaatactgtaccctgggtcttcctcagatgccacagtggctcctgccctaggatgactaaaaatacggctctcctttccttagagatactggctcactatcaagaatagaggtagggaggcattgtgaactccagaagagttgagtctatggagtttattccacagtggatacattaggctttttagagctacaatgagactgtcagtaataggcgatcacctttttatacctatgaaacatttcttaaaattctcttgggtttggcccaaaagagtgaccagattgaaaactactctgttattcttaaggacaaatgcaattcctttaaagttacaaatcagtacttatatcctatagttgagcatgtcttcacaccatcccctgtttttggcctccatataaacagatgcattgcactgctgcatggtatattccatctcaaccagctggcggcatccaatggttaacttttccctatactcagtctgagaaacacaatcataaatttcctgggcagtaaatttgacatttttatttacctcatacttgattaggaagttatagagggtctcaacatcttgataattactgtttggggccaaaatcctttgaattccttcaagaatatccctcacagctgccattaacttttgaagacatataaatgcttcttcaaatgatgctatatttgaagtagtcagagctgaatttgagcccaatctttgaaatacatccgtgctgttctgatatattgtaatccaaacactctctaggatagaccagatttcttgatgcctgctgggttggggaagatgagaactcgagaaaacagtgatttcttgattatgagaattcttcaatgaagtaccttcctgctttttagtcactgtgttttctgaagaatttggcttaagttttgtcttgacctctgcaaatgtctgaaggaggttgtttacttgagcaaaggtctgtggaagaataccatcataatttgaccttgtactgaaagcatgtaacaaacttctagaatcctgaagcaagaatttgactgttgtaaaatccactgccttattagctttacggagatttttgtataggctctcaatagttaaaagcaagttcttttccataactaatccaaatacagccaaccaatgttttttaaagcactgtagtaaatgtagtagagtccatggtggtttcaggtacaggatctccatccaaaggtttccaaaagcaattttcatttctgtttctaatattgaagataaacctgttccaagagatttttcaagatcagatacaatgctctcaagcagaatggacagtccagaatttgtagattcctccttatagctctctttcaagggtgttgtttctgctcgtgccgaattcc

SEQ ID NO: 81185 - DNA, 896 bp, Homo sapiens
  sig_peptide (172)...(307): this location contains the signal peptide sequence, MFVYLLIYILNICDGRQTFLTLSYSITLCKVYFQEIINRNKFIQT, Run with SignalP
  misc_feature (199)...(423): similar to gi3005960 in the genepept database release 114, Run with FASTXY 3.3t00, default parameters
cgcgctggaattcacgcaaaccccaaattttaaagataaataacaggaatattcattatcaaaacttgtcattgacggttaagctcaatggcacgaaaatctgttttgttttaaaaaataaaccaaatttttaaaagcccaagtaatcagtaacataagcttgtttttaaaatgtttgtatatcttttaatttatattctaaatatatgtgatgggaggcaaacatttctaacactgagttatagcataacactctgcaaagtatattttcaagagattataaacagaaacaaatttatccaaacagaaaaccccactgtgtgtgcagatagctttacaaaaagaatgtgagcacttcttctttatgaaactctctcttttgggacatgtacttatctggccctgtctcaggacatacttttggcaaatcactttgaaaaatcctcatataaaggagtggggagaaatttttgttttacaaaaaatcttacctgcaattgaaaaattactcacattttgaaaataattaagaaaaaaatgttcagactgtttatcctttatatgttttaatatagttagaaatttattttttcttcaaatcttatgcaccactataggatgtgttctactgaatttagttcaaagtttcaaataattgttcattaaaaatgaggtggcattgtataacccttcatttcataaggcccaaaagaaatcaacaattcttatctattattgggaatgtgtcctttagcaatctgaaaaacaatgcttattttcccccacgccatttcacacaataactccttatacttagcgcctcacatcgcttcttaaacgttttcctctaaaattcccaatacagctttccttacgcgtcacatattaatggctct

SEQ ID NO: 81186 - DNA, 799 bp, Homo sapiens
  sig_peptide (41)...(176): this location contains the signal peptide sequence, MLLCPQLMNVCCYLMVGNKLVGSAVSTAIRVQFYYILINIMIKLT, Run with SignalP
  misc_feature (349)...(698): similar to gi4160155 in the genepept database release 114, Run with FASTXY 3.3t00, default parameters
agtccactgtggtggaattccaaaaagggatgtaattgttatgctgctgtgtccacaactgatgaatgtttgttgctatttgatggttggtaacaaattggtgggttctgctgtcagcactgctatcagagtacagttctattatattctcattaacataatgataaaattaacattaagaaaacactttctataagaatttatgagattctatgcaattaagcatgtaacagtgtggacagaaaatttgcagaaggctgtataataataaaaactttaaaaatatatttgtagaagtagtcagtgacctgagactttagactgttgatgactggcttgttgatatgttaatgtgaagtaattattccagtgaattgaagctgaaagtcaacatgtatatttattaatttagtttaagcttccttattgttaatcacaggtgaggtatctattttcagcagacttatccataactttcccatcaaggtttgccaaccataaaatctaaatatttttttcctgtcaactttctaatttctaattaggaaatgttttgtgactctttaaaatcctaaacacttggttgtctttaagaactgattttgtgggtcagagatctgataaatactgggtacaaggtgacgttgggcattcactactattttcacaataattgataagcaggtttcgttattaaaaggaatcggatggttctttaataagcccccttttaccgaattggggaaaactggtcacggcaagaacccgactattatgcggggtacaccaagacctcgcc

SEQ ID NO: 81187 - DNA, 1314 bp, Homo sapiens
  sig_peptide (839)...(704): this location contains the signal peptide sequence, MNRCELRACTLMWLKILSTSYKMVSSGGIFQLASISTDDTVHRLT, Run with SignalP
  misc_feature (992)...(1262): similar to gi1389766 in the genepept database release 114, Run with FASTXY 3.3t00, default parameters
ttcacattctccaaacctgctttgtctaatatgtgatgaccagctatccagaaaagccatgaaacctttaaaagtgcttcaccacatggagaccaaacaccctgcattaaaagacaagcctttggagtttttcaaaagaaaaaatcgtgaacgcaaagaacagaagtaattattgaaggccaccacttcatcaaatgtgtctgcagtgagagcatcattcttagtggctaatcacattgctaaagctaagaaggcctttactactggtgaagagttgatcctgcctgctgctaaggacatctgttgtgaactcttaggagagcctgcagttcaaaaggtggcacatgttcctcttctggctagcaccatagctagatgaattaatagaggatatgaggcacagttgttagaattaatgagtcactgtggtacccaatccaggttaatgagtctaccagtgttgacagcaaggcaacaatgcttgtttttgtgtgatacatttttcaggaggatgtgcatgaggatatattatgtgcacttttgctttcaaccaacaccacagctgcagaactattcaagtctttaaatacatatcaggaaaactgaattggtcattttgtatcaatatatgcagggatggagcagctgccatgactggacggctttctgttttcactactcaggtcaaagagcttgcttctgaatgtgagtctgtgtactgtgtcatctgtagagatgctggctagttggaaaatgccacctgaacttaccattttgtaggatgtgcttaaaattttcaaccacattaaagtacatgcccttaattcacatctgttcatgtagctctgtgagaagatagacacagagcacacgtcttctcttatacacagaagagagacggcttcctaaaggtagatcactggccactgtttttcagttacaatagctgctccagagatttcattttagaaaaagtcaccactggcagcacatttcgttgacacagaattgggtcacaaaattgcttacttggccaggcatggtgggtcacgcctgtaattacagcacttttgggaggccaaggcaggcagatcactcgaggccaggagtttgagaccagtctggccaaaggggagaaacctcgtctttactaaaaaatacaaaaattagctaggcatggtggcacatgcctataatcccggctactcgggaggctgaggcacgagaatcacttgagcctggaaggcagaggttgcaatgagccgagatcatgccactgcactccagcctgggcaagagagcgagactctctcg

SEQ ID NO: 81188 - DNA, 739 bp, Homo sapiens
  misc_feature (1)...(739): n = a,t,c or g
  sig_peptide (691)...(556): this location contains the signal peptide sequence, MVVSILNXLVIVFYRCFMLFISNYFSKMGLHTSSDFQRNSLMNLS, Run with SignalP
  misc_feature (436)...(318): similar to gi4981790 in the genepept database release 114, Run with FASTXY 3.3t00, default parameters
tcgtggaattcgttaagtgccgcatattacaatagtaataaaatgtttactttatgttagtacctgttagttacaacaggggtccatgaacatatctgaccttactatttcccttccaaataaaacacgattgttgatgtcagtgcattggaagaaacagagattttggaaaacaggctctgccaccttctaagctagtttctgtgttattaaatagtgataacacccagctcatgggattgtggtaaatctgggtgaaataacatgtataaagaacctggcactcaataaatgataattattgttgtgatcattatttgcagaaaattttaccttgaaggttcccataagcaggaaagactgagcaaccatccattggcattgattgccttgctagttggtagtaatgctttgatataaaggcttctgagtctgaacccacacctaggagaaagagtctgtggctcacaagcgatgtctgctttgtgcactgttcagggagggccggtgctgtgccaggcctttactatgtagactctaaggctggagtctttccggataaattcatcaatgaatttctttggaaatctgaagaagtatgtaaacccatcttggaaaaataatttgagatgaataacataaaacacctgtaaaacacaattactaanatatttaaaattgatactaccatctgtgttttttattaacacattaaataacaagatcttgtggcaggtct

SEQ ID NO: 81189 - DNA, 736 bp, Homo sapiens
  sig_peptide (279)...(414): this location contains the signal peptide sequence, MYYALCLALLFCRKTLDLIEKRKTLNWAEVLVAPTRALLHSDTVH, Run with SignalP
  misc_feature (245)...(333): similar to gi3822172 in the genepept database release 114, Run with FASTXY 3.3t00, default parameters
cgcgcgtaattcggtagtagttactctgttatatcagcagaaagctgacaatcctaggaggtacctatcctctagcttgaatatccgctcatcttcaagacacgaagatctgccagctttgctcaaagtatctgaatagagaggaaacatccaatgagtgctttttagatgcaatgtttataaagtataaatatatatttagtaaatatttgataaactaatgataagccattatagcttataccattttccatttctcaacaattcaaataatcaccatgtactatgctttatgtcttgctttgcttttctgtaggaaaactttggaccttattgagaagaggaaaacacttaattgggcagaagtcctagtggcacccaccagagctctactgcattcagacactgttcacacactgaccattcatgtgtgttcagcatctgaacttggccttgtgacgtagagaccctgatgaaagctaatgtttctgttttcatgaaaatattcaatctagggaacaccttagaggaaaaaagacttttaggtaagattggtttggaaattgggaatgacccagcttgtgcctatatatgtgggcctgcaatcaacttctgtggtaggagtgagttgcctacctgaagggaaactttttacataggatttaaaaagatgatactaatttaaaaacaaacaacatttttaataggttcaaagctagtgaaagtaaaaataaac

SEQ ID NO: 81190 - DNA, 465 bp, Homo sapiens
  sig_peptide (141)...(6): this location contains the signal peptide sequence, MAFVASISFLLTARTLTLVQGSNIFNRNYSQPPRDGQVTQSEFHR, Run with SignalP
  misc_feature (112)...(223): similar to gi1054839 in the genepept database release 114, Run with FASTXY 3.3t00, default parameters
cactgcggtggaattcggactgtgttacctggccatccctgggaggctgggagtagtttcggttgaaaatgttgctgccctgtacaagagtcagggttctggcagtgagcaagaaagagatggatgctacgaaggccattagcagtgtctgcagggctcctccatcagatcttttgctcagaacttttcagctccctcttgtaatttaccctcaacaccatatgagccagaaaaagaaatcagggtcagtacttaagggccgtataagattactatcttgaaggtctcataaaccatattgttcaccatgatcacttccttaatttgcagaatcattcatcaaacctcccagtagcagagatttgctaccgctaaagatacagaaagaaggtccagcaacgaattataatagctaaagactacacaactgaattgttcagcaatagatgactaattgaataaact

SEQ ID NO: 81191 - DNA, 657 bp, Homo sapiens
  sig_peptide (342)...(477): this location contains the signal peptide sequence, MKGILFFFFWKGVYFSPSLKPRGEIWVNCPQPWGEGGPIGGKIKN, Run with SignalP
  misc_feature (31)...(145): similar to gi4155856 in the genepept database release 114, Run with FASTXY 3.3t00, default parameters
gaaatgcctctactgcatggtcacctttttctccaagaaagaaaagatttctctctagctttaataagcagagctttgcatactaaataacttggattttcccatcatcccaacattcaaaccaagcctcagaggaggaaaaatgcttcagagaggctgcaatgactgggttttgccatgtgtttctgagaatcagaaaggcactgcagatcttctagtcttctggagtcctgtggtctctgctgagcactgccactggtgccctgattcaaggcccaagcttgggaaacattgtttctggagctgctaaaccacaacccagaaaggagcacaagggagtgatgaagggcatcctctttttttttttttggaaaggggtttatttttccccaagtttaaagcccaggggggaaatttgggttaattgcccccaaccttggggggaaggggggcccattgggggaaaaattaaaaatgggggggttttttctggaagggaatttttccccaccatggaaaagaaaaaatttcccccaagggccaaaaccaaaattaaccctcccagaaaaatgggggcccaaaggaggcccaccccaaaatggcccacccggcagggtccctttaatagaagcccaaaaaagggcaaaagatatccgg

SEQ ID NO: 81192 - DNA, 692 bp, Homo sapiens
  sig_peptide (175)...(310): this location contains the signal peptide sequence, MYMNTCLYLHVYVLTCSGCNVDMCSRLFLSTKLKAHVQIVLYWVF, Run with SignalP
  misc_feature (175)...(414): similar to gi862343 in the genepept database release 114, Run with FASTXY 3.3t00, default parameters
ctccaaaccacctttcactctcagaaaatgagaccacaaaggagtatgctataaatcaaatttgccaaccaattatgtagatattactcattctaggactaatgatgatggtaaagaagttgccagtgttatggcaatgaaaatttcagaaaggaggagttgatgatcttctagatgtatatgaacacctgtctatatctgcatgtatatgttttgacctgcagtggttgcaatgttgatatgtgttcaagattattcctgtctacaaaactgaaggcccatgttcaaattgttctttattgggtgtttttatggtcacgtggtaacaattttcttacctaacctacaaaaggttctcttgatgaacatttttatttatatttactaatctttttaaaaaaaagctttcatagcattatataatcagatgaagaaagcccagtagaataaaaaaaaaattcattagcctagcctatattatgttttctgtcaaaggaaaacaaattctcaaatagggaattctaaaaatatttactaaagtaaaataactacttaaaatgttttattccagttgggaagggaagggtacaggggaggaaattggccaattatttaggggagaagtatatttattataagatggtgtcctcaaattagcctaccatggcacgtaggggcagcagctatattag

SEQ ID NO: 81193 - DNA, 350 bp, Homo sapiens
  misc_feature (1)...(350): n = a,t,c or g
  sig_peptide (43)...(178): this location contains the signal peptide sequence, MLWTTTTPSLITPEVRTSLLCLLWVSPHPPLTSQQVLIPSRLLFS, Run with SignalP
  misc_feature (107)...(229): similar to gi5042331 in the genepept database release 114, Run with FASTXY 3.3t00, default parameters
ggcttccactggggcttttccaggttacacttccccctggggatgctgtggacaaccacaaccccatccctaatcactcctgaagtcaggacttccctcttatgtttgctttgggtctccccgcatccccccttgacctcccagcaggtgctcataccttcaagactcttgttctcaaaatttcttgactttcataaccacaagctcccttaaaggaactggttccaaggcttaaacggcccaataacccggactaaaaaccttacctgcaattaagctgcttcttcctgccttggtccctgcagggacagcaaaaagcccatctcttcattttcctgaccttcagnggg

SEQ ID NO: 81194 - DNA, 736 bp, Homo sapiens
  sig_peptide (323)...(458): this location contains the signal peptide sequence, MLVHMLFPLPGISFLPSLLRNSSLSLKSQFSHYCPQRAFFDLCQA, Run with SignalP
  misc_feature (339)...(445): similar to gi563379 in the genepept database release 114, Run with FASTXY 3.3t00, default parameters
gtggtgtaattccagccacagcctcagaaaggagggacccagaccagaacagtagccacataggatttgcagtgaatgatagtccttgaatcaggccatcctttcatgttccatgggtaacaactagtcaggtatggcttggttggtgcttgttaacctttggcttattttttgtcatttataaaatgctagtgacattcaaagaaaacagctaactcttgtaaaaccaggaaaaaatttcagagctctttggacatgcatgatctcctcaatagacccctatgtatccagctgcttttcctgaacagaccatgaggctgctatgcttgtgcacatgttattccctctgcctggaatatccttccttcctagcctgctgagaaactcttcattatccttgaaaagccagttcagtcattactgcccccagagagccttctttgacctctgccaggctctgaagcaattgtctttcccttcagttgcatacgcagatgtgttcttgtgcatctctatgtaaaaatatggtttcttacatctggctgtctttcttgcacaatcctcaggtccagacctgggttattatctctggttcctggaaacacagggctaatacacaaggggtgcccactaatggataaataaaagccgggccccgtgcttcacgcctataatcccacattttgggaagccaggcgtgggtcacgaggccaggaaaggaaaacatccttggtat

SEQ ID NO: 81195 - DNA, 364 bp, Homo sapiens
  sig_peptide (187)...(52): this location contains the signal peptide sequence, MPCLLYLVILIEVFTLEKLLHIYTRSHIHKDAQGSIVRHCKKAET, Run with SignalP
  misc_feature (120)...(23): similar to gi6015741 in the genepept database release 114, Run with FASTXY 3.3t00, default parameters
ctgtggtggaattcgctcatttatctatttccctactgattggcatgtagcttgtttctgcttttttgcaatgacgcacaatgctaccttgagcatccttgtgtatgtggctcctcgtgtatatatgcaggagtttctctagagtaaaaacctcaattagaatcaccaggtataaaaggcagggcatcttcctttattcagcactgctcattgctttccaaatatttcaccttcatataagccccaaactagagttcctgttcctccccttctgccaatgcaatacattgtcaggctaaattttttattttttttaccatctgttgtaataaaaagatatctccttttactctcaaaaaaaaaa

SEQ ID NO: 81196 - DNA, 745 bp, Homo sapiens
  sig_peptide (27)...(162): this location contains the signal peptide sequence, MWFWLTPRHQMTLTTLHPKIRTLPRCHKIKKTPDSIYLSVSWGKT, Run with SignalP
  misc_feature (269)...(438): similar to gi1620041 in the genepept database release 114, Run with FASTXY 3.3t00, default parameters
cctggtgtaattcggcaggcagtgccatgtggttttggttgacacccagacaccagatgaccctgaccacattgcacccaaagattcgaacccttccccgttgccacaagatcaagaagactcctgactccatttacctaagtgtctcttggggaaagacatagaaagggcagacatgggatactgaccaccacttcaaaagattgattaaattttgagatgcaacgatttaaactggacgaaacaatttgcgcactaccctggctggggactgatgcggaagatcaatgggagatagacaaatagataacattgtctctgcacctgtgaattgtggtgcaaattaaataccacaagcccactactcttgtttagtttaaaaattagagctggagtctcaaaggtttagctgacagaacatttttgtaatgagcacaaaggttattttagacagaaaaatagatacaatgaaagtctcagaaacagacagttttcttcagtttctgttgttacaaaccaaatattttctcactgtccttcgttgtttagcaattttttttgtctttggaggacttttttgaaatcatccctgcactgactgaagtgcaaaatcaatagtatgtaagcgattagataggcggtattggaagaaaaatgtgttttcaagaatcaaaatgtatagccatttctgaagcagcccaaacctctaggtaatcatagagctctgtgagacagatctaaggac

SEQ ID NO: 81197 - DNA, 743 bp, Homo sapiens
  misc_feature (1)...(743): n = a,t,c or g
  sig_peptide (37)...(172): this location contains the signal peptide sequence, MLSSWILAIHFLAGTKMPFRAVFPSDHAAHQGDFTAVLRVMVFRV, Run with SignalP
  misc_feature (178)...(288): similar to gi347412 in the genepept database release 114, Run with FASTXY 3.3t00, default parameters
actgtggtggaattctggcatcaacccgtctgttaaatgttgtcttcgtggattctggccatccactttttggcaggcactaaaatgcctttcagagcagtcttccccagcgatcacgcagcacaccagggagattttactgctgttctccgggtgatggtgtttagagttcagactccatggccatcctgtagtcaccatgcagtgtacaatgcacaagaagcatgggcttctaaaacttgtagaaactaaagaaaacccaaatgcataacattttcccgaagggtaaccctctttccttcagctttatctctccaatgttgcagcctcagtcctctcacctgtagggcgacctgcttaatcctcttcagaggtcccacctctcaatacaaagtgttaatcattcccttggaaaaaggagcttagaattcaatcttcctatttgtaaatattggggtgagaagcagggtgttggatatttagggaaacattatctatttaatcttttaagagtcttctttagcaataagagcatgtaggaatcaatatgaaaataaatgatctgtttggtagctattcttgagtttcacagtgatcagaagctccaggaaagatggagagggcagactacttgcgtgtcctgtgtccttgngcagattacttctcctgtctctgccttccactatcttgggagatattgagatatagaacgagttgacgtatgcaaagtacttatatgccta

SEQ ID NO: 81198 - DNA, 421 bp, Homo sapiens
  sig_peptide (225)...(360): this location contains the signal peptide sequence, MSTSATLFIFLIATLCDTATQASIPNTCRDLPCHGVFAHVETHRF, Run with SignalP
  misc_feature (254)...(404): similar to gi1016046 in the genepept database release 114, Run with FASTXY 3.3t00, default parameters
cgaggtatcatcttaaccaaagtttattataattgagtgtacagcatctctggggaaatttatgtttaactgaattgatggataggcacattcatttcaaaagccacatctgtgatttctcttgcacagttattttattgctattttgtatgcaaatctcttgctaaagttattttagggttgggaggtgtgtgagagagaaagacagacagaaatagatagcaatgtctaccagtgcaactttattcatattcctcattgccactctctgtgatacagccacacaggcttcaatccctaatacttgccgtgatttgccctgccatggagtctttgcacatgttgaaactcacagattcccatcacattatgcttgttgtggctatctcaaaatatcatttatgttcatcattataattat

SEQ ID NO: 81199 - DNA, 730 bp, Homo sapiens
  sig_peptide (509)...(644): this location contains the signal peptide sequence, MYSLVFLTTYWIFITIHFTDEEIEAWQCAITYLGARGNSDLLLSP, Run with SignalP
  misc_feature (342)...(203): similar to gi4140510 in the genepept database release 114, Run with FASTXY 3.3t00, default parameters
agaaaaaaagggctatggtgcattacaggtgacaggcacttagattcacagtctcaggcctggcctaagggttcctgttggaaatacaagagttattgggttgtttccttcctttgttctggggttagggcttggccctgccatgaactaccaatatgacttggtcaagctacttgacctctctagacatcaattcacctgtaagaattgatggagatgataatagtgccaaaattatagagttgtggtaaaactatgtaatgccgtgtaataaacaataactcatattggtattacttttccaggacaaaacaatgttatacatctgttcccaacctttatggtataaccttattttaatttttcataattacttttttattctgttactgttagaagaaaccatcatttcttcctcttgggacagaagcatttgctactaatgacaataataggtgatgcttctcaaggagcttgctgtgtgctagccatttgctaggtgcattacatgtattcattggttttcttaacaacttactggattttcataacaatccacttcacagatgaggaaattgaggcatggcaatgtgcaataacttacttgggtgctagagggaattcagacctccttctgagtcctacacatcattctttcttttcatgccatttaaatgttctgagataaaaatggatatgactttgtggggtgtgaggtcaaccctgactt

SEQ ID NO: 81200 - DNA, 441 bp, Homo sapiens
  misc_feature (1)...(441): n = a,t,c or g
  sig_peptide (195)...(330): this location contains the signal peptide sequence, MFLLETLKILLLKPFPLEAIPPCTVSLGFKTSLPPLPNELLMGIF, Run with SignalP
  misc_feature (258)...(381): similar to gi552601 in the genepept database release 114, Run with FASTXY 3.3t00, default parameters
attgaattgagacctatagaccgngcggnggaattccaaaaaagaagatgtagactgtgtgatctctgaaatttctccatgttcaattgtctatccttcgaagacttctaagagttttagaagaaaagtttgagctgctagaggagaaagaggaaacagtttaaaaattaagttagagagttcttgccaaggagatgtttttgttagagacactgaaaattcttctcttaaaaccatttccactagaggccatcccaccatgcacagttagcctgggctttaaaacctcgctccctccactgccaaatgagttgctgatgggaattttttgaatgtttgactctgtgtctctgtggaccacaacaggaccacaggctgttacacagttagcatttaacttacattatgaagtgacagaatcgcacttgtgtggctgatagg

SEQ ID NO: 81201 - DNA, 485 bp, Homo sapiens
  misc_feature (1)...(485): n = a,t,c or g
  sig_peptide (109)...(244): this location contains the signal peptide sequence, MVILDVLELYHMWFLGILYDAIFYCFVHAINADKFFGLKLTKSAT, Run with SignalP
  misc_feature (127)...(375): similar to gi4835452 in the genepept database release 114, Run with FASTXY 3.3t00, default parameters
tgggcccgnnnaactgaggaactgantatctaggaagagcggnggaattcatattgcatgtccatattttccaaaaagagttaagatagcaagctactgtttaggattatggtaattctggatgtccttgaactgtatcacatgtggtttcttggcatattatatgatgcaattttttattgctttgtccatgcaataaacgctgataaatttttcggtttaaaattaaccaagtctgctactgtatcccagaattctcaatgaaagaaaatatttacagtttttaacattacaggtagaaaaaggatcaaagtgattttcttaaatttccttctaattcatggaaaagagaacacagtcagtgagggtctttgctcctgttccccaattttctttgtccaaatggctcatccttgaattcaagaggagtggtgcaggatttaattgctcccacttgtcttccttgtgcaaaactgcagctagaa

SEQ ID NO: 81202 - DNA, 1960 bp, Homo sapiens
  sig_peptide (1803)...(1938): this location contains the signal peptide sequence, MYWLEYILLFHILKISTLFRIFFYFNLEPRLLCQMYYFHNAIKYK, Run with SignalP
  misc_feature (1760)...(1892): similar to gi20383 in the genepept database release 114, Run with FASTXY 3.3t00, default parameters
ctgaactacacagatgagcttctaaaactgatgcaaacagtttctgacactgtataatatgcttttgggtgatttggggggcaaccacaagttttgcgttttgactacttaaatcatcatggctataaataccaaaacgatttggatccatttatgtttgtaggataatatactactgactgacttgactgtcaggttcacaacagctagatgatatatttatgactatgtctaatagttgaaataaaatctgaatattgatttactatacccaagaggggagaaaaattaaccattgtaaatttttaaaaattttttcaaaaatgttaaaatgaggcaaatttaagtttacaaattttgaaattttcttttgaatatttatgaaattgtcagtaaacttacctaagatcctgtgaccttttgatattttttattttaattgtagtgccatggaccatttgtaaacaaattgatttacttttgttggttgtaagttgaagatttagcattatgactttgaggtctgtggttttatttgtaaacttgcaattgctatatttgcaagggcaaatgtatttctttattaaataaagtacaataatggtgaatgtaccaaaatgacatcacttaactctatgagagatctgcattttaatctatagtttaatagttttaatatttattagatattcatatgttgatcatagatcaaacttgttgctgcttatacagataattgtagaatgctcatggaatatctttagggtaggtggaatacttctgtagttaaattgggaaaccttgttcagctggttttagatattgatggccatttggaagtaaatttccgcaggtattcataggtgcacttaacacagactttgcttaatgaaaatgtcagttctaatagtaactgattcacttctgaacagaagtgattttaggcatatttcttaacatatatcaagcaaagtcctgttaaaagatctaaatgaagaatggagacctcagtgattaaagatattttgtttctgaccttgagcagattgcttacctgttctctagactataacccaacatgtaaaaaaaatttgaagatggtgatgaggaaagtgagatatatatatatatatgtattatgtttctagcacttttcccttttaaaaagagaaaatatccttgtacatttttgaaaaatatattttcagttctgaaaaatgtagcagaagtagtgaaaatgtcatattttaaatgttgattattagataaatttaacctgcttagggtttattgtaactacacctttcagacgtgtgttttggagtagtggaattgccagccaggccctgtggcttggaaaggcatcccagaaatcctcggccagaaggtgtggcttgttaaagcattgagattcagagtattttgttttgccggtgtagataggcatgtatttatgcatttttgcatttgtaaaatcaacttttcaaataatgtaaatgtaatatactagtttacttaaaggtacttgggcagaatctaaagctgctacaatgtttgattatgaaaaaaatgtaacatggtaaggatgaaaatgcaacttacaaaaccaaaggaattaaaaattttcggtagtgtttcaaattgtcttctgaacaggaatttaacattggttttgatgaagtgagggtcagttctcaagatttgtgctaatcataaaatgaatgaatgcaaaacaccttgtaatttcatatggaattataaaaattaggtttgctgggttttggcctaataagagtgctagtatgtattggttagaatacatcttactatttcacattttaaaaatcagtacactcttcaggattttcttttatttcaacttggagcctagattactttgccaaatgtattattttcataatgcaataaaatataaattagaaaaaaaaaaaaaaggggg

SEQ ID NO: 81203 - DNA, 588 bp, Homo sapiens
  sig_peptide (168)...(303): this location contains the signal peptide sequence, MEHCRVYLSIFCITVSLGAIVMFLMPPKIIKVNQDMRRVQNEIQT, Run with SignalP
  misc_feature (470)...(290): similar to gi408889 in the genepept database release 114, Run with FASTXY 3.3t00, default parameters
tactttgtatgtaagaaagaaggagatgtaagaatgcacatgtatctatttgtttatgcaaagtaaataaggaaagattggccagaaagtaatgagctgtctatggatggtaggtgggtttagagtagaaagaagggagaaatcataacggtgtaaaggaggaagggatggaacactgccgagtgtatctgagtatattttgtataactgtgagtcttggagccatagtaatgtttctcatgccccccaaaataattaaagtcaaccaggatatgaggagagttcaaaatgaaatacaaacagtaacaaatgaacttaactgtatttcagatgcataatacaaccacattgaaggaggtgggcaagaaaaataagaagttatagcattttgatgggatactagaaagagaaaaggaactgtacacaaataccagagtctagttagcaaatttttcacagaagcagaagttagtaattcaggaagtattttatgtgtgttttaggatggggaaaacaaatatatggtaggtaatgagaacatgggggacatattgaaaggacacaggaaccaaattgaatgtccctcag

SEQ ID NO: 81204 - DNA, 381 bp, Homo sapiens
  sig_peptide (297)...(162): this location contains the signal peptide sequence, MFLFSLMLFRVIIQLQGVGGFGLLGFLFNFMQVMLRSPSTPPPQI, Run with SignalP
  misc_feature (247)...(172): similar to gi5702173 in the genepept database release 114, Run with FASTXY 3.3t00, default parameters
ctcaccctcggacagagtaatttctttccatgcacgtttgccggacgagaccgaggggcccaggcattgtactaggacggacgtagctttttctacggccaaatggtaactgaccgtagaggatttcttttccttcttttcattttttaaaattttattttatttggggagggggggtggaggggctccttagcatgacttgcatgaagttaaacagaaaacccagcaaaccaaacccaccaaccccctgcaactgtatgattaccctgaacaacattaatgaaaagagaaacatcccagccctctattttctttcaaagctcttgactttcacacacgttgttggagccaaactgtaacggcgttcagtagataccttgc

SEQ ID NO: 81205 - DNA, 682 bp, Homo sapiens
  sig_peptide (527)...(392): this location contains the signal peptide sequence, MVGLGKGVPLLPLSCLALGDTGLMLIQNPSGRTVVTAWPSRREEA, Run with SignalP
  misc_feature (92)...(177): similar to gi5802372 in the genepept database release 114, Run with FASTXY 3.3t00, default parameters
acaggtccagaaacttctctgacacccattcaccagggtgctgagataggagaaagtgctcatttataatgtgtattctgtgcagctgttctcagacaagaccggatcttgtcatcttaccttttgctttacaaaaaaggcctgttgaagtcaatgctgtcttgccccttgctgtttcagcaggttagactttggtcttcactgcttatagctgcattggaggccaacgtagctgatgctcagggtcaggcctcgccccttcgccgcaggtctcaggatcggggataacatcgctcccaccctgctcatttagagatgggaaacaagcaagagcttgacttgcctcccatccctcagcctgtctgtggcagagcctgcaccaaaacccagagcttcttccctccgtgagggccacgctgtcaccacagtcctcccagatgggttttggattagcatcagtcctgtgtcaccaagtgccaaacagctgaggggtagaagtgggactcctttcccgagccccaccatgaggctgtagtgtcaggtttatgcctctctcaagtcaaaaaaacccgggctgagaactccacagaaaggggctcccatgctgggcaatggcagggccccaaaaagtcagtgaccaactggtcctttcacaccacgccgagcagtctcaaaaaaaaaa

SEQ ID NO: 81206 - DNA, 679 bp, Homo sapiens
  sig_peptide (393)...(528): this location contains the signal peptide sequence, MKTARVIFQIMLCVTTILSLRLNLAMVIFQHLSSMKIKKDFKVAL, Run with SignalP
  misc_feature (306)...(197): similar to gi5881692 in the genepept database release 114, Run with FASTXY 3.3t00, default parameters
gtgtggtggaattcggatccatttctccaccctttgtctcttttagcttttatcattttattgatctagtgtttggttacagctatctgattgaaaaagtaatagtttcagagtagagttagaggtgtaaataatatgaaagtaatatgtacacgctctttaaacacttgataataccaacctgtatcatttgacccatgttatcatttatagctatacacattgaataactttcttggtgaacttacggataatatgaaaactgctgtgaaagttttcatgctcttttttcctatatattaaaccagtgatagacttaaagggaaaagtgaaatggaatggcaacagcctggggatgtgagtacagacaattatgaagttttggtaatagaatgaaaacagcaagagtaattttccagattatgctatgtgtaaccaccattctaagtttgcgtcttaacctggccatggtgattttccagcacctgtcatccatgaagatcaagaaggatttcaaggtggccctatataaaagccatggaattttttcctccctgtttctgacctcctttctctggaaacttttgttcctaaaagagactggagacctggaacagtctacctaatttttccaccggaccccccacccatttcctggagctgcaatatggagacacac

SEQ ID NO: 81207 - DNA, 393 bp, Homo sapiens
  sig_peptide (24)...(159): this location contains the signal peptide sequence, MTLGFDCLSVCLLICLVQNASPTDFGVLCRSMGTSLHPSTLHPFI, Run with SignalP
  misc_feature (190)...(355): similar to gi466788 in the genepept database release 114, Run with FASTXY 3.3t00, default parameters
cctggtgtaagtcgaaccatcggatgaccctggggtttgattgtttgtctgtctgtttgcttatctgtctggtacaaaatgcttcccccaccgactttggggtgttgtgtagatccatgggtacgtctctccatccctccactctccatccttttatccgtctatccagatctctagctatcttctcatgtatccattgctccaaatagtgcaaacatccaggtcttcatctctttcagcacctgcctctttgatttagctccatgaacttatcttgtttggggtctccatcctccatcctggtaacacccagctattctggggctgtggcctcacctctgtgtttgctgggcatcccccaccaggtgaatggtctccgagtggatctcccag

SEQ ID NO: 81208 - DNA, 410 bp, Homo sapiens
  sig_peptide (45)...(180): this location contains the signal peptide sequence, MPVRLIYNVLSVLLCVVFLVALGITEDTCNLSLFAGIHVLPLHVK, Run with SignalP
  misc_feature (267)...(214): similar to gi4210382 in the genepept database release 114, Run with FASTXY 3.3t00, default parameters
ctttttcttttacatctctgtgggttgactgcgtgttttcaaggatgccggttaggctcatttataatgttttgagtgtattgctctgtgtggttttcctggttgctctgggtatcacagaggacacatgtaacttatcactgtttgctggaatccacgttttaccacttcatgtgaaatgtagaagccttatttccacttagctccctccccctgcccacatgttaaatagtcacgcgctgcataatgacattttggtcggtgatgggccacctgtacagcagtggtcgggtgggattctctggacctgaacaattcctgttgcctagtgaggttgcagcccttgtaacgtcacagggcagtgtaatgcccccatgcttgtggtgatgctggcacgaacaaacctgctg

SEQ ID NO: 81209 - DNA, 1175 bp, Homo sapiens
  sig_peptide (955)...(1090): this location contains the signal peptide sequence, MLGIIPSLLRRALLQVHGSLCSIGRRPGDTGEARERGQVAPPDSL, Run with SignalP
  misc_feature (1084)...(733): similar to gi553885 in the genepept database release 114, Run with FASTXY 3.3t00, default parameters
gggccagcgtccgatgcagcagctcagccagcggagacagcgaggaacgatcactgacaagagaggtgggaggaacgctccgcagtgcggccgtgaacgcacagcgacaggtctgcgagtgggcacataagaggtcgctcctacccagcgcgaacgatgaaaacaagctcatcagggcctgacccgccacagtagttgttggggccgagcagaagctacgtgtgtttgccgagccgatgcgcgattcccacagtgaatccggccgagaataaaccaggtctaaagttgttaaaagaagactgttagcaaagtctggaatgaaaaggccgtgtgtattcttttatatgatcaggttttgtcagggtttttcctgccttgctataacaaagtgagtagattgaggcaggatagtcccccaaggtgagtccagacctgcccagaactgtggtttcctgcagggcaggccccgcaagggccgggcctcggccacctccctcctttcaccggggatcacagactcagagggttcagcacgtcccgtctctgctgcctctgggacaggaggggggatcaggcagagcacagacggaattaatgttttctgagaatttctccagttctttttaacacgatttctttcagccctcagagcctcgtgaccatggctggccatggtgagggtctgagcaggaggcttgttggcaccaggccgagaggcaccacatgcagtcacactgctcaggtgtctggctgccccgggcttgcatttgctgtggccgaagtcagcacgtggccattagtgtcgtctgcttcctgaggggtgtgtcaggctgttgcttccacgagtttcctggtcttattggccagcggatccatcttcagctcgattattgcgtcttagctgcacattgtggaagtaagtgagctgtgaacaggacaaccatccgtgtagcaatgctgggcattattccaagccttttgcgtagggcgctcctccaggtccacggcagcctgtgcagcatcggccgtcgcccaggtgatacaggtgaggcccgtgagaggggccaggtggcgcctccagactcactggcctgctgtgaggaaggcaggaatgggagccttgttccaaaggtcaggcccgaccgctgtgtcggggagcatgggcaacacccggg

SEQ ID NO: 81210 - DNA, 418 bp, Homo sapiens
  sig_peptide (60)...(195): this location contains the signal peptide sequence, MAWACIYSCLALLLLWESLLIDTHLSPRINLFLPMTLAPTAFGTG, Run with SignalP
  misc_feature (150)...(289): similar to gi2360981 in the genepept database release 114, Run with FASTXY 3.3t00, default parameters
gtaaggctgtctgaaaattggtgttctgcccagacccccaggcccattggttgccttcaatggcgtgggcatgcatctactcctgcctggccttactgctcctgtgggagtccttgctcattgatacacacctcagtcctagaattaatctcttccttccgatgactttggcacctacagcatttggcactggcgtcaagcactaggggctgacaccacttttatgtgtccctaggtatgactgtcctggtgagaggctgcccctgtctggatgcctggctcctgggctataagtatctgttagtggtgagcctctgtaggaggctgggcttctctagcagggagcctacagcttcttgttttgactccctagaaattgggatgtcctctcagctggactgtcacagcaacctggaga

SEQ ID NO: 81211 - DNA, 478 bp, Homo sapiens
  misc_feature (1)...(478): n = a,t,c or g
  sig_peptide (322)...(457): this location contains the signal peptide sequence, MFCFPAVCVVCLSMCELLLLADRTTGFRGLIQRQAACSSCAEFXH, Run with SignalP
  misc_feature (216)...(325): similar to gi4008584 in the genepept database release 114, Run with FASTXY 3.3t00, default parameters
ttcttntgtctcttctggctcaggcgtaagcctcagacacagtagaggctgctgcagacacctgtaaaatgtggaaaattccccagtcccagagtcaggcacaactttgtcagggtttcctcttgctccctcccagctcccagttcctgcagaattgactcgctttcttttgacttattgcctgatttcttttagacctcagacttgtgtcgcttttccaagcatgagttgagaaatacaggaaattgcctttctttcctcaaggaaggcatccccccactcctcaaacctctgcaccacctgaagagagggacccgccacatgttctgcttcccagctgtctgcgttgtctgtctcagcatgtgtgagctgcttctgctagcagatcgcaccacaggtttccggggcttgatccagcgccaggctgcctgctcttcctgtgctgaattccnccacnctggcctagtggactacgatg

SEQ ID NO: 81212 - DNA, 797 bp, Homo sapiens
  sig_peptide (178)...(43): this location contains the signal peptide sequence, MLHHSQLIFVFLVQTGFHHVALSGFKLLASSNLPTLDPKVLGLQV, Run with SignalP
  misc_feature (591)...(562): similar to gi2340094 in the genepept database release 114, Run with FASTXY 3.3t00, default parameters
tgtacaccgtggtggaattccagtgggctgggtgtggtggctcacacctgcaatcccagaactttgggatccaaagtgggcagattacttgaggccaggagtttgaaaccagacagggcaacatggtgaaaccctgtctgtactaaaaatacaaaaatcagctggctgtggtggagcatgcttgcagtctcagcttctctggaggttgatgcaggggaatcgcttgaacccggcgggtggaggttgtagtgagctgagattgcaccactgcactccagcttgggtgacagagcaaggcactgtctaaagaaaaagtggatagaggagggtgaggcaggaaaaggaaaaggaagtcagcatttctggagcatcttttctcaaacattccttgtttatttgggagattaagtttcttctgaggataaaaaaagattagaagttagattggtattgtcttagggggaaaacaggcaagtagaatgataatagaactttgttgccatagaatatacaactaagtaatactgtttataatgttccaatttactacaggttgtgcatgcaagcagtcctctgtttatctcctcatcctccagtgtcacatgtcaattgccctgtcactaactaatcacaaaccacactggccttttattagtttcttgaatggcattaaattctttctgtctcagtcagggctgtgcacatacctggtatcttccactgaactgctcctctcttagctctgtatagccagctccttctcatactttgtcgtaacttaaatattaatagaggct

SEQ ID NO: 81213 - DNA, 389 bp, Homo sapiens
  sig_peptide (66)...(201): this location contains the signal peptide sequence, MTVFLILVIFDTAVISFLLQEIAFLLPPAFFAGVKKQNIFCFMHF, Run with SignalP
  misc_feature (105)...(269): similar to gi904200 in the genepept database release 114, Run with FASTXY 3.3t00, default parameters
ttgataacttggcatgttatattctcttttagattttcaaataaattcattttactgctcagagtatgacagtttttctaattttggtaatctttgataccgctgtaattagctttctgttacaagagatagcatttctcctcccccctgctttttttgctggggttaaaaagcaaaatatattctgttttatgcattttacagccttacaactattgcatttctttgaaaacttgataatacctaggtagttctaacattggaatactgaagattatattgcctgatcttatttaattattactctagttcattccctttaaataacgatttaaataaatggcatatattacatttgagtgctgaatcattgtagctgtcacatggtt

SEQ ID NO: 81214 - DNA, 437 bp, Homo sapiens
  sig_peptide (33)...(168): this location contains the signal peptide sequence, MISCAGLGLVLLQSVFIRTFLFHNPEAFCKTYAWKLSHFLLLRFS, Run with SignalP
  misc_feature (254)...(153): similar to gi1703627 in the genepept database release 114, Run with FASTXY 3.3t00, default parameters
gctagtcgactcacgcgtccgcacaagtgaagatgatttcctgtgctggtctaggattagttttgttacagtctgtctttataagaacatttcttttccataatccagaagcattttgtaaaacctatgcctggaaattgagtcactttttattgcttagattttcttcacagaaaaacataggttctgttggatgagtatttgttgtgaaagcaaattattaaggggtgaaaattgtctatacaagttgatgtataggaggatatctgaactggattagttgctcttttatctgtgttttcaaagctctttaatagtaactcttataacacttataacagtgttatcactattgtttgggcatcattccattctgctagactgggaattcttttataatacagtgcctgataggcatccattcattccttgaaata

SEQ ID NO: 81215 - DNA, 416 bp, Homo sapiens
  sig_peptide (31)...(166): this location contains the signal peptide sequence, MLKCTRVSAPALLCGLTQIEAPLQCCLCPEASQVALSISGTLLPG, Run with SignalP
  misc_feature (186)...(61): similar to gi2804168 in the genepept database release 114, Run with FASTXY 3.3t00, default parameters
gaaggccagccattttatttgaaatgtgaaatgttgaaatgcaccagagtttcagccccagccctgctgtgtggactgactcagattgaggccccactccagtgttgcctttgcccagaagcaagccaggtggccctgtccataagtggcactctccttcctgggctcacagtctgaagcccacaatgcgggcttctgtgataacagttgtttgtgtcagcagtaggcacttgcttgcagatcagcatgttgaagactgggaccacctctgagtgtaccctgggctgggcatggcagagacagaaccaacagggactccatcatgaagaccctttggctcaggacctttggagagaattgctttttccatcctcaggcattagcaatggggagacaaatgtgccctgcctctgggg

SEQ ID NO: 81216 - DNA, 1158 bp, Homo sapiens
  misc_feature (1)...(1158): n = a,t,c or g
  sig_peptide (85)...(220): this location contains the signal peptide sequence, MELLSPCHASCSALSRTLFVLLSNIALRVVCLMCVSLPHQRVGSW, Run with SignalP
  misc_feature (200)...(23): similar to gi215578 in the genepept database release 114, Run with FASTXY 3.3t00, default parameters
gacccacgcgtccgaaataaataaaaataagtgcaatgatagagatgctcagggagctccagagaggagtgtttcttactccggatggagcttctgagcccatgtcatgcttcctgctctgcactgtcccgtactttgttcgtgctcctctcgaacattgccctcagagtggtttgccttatgtgtgtctctctcccccaccagagggtcggctcctggagggcattaagacagagtcagtctctgattcatcctttgatatctgctagtccctattgcagtgctttgcatattttaaacttatttatactctcttgttccataaagatacctccagtactatgtgatgaaatagaaaataattgaagaattcaggttgagagaaatgtgggagaagaaaaggatgaaatcagaggtgaggaggccgggcacagtggctcacgcctgtaatcccagcactttgggaggttgaggcaggcagaacacttgaggtcaggagttcaagaccatcctgggcaacatagtgaaatgccgtttctactataaataacaaaaatagccaggcgtagtagccatcactttgtattccagctacttgggaggctgaggcaggagaatcttttgaacctgggaggcggaagttgcagtgagccaagatcgcaccactgcactccagtgtgggcgaccgagcaagagtcccatctccnannnnanngaggagacggagcagcactacgacttcgacgaacancgggggggggggctctctttgaaggacctctctattctcgccgggggggccgagagaattttttttttgttgtggggaccaaaatatatatgcgggcggcggtggaacaaacacgggcgagcgaggaaagaacgcggnngnccgacccagatccgactaccgacgaccaaggcatgaacgagcgatcaagaacgttagtaacgagtaacgacggtagtaaggaacaagtgcagaccagagcacgtagcgatcgaccgagagccgatagtgcgcaccgtttcatacaagtgacggcgtgatggaacgtggagtgacccgtatgatgtcagatctgccggtagtgaggcaacggtcgtggcgtatgacgtaccaaattgttccgatgctttctagcgaacgactctcag

SEQ ID NO: 81217 - DNA, 539 bp, Homo sapiens
  misc_feature (1)...(539): n = a,t,c or g
  sig_peptide (234)...(369): this location contains the signal peptide sequence, MSTALLRSLWGLFLTGEIPTSLLGLQAPSFFGFSRSHVPVMPNCF, Run with SignalP
  misc_feature (230)...(313): similar to gi2765700 in the genepept database release 114, Run with FASTXY 3.3t00, default parameters
cttaaattcttttctttcttcagctattaatatggaactggtcataaggtccagttgattaagtgtcctaaacatttatttaatatgtttttatttccaccatcactatcttaattacttcttttctctctgttgtgctgttatgatatcctcctaacttgcctcaccccacccaagtcttatttaattcatacctcacaccgctgtgagctttctaaatctaatagttgaccatgtcaactgctttgttacgaagcctttggggattatttcttacaggtgagatcccaacttcattacttggcctgcaagccccaagcttctttggcttcagcaggagccatgttccagtcatgccaaactgcttttattccccgaaatatgctactttttaataactgtgtgccttttcccataaggtttccttcacccacaaagccctctttctcccatctacttaacaaacttatagtcatttttttaagattctgcctaataaaaaacatttattttcattgcnnannaaannaaaaaaaaaa

SEQ ID NO: 81218 - DNA, 412 bp, Homo sapiens
  sig_peptide (151)...(16): this location contains the signal peptide sequence, MHKAKIYKNLFIFLVCISCILTFLYVEIYSEAPPETKVFASCSHY, Run with SignalP
  misc_feature (204)...(5): similar to gi4494005 in the genepept database release 114, Run with FASTXY 3.3t00, default parameters
cccacgcgtccgcaatataatggctacaagaagcaaaaacttttgtttctggtggggcctctgaatatatttctacatatagaaatgtaagaatacaagaaatacatacaagaaatatgaataaatttttatatattttggctttatgcatcttagaaacaaaatgattgtatcatctgaatgacagggctagtaaagaacctacatttactgaatgcaaactactggccagttcctgtatttaggcatgataaatacattgtgttttctttaatcttgtctctttttataagttcagatacatgaaaattaacaaggtttcatatccattaagtggtagagcttggttttaaccccgatctttctatggtacttccaataatgatatggacgattgcatgattttatgtgg

SEQ ID NO: 81219 - DNA, 618 bp, Homo sapiens
  sig_peptide (148)...(283): this location contains the signal peptide sequence, MALNILFFLCGEFLVLDYITEGINVPDKFSGKLSFILIGVSTQKN, Run with SignalP
  misc_feature (242)...(110): similar to gi3980048 in the genepept database release 114, Run with FASTXY 3.3t00, default parameters
aagaaattagcttgataaaacactatacagtaagtcatttaggctttttctttgctgggacaaggaagtgtttcacatgaccataagtttttataagggtgctttaagataaaatggcactatggggaaaccaataggcatgatgaaatggcgctgaatattttattctttctatgtggagaatttctagtgctagattacataacggaaggcattaatgtacctgacaaattttctggaaaattatcatttatcctaattggagtgagtacacagaaaaatagaccacgatggaaaggaccagacagacctatccgttgaaacaaggtttgtgtccaggagttactcagctgtgagcagtgaacattgaaaaaaaatcacttcaggggaaaggatccaactgaactgggtacagtgaagtgagttggtccaggtttctgaatcttccattttgatccagctaggaatggaacagacaatgaagggaagtccaacaaacatgaacctatctaaagtccaatgatcaaagggaatttgcccgaagctaaaaagtgatgttaccacttaaattccccattttgaaaggaaaaccttttccccgaactttgaggcaactgg

SEQ ID NO: 81220 - DNA, 616 bp, Homo sapiens
  sig_peptide (86)...(221): this location contains the signal peptide sequence, MLVERGLWLGFWYCWRSHRLDKCSSRRRFARGGSEMSLGPTEFAV, Run with SignalP
  misc_feature (320)...(232): similar to gi5103145 in the genepept database release 114, Run with FASTXY 3.3t00, default parameters
taaatgaaggaagttgttggcgggattggagagaaaggacataggtgcttagggggtgatattaacaggacttgggggccagttcatgttggtggagagagggttatggcttggcttctggtactgctggagaagccatcgtctagataagtgtagcagcaggcggaggtttgcaaggggaggcagtgagatgagtttgggacctactgagtttgcagtatctatagagcatgttgtagggagttgaggagagtggaaatatatacaactagaatatagaagagaggcggcgctggagatggaatttactagttggcagcaatgctaatgggtaagattgcccagagtaggcataaaaaacgagagaagaggtcctaggattaccctgcggaaacaccagcatcaggtgctagcatcaggaaaataggaatcccactgtaatcagcttgcttaataataccttgactgccttcaataagtactctctaaaatttttttttctaatgagaaaaaatgtattaaaccggaagattgtttcccttgccttattacccggcttctggaattgttggggcaaaaaaattccctttggtaaacctttcccccaatttttctt

SEQ ID NO: 81221 - DNA, 877 bp, Homo sapiens
  sig_peptide (250)...(385): this location contains the signal peptide sequence, MPKGFVFVTYLRKHFAAYFLFTLLMLLLLNWRMSAKRHESACAGV, Run with SignalP
  misc_feature (844)...(353): similar to gi600040 in the genepept database release 114, Run with FASTXY 3.3t00, default parameters
agaaatttttagctgtgagtcttgctgattggaatgaagattcccctaagaaactgttttagggactaataaaagttttgtaagaaagtgccagttgcctccatcacaaataacacttggtagcagtgttggaggttcagtgacttgtcattgtttcacattcttttttgttatggtcatgaattctctgttgtcctaagtcctattgtaatatgttttcagccatacttttgatttcatgcttttcagatgccaaaggggtttgtctttgttacatatttacgcaaacacttcgctgcctatttcctcttcactttactgatgctcctcttgctcaactggaggatgtctgccaagaggcatgagtctgcctgtgcaggtgtctcctaatcctgatttttgcttgtatttgtgaacatgtggcaagcctcttctgctgaaccaagtaagggttgtggagagagaacagaggcaccagacatagactatggtgtaaggagcaagatgtaatagtttaactcaattggattttttaattgggtggaataatttagggttgccaccccatattatcacctacaaagatgggacttactggggagggatcaattcttaattaatgggggctctttctgccctatattattcttggcttacaaggattcttaataacaatgcccgacttcttatattgccgcatttaattttacatggaggtccgcctcttgtgccacctccatcttttaatttttcccctctaaccgcccgtgttcggcggacaaattgcccaactgcggacggagtgttgcaggcaataaagaatccattctgttgtgcgccgccttccgcgttcaactgacttctactatgtcgtgcc

SEQ ID NO: 81222 - DNA, 842 bp, Homo sapiens
  sig_peptide (232)...(367): this location contains the signal peptide sequence, MQPSRLSVSFIFFGLIYILASYRKVIVMEMVLVHRMAHEFCPVEV, Run with SignalP
  misc_feature (133)...(210): similar to gi1272326 in the genepept database release 114, Run with FASTXY 3.3t00, default parameters
cggacgcgtgggcggacgcgtggggttccttgcattacttcttactagtcaacatcttgttagcagaatcccaggttgtagttaataattgtttatgttaagcttttcctgttcaaattagtatgttttccatctgctcattgaaccctaactgatagaacaaaccttacaaaaaaaatatcaggaaaaattgtggaagactcagaaatgggcaaaacagattaaaatctaatgcaaccttctaggttatctgtgtctttcattttctttggactgatttacattttggcaagttataggaaagtgatagtaatggaaatggttcttgttcatagaatggcacatgaattttgcccagtagaggtattattgatccctcccaaaaagcattttatatattaacagatcggcattcctgattgcctacacacatgtgtgtttcgttttctttggacctgttttaacatctttctggttcctgtattaattaatcagctaaataagatctttgccgcgtttattttatatttgtaaaagtcatagctttatgttttaaaatattctataactgataaggagcttacaggatatgcccatatatgttaaaaatgccacagaaaatggagatatgatttgttagaaagatgatttaaatgcattttaatgctttaaaactggaccgacatggatgaaatcatcttaagacctaacaaggaaaagtatcactattatgtttcgaaaaccgaacattcataacatacccacagaatgggaaaaaattttggcaataatatcttggtagagacccgtattttaaattagtaaattaactcctcaaactc

SEQ ID NO: 81223 - DNA, 843 bp, Homo sapiens
  sig_peptide (94)...(229): this location contains the signal peptide sequence, MVSDLCLAWVKCLSLCLCLSLTCTHARTHMPCTFSVEDFKVFGGC, Run with SignalP
  misc_feature (195)...(132): similar to gi2769725 in the genepept database release 114, Run with FASTXY 3.3t00, default parameters
gtccccgaaaacacactttataaagactgatttcctgctggcaggagagagagctgctgtacatcacaaagcaaggcggcccactagagtggtatggtcagcgacctctgccttgcctgggtgaagtgtctctctctctgtctctgtctctctctcacatgcacacatgcacgcacacacatgccatgcactttctctgtggaagacttcaaagtgtttggtggctgttctgagacctgttcctcctcggctgggctaggggaggggcccactccttttacctgtgtttctttttagaggagaaactgacacaaagtcagatagtcttggggatggaagttgctctcatctgtaagaaaaggaaactgacctaaccagcaggtaatcacttgaaatcacttgtgtcccgtgctggaaacagctccacagcagtgtctatgatggattggaacctacacagctagaggaagaatttgcatccagaaaccacaggagcagatgacccacaagtgtagctattttacttctttcatgttaaattccaaataaaaggatgattatctttgaactgaccccagtccaaagtacaaatgcctggctgagatccaccaaggccagatgttgtcatcagtgactgggtttatgccaggctatcggtgaactgggtcagagatggtgcaagcaaggttgctgggtcagggcaggttcacagcccagtcattcctaacccagaacatcaacccctggatgggagggggggaaagaggttcctgaactgctgactcatttgccaaaaggggtgtcagaaccccacaccgtagccgcataaacctgaactttagg

SEQ ID NO: 81224 - DNA, 469 bp, Homo sapiens
  sig_peptide (396)...(261): this location contains the signal peptide sequence, MYMPIYSLKILSQILSGLTLMTACKEMKVSTSPKKKSGAQRGQEI, Run with SignalP
  misc_feature (370)...(207): similar to gi1311496 in the genepept database release 114, Run with FASTXY 3.3t00, default parameters
ggcttcaggtcatctgctatcaccaacactggtgtcttccagcacatcctctgcaatttcgaggtaaatcagagattggcccttagtccttcaggagtgtgtgtgatggtaaatatgctaagtctgggctttcccctaaacctagcatgtcagcttccctcatagtcatgatggtagggagagggaaaaccaaacgagcctgcccagaggccctggtttgtaatgacatgtgccacctatggactgagtggcttcggacaaatctcttgacctctctgagccccactctttttcttgggtgaagtggagaccttcatctccttgcaggctgtcatgagggttaagccagatagtatctgggaaaggatttttaaactataaattggcatatacatatgagggtaaagaaaaatgatctcagttcctttgggtggtgctttgctgtttcccaatgattcttgaaaggggg

SEQ ID NO: 81225 - DNA, 376 bp, Homo sapiens
  misc_feature (1)...(376): n = a,t,c or g
  sig_peptide (68)...(203): this location contains the signal peptide sequence, MKWQVSGFEISPGLVVSKWQISLKKKWCSLILILCLLTPPTLHFC, Run with SignalP
  misc_feature (181)...(308): similar to gi1045493 in the genepept database release 114, Run with FASTXY 3.3t00, default parameters
aggaaactttcccttgtctcaatacttggatcatgagtccttttcctaaaatatttatacactanatatgaagtggcaggtgagtgggtttgaaatttctcctggcttggtagtctcaaaatggcaaatttctctgaaaaagaaatggtgtagtcttattctgatcttgtgtttattaaccccacccacattacatttctgtgttttacttgattttacagattggttaatttctgcagttacaacacagctacttcttttcccattacttttaaaaagggaaataagcacagccaactctgccagttttgtcggaagcatcttcttgcacagaaaaacaagtcattataaatggcacctgagtcctcaggggaca

SEQ ID NO: 81226 - DNA, 410 bp, Homo sapiens
  sig_peptide (44)...(179): this location contains the signal peptide sequence, MVWSPSQIGSTWFSSALKGLVAWSCLPRAVTAPGWTLYTMPHLLL, Run with SignalP
  misc_feature (268)...(228): similar to gi498042 in the genepept database release 114, Run with FASTXY 3.3t00, default parameters
gatgaaagagctgatgtgaatagaaggcatttaataaggagtcatggtctggagtcccagtcaaattggtagcacatggttttcatctgccttgaagggcttggttgcatggtcttgccttcccagagctgtgacagcaccaggctggaccctatacacaatgccacatctccttctcaaactgatgatttggagtggcaaatgccactggctttgagagatgccaaaagaatggtggacttggcttcttaatcttttgaagatcataaaatgtttgctagggctcgctcatctgcacttaggacaggggttagatgggtatgttggggagatgaggttattttagtggggtttggttaacgttcagttttaaccactgttcagccttctcactgggactcctagctggg

SEQ ID NO: 81227 - DNA, 480 bp, Homo sapiens
  sig_peptide (176)...(311): this location contains the signal peptide sequence, MASWTSPWWVLIGMVFMHSPLPQTTAEKSPGAYFLPEFALSPQGS, Run with SignalP
  misc_feature (207)...(18): similar to gi5734375 in the genepept database release 114, Run with FASTXY 3.3t00, default parameters
tttcgtggccggcgtcggggaaggtcctggtgccggattccgcacgaggtgttgacgggcggcttctgccaacttctccccagcgcgcgccgagcccgcgcggccccggggctgcacgtcccagatacttctgcggcgcaaggctacaactgagacccggaggagactagaccccatggcttcctggacgagcccctggtgggtgctgatagggatggtcttcatgcactctcccctcccgcagaccacagctgagaaatctcctggagcctatttccttcccgagtttgcactttctcctcagggaagttttctggaagacacaacaggggagcagttcctcacttatcgctatgatgaccaggtaagaacattggacaaggatctacctttggctttgctgtttgccagtggtcaggaaactgtctctaaaagaccttcaaagtaattatattttcctctttgcaatacaagtacaac

SEQ ID NO: 81228 - DNA, 660 bp, Homo sapiens
  sig_peptide (24)...(159): this location contains the signal peptide sequence, MVINLFRLYISFGVFFKINYIFYVFKVSKSFMYPSASFLWLFAIL, Run with SignalP
  misc_feature (19)...(262): similar to gi13179 in the genepept database release 114, Run with FASTXY 3.3t00, default parameters
tttgacaactttctatttcttctatggtaatcaatttgtttagactttacatctcttttggagtcttttttaaaataaattatattttctatgttttcaaagtctcaaaatcttttatgtatcccagtgccagtttcctgtggttatttgccattttatgtctctgcggttgttttccccatagacttttatttcatttatgttttcttcttttttcttgataggttacttttattttttaaaacgttatctgtgacctttcagcttttcatagcacttctcgcgtgaatctttaaaaaaggtcctttagccgtggggaaggagttatccgtttgagcagagggaggcggaggaacaggccttattgggtctgagcacaggcagtcaccccagccttggtgcttatttacgtctgttttccattcaccatagcagtgtccactctttgtcggcttaaaaataagctttttcctccgctttctaatcagaacagttagtttgttaaccatccctttatcaagaacgatggctgtcaagcctcacattatgacacaagtagtaaagcgcggcttgacccctgaacaaacaatgggctttgaagcttcggaaggatcaattttacggcttaatttttttttttccccagcccagaccccttca

SEQ ID NO: 81229 - DNA, 915 bp, Homo sapiens
  sig_peptide (525)...(660): this location contains the signal peptide sequence, MGLSKAFLITRTVFLISSLSFYSFLGFPSLCFTGSCMLSTLFIRA, Run with SignalP
  misc_feature (282)...(522): similar to gi829008 in the genepept database release 114, Run with FASTXY 3.3t00, default parameters
tttcgtcccagaactcctgtacagactcatgcgatcctcctgcctcagcctcccaagtacctgggactacaggtgtgtgccaccacatctatttattttttgagacagggtctcactctgtcacccaggctggagtgcagtggtgcaatcatggctcactgcagatttgacctcccgggcttacatgatcctttcacctcaccccaccgagtagatgggaccagaggtgtgcaccatgcacccctaattttttaattttcttgtagagatggggtctccctatgttgctcaagctattattattttaaatattttttctgtttctttctcttctctttgtttctcttctctttcttgcatccccattatgtgtatgttatttttttttcatagttgtcgcacagttcttgaatagtctgtttcactttttcagtctctttgttctttgcttttctgtcctggaagtttctattgatatatcctcaagcgtagagattctttcttcagccatgtccattacactcatgggcctatcaaaggcatttctcatcactagaacagtgtttctcatctctagcctttctttttattctttcttaggatttccatctctctgcttcacaggttcttgcatgctgtctactttattcattagagcccttagtatattagttataattgttttaaattcccggtctgataagtctaacactcctgccatatctgagtctgggtctgatgcttgctctttttcttcaaactttgtgttttgccttttagtatgacttgtaattttcttcttgacatcagacatgaggtactggggtaagaaggaactggcagttagttaagcccctaacagtcaatattcgtaacccacagattgggccaaaccgccacccctggcccattttg

SEQ ID NO: 81230 - DNA, 630 bp, Homo sapiens
  sig_peptide (43)...(178): this location contains the signal peptide sequence, MPFQFPKKARLVPLLGLCLEYSQTLSRAPAWMSVSRGPPHSTWIK, Run with SignalP
  misc_feature (133)...(175): similar to gi853974 in the genepept database release 114, Run with FASTXY 3.3t00, default parameters
tttcgtgtgaccgtgtctgcccctcataacaccctagtcacaatgccctttcagttccccaaaaaagctagactggtcccacttctgggcctctgcctggagtattcacagaccctcagtcgggccccagcttggatgagtgtcagcagaggccctccccactccacctggattaaagcaggtctgcctggcgccctgcaccacacacccttccctccctcagcgtgtctggcccgaccagcacgcagcttccatgatggcagggcctggcctctcctgcacgccatgcaggcctggcccttgccaaccactggaccttagtaaatatttgaggagcaaaagaatgaaacgctaggtgggtgcatgagtggtggcagagtctggttctgaggtttctgagcttaaggccgtgcagcagctggctctgctcccttgagattctggtgcccactcccttgccaggtttcaggcacccgtggatgagcagtcagagagtctacagaacacgcacgacgacagcaggaacagcgcggcctcagccaggtaaagcaagtctctccactggagagtgtgcacggcgatgtgggcttctgagggccgaacaggggaacaccgtaatggctgggttaa

SEQ ID NO: 81231 - DNA, 6248 bp, Homo sapiens
  sig_peptide (5632)...(5767): this location contains the signal peptide sequence, MSLFLFFLMFQVLSEVSWGGVGSVSNQGLEHHEIVTPDLQSLAGG, Run with SignalP
  misc_feature (388)...(3582): similar to gi5689559 in the genepept database release 114, Run with FASTXY 3.3t00, default parameters
gcggccagactaggcccaagccgcggtctcgagtaggcccgagacggccgggccgaggggaatgttgtggaggaggctgcgtctgaagcacggttgagcggctggcgccgcgcggacccagcggaggggctgcgaggggaaggcgagcgaggttcccggcggtacggggactatcccagaattttacgcgcgtcgccgtaggggccggaactaccggacgagcctccgctgaggcgcttcgcagtcccggagctagcccggctgccggcgtgtcgctggggctgagctccgcgggcgtggagtccttgcagcccaaagcatgaggaggtccctgtaggattctggactgaagacgttcttgtcaggtttggggcgtgaggaggttcctgtcagttggggaagcgttaagattcctctatcgtccagagaggacgcgtgctgccgcctcccgcccctcttgacacgacgaacctggccggccgcagaacgctccagggccgagcgaagatggcctcggtgccggtgtattgcctctgccggctgccttacgatgtgacccgcttcatgatcgagtgtgacatgtgccaggactggtttcatggcagttgtgttggtgttgaagaggagaaggctgctgacattgacctctaccactgccccaactgtgaagtcttgcatgggccctccattatgaaaaaacgccgtggatcttcaaaggggcatgatacacacaaggggaaaccagtgaagaccgggagccctacgttcgtcagagagctccggagtaggacttttgacagctcagatgaagtgattctgaagcccactggaaatcaactgaccgtggaattcctggaagaaaatagcttcagtgtgcccatcctggtcctgaagaaggatgggttgggcatgacgctgccctcgccatcattcactgtgagggatgttgaacactatgttggttctgacaaagagattgatgtgattgatgtgacccgccaggctgactgcaagatgaagcttggtgattttgtgaaatactattacagcgggaagagggagaaagtcctcaatgtcattagtttggaattctctgataccagactttctaaccttgtggagacaccgaagattgttcgaaagctgtcatgggtcgaaaacttgtggccagaggaatgtgtctttgagagacccaatgtacagaagtactgcctcatgagtgtgcgagatagctatacagactttcacattgactttggtggcacctctgtctggtaccatgtactcaagggtgaaaagatcttctacctgatccgcccaacaaatgccaatctgactctctttgagtgctggagcagttcctctaatcagaatgagatgttctttggggaccaggtggacaagtgctacaagtgttccgtgaagcaaggacagacacttttcattcccacagggtggatccatgctgtgctgacgcctgtggactgccttgcctttggagggaacttcttacacagccttaacatcgagatgcagctcaaagcctatgagattgagaagcggctgagcacagcagacctcttcagattccccaactttgagaccatctgttggtatgtgggaaagcacatcctggacatctttcgcggtttgcgagagaacaggagacaccctgcctcctacctggtccatggtggcaaagccttgaacttggcctttagagcctggacaaggaaagaagctctgccagaccatgaggatgagatcccggagacagtgcgaaccgtacagctcattaaagatctggccagggagatccgcctggtggaagacatcttccaacagaacgttgggaagacgagcaatatctttgggctgcagaggatcttcccagccggctccattcccctaaccaggccagcccattccacttcagtgtccatgtccaggctgtcactgccctccaaaaatggttcaaagaagaaaggcctgaagcccaaggaactcttcaagaaggcagagcgaaagggcaaggagagttcagccttggggcctgctggccagttgagctataatctcatggacacatacagtcatcaggcactgaagacaggctctttccagaaagcaaagttcaacatcactggtgcctgcttgaatgactcagatgacgactcaccagacttggaccttgatggaaatgagagcccattggccctattgatgtctaacggcagtacgaaaagggtgaagagtttatccaaatctcggcgaaccaagatagcaaagaaggtagacaaggctaggctgatggcagaacaggtgatggaagacgaatttgacttggattcagatgatgagctgctgattgacgagagattgggaaaggagaaggcgaccctgataataagaccaaaatttccccggaaattgccccgtgcgaagccttgctctgaccccaaccgagttcgtgaaccaggagaagttgagtttgacattgaggaggactatacaacagatgaggacatggtggaaggggttgaaggcaagcttgggaatggtagtggcgctggtggcattcttgatctgctcaaggccagcaggcaggtggggggacctgactatgctgccctcaccgaggccccagcttctcccagcactcaggaggccatccagggcatgctgtgcatggccaacctgcagtcctcatcgtcctcaccggctacctctagcctgcaggcctggtggactgggggacaggatcgaagcagtgggagctccagcagtgggctgggcacagtgtctaacagtcctgcttcccagcgcaccccagggaagcggcccatcaagcggccagcatactggagaaccgagagcgaggaggaggaggagaacgccagtctggatgaacaggacagcttgggagcgtgcttcaaggatgcagagtatatctatccttcactggagtctgatgatgatgaccctgctttgaaatctcgacccaagaaaaagaagaattcagatgatgctccatggaatcctaaagcccgcgtgaccccaactctgccgaagcaggaccgtcctgtgcgtgaggggacccgggtagcctctattgagacaggtttggctgcagcagctgcaaagctggcccagcaggagctacagaaggcccaaaagaagaaatatatcaagaagaagcctttgctgaaggaggtagaacagcctcgccctcaagactccaatctcagtctgacagtaccagcccccactgtggctgccacaccacaacttgtcacctcctcctcacccctgcctcctcctgagcctaaacaagaggccctgtcaggaagtctcgctgaccatgagtacaccgctcgtcccaatgcctttggcatggcccaggcaaaccgcagcaccacacctatggcccccggtgtcttcttgacccagcggcgcccttcagttggctcccagagcaatcaggcaggacaaggaaagcgtcccaaaaagggcctggccacagcaaagcagagactcggccgtatcctgaaaatccacagaaatggcaaactacttctgtgagccctcctgtgtcccacccctcacccctttacccccattgccttctccattgtcaactcttggggcactcctggatcctatctgccctggacaaggtgctgaggtgcattgtcctgctttcttgggacttaccaaaggcacggacccctccaccgactccttctagttcccttccccactttcactagagcatcctgcctgccttctccactgaggagcaggtaaatgggagaggtttccagctgactagaaccctcttttctactcgtccaaaccactcccgtcacctgccttgtctgttctttattcttcatcccccgctagagctggaaggcaggatgaggagaggtatgaaggagcctgagccatgaagtgggaagcccagtgcttgacactttctgcaactctagccctatatccagaagcctgcccacctccacccattctgtttgccccatttccccagtccagtggacatgccccacctccagacttgctcatgggagaaggctgtggtctctgccccctcttgccaaatgcttcatggaaatgaagaggaaggcctagagcctccttcctgccccactgtgggccatttccagaagtggcctagaaatgccaacttcacttacctttcaaaagaaaggtgattcctatcacttgtcaaggtagggagaggtcagatgcccaagcctttgaccacggttttgtagcctgttggaggaagctacttttagctggctacacatgaggccacttgttttagggtgagctccagggatttgcctggattttgaaatcatgtagaacattatccacgtggctgtggctgtggctgtggctgggccctggcaggtggaaaaccatctcccagaaacctgaaagcacctgccaatgacgcagataaccctggccctacagcctgcttgctccgcctataccacagagcacagcctggacattatggagggtgtggcgggacggcccacacctggggtcctccatcgggaacttttcatgcttctttctccacctgaggtcttggtctgaagaagacctcaggactcacatcttcactcctgggcctttgcacttccagacgacaggtcatcgttcaagcagaatgcagacaggccattcacgagcccaagttgaagagaagagacgcccatccgtgaaggagcagaccatccatccgatcctccccttcccctgtccttccttcgtggattgtctccattgtccagacagtgcccccacctcccaccgccttgcctcactggcaatctggactcgatggagaacatccccccacctccatttggcactacccaagtggagtgtacccttgccctttccacctgtaccacccactccaacctcaccccagcttgcccaatgcttctggggaatttaatagctaccatgcaggccacagggaatttgtgaggcttcttttgtcatctttgtatctccagtttgtctttcttttctccatagccctgcctctactttccttccttgggaatcaggggttcctttagcccatttgctttctctaccttggggaccccaggggccaagcagttctccatctagtcacaccaaaggcaaaaagcctggctacctcccccctagcacgtgagtccctactcccctcccctctgtttctgcccagctttgcttattttggggatttcaaggcagcagagggtagtgaggggagagcaggagaagcctctgtcctgtataggcaactgcctgactatgcggtgactgctgtaaccaagatcaggtccccagcccttttgtccattaacaccccttcttgatctttcaaaggcagctaattgctagcaaatccccccgattccggccttttccctctatttctttgttagaagttttctgtggagctgaaacccagcctctgtttgactgggtttcatttagcttagttgggttcttagagccccctgtttgttgttttgtgttgtttccaatgaaaagcaagtttaccctcagagttatgcttttccaaagaggctgatgtctttgtttttgttttttttaatgtttcaggttctaagtgaagtgagttggggaggggttgggagtgttagtaatcaaggtttagaacaccatgagatagttacccctgatctccagtccctagctgggggctggacagggggaagggagagaggatttctattcacctttaatatatttttacaaaaaaagcaaacaatttaaaaacaagcccaccgcttctgtacatgtctaaatatatttttagaagtgggtaggattgtgaatttctgatgcagggcctttttataaataggttagggtagcatcattcagacttctctgttgtttttgtccctgtctttttcttatgttgtgttactaatgtaatttatattttttttagatcctccctttcctatagagataaaagtgatttatcttggcaattgctttgcttggcattctttttttttgtgatgagggtggtggtgtggtgcagggtctgggagtgctgccttctccttgtactctttgtctctccctcagcaagttgtcaggcatttccctggtgctcagccttatgcttgaagtgggaagggtattcccaccctcaggagggacacgcttcacac

SEQ ID NO: 81232 - DNA, 632 bp, Homo sapiens
  sig_peptide (271)...(406): this location contains the signal peptide sequence, MTPVLFSPLPVISLRHSMPCNPVAIPSGWGLAGCSGGPPKQSLSI, Run with SignalP
  misc_feature (356)...(54): similar to gi1805855 in the genepept database release 114, Run with FASTXY 3.3t00, default parameters
tttcgtctgaaaagacgcacaaagaatggtcataaaagatatgagtatgttgagtgattagtgatcggaaactacgagtgatatggtacaggtgtttgtagaagaacagtaaagccattgatcaggtcagctatcaatgaactcctgctagagaaggggtggtctaggcctgagtcctaaaacttcgttagtgatgtcaaaagtcacagtccttttgaggcttcagagacctcagttgtctgattatttctgtatctccatgcaaagcccatgactcctgttttattctcacccctacctgtgataagcctgagacactccatgccttgtaatccagtggcaataccatcagggtgggggctggctggctgctcaggtgggccccccaagcagagtctcagcataagtaccatgtttaggtctcacctttctgcaatgtttgaatttcacccaaagccacaatttctaaaaatgaacattatttcacaactctagatcttcccaattacaggactattcacactccctaatcaggaccccttcccacatcagcacaggcagggggctctgcagcaaggctgatgttagggcggaagtgactgataacgtgtggtatatacgttctttccccc

SEQ ID NO: 81233 - DNA, 635 bp, Homo sapiens
  sig_peptide (178)...(313): this location contains the signal peptide sequence, MRARPACTATFPSFHLALDSSYLPCCKGKATFIPKSRIYLQEAKG, Run with SignalP
  misc_feature (107)...(223): similar to gi554391 in the genepept database release 114, Run with FASTXY 3.3t00, default parameters
tttcgtggaggctcagaaagacccctaaggagcgggtattcaatctagcctcagaagatgaaattcagtaggcgagaagtgttggaaccaaaatcctcgttctggagtcattttatggaagcagctgctttggcttgaaatggcaagccccgggacctctccccacccagtgctttgatgagggccaggccagcatgtactgccaccttcccgtcctttcacctagccctggacagtagctaccttccttgctgtaaaggaaaggccacgtttataccaaaatccagaatctatctgcaggaggcaaagggaagtggggagcccctgggatgaggatctgtgagggtggctttccctgctaagcagaacatctgactgtctcactcctggctgtgtccaggaggtagatgggcttgaaatcaattctgcttgctgcatatctgatttcctagagcccactcgtcaagtgaggagacatcgtcagtgctgcagccggggatcgccatggagaccataggactggctgactccgggcagggctccttcaccggccaggggatcgccaggctgtcgcgcctcatcttcttgctgcgcaggtgggctgccaggcatgtgcaccaccaggaccttttttt

SEQ ID NO: 81234 - DNA, 633 bp, Homo sapiens
  sig_peptide (201)...(336): this location contains the signal peptide sequence, MPGLLNWITGAALPLTASDVTSCVSGYALGLTASLTYGNLEAQPF, Run with SignalP
  misc_feature (236)...(362): similar to gi4680497 in the genepept database release 114, Run with FASTXY 3.3t00, default parameters
tttcgtcgcaatgtgggcattgatcaagccagctgccagggcagcgggcgcagggcttgggcactggagcccagccccggaccgcacctccagcagtgctgggtgcagaaggcagtcactgtggcagtggagagacagagtgtgtacccagacacgtgttgcttctggggtaaggttctgaaggctgagtagccagcgggatgcccggcttgctgaattggatcacgggggcagccctgcccctcaccgcgtctgatgttacctcctgtgtcagcggttatgccctgggcctaactgcctccctcacctatggcaacctggaagcccagcccttccagggcctcttcgtgtaccccctggatgagtgcaccacggtgatcggctttgaggcagtcattgccgaccgtgtcgtgactgtacagatcaaggacaaagccaagctggagagcggccacttcgatgcctcccatgttcgatccccaacagtcacagggaacattctgcaagacggggtttccatagcccctcattcctgcacaccgggaaaggtgaccttggacgaggatttggagcggatcctgttcgtggccaacctgtggaccattgcccctatgtatagagcagtctgggata

SEQ ID NO: 81235 - DNA, 632 bp, Homo sapiens
  misc_feature (1)...(632): n = a,t,c or g
  sig_peptide (276)...(141): this location contains the signal peptide sequence, MGAVQRLMKIIMLNYRLVAHFLVLFAQKKANRQRTRVHRGSLWLS, Run with SignalP
  misc_feature (93)...(209): similar to gi664948 in the genepept database release 114, Run with FASTXY 3.3t00, default parameters
gaggagtttgcagttttaaaggaatcacattaaggacactgcaaatccctgctgcggtgtgcggccccgtgcctgcctgccttctgcgggttcggtatgacggccccctgggccatttggagattcacactcgcttaaccataacgaccctcgatgaaccctagtgcgctgacggtttgcttttttctgggcaaacaaaactaggaaatgtgccacaagccgataattgagcatgatgattttcatcaggcgttgcacggcccccatccaatggctgcgggctgcattcatccgctccacaaaggctctaggaggccctgctgtgcgccaggctcttgaatgttctaaagaccaggaaggcgcaagctttagcatggacacattcgctgtctgctgagggagataatgttaggtaaggtgtgcaatacgatttgaaaaggtggctttttatagtaaaaaccaagtatatgtgtgtagggggggatgcccacagggaaggatttcgaagactccagaaaggacttcgcanaggaggtggcgtgctggctagaacctcgggagtagaaatctgcctggcagaagcaaggctgctccagacggaagggaatcctcccgacgccagcagcccaggg

SEQ ID NO: 81236 - DNA, 1091 bp, Homo sapiens
  sig_peptide (64)...(199): this location contains the signal peptide sequence, MSFLLLFWPGSGTASPERPALLDSVAKELIIKQRQKPPKFLTFSC, Run with SignalP
  misc_feature (174)...(302): similar to gi1110587 in the genepept database release 114, Run with FASTXY 3.3t00, default parameters
ctcactgccaaagctgaaaccgatttgtgctggttacttctttctaagagtgaatgtgtgcgtatgagctttcttttgctgttttggccagggagtgggactgccagtccagaaaggccagctcttctggattcagtagcaaaagagttaatcattaagcagagacagaaacctcccaagtttctaaccttctcttgcgttaaatctccttactcttattagaagaaaaggcatatgcacacttatgcatgcgcgtgtgcacgcacgcacacaaacaccatacacacaaatactctaacaaaacttaatgtaaaatgatctcatgtttatgagagctggaattacttgggagggatacttgtgttctgcaggcttagtgggcacgatgtgaaagcaaggctatttggcctgtggagattgaagataagagcgtgatatgtaattgagtaagaatttgaaaaattatccgataacgttaggagcagcaaagcaactgcgtgtactttttttatgcttgaaactatttggagtaggagtgaggagctagcattgttttcagggcatgggaaccccctccccacctcgctagccaaatatgtttgcctaggccaagagtgtcagatctctgagagatcttgacagagtatttaaatacattctgccctcggacaattcttcagtggtaatcatttcaggaaaagggctgtcagctaacctttaaaatcctttccagaatagtatactgcagcccaccttcccatcttggtccagggacccaatctataaattggcaggttcttcatttgcagaacttgaaatagttaaagaagagactggatgaatgaactcatgtttctgctgctgtggccacaccctctataccgacatttgctttctatggctctcacaaccttggaaggagaggcttatgggaaacctttagggggtgcttatagtacactgggggcttccttctggcccctccctcctactttctttagggggggacatttgatgtacacaaaaatcaacgctactctacctgcgacccatttatagcactcgtgctgttcctctttatctcctgcccc

SEQ ID NO: 81237 - DNA, 1072 bp, Homo sapiens
  sig_peptide (323)...(188): this location contains the signal peptide sequence, MCVQLPQNISLLLLLLFASFSAFLHLRNKRLKKKSHLTKSCAIRI, Run with SignalP
  misc_feature (124)...(251): similar to gi2506035 in the genepept database release 114, Run with FASTXY 3.3t00, default parameters
ttaaaaggagaaggtaatcagagaagaaaaaaggaagtcggtggagagttctgcgaagattttgaagatttctaggtactttctggttttattttcttctctatggaacggtgctggctttttccgtatctaaatgcccttcaaaatgtgcccatcttgatttatagctatcattaatattacctttatgcggattgcacatgatttggtcagatggctcttcttttttaatcttttatttcgcaaatgcagaaaagcagagaaagaggcaaagagaagaaggaggaggagactgatgttttggggtaactggacacacatgtgaggatggagatgaaagagggagaggtctggagggcaggtgtgtgtggtagagaaggagctggggaaagatggagaagggggcaggtccagtactcttccggggaagagaggagatatctgggaagagttggggtccggtggatctggggggctgctgtcttgagggggctgtgaggaggggcagcatgcacaccctggtccacacccacccacaacagcggctcgcacccgtggctggactttgcgaccacccgtgagggcttatgaaccccacagcatgggtcacacgctcaccccactaatatcagaacgtggaaagcacgcgcacatacgtccaaggccttacctattttcaatctcccaatcgactcgaggcattacaccggggtagtcatggcgggcccctcttacatctacgagggcaactctacggcaggggcgctccacctggaccccagcacttttcgtcagctgtatcgccacgtactctagcacctttcctacacaccacttctcgtaccaacgatgtcctaatactagagctccacgactgtgccgactagatcgcacctcactctactcctcgggcgcatacaacaactctcactaacgcgacagtcacaccggccgagctagttgacacccccatcttttcttgctggtcgctgcgagacctcgatactccatattccccgcacactgctgctagccgcctctagacacttcctagcacccaccgcctccaccc

SEQ ID NO: 81238 - DNA, 384 bp, Homo sapiens
  sig_peptide (66)...(201): this location contains the signal peptide sequence, MCVLSVAKMVLLFQGWKDALPEYSHAKCIAVGAWVMVPSVHIWQG, Run with SignalP
  misc_feature (205)...(16): similar to gi395314 in the genepept database release 114, Run with FASTXY 3.3t00, default parameters
cttttaggaacttagaagctgtggttttttatgagtgcacttctgatgacttgggaacatttcatatgtgtgttctttctgtggccaagatggttttgttatttcagggatggaaagatgctttgcctgaatactcccatgctaagtgtatagcagttggtgcttgggtaatggtaccaagtgtacatatctggcaaggccaggctagaagggaaaatgtagactcttaagctttttgagacgaacttctcagatactggatctcttgactcacatagtggaattttgggggaagtatgtggtttgctttttgtctcctaagaaatgatgattcagtttcctcaaacgtttctcacagtcactactggttgcttggaatggctg

SEQ ID NO: 81239 - DNA, 412 bp, Homo sapiens
  sig_peptide (167)...(302): this location contains the signal peptide sequence, MHFSCFLQYLYLLLLSFLLGCSQYLLVAYVMDLLRRLPWVIFCSY, Run with SignalP
  misc_feature (130)...(242): similar to gi5059314 in the genepept database release 114, Run with FASTXY 3.3t00, default parameters
cacaaggcttcttaagtccaaagggcaattctcagtcttcgttttgtctaaattcatggtttcagtatggccagttactaggtgaatgcaaccatgaatttagacaaaacgaagactgaaaccgcctcctgcgaatcaaacttctctctgctgggtttctgagacaatgcacttttcttgttttctccaatatctctatcttctccttctcagtttccttttgggttgctctcaatatcttcttgttgcttacgtgatggatttacttaggcgtcttccctgggtgattttctgctcttacggtaagcattctcccttggagacaatctcatcccctgtcaaggttgctaccgctgtctatatgccaaacaattccacatctatagctgtaggccagatttctttcacaagg

SEQ ID NO: 81240 - DNA, 741 bp, Homo sapiens
  sig_peptide (56)...(191): this location contains the signal peptide sequence, MYDFLLLLSFIFIVASYWSFLSTIFLDVVCSILHCPVKPQTLLKS, Run with SignalP
  misc_feature (56)...(257): similar to gi6018807 in the genepept database release 114, Run with FASTXY 3.3t00, default parameters
aaaatgttaaagaactatctttccaaaacgtaaacactgccttccctttacttaaatgtacgattttcttttgctcttgagttttattttcatagtggcatcttactggtctttcctttccaccatatttttggatgttgtgtgttccattttacattgcccagttaaaccacagacactcctgaagtcatgtttacatgtggactgcaagtcaacctagttggcatgttgatctaagctacaaattgcactgctgttttgccgaacccaacagtcggtttcttgccattatttgcggtattttaacttaaaactcacggtaatccttctcaccccatctagtttgttttaattgatctaacaaacactgcttgtttgaattcaaatggaggatccatggaagctctcccaccccaccctttgatacttgataaggggtcaaacagtacttcttttaaattcagataattctttgaatgaactatgaaatacttcagagggaaaggaaatatcgattctgagatggagagtaaaagaacaaggagatattcattactgttgcagataatttcttgcaatgaaggaaaaaattagacggtggatattttttgttgtggtgcgtgcatagggagataggtggaccataaaacactcttccttggggaccgcaagtctcaacctagaactcatctttgaagctgttactttacttgaacactccctttggaaggggatctcaaa

SEQ ID NO: 81241 - DNA, 392 bp, Homo sapiens
  sig_peptide (217)...(352): this location contains the signal peptide sequence, MPSTLLALLHCGTSLLRIFKNCLIENTNVFVEMTVTIAEVFYLSD, Run with SignalP
  misc_feature (177)...(266): similar to gi440335 in the genepept database release 114, Run with FASTXY 3.3t00, default parameters
tgtccatgcatcccacacagcttttgagtatataatcaaatgtattagcatcattttgtgatttatactagaaatcaatctttattgaattttttccaaaatcaaagtatagacttttaaacttctaaataccattaaatagctaaattttaatagctaaatataaaccattaaatttgctttggtaagcctcattaagcgtaggaaccatgattaatgccatcaacattattggcattactacattgtggaacatctcttttgaggatttttaagaactgcttaattgaaaatacaaatgtatttgttgaaatgactgtgactattgcagaagtgttttaccttagtgatattccatccatctacctgttttgtttcgcattttgctacaa

SEQ ID NO: 81242 - DNA, 1265 bp, Homo sapiens
  sig_peptide (1040)...(905): this location contains the signal peptide sequence, MGCGSLRFLVKSAHLCFYICSLPCNPYHVHLFCGFGLLFNCTQVI, Run with SignalP
  misc_feature (1059)...(955): similar to gi2605734 in the genepept database release 114, Run with FASTXY 3.3t00, default parameters
ttttttttttttaattgttttatttgggaaaagtgcttcttacaaaagggcagctgcaaaatacagagacctctgcaacaattatttgttttttcttaaagtgaaagaatgggtgggatccaaggaatcaaagcagtagatggacaaaccaggagcatccccgagttattttcaggaaacagagcaacaaaacacaaaggtacaatttccaatcaaggaattcttccaacaacttaactttagctaatctcagggattcccaagccctccctttcggtggaaaagtatgacttatcactgcaaacccattactccactacaataaacaccttagaacagagttttgaatcacgtctgtctacctgaaagctcaggggtggaatgaggcaaatacccacaaaaacaaacacaaaaacccgacaacaaaatgcctcaagtgaggacaaaggtttctcagaaagtgcctgtactggaaaggctagatcgtaaaacattaaatacaactgtgtatccaagacccagtttgtgttattatatgggataaccaggtagttttaacctctatggctaaccccatttctctatttatatagacagagctagcactgctatattgacaactaccaatatactgctttgccctttaagatctatctgccacacaaggcttaaaccactaaaccaggtttttctactaaggctaagaatactgcatctatgcagggatgagaagcttatcacacacccacacactcacaccatgtcagcccttgggagccaacttccaactctgcattgatgttatgcctctctatcttttatacgtattctttctcaattttcctatcatgcaaaacagtaaaaaatctcaacacattcacacctgattctggttacccagtagtattacttgtgtgcaattaaacaagagaccaaaaccacagaacaagtgcacgtggtagggattacagggtagggaacagatataaaaacacagatgtgcagatttcaccagaaacctcaaggatccacatcccatgtctggggcagagggctattggccagcttaggtcccttcacccatcactcctattcttggaccccaaagcagggccactgcttttacttttgaacctggggtcctcaaaatgagtgtgtgaaaagtccataaatgcaatctggttgaaaacagatgacgcaacacacctacactaactgtctgacagttaaattcgtgttacaaaaaactaactttaagatttatt

SEQ ID NO: 81243 - DNA, 867 bp, Homo sapiens; identical to SEQ ID NO: 67689
  sig_peptide (8)...(143): this location contains the signal peptide sequence, MPVPALCLLWALAMVTRPASAAPMGGPELAQHEELTLLFHGTLQL, Run with SignalP
  misc_feature (281)...(50): similar to gi1752666 in the genepept database release 114, Run with FASTXY 3.3t00, default parameters

SEQ ID NO: 81244 - DNA, 461 bp, Homo sapiens
  misc_feature (1)...(461): n = a,t,c or g
  sig_peptide (288)...(423): this location contains the signal peptide sequence, MEKRLFLLFVCLTNSAATTKYLHGKIIINLNAVSLHIQIILNVPY, Run with SignalP
  misc_feature (202)...(65): similar to gi5360853 in the genepept database release 114, Run with FASTXY 3.3t00, default parameters
agttctgacccagttcagagcattgtcnngacnncganntttaaacaattgaaagttaattctaaaccttatataaaatgcaacagacaaagaatagcctaaacaatttgaaaaataataagtcgaaggacttacactacttgattttaagacttattgtaaaccaaaataatcaagacaatatggtactggcataggatgtcaaatcaatgaaaaaaatgagtcaataaatagaccctgatatataaggaaaatggattgttttttaaaaccacagcactgagttaatggaaaaaaggctttttttgttgtttgtttgtttaacaaacagcgctgcaacaactaaatatctgcatggaaaaataataataaaccttaatgctgtttcactccatatacaaataattctaaatgtaccatatacttaaataaaaaactcagaactatgaagtttctaaaag

SEQ ID NO: 81245 - DNA, 610 bp, Homo sapiens
  sig_peptide (104)...(239): this location contains the signal peptide sequence, MLGSFIPLFLWTLGSQEALFYQHSFVAVNVSHQPDDFSNCIKQLY, Run with SignalP
  misc_feature (319)...(216): similar to gi2352441 in the genepept database release 114, Run with FASTXY 3.3t00, default parameters
ttaattctgtgtataaatcagatacactgtggtcaaagatttgtgtgtatttgtaagaaaagaggagaatggagaatctgtttttaagtggtcctatgtgtgaatgctgggttcttttattcctctttttctctggacacttggcagtcaggaagctttgttctaccaacatagttttgttgctgtgaatgtctcacaccaaccggatgatttttccaattgtatcaaacaactctattttcagggaggagtaagctgaagtgaaaacaggcaaggagcaaagttcttgttgacatacaaatgctttctgtggatgagtaaagaaaaaagtagcccataaagttatttttgcttgaattattgcgcatggaatgtttaaaacatgcttattgataggttctggacaagagccttcccaatgccaacctagggctatcacacaaccaaatcagatgcagtgtgactagaaacgatgccatggttttagtacctaaccacttcttcaccactctgggagggacctagtctcttgatcaaattaaccttagctctggggtgtaaaaaaaccttctgactgctgcgtaaaagccagatgtttaaagtgctttca

SEQ ID NO: 81246 - DNA, 396 bp, Homo sapiens
  misc_feature (1)...(396): n = a,t,c or g
  sig_peptide (75)...(210): this location contains the signal peptide sequence, MFLLHRYSLCSVFFMGVRQLTTKKNYLRFHFTQIAAEIRSLPFNV, Run with SignalP
  misc_feature (165)...(246): similar to gi409898 in the genepept database release 114, Run with FASTXY 3.3t00, default parameters
atttctaatcctcaatttcatcgtaccatatatagttcaaaaattcacttattttgtactagattgctaattaaatgttcttacttcacaggtattctctctgttcagttttcttcatgggtgttaggcagttaacaaccaaaaagaattacttgaggtttcattttactcaaattgctgcagaaatcagaagcttaccttttaatgttaagctagcagagtctgtatagttcgagataaggagttacagggaagccatgtttttaccgatgggaacatgctcattcaaaggcttactcaaatgaactgaaaaccgtcaaatacagaagcatctttaaaatgctgaaaaatagaattattactatcttcaataatgggggccaggcatggtggctn

SEQ ID NO: 81247 - DNA, 414 bp, Homo sapiens
  sig_peptide (177)...(312): this location contains the signal peptide sequence, MFYVEGQFSFLILLLIFGFIIALRKCWSYFYFLNLLKFSLCLSFH, Run with SignalP
  misc_feature (252)...(345): similar to gi2746254 in the genepept database release 114, Run with FASTXY 3.3t00, default parameters
tggctattgatgagaacacgttggagggcgttttttaataagcaatgctacattgaataagcttgcttacatacattattgtcatagcaaactcatgacaacgttgaggcagatgtgtggctgagttattccaacttttgaaatgggcccaggagtttttaagcaagagttaacagatgttctatgtagaagggcagttttcttttctgattttgttattaatttttggttttattatagcgctcaggaaatgttggtcttatttctactttttaaatttattgaaattttctttgtgcctcagttttcacaaatatttgataggcacttgagaagaagataaatccaataatatcaaggtatggagtttgatattatttatttataaaatcgactttattgattatattgctt

SEQ ID NO: 81248 - DNA, 408 bp, Homo sapiens
  sig_peptide (249)...(384): this location contains the signal peptide sequence, MKRFLWPILQWLTIKFAIFVLFASSHILEIMKVWHSFYVNKSSAE, Run with SignalP
  misc_feature (132)...(264): similar to gi1381108 in the genepept database release 114, Run with FASTXY 3.3t00, default parameters
cttggttctcctcagtctggcttcctggctccaataggctagcttgagctctttcatagggcaaacttagggttccaagaacagcaagaggatagcctcaatgcaacagtgctctctaagcctctgcttcaggcattttgctgaagccctgctgaccaaagcaagtcacatggccaactcagttttatgggataccttgatggaggtgatttgcactgccacatagcacaacagagtgtgctgcagacatgaaaagatttttatggccaattttgcaatggctcacaattaaatttgctatttttgttttatttgctagttcacacattctggaaataatgaaggtatggcactccttctatgtgaacaagtcttctgcagaaattctgagattgctttcttcaaaag

SEQ ID NO: 81249 - DNA, 1201 bp, Homo sapiens
  sig_peptide (303)...(438): this location contains the signal peptide sequence, MAFQFLISTLLLQCLQIGVLHSAMICSPRYRVFLLKLFWLALASV, Run with SignalP
  misc_feature (787)...(875): similar to gi2224488 in the genepept database release 114, Run with FASTXY 3.3t00, default parameters
tgtgtattgtgtataacaagatgttccatctgactataatttattgctgtaaatattttctgcctttgaagatgtagttaatagaatttaatcttttctaagtgcacattgaagttgccttttatgttcatattatgttcatattttatttgaaaaatctatagcatttttattgtgctgaaagcattaatatttgcagcactttgtgagacaggcaaaattatctttttgctgacttggaaactgcaagagttaaaagacttgcttggaatcacacatggcagatagaggataaggaaaagatggcctttcagttcctcatcagtaccttgctactacagtgtctgcagattggtgtcttacattcagctatgatttgttcgccaaggtaccgtgtcttcttactgaagttgttttggctggcgcttgcctccgttcagagggaactgagttacctaactttatgatgctaagagccaggaaggtactgggatctgggatgctaggcacctaaccagtctagactgaactccatactaagctgtttttctgtgttaaggcatcaagagtagatggtggtcctgattttctgagatatattatctctgaattatctacataaataactgaaacttttatgtaattttaaaactagtcaatcatgttaccacccttttgaggggcaccaaatttgagacccttacccccaatttattaattaatagctgttttaatcacctaatagctgatcacctaatgactaacagtcattttcatcctggaaaatgggaactaactttgactttgaaaagtgctgttattaaatgtgtgattcataagaactgaacatattttctttattattttccttcaggattcaactttaattgactccaaatgatgttatggtcattctgtttttctgatacgagaatagattgttctgagaacctagaatattcattgcctttatgaatctagaattgactttaaatttaggttattgtgtttgtcatttgcgctaaaaaaaaaattgccctggggaataccaaacttctcggtacattcgtgtggtgtgaaagtcaaaattgccaattaggttctattttgaccaaatagttgaatgttgtagacagttgtaaattttgaacctgttctaatttgccttttgccagatggcgcatttaactttgtggcatat

SEQ ID NO: 81250 - DNA, 410 bp, Homo sapiens
  sig_peptide (54)...(189): this location contains the signal peptide sequence, MPTTPVAYNSLGAVIGIAVLGSLVVALVALFIGYRHWQKGKEHHH, Run with SignalP
  misc_feature (212)...(105): similar to gi3150526 in the genepept database release 114, Run with FASTXY 3.3t00, default parameters
cagggcacagtggtgcaccttgcaggattgtaatccaggagccctttactgtgatgccgaccactccagtagcgtataactcgctgggtgcagtgattggcattgcagtgctggggtcccttgtggtagccctggtggcactgttcattggctatcggcactggcaaaaaggcaaggagcaccaccacctggctgtggcttacagcagcgggcgcctggacggctccgagtatgtcatgccagatgtccctccgagctacagtcactactactccaaccccagctaccacaccctgtcgcagtgctccccaaaccccccaccccctaacaaggttccaggcccgctctttgccagcctgcagaaacctgaacggccaggtggggcccaagggcatgataaccacaccacc

SEQ ID NO: 81251 - DNA, 1144 bp, Homo sapiens
  sig_peptide (376)...(511): this location contains the signal peptide sequence, MARPSAFPIGVCLTLPMAWISPGLAVPSCPQYILQAQGCILDMKT, Run with SignalP
  misc_feature (1114)...(137): similar to gi1806630 in the genepept database release 114, Run with FASTXY 3.3t00, default parameters
agtgggggaattccctaagtccactgagaataaacaagagacagagataggtgggaagacagagacagagataggagggaagacagagacagagataggagggaagacagagacagagggagagaaacacagagattccttattggcaatctttctgttctcttatttaaagaaaaaagttgatttttctccttaatctgaaacgtatggctgctctgtagagaaggtttgggagatgctgaaatggggcgagaagggagcactcatcagccttacacacggctctgctaaggatcagggctccaggcccctcagcctcctccccagcatggcagccccttccagcctctcctatccccaggcctgcaggctaggatggcccggccctcagccttccccatcggggtctgtctgactctgcccatggcctggatctccccgggtttagctgtgcccagctgtccccagtacatacttcaagcccaaggctgcatcctagacatgaaaacccgaggcagccatggggagtctgctgtgccaggggcccatggctctcgtcccttccaccctctggctgagcccaatcctccccgccaaaagttgacaccatgcacatgagggacacggggtggctccccaaagctgacggtcgacgcccctgcagggccgtgatgccaagtcagggtctcagcaggccctgggactcagtccccacagagggcagggggtgacactcagccccggagaagggcccctcagagccctctgacagtgccctttcccggtgggcaacgctttctgccaggcatgcgctcccaccagattacaggaaggctgcaggcagagtgtgcacaccgggatggccccttatcccgcccagacaaaggcgcgcagggccctgaggcagggcccatgctgtgctggagtgggtggagctgggaacagaaatacgtcctgcctgcaacaaagcggcgctgtgagcagctgcggagcacagggggcatcttctgaggacaaccgcagcaacaacaataacagcaggctgggcccggtggcttacacctgggatcccagcactttgggaagccgaggcaggaaggatcgcttggaggcgagggaattaagaacagcctgggcaacataa

SEQ ID NO: 81252 - DNA, 1667 bp, Homo sapiens; identical to SEQ ID NO: 80789
  sig_peptide (735)...(870): this location contains the signal peptide sequence, MVGLGGMSQLLLASLLPPVPQGSPTRRKLPASLLVSTALISPVCV, Run with SignalP
  misc_feature (951)...(691): similar to gi818877 in the genepept database release 114, Run with FASTXY 3.3t00, default parameters

SEQ ID NO: 81253 - DNA, 839 bp, Homo sapiens
  sig_peptide (233)...(368): this location contains the signal peptide sequence, MLVYILWNMYFNVCIVPGVIKSKTGTQDLSGLWPLGTFPLITFLP, Run with SignalP
  misc_feature (480)...(830): similar to gi786160 in the genepept database release 114, Run with FASTXY 3.3t00, default parameters
cccacgcgtccggcttttggtgtgttggataggcttttgagtagggagagatactatcttgaattgtgctaataatttaactcaacagcatctaacaaaggcagtcttattcttggatcatgtgtacagatcatagtctgaagtggaataagcagaatgttgtcctcagtgtgagatgttatttagaacacactggaaacattgtgatgtcattgtgcactgaggcagggaaatgttagtctacattttatggaatatgtacttcaatgtttgcattgtacctggagtgataaaaagcaaaacaggtactcaagacctgtctgggctttggcctttgggcacattccccctcatcaccttccttcccacttggctgagctatggatgagaaaacctaggtcaatagttcaccaactcaccttcaagccaggtgggctgacaagtcctcctttgaccacaggaccccagcgcctgcatccagaagcatctaagatcctggaagtcaacttaaattttcaatgaatgggccagttgcaggggctcacacctgtaatcccagcactttgggaagctgaggcgacaggattctttgagccccggaatttgagaccaacctgcttgggccacctaaacccatttcatcaatcaatcataatcgagggaggggcgggattggagccctcattattaggagctgaggggggggccactggaccccggggtttgggttgccgggcccctattggcccggaccctgggaaaaaacgaaaaccagcctccgcagaactcgccaaaaaatggggcgggcgttgaaaacaaattttaacccggcgggccat

SEQ ID NO: 81254 - DNA, 486 bp, Homo sapiens
  misc_feature (1)...(486): n = a,t,c or g
  sig_peptide (137)...(272): this location contains the signal peptide sequence, MRRWHGFIFLQVSEAWLDRRAWLLRAASVCCDIYCMSRSLWKTPQ, Run with SignalP
  misc_feature (125)...(26): similar to gi414872 in the genepept database release 114, Run with FASTXY 3.3t00, default parameters
cccacgcgtccggcagcagaatgagaaaagtttacaaaatagtttaaatgacaataaagtcattatagattaacataaataaaataccttttatgaaaaaaataatcattttctgaaatcagacaaaacattgtgaatgagaaggtggcatggttttatttttttgcaagtctccgaagcctggctggatagaagagcctggcttctcagagctgcttcagtctgttgtgatatctattgtatgtcacgtagcctctggaaaactccacagttagtattgttgggaaaataactttgacctcaggatctcctgaaaacgtcttggggaaccccagggtctagaggctgcagtttgagaactgttgctgtggtatcccaggtgtctcaaatactgcctagaacataggtggtactcagtaattattgttgaagaatgaataaataaagtgaatctttgcacctaanaaaaaaaaaacaaaaaaaaaa

SEQ ID NO: 81255 - DNA, 677 bp, Homo sapiens
  sig_peptide (12)...(147): this location contains the signal peptide sequence, MILFQLPSNVFVLLMFLFLFEFFLTLVPMWAFPGDKTFVSPASSL, Run with SignalP
  misc_feature (150)...(293): similar to gi450742 in the genepept database release 114, Run with FASTXY 3.3t00, default parameters
gggagaattgaatgattttgtttcaactgccaagtaatgtttttgttcttttaatgtttttgtttctttttgagttcttccttaccttagttccaatgtgggcatttcctggagacaaaacttttgtttcacctgcatcatctttaagttttcttgatctgagttttctgcttttctgtaacagtgtatctattggaaaacaataacagaaatctcataatcctaaaatgttaagcattttgctaatattacacagagtatgtgaactaacagaagggctagattttgtttatcttgtacatcttggaaatctgtgacagcttggcttagattcagttttagtgtactgtatttgaaattaccgttatccacaggaacagtaactatagtttgtcctaatataacgaagtctactttataagttggctgagcatggtggctcacagctgtaatctcagcactttgggaggccaacatgggcacatcacttgaggtcagtagtttgagaccagcctggccaaaatggagaaaccccatctcaactaataataaaaaaaattagctgggcatggtggcacacgtcctgtagtcccacctacctgggaggctgatgcaggagaatccattgaacccgagaggtggaggttgcagtgagccaagatcgcaccactccactc

SEQ ID NO: 81256 - DNA, 825 bp, Homo sapiens
  sig_peptide (15)...(150): this location contains the signal peptide sequence, MRLVARLLLLIFLGSGQRLGSWETTGSKGWSRMQRVLVARAPGCA, Run with SignalP
  misc_feature (173)...(77): similar to gi1184879 in the genepept database release 114, Run with FASTXY 3.3t00, default parameters
cccacgcgtccgcgatgaggttggttgctaggttattgctgttgatttttctggggtcaggccagagactgggttcctgggagaccacagggtccaaggggtggtcgaggatgcagagggtcctagttgcccgagctcctgggtgtgcacccacttccttcagtccactgcagctctttggtcccctgtgattgtgatgaccatctggagagaaggtttctaatctcccctcttatcagacaggacactcagatgagtctgtttttatttaaaattttggcattttgcttatcttggatttttgtgcatcagtttttttgttcaattattacattaaactatttctcttgactactgagattttggacctcccttaaattttgtgtcagaggcaagtgcctgtaatctcacctctgttccagcccttaccacgctactcctacctatctccccttttatactaataatcttatcatcattaaaaaaaaaaacttctttccttgtaagcgtgggggggggtttttaagggattgctttttgccccccggggcagctacataaaatgttttttttgtggcgcaagaatgatattaagtggggagcgctgaaaacatcctgggagggaacaccctctgtccgccatatatagacttttttaccttaataggaactgcataatctctgacacctaacattgtaagagatataatctttggaatctgcggacctcccaaagcaaaataccactcggccctttgtgaccaaggagggggcgttttacgaacctcttttcccggcacggcccaccttttataggggggcgcc

SEQ ID NO: 81257 - DNA, 788 bp, Homo sapiens
  misc_feature (1)...(788): n = a,t,c or g
  sig_peptide (205)...(340): this location contains the signal peptide sequence, MPPSHPHSSTFYPLILVIDLLSSSFCLLSSSLSLSFLPSLLYPAL, Run with SignalP
  misc_feature (695)...(534): similar to gi1762124 in the genepept database release 114, Run with FASTXY 3.3t00, default parameters
cccacgcgtccggtacacaagtctgcaagggaccttggaagtaacttgtttctgtctaatttctataaaatttccaggagatagtcatacagctttaatttgatcgcatccactagttttggcattggtattgccatattgattatggacacataaaactgtaactcctggagccaacctctcaggctttcctacatgaaaccaatgccaccatcccacccgcactctagcaccttctatccactgattttagtcattgacttgctctcttcctctttctgtttgttgtcttccagtttgtctctttcattcctcccctcccttctctatcctgctctctgacccaagaggctgacctgtatgaaccacatcagtgattggctggtggggccccccagcaaagaggatggagtgaagtgagggtatttacttgcttaattgcctccaggctgggtcactcacagctggccatgtccttccatcaaagatcagagctctcctcaaggtagccctctccacaaactttcttgagtttctctttttgggttttgttaaccattttctcaacttgtcccttcatgcctagaggtaatagcaggtggggaatgctgtgctattccatttggttntcctgcacccttcccatgtttgtatgtagtccctttcataaagtactgggactgtcctaattcgaatgtgccatcttttttggttcctgctaaaaactgttcaactcactctggatacactcaataaatataactcagactggtccaataaaaaaaaaa

SEQ ID NO: 81258 - DNA, 1667 bp, Homo sapiens
  sig_peptide (800)...(935): this location contains the signal peptide sequence, MGMAVLVEKSVVLVIWLGPVAQAGSNWFAVSSLQEYLKQGDSSSL, Run with SignalP
  misc_feature (597)...(764): similar to gi205426 in the genepept database release 114, Run with FASTXY 3.3t00, default parameters
cctgactccttcactcttgtgtgtgaagtctattagcaactttcaataagctaagcaatgttgtaacttgcaaaaaagcctccactctgagtaaacagggccttatagagtaggtaatgttttcatactgggtactactgaaattttgcagatgtgtgcatctgttccatttaaggtgcccttaaatgtgttgaatgtaatgtgttgaatgtttatgtgtaatggctaaagtatctatatgtatgtgcataaaactgtcccaagatgtattctcaggaatactgttacctggagtttgaaaggaataactattaaaaaaaaaagttggggaagattagaaaaaagctcaagataaatgttcaaaatattattaagtacatgactaaaagctaattactacatatgataaatgcagggttggtaatagtagatcatttcttaagccatgatacttaatgatatttatcttattcagaggaaaaacaaaaaaggtacccacttcccatgtagaaaaaattagactcagcaaagaggttgcttcttctgaaattagcttttgagagaccttggaataaaccatgtgttatccatgatagtatgactcagatccaattaaaacagtttaaattctggatataggatctcctatagcaaaacattttactttcatttttcagtatttgctgctttctagaattctattagataagctatgtcatttttctgaaaaagaaactgagttattgagtgtattaagacaaggcactgagaactacagtgtcaaaatcaaagggcataaatgggcatggcagtgctggtggaaaaatctgtggtactggtgatctggttagggcctgttgcacaggctgggagtaactggtttgctgtttcaagcctccaagagtaccttaaacaaggggatagctcctctcttctttagcattatattcctttagtcaacaaagaactttctccactctgctgcccagctctgagagtatctgagatgagaataggatgtgtgtggaggggcttttagggaagaaagggtcataaatgaatagaagtacagtctgaaacatgaattaaatatccttcctcaagttataaaggatactttaatagaacacagtctccagaattcgctgctatcacaccaagtcatgctgttgccctgtgacctcacacttcccattccatggccttgtcttggcagggagtaaaaaatcccacttctttttactttagtgggtctcaactgcagcatttcagaaacaaattttgatttgacactcaggagaataaaaacaagttgagggcagaatgtatttggaaaagcttaagacaaatttactgatattattttatgatcatttaggattacagatcaatttacctccataaatctttgaattgtcactgtgaccacaggatgaaaatcctttattagccattttataggttaaaacaaaaaattgactacacagccgacttccctcagataactatgaagtctattatgagtactgaatgaccaaagaacatggaaaaaatgcatatgaataaatactgaaatgtttatgaaagatatttatgaaagatattaagacttctgtgtttaggtatgcacatatgataaaataaatctaaaaacattaaaaaaaaaa

SEQ ID NO: 81259 - DNA, 609 bp, Homo sapiens
  sig_peptide (5)...(140): this location contains the signal peptide sequence, MKVWDYMIIFIFLLYIKINTLNIFKNPSCTTKNHLLHQILEHSLH, Run with SignalP
  misc_feature (200)...(305): similar to gi440270 in the genepept database release 114, Run with FASTXY 3.3t00, default parameters
atccatgaaagtatgggattatatgataatattcattttcctactatacattaaaataaacacattaaatatttttaaaaatccctcatgcacaaccaaaaatcatcttttacaccaaatattggaacactcccttcactttaaagatgtggtaactgactagaaaagagtcttcccttcaagtttacagtgatctgtagtcaatattctttggatttttttttaattattcaaccaactgattttgtttaagtcatacttctctaattcattcacatgggtatcatgaaatatttcgccaaatgctctgttaaaacgaaagcacttcacgtctttgatcttgccttcatcttgataattgttgtaaaatgtgagaggtgtcacactgctgcagggatttcttcagttactcagtaaaggacatttgcaaatggtcatttctaactccatgagaacaggctaagcactagggagggatattgtgtaagtatctgggtggttgggtaaaaataaaaagcaatggttgtaatttttttttgacagcaagaactgaaagaaaaggattgggaaccccccggagcggaccgaaaacccattaaaaaaaaaaaa

SEQ ID NO: 81260 - DNA, 616 bp, Homo sapiens
  sig_peptide (269)...(404): this location contains the signal peptide sequence, MCFMFILGCMRASVGCKSVYEGEEAEGREEMNIRLGTPGVSLLEC, Run with SignalP
  misc_feature (365)...(265): similar to gi475791 in the genepept database release 114, Run with FASTXY 3.3t00, default parameters
aaccgatcaatttcccataaacaaagtgattgaaatatttatttttgttgtgtaattgtgtgaggcctttgatgataagtggcatttcttgatcatgtttaaatcctccagaatctggggctttgactgtaaagtataagacagaagtagaaattaccttcacagttacctgacacgtatacacctttattcatgaaacattgggtctggacatgacattgcatcaggccgtgtggatttcagaaaaagtgaaaaaccacttttctggatgtgtttcatgttcatcctaggatgcatgagggcctcggttggatgtaaaagtgtttatgagggagaagaggcagaaggaagggaagagatgaatataaggttaggaacacccggcgtctccttgttagagtgcagggagagatcccattcctgaaatataggttgaggcaggattgttgaaggagtagttatcgtaggttcaaatgtgcataatttgggcatctataaatccaaaacaaacatttctagatgataccacttttgagatcttaattattgacttaacaaacatgttttaaagggggttactatgtggccgcgcccattgggtaggagggggggatta

SEQ ID NO: 81261 - DNA, 609 bp, Homo sapiens
  sig_peptide (129)...(264): this location contains the signal peptide sequence, MRNIPLAKIFFSFLTFYNLNSWPKALLLELKETFFGSLIENDIKT, Run with SignalP
  misc_feature (292)...(390): similar to gi797347 in the genepept database release 114, Run with FASTXY 3.3t00, default parameters
atgatattgaaaccttttaaaatttatatcaggtctttttttccccctctaaatctgagtttttgctaggatagatctttcacctcttagaaaaccactctatctgatctttaaatccgtgagttggaatgagaaatattccacttgctaaaattttcttcagctttttaactttttacaatctcaacagttggccaaaggcacttctactagaattgaaagaaactttttttgggtcattgatagagaatgacattaagactataaataagtcatgctggaaataaaaatttacaatcaggtcacaaatgccaacactttataagaacttgggaagtaaaaacctcttgtacttggctttacagtgacttaggcactggaggaaatgaagatcaacacgatttcgaaagcaaaagttgcagagtgttatggtcttactcaagtgccttgtaataaatagcttgacgtgaaggttcacgttttctcattcaatccagctcttttaggaatctcgtagacagatagtactctaaagggaaagatttgaatgtgtcactgtggccctggcccaagcaaatcattttgagcagctcctgtctgctgggcatt

SEQ ID NO: 81262 - DNA, 609 bp, Homo sapiens
  sig_peptide (248)...(383): this location contains the signal peptide sequence, MYLFLHHYYTLFIIVAVVSMPWLESSPWKVSTLWKYHFKTDFNFG, Run with SignalP
  misc_feature (172)...(307): similar to gi1228932 in the genepept database release 114, Run with FASTXY 3.3t00, default parameters
aaaagttttccctattcctaagaccacaaagtcaactagaatattttcctttttatgattttaatttttatattaatttgccatcttattttgctgcatggtaataagtgggaatcttaattcttttataaatgttaagccagttacctaaaacagtttactgaataatccattctttcctctgatttgtaatgccatcttatatatcctagctctcttggggtgtttgattccgtattgttgattgatgtatctattcctgcaccattactacacactcttcattatcgtggctgttgtatccatgccatggttggagagctcaccttggaaagtaagcactctgtggaagtatcatttcaaaactgactttaattttggaaattaaaaggaaaacccttcttaagctagagtacgtggagcgaattgacttggatcctgcctgggttcctctgtcaacattttgttttgtggcctttaaataacatacttgattaattccattggacatgagggaatggctgctcttaagctattctaaagctagaaacccgaactgtcccaaaaaaatggtcagcacccaaggaactttaatttaaaaatatttaa

SEQ ID NO: 81263 - DNA, 392 bp, Homo sapiens
  sig_peptide (113)...(248): this location contains the signal peptide sequence, MAHLFASLFLAILGFVLYFLVFWYHDSSIHCHHNSSASSLLYLSA, Run with SignalP
  misc_feature (354)...(184): similar to gi683731 in the genepept database release 114, Run with FASTXY 3.3t00, default parameters
ctgtgatgatgccatcaccccattgctaaaccaggtacaaaaccctttcttggcataatagaaggataattttaagtgatattcatcaaaatacagatagggaagtaaaagcatggcccatttatttgcctccttatttttagctattcttggttttgttttgtatttcctggtgttttggtatcatgattcttccatccactgtcatcataactcttctgcttcatctctcctatacctttctgccagtacctccacccctaatcaagacagcttcttaattctgtagattctatttccctgtgtttccttctgtctcctcatttccatgcttacagccattgccttggtctagatcctaatctcttgcaagaatattgaaatagtcatct

SEQ ID NO: 81264 - DNA, 623 bp, Homo sapiens
  sig_peptide (273)...(408): this location contains the signal peptide sequence, MRWSIMRKLADLIATTLIPVAATSRASCFALFTADSVIILIGALL, Run with SignalP
  misc_feature (390)...(262): similar to gi414662 in the genepept database release 114, Run with FASTXY 3.3t00, default parameters
cagcatcaattatttaggaagccaaccatccccattaccacctcttattactaatacttgataacgtcaatttaaaaatcttcccttctgcagcctgtcccagagatgggaccattttaactcaaatggttcttttacatatcaaaagcccctgcaacagaaagtcatttgtatatgcaaaggatcagttgtaaatatgatttacgaacaacatttctcaatagttatccgagcggttttgtgtgatcaccccagtcccctttgggtgaaccatgcgctggtccataatgagaaagttggcagacctcatcgcaaccacgctcatcccagtggctgctaccagccgggcctcatgttttgccttgtttacagctgacagcgttattattctgattggggctctgctttcttatcatattggtgtggagagcgagccttttcctctacgtttgtgtttcctggcagggcttttcttgccttattgacagcttgtaaaaaaatgcattaatttggaggtttcaagcatgcatatcatgggggctcttttgcttgggttggcttggaaggtggttaaacgataaaaaccttccctttgggggcccgcccctctgggaagagatatt

SEQ ID NO: 81265 - DNA, 599 bp, Homo sapiens
  sig_peptide (105)...(240): this location contains the signal peptide sequence, MVGQVFLQLCVFDYLCLGGRYCEIYFVGCHVFLKCTNLELCSKMQ, Run with SignalP
  misc_feature (79)...(192): similar to gi1181442 in the genepept database release 114, Run with FASTXY 3.3t00, default parameters
cttcagtggcagcctgcaaattctgctgtggtggtgttttaatatccatctctgctaatttcaacacctctgtcagttctgagttggttgtgattattcttttcatggtgggtcaagttttcttacaactttgtgtatttgattatctgtgtttgggtggcagatactgtgagatttactttgttgggtgccatgtatttctgaaatgtacaaatcttgagctttgttctaagatgcagttaagttacttggaagcaattttgtcttttggaattgtgcttttatggtgtgtgtgtgtttaaaagtgggtttggagaggtgctcaatgtagagttaattgttctctacttccaagataaaaccttcttgagtactctatgcaatgctcctgaattatgagtttttccagtctgacattgggcaccggcactattccttgccctgtctatgtgcgtctcaagccctggtcaaaccatccattaccaagggttttttccctggcatccaatagtttttttcgtaaggccagggccgccccctgcctttggttaaaaaaaccggagacccttcctggaaataaaaacctcctcccctggggg

SEQ ID NO: 81266 - DNA, 860 bp, Homo sapiens
  sig_peptide (241)...(376): this location contains the signal peptide sequence, MGMIIIVIMECILIGMIIIVTKTYHNKPLYSFQESFGSLVFFGGA, Run with SignalP
  misc_feature (157)...(354): similar to gi34087 in the genepept database release 114, Run with FASTXY 3.3t00, default parameters
cagaatcatcatctgtcattattttaagaaaatacatttatagctaagaagaaaattagtttgggaaagatcattttgctcagttgaaatctatagactgtattgcaaggtataaagaatgtatctaattttgctttaaaaacaacttgctattagaagttaaattatcattttataattttctatgaagtgaaagaaaagtgtttttaatttagttacccctgcctaaaggatattctcatggggatgattattatagtaataatggagtgtattcttattggaatgattattatagtaaccaaaacatatcataataagccattatactctttccaggaatcttttggttctttggttttctttggaggggctaagtgagtacaggactgacacaatattattcgacatgcagatactctctacgataatcatgatgggcgactttattaactcagactaactgtgctgggctatggctttggtttgcgctcttacggcccacatgagcaaagatcctttgtgcaccctgagataagtaacccccacggaatcttcaccctaccctgcatctgccaaaggactcaaaggctggcttggcttggtggactacacctctccctttttctaatatacaagctcctgagtgagggataactggcacactgctggacacagggagggaggggctatcacagaccactacagtttagacagagcccccaagagggggggtccttcttttttacacgggatataggagggggggcgtaccagctaagcgtggccgcccctttcggagcgccaaaccaggccacgcccaggctttttcaaaaaggtggttcaaagccccccatctc

SEQ ID NO: 81267 - DNA, 992 bp, Homo sapiens
  sig_peptide (549)...(684): this location contains the signal peptide sequence, MTGNLCFFSIKGYLLTSEILMIYLTLEFCILRGKHLNVSFKAGDT, Run with SignalP
  misc_feature (358)...(495): similar to gi3979977 in the genepept database release 114, Run with FASTXY 3.3t00, default parameters
ctggtcttgaactcctgaccttgtgatccacccgtctcggcctctcaaagtgctgggattacaggtgtgaatcaccatgcccggctagaagagctttatgttcatgatgttgagatgaagttggggccagaagaagagtcagttgataaaagctaaagtatttttagatcctgattaaagaagaaggtaatgggttgacttgagagagaatgagcgttctgttatgggaatgctcatatgggaaatgttctgtctctttgtcaaaaactgcaggaccacctgttggtgacattggaggaattcctgctttgtgtgggagggtgaactagatgcctttaaaaaaaatttcccccccacagacttgttttagatattttactgcttcagagagggtcatgttcacaccattctccccttttgtaatttttcacacctccctggctccccttttataatttagaaagaggtttacaagtctgtaactttttgtattagatttactttgagaaatcttgtacttaatttagtaggtcacagagggttgctgaatgactggaaacttgtgtttcttttccattaagggctatttgctgacttctgaaatattgatgatttatttgactttagaattttgcatactgaggggaaagcatcttaatgtatcatttaaagcaggagatactttcatactatacctgggttctcttggctttgaagaggagggtggtcctgagatattgaaagattgcatgggtggcctgtcatccccaccactttggaaagctgaggccgggtgcatcatttggggcttaggagtttgggaccacccctgggccaccacgcggcaccccctcctctgctaaaaatccggaaatttgcccggggcgggggggggatgccctatacatccagtttctcctcaggcgggcccattatattaaaccctagccggccgctccctcgcccccgcgcaacaatatatctatccgccc

SEQ ID NO: 81268 - DNA, 871 bp, Homo sapiens
  misc_feature (1)...(871): n = a,t,c or g
  sig_peptide (451)...(586): this location contains the signal peptide sequence, MSRCRGLSVLCLGLGVHFQSEDLYIYLILRTLLLSLHIFMNFHSM, Run with SignalP
  misc_feature (280)...(446): similar to gi1235639 in the genepept database release 114, Run with FASTXY 3.3t00, default parameters
ttttgcaaatgcatgcccctaatcccctggtctattcctggtcctataattattagtttactgcctcactgtgatactggggatatggaagatttggttatagaacccttggtagcttagctatgctcctggtgtcctggcattttatgcctttaggatccaggagtgcagactctgacaatgcacttaaaattatttgtttcttattctttccctctaaccttttgttctactaaagaaaagatgaaaccattcctattttgccattagtcttaatcagtagtttattattcaatattattcctttatcttctgacatctgttgttactgagaagtctgcttcaagaaaattgttgtttcttcatatgtagtctgtatttttggctatctctttaacaatattaaagatttttatcttcatccttgatgttctgcagatttactctgaaatgtctagatgtagaggattatcagtactctgtttgggtctaggagtgcactttcagtctgaggacctgtatatttatttgattctgagaacgttacttttatctcttcacatatttatgaactttcactctatgcattacattgggtttgattggtttgaagggttgaggggccggggtttggcccattgcttggactcccggtaccctgggctggctggggcgggaggggccgttgtgggccccaggaaattctaggcctgctgcgggccctatggtgggggcaactttggcggccgggggccgggggccgcagacgggagaacccctctctctggccccgcgcggangaggggaacccaaacaggcgcggccgctcctcgtggggtcccgccatttctgtaaaaggcgggcgggggcg

SEQ ID NO: 81269 - DNA, 894 bp, Homo sapiens
  sig_peptide (128)...(263): this location contains the signal peptide sequence, MYVLSSAHLCFLCLQCSSLEVYLISSLTSFRSVLNCYPPERSSLT, Run with SignalP
  misc_feature (265)...(373): similar to gi209327 in the genepept database release 114, Run with FASTXY 3.3t00, default parameters
taccatagcatgtaaggtcctactggatctaatactgggctcctctctgaattcattgcttgccacttttccttttgatcagtgtcctcctgccatcctggcctccttgctgtttctcaaacatgccatgtatgttctttcctctgcacacctgtgctttttatgccttcagtgctcctccctagaggtctacttgatctcttccctcacttcattcagatctgtgctgaactgttacccaccagagagatcttccctgaccattcaatatcaaatattactccttctgttacagtaggtagctagtcaggcatgagcagggcagaagagggctcccctccctcaacacacaccaggaatgacaggcaaacatcaggtgatggtcaggcagctgctaactgtttctctaaaatattaattggttgcagcctgcaccagggaaaggcagtctccatatatacagaagcacctgaagctggtgatcagcagcttcccatgagatctcaggaactgggtgagtgggctcaagcgtttgcactaagaggcaaaatgccagagtttggtatgtgacctcctaaggacattcgactggtaatggaagaacacctcaagtgaacacgcgtacaactccagtaaacacgttgcacatggtccctttcccaagtgctgggaggctactgtgtgtgcagacagcctgccccaagggaagaatcatgggagatgggacaccaagatcctggaagtatgccaacatataaaaccccaagttgaaaggtcaaaccgtgcatttgtcttttcaagttgcccactttgccctcttccaagtgtaccttccttccctttgttcctgctctaaagccttttattataataaactgattccatctctaaaaa

SEQ ID NO: 81270 - DNA, 393 bp, Homo sapiens
  misc_feature (1)...(393): n = a,t,c or g
  sig_peptide (26)...(161): this location contains the signal peptide sequence, MSRWGYGAGQLVAWVWILEGIRGGEISESPAYRWRLRPRDQLISF, Run with SignalP
  misc_feature (48)...(297): similar to gi296756 in the genepept database release 114, Run with FASTXY 3.3t00, default parameters
cacacaaatttgagatgctcctcggatgtcccggtggggatatggagcagggcagttggttgcatgggtctggatcttggaagggatcagaggaggagaaatttcagaatccccagcatatagatggcgtttgaggccacgggaccagctgatatcatttagggagagaccggagagagagaaagggtttgaacattgagtgccggggtgttctgacatgcagaggtctgggaaagaaggagcaaaggaattggaggagtgacccctgaggtaggcacaggcagcgagtgtgtctgtcctacaagcaagttgcttgtagagtctggggaaaagcttaagccaacttccatgttcaaagcagagcgaactaaaactgacggggcgtccagcccn

SEQ ID NO: 81271 - DNA, 403 bp, Homo sapiens
  sig_peptide (158)...(293): this location contains the signal peptide sequence, MNKILFMLFLFIDVFHTQGNRFRNTSLCPRHLPSHSLWLKTKKLG, Run with SignalP
  misc_feature (177)...(286): similar to gi1263281 in the genepept database release 114, Run with FASTXY 3.3t00, default parameters
agcggggtgagcgaaaggcttcagaataactaaatattctctttatagatttttacttataaacatattcttagaaaggtattgatgaaaaaatatatttttaacatagtcttcattacatgaccaaataggaagaattcatagggctgtaatttttatgaataagattttatttatgctgtttctattcatagatgtttttcatactcaagggaacaggtttagaaatacatccttatgtccccggcacctcccttcacacagtctctggctcaaaacaaaaaaattgggaaaaactttatagtcacagggaattaaaaaaataattttaagaagcatatttcggtattataagaaaggatttactaggactagctgggcgtgggcggtggctcatgcctgt

SEQ ID NO: 81272 - DNA, 866 bp, Homo sapiens
  sig_peptide (318)...(183): this location contains the signal peptide sequence, MLSLIFFEICVFLACVFLPLVETWISKQFTFNFTIKNNNCSNACK, Run with SignalP
  misc_feature (384)...(548): similar to gi2224494 in the genepept database release 114, Run with FASTXY 3.3t00, default parameters
atttcatgttaaaagaaatctagacttctatttctcttgcaaatgtgagctctgacaaacattgaaattatagagtagcaggggtagtgtgccctttatttggtgcatgtcttctgcaggttcccaagttctgctgttctctgttgttgcctcatcactgaggccaaatgtcagttgctgcttacatgcatttgaacagttgttattttttatagtgaaattaaaggtaaactgttttgatatccatgtttctaccaaaggtaagaaaacacaagccaaaaagacacagatttcaaaaaaaataagagaaagcataattctttatggaagtgaagaatattctttttatctaagtatgccaaaaaaagcatgtataaaaaaatacaatttaagatgccattatgaaaaaactccaagtcagtgtttactaacatcttttcagttttaggaaggaggcaggttgtcttgcatctcattggatctccggtactacctatttcttgaaataccataagtgctaatatatacttgcaatagataaacatgaggagtattaccaatacaagagatagcaggaactattttaatattaagagatatcaaatatgcacgctaggattaataaatgaaataattattttccttcttctacaatatttacttaatctggaggcagaaatacatgctgcctctcttttctgcttctcctcaaaaatccgaccaagtaatcaggatctttgagaatccaataagaataccgccctatgtctggatttttaagttaaatctaaattactcctttccctgattttattgaaaactgcatcctccagaccgcaaacacactggcaaagcgggaaccaaac

SEQ ID NO: 81273 - DNA, 2190 bp, Homo sapiens
  sig_peptide (595)...(730): this location contains the signal peptide sequence, MCFVCVFRNFFIVPITEKFHVIGIEKPEVSSLLPRELQSALGTLF, Run with SignalP
  misc_feature (1980)...(1367): similar to gi1216153 in the genepept database release 114, Run with FASTXY 3.3t00, default parameters
gttgttgtgttatgatcgaaatgctgtagtgatataccagtgtcgaagtagagttccttatgaagtgaagctgccatacagttataatgttgtcaggaggaattcgacaagatgataaggttcatgaaatcggtacgtggacaggtagggttaatatgaagcttggaatattttttaggatcagaatactttaataagataccagtgtcaaaatacatttccttataaagttaagctcccatacagttataatgttgtcagtaggaattcgacaatataataacgttcatgaaatcgttacgttgacaggtagggttaatatgaagcttggaatatttttcagtgttttagtaaaactgcaagggtaaaatgcccttaatgccagggcaacacacacaggaaatcaaataccagcatttacacgtcagtaacccttcaagttctgccaccctgtgtggggtaatgccgtgcagctaaaatatgatttacgcaacaccatgactaaggaatttctcatagaacttaaatttcttttgaaagctattttttgtttttggcaataagtctatccgggcttactaaatagttggcccaatgtgctttgtgtgtgtttttagaaacttcttcattgtacccattacagaaaagttccatgtaattggtattgaaaaaccagaggtgtcgtccctcttacccagggagttgcaaagtgctctgggaacactattttcagtgcttcctacctacatgtcactgaccgacccagagacctcagccagggcctgtggctaggggccatccctggaggccttgcggggccatctggctgccggctgagtgggggctgcagggctggtctggaccagctgctctcccgctgtgcagcctcctcctcagtccagctccacggggctccaaggtcgtgagcttggaggacgtggacggggtcactataccatttttgacccctcatttgcatgaattcccgtctaaaccatctcatggtagttctggaaatgtccaaatgtgccgtgtgaaagaccatccgagtcacatagctcagtgcacttgaagggctagcaacaaaaccttaagaaaagttagagcacttccccgccccaccccccgaccccacaacgtgccatcagaccctcttggcagcaataataataatacatacatacatagtacatagagaatgtgaggggatagcgcgcagtgctcccgctgaatgactccactgctcggattgtcacacctatggcatatcacagatggcaaaaagccgacagagggaggccttccacagtgtccgtacaggccgtgggagcactggacaagtctgcagtgtccacaacactaagaaaaattaacagcttcgaaaagatcttaaagtgattttgtgagcaggattccatttccgtttctaagtttttagatattacaaagtacccatatatatgataaacacttaacccagatataaattttctcctcttttaaaaaactcactcagttatgtttttgaataataataaaaaatccaccaaatgcgggggaaaaacccccgtttaggaaaagccacgctgtgcaactttcacagataaccacatacgttggagttgacccttcacatttctttttttccaaaattagagcaaagagtcaggttaaaccaaaaaaaaaaccctgaaatttacaatatggtgattagtttaaaaaagaaacgagaagggctctgcgagggagacgccacaaaccaagcttggaaagcaaaatcatttttgtttctctttggcaacaacaataacgaggaatctttttagtaaaatgaagctaaagcttctccctacagaagaacagacatgcaccaaacttgttagtatggacagttgtgtgtgagaaggagaaggagggagagaaacctatggataatataaattagaagtcattgaaggtggggaggaaaaaaatcctacaaaatttaagaacatttcagaacaggtaaaacaattgtgtactttaaaaatagggataataaagtgagcatctcagaaaaaggccactgcttggtgacctgggcaagtctgccaggtaagtccatcttgtaaatagtgtgctggcgttagaaatacctagttgcaaaaacagacggagagagtgaagctggtgggacggcgtcggcagagg

SEQ ID NO: 81274 - DNA, 18819 bp, Homo sapiens
  sig_peptide (11266)...(11131): this location contains the signal peptide sequence, MIKLAIWSIIIGLRLTILFCIETRESDICKILQYTESTIFWRFFP, Run with SignalP
  misc_feature (15648)...(15495): similar to gi1109902 in the genepept database release 114, Run with FASTXY 3.3t00, default parameters
gtaacttctgaagaactgaatattataattcagaatgtaatgacctgggttgtggctacagtgaccagtatattgtacccagccatcacaaagtatgaaaaaagattgcaaaataatacatacccagtatctgatgactccatcctctcttcagatagttcaagtttctgtagcacgtgcagtgaagactttacatatagaagctacacatctgcaacaactaaaacatttcaggcagaaccctgtgcatttgtagttgacacgtcagtaaggagaccaaccacacctataaaacctcctcctgcacatgtggaaaaaacagttgtggggaaaacatgtcacataaaaggacaatctataatctctaaacataaatataataaaaccaacttgctatattcataccctaagctcagaagttgtaaatcagatagtcaccttttagcatcatttgaaacaggcacaaaaaaatctaaggatgctaccactgaaacagatagcttagggagttcattgcattgtgataaaacagcaaaagccatggatgaaatgaagaatttaaaaaatgtttttgttaactttaaatgttacttgaaaggggaaactgaagtgattttagaaagcattttgcgagaaataatgtctgatttaacccaggccattccctctctctcttctgttactgctgaagtttttgttgaacaatgtgaacgtgaaaaagaaatcttgctttccaatgctcatattccctcagttgcttctgagattgtggaaaatatgcttgagaagttagagtctgcagttgagaaaaaatgtgttgagatgttttcacaagatttgtcagtcgacattaaaccaagtttagcagccagtgatgaacttctcacatcatctaatggaaaacctttgaaaaattcaatgcctcatactttggacccaatgtgtgatattgcagaggacatggtgcatgccattttagaaaagctaatgactcttgtttcttttaagcaaaatgaatttcttcatcttaaagacacaaataagctttcctgccagcaacataagacagacccaatatgtatgttccttcaaagagctggcaaaaataaatctagtcttgaatctgatgaagctagtttaattgtcaatgaagaagtacaaaatttaatatcaaatattttttcccagtcttctttggttgcttatatagaggaagcaatcaatgctatactaggttatatacaaactgaactaaataatgagagaattattgcatctgaagaaaccgtagtactccttcagctacttgaggacatcctttttcagctccatcaggaaccagtaaatgaaagttttcaaaaaagtaggcaacctagaataagtagtccttctgacaccaaagaaaagtacagactcactggcactagattatcaaatagtcctaggtctggaagaccatttccacctataaatgttccaggcatggttctttattctgatgatgaaaatgaggaaatagacaatattgtaaaaaatgtgcttgattcaactttcaaagatgaaaaagtaaaatcacaagaacagattcctaatcattggtttacaaagggaaacacttgttttgaatgcaaaagaaatatcaaaccacctacaaagcctggttctagaagcaaagctgcatttcatgattgggaattaaagactgagccaccatctactaatcatgaagatattttaaagaaaaaactttcttcgaataaagacatttcaactttcagccaagatcaaaagcatcaaatagaaaaggcttcagaaaacatagtcacaagtattttaaaggaaatgctcaaggacatatcttccgttccttttggtcacttagacagcaaaactggcagtgaagcttcagttcttgtttcagaaaagcctcaaggactgtcacatcaagaatggatagaccagatgttttctgtttcagaaatcagtacagtggctcaagaaataacagattctgtgttaaacatacttcataaggcatcaaactacatttccaataccactaaaagttccatttcatcatcagttcatcagatttccttacataattctgacactgaacacatagtcaaagaagcaccaaataaatacccattaaaaacatggtttgacagtgaaaagaaaatgaaatatttatctttatttgacgttgatcctgaaaagcctccctggttaaaatctggaaaaagtgaacctaaacctgtagatgacattaatgataagatcattcgtacaatttttaaaagactgaagtcatttatttgtccaaaattgcatatgggcttcaaatcttcattacgatctcaacttagtaagtacacagctaaaatagtaaacattgttttatgtgctatccagaatgaactggaacttcacaaggaaaacctaaatcttagggagattgaccataccaaatcccttacagataaaggattttttgctaatactgataaaaaattagaatctcttgtcacgagtattgatgatgacattttggcgagtccattattaacctgtatttatgatatgttgttatcaagtgaaaatgcacatcaaagaagcatttcactctcttctcgtaagccaaagtctgcaactgacagtgttgatgtacaaagcattttgccaaataggcaagataaaaaatcttttcacaaatatttggctactccttgtactcaccacagtgtcaatggtggaaaccatattaaagagaatgcaaaattgcaagtgttagaaagaattggggaaacactacatgaaatgttaagcaagctcctggggacccatcttcattctcagctatcttgtagtcaacaaagcagagagatgaccaataagaatcagaaaatggctgctgcattgcagtctaatattcagttaatttctaaagcaattttggattatatccttgcaaaattatgtggtgttgacatggataccagttttgcaagttgtggattaaaagctatctcagagtctcttgacattgacaacccatcatttgcttcaattattgagaaaatggccaaatccaccaaaataatctccagcatagtttccagaagggttcaggaggacaataaagaagagactaaaagcaaggcaaaacctgttgctcctgtgtcttccaaaacaccaagcacaaaagaaatgcatccaaataaactaaaagctgtagcttcagatattcttaatatggtttttgctaaactggaagggtttgccaacggacatttagaaattttgggtgctattaatgatggaaataagaaaagcaataagataggctgggaatatgaaagcaccaatatttccagagacacacatgaagcatcatttctgtctgctttatatatgcatgcaaagaaggtatcaagtgctattttgaaggttattcaaacagaattaaatgtgacctcatcagatttgaagacaagtgtagaaaacccaccacctgagactcaaatacttaagtatgtagtcaagttaattttagatgcagtatcttccgatatgtttaatgaaatggaatctgaagggggaggcattgaaacttatcgatacaggccaacatatggaagtcttcctggaggagctgaatcagattcatttctagaagatgatgcatatacagcgaaaaaaattattgatgagagatccccacaaagagaagaagtgaaaacacgttctcttaaacaatgggctctcgaaaaaaccttaaacaaaattgaagtaaaactcaaagaaccacatatatctccaattgctcccattataagaaatattttgaatgaaatttttcaaagtactttaatcaatcaattaaatgtcctttctctctcccactctaattttaatggcatgcctcacaatgttgatgagccaactccccaaacatctgttcaatttatggataaaatgatggatcctttactttcggaagcagatataaccatagtaacagataatattgttaggactgtatttcacaaactttattcagctgccatgacagaaagaaatgtaagggaaaataggtataaaactatcactttttcagcaaatgtttcttctcatgaacacacctataaaggaaagtcctctgtcacggctttggatgaaaatccatgtacttttcagtctagattcagcgttgctgacaaggagacaaaggtaaatctagctgaagatattgtacaggcaatattaacaaatttagaaacttttgctacttccaaagtaaaatctctcttttattctcaagtcaactttacagttccagtggctttacctattcagcaagatcacagtacattgagcaaagcattatcagccaaagattcatattctgatgagcaattttcctgttgctcagtagatcataccaagtcaggaaagaccaacttgtgccaactgtctttgtctaaattaaatacttatgcactacaagtggctagaagaaatttacaaggaatcaaacaggaattagataaagaaagggaaaatccttttttaactcatgacattgggatttctgaaagtattgcaagtcaaattgttaacgcattgttagacattatatcacgtaaaggcaaatgtgacaaaaacagttctgacaaagagatcgatttagatcagcaaaaaggtgttattgaaaagctgctcaatgagaccaaatatcgaaaagtacttcaacttcaaatacaagataccattgaaggtatcctatgtgatatttatgaaaaaaccctgtttcagaataatctctcatttgccacacccactctgaaatgtagcatagctgataaacattcagaagaaaattctgaaatgttcatggagggtgcaaataagattattcctaagctttcagttcctaaatcagatgtcattttgatatccaatgatatagtgaatattgttcttcataatctcagttctgctgccacgcttgtcataaatgcaaagaatcctacttctgcaagattgcccctgacattttgtgatacgtttccaaaaatagactgtcaacagcctcttaaggggtcaaaaactgaaagaaaaacagagcgtttttcatattcaagaaatcagaaatcagcttatgctgatgataatcagataactgtagtagagaaagaagacactcagaaatctgctactgactcatgtgaggaaaatgctaacttcattactaaaactatttttaaacgtttggaatcttttgccacagaaagaatagattcattaattacccttgctttccaaagtaaagaaaagtcatttgttatcccagaattggaaaattgtaaacaaaatgacagcatcttttatgattcaagccaagtggaatcagatgtaaatgtcctgaaaatatcagcaactgaaaccattctcagccaagagcttacagatttcacttttgttggtcgcagagaaaaacttggatccacaattcacctatcgcaagctaggcttaagacatatgctgacgtcattgccagtgccattttgaagcttattaaaaatgacttagacttagaaattcaaaagatatatccatatcaaaacaatattttgttccaagaaaacatcattgtgagtgaaattgttgacagtatgttaaagatgttagatgataaaagatctgtaaaggaaatttgttttaattcaaaagaaaattctaacttttcacaattagctttatcaaatgaaatattgctgggtcacaaagagaaggaaagaagtaccaaacaatctctatttacaaagtatccattagagcaaaaccaaatgatattggaaaacaaaaggcagataattgttttggaagaaatatttatgagaaatggagaatcaaaaaacaaagaaaaaggtgaactgctcattgcagtggaagaacttttgaataagttgtatcaaagagtaagggaagtcacaggccatttgcctccacttaatgaaactgccaactttatatctaattctaagattaaaacatcagacacaacacagaaaaacagttttcaatcacatattaacagtgtagcaaatgacatagttgaaagtgttttggggaaaatgtacttggtagttgtgacatcattatatgaaaataataaaagtaggacagaagttgaaatatctgaccacaatgattccttactaatgaaaccattaaggtttagagaaactaaacaagcaggaaaaataagtaattcccctagatatgcgatatcacaggcttattcttatgtcgacagtcaaaatatctctgtgatggaaaacactcttttgccatatttaccattgcaagtgaagaaagacttaattcaaatggttctcaataagatcacaaattttgtctcacttcctttaaaggtgagccctaaggacaaccctaagccatgctttaaagcacatttaaaaacaagatcaaaaattaccactttgcctaaatttacaaaaaaaacacacttaggactgagtgctgctaaggccaaaagcaaaaccaagttaggtcctggagagaagaccctaaaagacagcagatccaagactgccattgggttgtcacacatcatgtcagctggagatgccaaaaatttactggacacaaaattgcccacttcagaactaaaaatatatgccaaggatataataattaacatcctagaaacaattgtgaaggaatttggaaaggtaaagcaaaccaaagctttaccatctgatcaaatcatagcagcaggtaaaatagttaatacagttttgcaagaattatatgttaccaataactgcaatttggcttacccgatgaaatcctcacatctcagactttcacaggggaatataggcacaggatcccttcctaaacaacaagcatgtttttacttggagaatgtttcttcacagctagagcacatttttcctagagaaggtatatttaaaaaattgtttgacaagtggcaaacagaatcaaatgacaaggaaaatgaaaaatgtaagctattgatgatagctgaaaatgttttgactgaaatttcaataaaagcaaaagaattagaatattctctttcacttttaaatttgccccctcttgagaattgtgaaagcaggttttataatcattttaaaggagcttctactagagccgaggatactaaagcacaaattaatatgtttggaagggaaattgttgaaatgctacttgaaaaactacagctatgctttctgtcccaaattcccactccagatagtgaagaaactctatcaaacagtaaagaacacattactgctaaaagtaaatatggttttccaaacaagcatagcctcagcagtttaccaatctataacacaaagacaaaagaccaaatttctgtgggctccagcaaccaaattgttcaagagattgtagaaacggttttaaacatgttagagtcatttgtggacttgcagtttaaacatatctccaaatatgagttttctgaaattgtgaaaatgcctatagaaaacctttcttctatccaacagaaactgttaaacaaaaaaatgttgccaaaattacaaccactgaaaatgttttctgataaatccgagtcaaatactattaatttcaaggaaaacatacagaatatccttctacgggttcattcattccattcacaattacttacatatgctgttaatatcatcagtgacatgcttgctgtaattaagaacaagctagacaacgaaataagccaaatggaaccatcttcaattagcatattgaaagagaacattgtagcaagtgagatcattggcacactaatggaccagtgtacttatttcaatgagtctttgatacaaaacctttcaagagaaagtttgttccaaggagctgaaaatgcctacactgttaatcaggttgaattagcaactaatatgaaaatgttcacatcaaagttaaaggaaggtagtttggggattaatccttcacaagtgagtaaaactgggtttgtgttttgttcagatgaagatatgaaagaaaagtacagggtttcatcagatttacccacctctgtcagatcctctgtagaagacacagttaaaaactcagagccaacgaaaaggcctgattcagaaactatgccatcgtgttctactagaaacaaagtacaagaccacagaccaagggaatctaactttggtagttttgatcagaccatgaaaggaaatagctacctccctgaaggcagtttcttacaaaagctgcttaggaaagcaagtgactccacagaagcagcattaaagcaagtcttgtcattcatagaaatgggaaaaggtgaaaatctaagagtgtttcattatgagaacctaaaaccagttgttgaaccaaaccaaattcagacaaccatttcccctctcaaaatatgtttagctgcagaaaatattgtcaatactgtgctatccagctgtggctttccaagtcaaccacacactaatgagaacagggaaataatgaaaccatttttcatatcaaaacaaagctctttatctgaagtatctggagggcaaaaggataacgaaaaaagtttgcttagaatgcaggataaaaaaatcaactatatacctgaggaagaaaatgaaaaccttgaagccagccgggaagattcttcttttttgcaaaaattgaaaaaaaaggagtacccaaagatagagactgtgaaggaagttgaagcctttacttttgctgatcatgaaatgggttccaatgaagttcatctgatagcaagacatgtcaccacatctgtggtcacatatttgaagaactttgaaactacagtttttagtgaggaaaagatgtctgtttctacatggtcaaggaaaaaatatgaatcaaaacagttcctaagaaacatatacgatgattcttcaatttatcaatgttgtgaacatctcactgagtcagtactttaccatttaacttcgagcatttctgatggcaccaaaaagggtagagaaaaagagaaagcatgggaaattcaagaagcaacatttagcaagattatttcaattcattctcaagtgtttgagagcaggtcaatttccattggagaacttgctttatgtatttctgaaatcattattaaaattctttttaataataaaattatacaggctgacattgcacagaaaatggttgccatacctacaaaatacacttactgtccaggaatagtttctggtggctttgatgacctctttcaggatctcttagtaggagtgattcatgtactgtccaaagaaatagaagtagattatcactttgaaagcaatgtaagaaacaaatcattttctatgcatagaaataatagtgtacccctttgcaacaaaatcaatagacaggcaagccccagagactggcaattttctactcaacaaattggtcaactttttcaaaaaaataagttaagttatcttgcatgtaagttaaacagcctggttggtaacctaaaaacaagtgaatccaaagaagtagtcaataaagtttttaatattgtttcagatttattttcaccagatgaatgcctagatacgggtatggattctggtaaaatacaaagaacatatttctactcctcgaataatgagcaacctaatagcatacttaccaataacctacagctctcctcaaaatcagtttttcttctcaatgttgtatgtgagaaacttatcagaatacttttggaagaatgcacaagcactgcttttcctgataaagggtctgtttcagaggaaacatcagcagaagaatgtcaacttttaaaaatgcttcaaagtgtagaagatggaaaatctgattatcgtaagggaggaatggactgtgaatgccttcaagtagattacatgtcagaccttttggagaatgtggcagaaattgatcaagacttattgacatcagactctatgcttactattatttcccacagcttggttaaatcattgatggacaaattatctcacagcatacaacaagctccggaaagtctaccttttgcaaataagcatttgaactacagaacaagagaaatacagtctagtttcataaaagcaagaaagtcagaattaatagaattaggacagagtaaaagttctttagaactcaggagctatgatagtaattctttgacagtatccctgaataatcccagtgtggttagctccaaaatacaagcaccatttaacaagcattgtgcagtaaaatcctcttctgtgtcaccttttgaaagacagagaacaaaggaaatggataaggtagccattcataataagctacatcaggaaggtatatatgctggtgtttattcagccacatttttggaaggaataatttcagaattgttttttaatctctctatgtcattgtggggcaaaaataaaaacatcactgtgtcctggctcaatgagatgaatacattatttgtcaacaatgtagtgaatgaatttaataatgctcaagtcactgttctacggaatgctgaagaaaggctgtgttttccaccagttcatacagaaactgttagcaaaattgttgactcagtttattatgatgttttacagcagtatgaattaaaagtggcctgtggtaataatccggtatacgacaatgcctcaatagcagaacaaataacaaatggcatattgttagagattttagactacaaactgccatcttgcttcaaggaacatctcataccccattcatattaccctctcaaacctgaaattatattgcaaaagcttcaaagtaacctaacagaatttacttctctacccaggtcttcatcagactatagtaccatgttatcacattcatttttagaagatgtcataagaaggcttttatctcagctaattcctccacccattacatgttcctctttaggaaaaaaatatttaatgagttctgattttaatgaaatgtccacttgtataataaataaggttatgtcagccatttcaaaacataaaatctggttcactatatatgataatcaatatctatatactggaaaaaacctccaaaagatggtggattctgtatattgtaatattttgcaaatgtctgactctcttgtttcaatacaaaaaagtatagtaagccgaagcccaattatgattgaccaaatagccagctttatcatccaagagattatcgaaaatcatcttcaaccatttttgagtggagaggttttatgtcatccaaggactccactggatccagtgtctactattgttacacaggttctgagtgaagtgatagagtcacacagacctcagaagcaatcacctttagatattcaccttgattcatttgtaagggagattgttgccagacttttgtcaaagattttcagcccaaagcataacactgaaattgagttgaaaaacatgacccaaagaatagtaaactccataaataggcatttcaataaagctaaaattcacattctctatgatgacaaagaacaggctttcttttctttcaatacagatattgtggatgaacttgccacctcagtttatagaaatgctttaaagcagcatgggctagaccttgctgttgataaagagtctgaagacagtggcatttttgtggaaaatattaccaatttaattgtagcagctatttcagattaccttcttcatccactgttttctggggatttttcagcttctacctattttaattcagtggctgagaatattgttcaggacatccttagtaacatcagtaaatctactgagccaagccagagtgtacctctatataacaccttgctgccatacacatttttagaagatatgatcagagtactattatctaaattattttcttctgcatctagcctggttctaaacagagacacccaaaaagatatatcaagagtgaatttcaatgacattgcttcaaacctagttagtgatattaggatgaaagtttcccaacatgaaattcgattttcaaaagaggaagaagaaaccaagtttatttattcagaagatgatattcagcaccttgttgattcagtatttgcaaatgttgtgcaaacctctggttctcaagaatcagctgtgcaaaatatcacaagcagtaatgacattcttatagatagaatagcaggtttcatcattaaacatatctgtcaaaaacatcttcagccatttgtgagtggaaaatcattatcttcatcagacacatattttgatgatgagagaaggcagttattttataccagtgtttactcttcaacattcttggaagatgtaatctctggggttttaagaaaaatattccacagggtagtaggcattgtacaaacaaaatccataagagattcagaagatgaactgtttgagaaagctgaagaactcatacatttgattacaggggaattctcaaaagcccaagttagcattatagataatactgaggaaagactgtgtttacctccagtggagagggatgtagtcaaaacaattgttgacatggtgtacagcaaagttttgcaagaatatgaaatggaagtcgtgcccaataaagattttctaaatgacacaaagacattggctgcaagaataactaatatcatcctggctgaaatttttgatttccaaattcatccagatcttatagcaaatctgccttttaaatcacattccaaactcagtgcaaatgttttaatacaaagagttcaatatgatataagtaaatcaagattccaaagacaagcttcaacaatgtataccactatgttatcacatagtcatttggaaaaaatagttactcagcttacatctcagataagtccattgaacaccagtgcagagcagtcagatactactaaatcagacttaagtaatacagtgataaaactgataaatgaaattatgtcaataatttcaaaacatgaaatatgtattattaaatatgggaataaaaaacagagtatgatttcagcaaaagatatccagtctatggttgattccatttatgctgatctttctcattcaaatatataccagtccattacaaaagataaaaagagcataagtgacatacctgtttcaaaaatagcgagttttataataaaagaaatctttaaccatcatattcaatcatttttatctgaagataaaactctccttttggcagcagttgatcaaacttataaattgaaagcaatagatcctaaacaaagagaattatcttttattgtgaactcatctgtctttttggaggaagtaatttctgagctcttatgcaaaattctttatgcattttcacataacatgttggttactgaaaatccagatagagtgaaactgaaacttaccaggattgttacaacattggtaaattcaattgttctggagttcaccacatcagagattttagttgcagataactttgataaaaatttgtgtttctcagaaagatacaaagaaatggttcaaaaaatagtcaactcagtatatggaaaagtattagatcaatataaatctctgattcaaatacatagggttatacaaagtgacacaatatgttttggtaggaaaatatattatttgctattggaagaaatatatgattatcaagtgcagtcattagtttcaggagaattagagtcttcttcttattcgtatccccaagctgataatatcatcagaaatgtgcttaacataatcacaaaggatagccatgccttgccaccatatattactgtgttgcctcattctcttttagaagatatggtttacaggcttctagggcatgtcttcccttcaactcacactgaaaatgaactaaaagagaaaaagtttccaccggatgatgaatttgtggaggcagcttcaaaattgactgatgaaattataaaagaaatttctgaacatgagattcgactttccatggcagaggataatgcagaaagtatgcagttagaacctattgaaaatttggtcgactccatatgtaataatattttgaaaacatctgaattccaagctgaagtacaaaaagatgcagacaaaaaaggatgctcattcctcagtaaattagctggttttattatgaaagaaatcatgtatcatcatttacagccatttttacatggtgaagaatcatctttcagtgacttatctgattatgaccatgtctctgaacttgctaaatctggtaaagaaaagacacagccttctctctattcagctacatttttggaagacataatcattgaccttgttcacaaattttgttctctcctcattattactgaagattctaagaaaaatgaaatggcagagctagatattatgggcttggctctaaaacttgcaaattctctgataagggaatttaagaaaagtgatattaaagttttaccaaatgctgaaaaaatgttttcttttccaccaattgataaagagacagttgataaaatatccaattttgtatatgaacagttcatagaaaaatgcacatctcatgatattcaaaaaggtgatgaaagtaacattgctatagggatgattgctgctctaacccagaaggcaatatctgcattcaggattcaaccacttttttcaggagactggtcttccaccttcttttcatttctaaatccagataatatcacccaaagggttcaacacctaccacaaaacacctttacacaaataagcagatgtgcaaaagagaaccaactttctttaccagatcaatcatataaagatacttcttccaccccagattgcaaaaacatgatgagcactttggaaataaatagaggtacaatgaatagaaagaaaagttttaaaaccaaggacacatcagtgaaaaaaggtgacatccaaaatccagtacttagctctataaatgcaattatgaaaagcggcatgattaacctaacatcagggttggctacaggtgtgacaaataaaaaggaagtggatgaaaataaagtgggaatttgtactcaaaaacatagtgagaatgtatcaaaagttacttcaactaccactgtgaaaagtaaagatactcaggagccaaatttgagtgaaacatttaataataatgaaattgagaagaaaagaaatttaattccaacagataaaaaagggaaagatgatgagatatacacacatttttcattaataattgatgatacagaatatgagaaggaagtacttggatcagattctgaaataggctataaaaagaagattgacaatgcaagggaaagctcatttaaaaaagatgacaagctctttcagttatcctccttgaagtccaagagaaatctagggactacaacagatactttggaaataagaattcgaacatcaagcaatgaggggagaagagactctccaacacaaacgtgtagggatgaggaacaccactcagattatgaacatgttcaaaatgtcattgaaaatatttttgaagatgttttagaactatcttcttctccagaaccagcatattattcgaaactcagttatgaccaaagccccccaggtgataatgtattaaatgtaattcaagagattagcagggattcggcacagtctgttacaacaaaaaaagtatcctcctcaactaacaaaaatatctctgccaaagaaaaagaagaggaagagagagaaaaagagaaagtaagagaggagattaaaagtgaacccagtaaaccagatgatcctcaaaaccaacgagaaagtaaacctggaatttttcccgctaagtttttagaagatgttattactgagatggttaaacaattgatcttttcttctataccagaaacacaaatacaagatagatgtcaaaatgttagtgataagcaaaatcaagccaaactctatgacactgctatgaaactcatcaattcactgttaaaggagttctcagatgctcaaattaaggttttcaggccagataagggaaatcagttccctgggggtaaagtgtcttcagttcctaaagtacctccaaggtataaagagccaactacagatgaagcaccatccagcattaagataaaatctgcagataaaatgccacctatgcataaaatgatgagaaaaccttcttcagataagataccatcaattgacaaaacattggtcaataaagttgttcactcctctgtttgtaatattttaaatgactatggatctcaagactctatttggaagaatataaacagtaatggagaaaatttagcaagaagactaactagtgcagtgataaatgaaattttccaacgtcaggttaacttgatattttgtgatgaggtttcagtttcagcatgtttgcctctggaatctaaggatgttgttaaaaaggtccaaaagttggcccaaacagccagcaaagaatgtcaaacttcatcaccatatacaataatattacctcataaatttttggagaatgtgatttctgctcttttctccaaaattttctcaacaatatccagcacaaaaacaaaagaacctgaggacaatttgtccacagaactgaatttccttcaaatgaagttagtaagtgcagttgcaacagagatctcccaagataaatatatgactatacagtatgtagaaaccttacaatctgatgatgatgaaattattcaattagtggttcagtctgtttataataatctcttgccacagtttggatcacaagagattatacaaaattgtgtaaccagtggatgcaaaatcctttcagaaaacatagttgacttggttctacgagaagtggctagcaatcagctgcagagctatttttgtggagagctaactccacatcagtgtgtggaagttgaaaacatcgttgaaaagatccttaaagatgttttccaaactactgatgtgcccctacctaaaccttcacatgctgataagctgtcttataacataatagaagaaattgctgtgaaatttttatcaaagcttttatctatatttccaaaagtacataaagaaagaacaaaatctctagagactgatatgcaaaaaataacttcaaaagtactaaattcagtccaagaatttatctccaaaagtaagattaaacttgtaccacccaccaaggaatcacctactgtgcctgtagctgataatgcaactattgaaaacatagttaattctatttataccagtgttttaaagcactctggctcttatacttctgtatttaaagatttaatgggtaaaagcaatgtcctctctgatacaataggctttttaatggtgaatgcaatttcgaattctgaatttcaacctcaagtagaggaagaagtatcaaattcagaattagttctggaagctgtcaaaattatggaaaaagtgatcaaaattattgatgaacttaagtctaaggaaaagtcttcatccagaaaaggtttgacattagatgccaaacttttagaagaggtgttggccttgttcttggctaaactaataaggttgccaagttcctcaagcaaagatgaaaaaaacttatcaaagactgagttaaataaaattgcatctcaactgtcaaaattggtaacagctgaaatttccagaagtagcattagtctaatagcttctgatcctgaagagcactgtttaaatccagaaaatacagaaaggatttatcaggttgtcgattccgtttatagtaacatactgcaacaatcaggaaccaacaaagaattttattatgatataaaagatacaaatacagcctttcctaaaaaagtggctagtttaattattgatggagtttcaagttttccattagatacaattaactcaacaatttcaaatgctgatctctctggagagctagacgttaatagaattgttcaaaaggcccaagaacatgcttttaatgtgattcctgaattagagcaagaaaagttagatcaaaatttatctgaagaggaatctccaattaaaatagttccacatgttggaaaaaaaccagtcaaaatagatccaaaaattatttcagaacacttagcagttatttctataaaaactcaacctcttgagaaacttaagcaggagtgtttgaaaagaactggacatagcatagcagaactgagaagagcatcaataagtgggagaaattactccttaggatcacctgatttagaaaagagaaagacagaaagacgtacctcattggataagactggaagactggatgtaaaacccctagaggccgttgctagaaattcatttcagaatataagaaagcctgatattacaaaggtggagctcttaaaagatgttcaaagtaaaaatgatcttattgttcgattagtagctcatgatattgatcaagtgtatttggaaaattacataaaagaggaacgagattctgatgaagatgaagttgttttaacacagacttttgcaaaagaagaaggcatcaaagtatttgaagatcaagtgaaagaagtcaagaagccaatacaaagcaaactttctcctaagtcaacactaagcacgagcagcctgaaaaaatttttgtcactaagtaaatgttgtcagaccacagccagtgcaaatattgaaagtactgaagcaatctcaaatcaggtaatagaatccaaggagacacatgttaaaagagctgttgctgagcttgacatggccacaccaaagacgatgcctgaaacagcctcttcatcttgggaggaaaagccccagtgtaag

SEQ ID NO: 81275 - DNA, 836 bp, Homo sapiens
  sig_peptide (36)...(171): this location contains the signal peptide sequence, MWLPGLGPHSTVQLIQCVQPRLLLVFYVCLICKTYDTLMCSNGSL, Run with SignalP
  misc_feature (142)...(240): similar to gi5802370 in the genepept database release 114, Run with FASTXY 3.3t00, default parameters
gtggtgtgaaataaatgtatgcaagctagaggaacatgtggctccctggtctgggtcctcactcaactgtgcaactcatacagtgtgtccaacccaggctactactggttttctatgtgtgtttgatttgcaaaacctatgacaccctcatgtgtagtaatgggagcctcctgtcccagatgctgctgtttcccagggttgtgcgctttgcatgtctgaagccttaactcacagtcagtcctcctctgggttttaacttattggtcaaacggttctggagtttgcaaagtggaagagattggaggaaactcatatttcagggctatccaatcacttaataaaacaaatacaaagcttagaactggttttaaggaaaggattactattgaaggaagactccagcccctgatcctggacaagcctggaaattaatataccttactttgaatgtaacatcatctcacagccaagggcaaatgccttgccaaactagtggactgtagagacaagtgggttttctcaaactgaaatcaggaaagctaatcctcctctagctaccatagctttgcatctcctttgcttccttgtgattggtgatgaacattctctgtcgctgtgctgggcatgttcttttatactaagcactcctgattgggtgaacctaaaaaaccgggagattttggaagaacaaccttaacttcccagggtgcgggaacaaaacaggcttaagtcacgggataaggctgacataatagtcaagtgcctcactcgacgattgagacgccctaattccattccttggaacccatgcggttgtccccgcccccccccccccc

SEQ ID NO: 81276 - DNA, 416 bp, Homo sapiens
  sig_peptide (125)...(260): this location contains the signal peptide sequence, MRYYLIFTGLAKFTLITPTLGEMRRNRSFSLLLIVNWYNCFRKNL, Run with SignalP
  misc_feature (323)...(162): similar to gi1657707 in the genepept database release 114, Run with FASTXY 3.3t00, default parameters
aaaaaagacaaataaccaaatcaaaaatatagatataatatgaatcagcagttactagaggaaggatcttgaatgactagtaaacatgttaaaagaaaatcaacctcacagaggttgcatcacaatgagatattatttaatattcaccggattggcaaaatttactctgataacaccaactttgggagaaatgaggagaaataggagcttttcattgttactaattgtaaattggtataactgctttagaaagaatttagcaatatctaataaatatagagatatacatacccacttctaggcctatagtcttgaaaattgtacatatgcattaggagatatggtgaaggatgttcattgcaaacgatttgaatagataaagattggaatgtacttaactacccattatcagaaag

SEQ ID NO: 81277 - DNA, 862 bp, Homo sapiens
  sig_peptide (110)...(245): this location contains the signal peptide sequence, MQSLVCFENGLGVFDVLGCPGFLFCLMATMWLVSISLYTEVPFGS, Run with SignalP
  misc_feature (465)...(341): similar to gi3510484 in the genepept database release 114, Run with FASTXY 3.3t00, default parameters
ctttatacattttgctaattttaacaaaggtagatcaagtgagtattcacttgtaatattagtttgcttttttttccccccataaaaagaatatttctttactggtataatgcagtcactggtgtgctttgaaaatggcctgggtgtctttgatgtgttggggtgtcctgggtttcttttctgtctgatggccaccatgtggctagtttccataagcctttataccgaagtcccctttgggagcttgatttcaagtcttcaggaacttttatttattaagagattttaaaaagactattaagagaatttgtttttaaaaagcaggttcttcaaaattagagggaggtaacctgtggtagaggggagctggtaaagggaggtgctttctcaccattcagcgtcaatttctagtgcccccaaagtctcaagtaaactaatgatgttcaacaagagaactttttttttagtagcataggtgctaaagttctgcaggtcaagtaatgtattattccggggatactgcatactactaatagctaaaacacttgaaacccttttttgggaattggatacgctcttattaaaaaacaaccccactttttattttcagctgttcatttcaaaaagggattaaaaaaccatgaaaaagttttgcctactttttgaaaatagtataactaaaaaaggtgggattttggttaatattaaaaaacccttaattttttccctctggtgaaagtttttactggctttattttgaaaggggggggggggttttttttttttttgaaaaaaattttgaaaaataaggggggagaaagaggggccaccattaatgtggaaagggtttttggtcttcttt

SEQ ID NO: 81278 - DNA, 832 bp, Homo sapiens
  misc_feature (1)...(832): n = a,t,c or g
  sig_peptide (175)...(310): this location contains the signal peptide sequence, MPLACTGLNTQRFSYLRDLFLPWGLCILYSILSAIFPDLSSSAKL, Run with SignalP
  misc_feature (474)...(359): similar to gi15707 in the genepept database release 114, Run with FASTXY 3.3t00, default parameters
caccatggccggttaattttttgaatttttagtagagacggggtttcaccctgttagccaagatagtctggatctcctgacctcgtgatccgcctgccttggccttccgaagtgctgggattacaggcgtgagccaccgcgcctggccgatttaccttccttacttaaccaatcatgccactagcttgcactggcctcaatacccaacgtttttcctaccttagggaccttttcctaccgtggggcctttgtattctctattccatcctttctgcaatttttccagatctttccagctcagcaaaattgccatctctccacattgccttcttcactctattcaaagtaacgaagggtacttcccccaaagcaactgatgttcccgtggcttgctttattaatcacaataggacatgatcttctacattaggttttcctccatgttttctggcagcctctgaaggatatgagccataacagagcatagacattgcttttttctttgtagcttaatctccagtgcctagtatcattcccagcgtataatatgtttaatgtgaactgaatgagaaaactaaatgagaggcttaattttatacagcagtgaaggtatggcccagacttataatttaaggagaacttactctctacaaatgtggagtagcctgacgtggtggctcaagcctgtagtccaagcacttcgggaggcgccaggtggggtgatgacttgagccccaaagttcgagaacagccctcggaacatggcgggaccccatctttgccnnnnnannnanacnannncnnnnnnnnnnnnnannnnnnaaaaaaaaaa

SEQ ID NO: 81279 - DNA, 445 bp, Homo sapiens
  sig_peptide (193)...(328): this location contains the signal peptide sequence, MAAAAWIALYWVSPAEGLQQVTAYWLLLMFIQGPRALYSAGDECC, Run with SignalP
  misc_feature (235)...(120): similar to gi3322826 in the genepept database release 114, Run with FASTXY 3.3t00, default parameters
ctggggttacgacccgcaattcccgggacgagccacgcgtgcgccagaaatgtcatccaggagccaaggcctgaaatcagagacctcaggagctaccttgttacggctaccccactatggctgagctgctaatcaagcttcgagacaaagtcccttcttccctctcttttcctcaagcaggagtctctccacatggctgcagcagcttggattgcactgtactgggtctcacccgccgaagggctgcagcaagttactgcttactggttactgctgatgtttattcaaggcccaagggctctttactcagcaggtgatgaatgctgccagaactggtaccttcccttcaaggcagtgtgttctcttctggcccagggtatgtctagaactgtcactcaggaactaagtcctagaataggagcctcagggctttttctgatgccgt

SEQ ID NO: 81280 - DNA, 532 bp, Homo sapiens
  misc_feature (1)...(532): n = a,t,c or g
  sig_peptide (221)...(356): this location contains the signal peptide sequence, MFEIHRAHGVFLLLSIQLTTSLKRKSGEGDRESPASWFSPFSQMF, Run with SignalP
  misc_feature (350)...(273): similar to gi504525 in the genepept database release 114, Run with FASTXY 3.3t00, default parameters
agcaacttaacagaaaaagaaaagaaatattagagaatttcaagatttatttttaataatcccctattggaagaatatactctgggtctatttattaccattgcttctttctcaggttacccttattttctatgctgaattgagaaggaagatcagcttcgtcatgggacgatactctaggaaaagcttataaacacttggaaatattttatattcagaaatgtttgagattcatagagcccatggagtgttcctcctccttagcatccagctgactacatcactcaagaggaagagtggagaaggagacagggagagtccagcttcctggttttctccattctctcagatgtttttccttataaacaccattcttctaccatttaaaattcccatttaaggccaggtgtggtggctcatgcctgtgatcccagcactttgggaggccaaggcaggaggatcacttgagcccaggagttcaaggccagcctgggcaacacaggaaaaccctgtctctaananaaaaaaaaaa

SEQ ID NO: 81281 - DNA, 643 bp, Homo sapiens
  sig_peptide (493)...(358): this location contains the signal peptide sequence, MLLRALTAMCVIALVANVTSLTLQRPQPLSCLLREYKKGKGFRSL, Run with SignalP
  misc_feature (56)...(171): similar to gi414511 in the genepept database release 114, Run with FASTXY 3.3t00, default parameters
tgacttagtgcatttcccccaccttcattaaagagatacccgagtctgccttcagctatttaatacttccgcaagatggttttagaaatgtgcttttattttaatacaactacccttcgatgcatttgtttatttgatttcctaggacctgattccttgggcatcactttccaggaagccaagtgggccttggtgcagtgcagaggtggccctccccgaggtcaagaccaggaagctgctacctgtttatctcaggcaccaggctaaccacatactttgcttaggcctttagcagccaggaggtgggggagtgcacttggccataggccatagccagcctggggcagttcatcctcatcaggcttcgaaacccctttccctttttgtattctcggagcaagcaggagaggggctgtggtctctggagggtcagggaggtgacattggccaccagagcaatgacacacatggctgtgagtgcccgtaggagcatgagccccagtttctgggcagttttaattgggggaaaaaatccctttgggctgaaatcatatcagcattgtgatttcaaaggcagcattttcagagatcaagcactttttccctgtagtttagaaatttctgttctcagaactttgacctt

SEQ ID NO: 81282 - DNA, 1020 bp, Homo sapiens
  sig_peptide (744)...(879): this location contains the signal peptide sequence, MLSLFIFLRFLPLGFCWKELHPEAEQSEKVDFRKPWYLTGHAASL, Run with SignalP
  misc_feature (144)...(339): similar to gi563136 in the genepept database release 114, Run with FASTXY 3.3t00, default parameters
ccaatttcctgtggcaaactttgattgtgaatttcattaatctgttctggattgctacggtaaaatccgaagtgtttaaagttcggcacactggaagctactgtggccaaaagtaggataaggtctttcatgttttgccttagattgctaaagtatggattttcacacaggttctccaaacctatagtcatcagtatttgcttatgcatttcttcatttgaaaccaaaaataacatttcatattcttttattctttcttgtttacattcataataaaagtcagtgttagcatccggcaatgtttttgtaattttttgaataaagtcacatttgtaagaggtctcctctacaaactgccccatataacacaccaaaggttgaagtaagacacacacatgggcccgactgtttgacttcaatctttccactgctttggcatctaactttgcatcttcagaactagaagcctccgtaagcaaacttatttctggatcagcaggccagtatgaaattcggttaactccagctcatatcagagtgtttcctccggttgcatttcaccttccctctgttcgagttctcataatccatttcctaaccagcagtgatggtaaacctttcatctaggcatcttagctgctcccagtaatccatttacaatcattttcaaacaagcagaacatggttttctgtcttttgtcagtagatactctggtcctctcttcattatctcctaagggtccatgctttccctcttcatttttctgagatttttgccgctgggcttctgctggaaagagctccatccagaggctgagcagagtgaaaaggttgactttagaaagccttggtatctgaccggtcatgctgccagtctgggtgctgactgaccgcccggccctcgcgctctccagattttgcatctgcccagcttctttcatcccaaacctagcgtcctctgctgccaaggaaacctctcccagtcagacatgatctcggccctagcgcccccgcctctcg

SEQ ID NO: 81283 - DNA, 653 bp, Homo sapiens
  sig_peptide (87)...(222): this location contains the signal peptide sequence, MHSNIQIPFLLWLTSQAFIILNSTEWGKRVLTYNRSLSLLNVPFL, Run with SignalP
  misc_feature (247)...(336): similar to gi1336045 in the genepept database release 114, Run with FASTXY 3.3t00, default parameters
acggtgcgcccacgcgtccgcacgctctaacctttatagcgtgtattactccttctgacttgggactaataaatgattttgtcaggatgcactctaacattcaaattccatttttattatggctaactagccaagcatttataattctgaactccacagaatggggaaaaagggtattaacttataatagatcattgagcttgttaaatgtacctttcctaattcgtactttttcccttttgctgagaaaaatgcctttctgaatatataatttttacaggtcattggaaaggagtactgcacaacaggattattataatgtgctaaaagatggcacttgtatctcattgccacatagagagctcatgtgaaaactctttgatctttgctggctttttagctgaaaagatttggaaatctttgtggcactggcaaaaacagaactgtggtaactgtttatagttggttgatttttagcaatgggtaagaatgtctttgttgaatccagtttattaatacgtaatgggccacatgttgccctaaagggcaaagcatatttttctcatatcaaaaagctccctatattttttgccaatatccaaagatatttttaagagggggcttattttctttttcaacccggcctaagccgt

SEQ ID NO: 81284 - DNA, 634 bp, Homo sapiens
  misc_feature (1)...(634): n = a,t,c or g
  sig_peptide (173)...(308): this location contains the signal peptide sequence, MTCSFLYFSFVFIFLKLTSDISLFLVDVVYHLPKRTDGQFHSPHS, Run with SignalP
  misc_feature (231)...(373): similar to gi3882460 in the genepept database release 114, Run with FASTXY 3.3t00, default parameters
taaacttgacactcttgttttcatagggaaccatttatgatttgaagatgcaccgaaaacataaagtgatctgtctttaatacccacaagttcaaattgtgtgctcctggcctccaagacattctctattgccaccgcaataccaacctaagtgatagttgtgattctttctatgacttgctcatttttgtatttcagttttgtttttatttttctgaaactgacatctgatatatctcttttcttggtagatgttgtgtaccatttacccaaacgtactgatggacagttccatagtcctcattcccaagacattgatagctcactccttcaggagccccaccctcttggagatgtcactaccatgggaatgagaataaatagtaccatactctttgtattttacttcaagtataaaatgagttaaattggctgatgctgtgctggtcaggcaacttacccaccatttagagcattgctttatgggcggaccgaccagtcacttacgacgtttgatatacctgccattattagggcgagagctaactggttagatgagactatnacggtgttcacattcagttatgccattggtttttcagccggtgggagagaacgaccttttttcacggct

SEQ ID NO: 81285 - DNA, 412 bp, Homo sapiens
  sig_peptide (134)...(269): this location contains the signal peptide sequence, MVKFIGPRVRRGLESPLCHACYLALCTLALVRLCALSRSRSLSLM, Run with SignalP
  misc_feature (207)...(376): similar to gi1289222 in the genepept database release 114, Run with FASTXY 3.3t00, default parameters
ccagtacacacttctttaatcccgtagtaaattttctctttatagccaattcccaaagtcaagtatattgactcataaaaataccttctgggaagcatgtgactgatttccagctgagaggccctgccactggatggttaagttcataggccccagagtcagaagggggttggaatctcccctctgccatgcctgctacttggccttgtgtacgctcgcgctcgtgcgcttgtgcgctctctctcgctctcgctctctctctctcatgctgattctgcaggcattctacaggcctcccatgtcccaggagccagctctgtccacagtgctcttcctgctcctgctcctggccaaccctccaaccaaggtgtctaggagccacaggaaagagcgggttctcttgctagttgct

SEQ ID NO: 81286 - DNA, 396 bp, Homo sapiens
  sig_peptide (230)...(365): this location contains the signal peptide sequence, MPWNGKSTRLWPLNLCWTFLDPYVWAVVGARWIFTDGGTRGRKCK, Run with SignalP
  misc_feature (180)...(283): similar to gi2622024 in the genepept database release 114, Run with FASTXY 3.3t00, default parameters
atgattttggcaaatattcctcttgcctgactttcctacattttctctccttttcactatagcaaatatatctttatttatgattctcacctcatttagttaaaacctttgctaaaagtttatttttattgttaccgtgataacagctaatggcatgtgagtgtttactgtgtcaaaggctctatgatgtatagtttagggggatatcttattggatccttgaagaaaaatgccctggaatggaaaatccacgaggctgtggcctcttaatctgtgctggacatttctggatccgtatgtctgggcagtagtaggtgctcgatggatatttactgacggaggaacaaggggaagaaagtgtaaatgggagaggagggaaaggggaaaggtgagggg

SEQ ID NO: 81287 - DNA, 635 bp, Homo sapiens
  misc_feature (1)...(635): n = a,t,c or g
  sig_peptide (318)...(453): this location contains the signal peptide sequence, MAEKLEAVDAYWPLQFCHFCCLVCSFSVLFFLTLLLITSQSSPSV, Run with SignalP
  misc_feature (196)...(71): similar to gi945390 in the genepept database release 114, Run with FASTXY 3.3t00, default parameters
gagaagcgcccggcaagagtgttcaaggggcataaactgagggtacggagtaggcagatgtaaattcacaggggataatcagaaatgaggaaaggatttcgtagggtgctcatttttaaatagaggcctcactgaagttgacatttgtgaaaaggcttgaaagagttgaaatagtaggttgatcaatcatgtagggagatcacggggcccagaaagaataggtaagatcttcaggcagaagcattcctagcccttttcaggaagagtttggagaccagtattcttgaagcactaccagaaatctcggagaatggaacatggctgaaaaacttgaagcagtggatgcgtattggcccttacagttctgccacttttgttgccttgtctgttctttctctgtgctttttttccttacccttctgttgataactagccaatcctctccctctgttttcatctctgaagccaggatgtatggtagtattcgttttattgagattcccattttcattgcctntagggagccttacagtaagctatcatgaaaattaagggatttactatttttttaaattaataggactttcaaaattgcggtgaaggtaaaaattactgggatcctggttggccaattt

SEQ ID NO: 81288 - DNA, 629 bp, Homo sapiens
  misc_feature (1)...(629): n = a,t,c or g
  sig_peptide (109)...(244): this location contains the signal peptide sequence, MKPYCMYPFLSGLLSSLLFWVESLMLLCVQMVLFLMLCVLDYRIY, Run with SignalP
  misc_feature (181)...(423): similar to gi862343 in the genepept database release 114, Run with FASTXY 3.3t00, default parameters
aacatttccagaaccagacagcatcctcacttgtacccactaaaggtaactactagtgtgacttctatctttgttggttggttgtatccattcttgtacatcataaagatgaaaccatattgtatgtatccttttctgtctggcctccttagctccttattattttgggttgagtcattgatgttgttatgtgtgcagatggttctttttttaatgctatgtgtattggattacaggatatattgcatcaaaatttatgtatccattatattattaatgagcatttggattatttcaatttaagactattttgaatacaattactgtaattgtcttgttcatatcatgtgttcaacatatgcacttactcctaagagaggaatttgtaggtcataggatatgtgtatgatcagcttgggtatacactaccagttttctcctgtcaaccaggcatgagaaatctaattgccctatgtgctgactaaaacatgaaattgggaggcctctaattctaacccttctggagagggcccccccccccccctggggggggggccntccccccccaccccgnnggggnnaattttaaaataaagtcgtggttaagttatagatttttttaaaaaatt

SEQ ID NO: 81289 - DNA, 394 bp, Homo sapiens
  sig_peptide (191)...(326): this location contains the signal peptide sequence, MPNLFTLPPSLLTWLLYCPFHYLCVLDCVLDTLLEGGCFSLQLCA, Run with SignalP
  misc_feature (111)...(301): similar to gi1294785 in the genepept database release 114, Run with FASTXY 3.3t00, default parameters
ctactttgttcttggtgatctgcattctcattattatgtctggaagttgatttctttttatttatcgcgctgggtattaactatgttttcaaatctgaagattatggtctttcaacaattttggagaattgtcggcctttttcttaaattatgtcttccatattttctgtttggaacttgtatttgaagtatgccaaatctttttactctacctccgagtctcttaacctggcttttatattgtccatttcattatctctgtgtattggattgtgttctggacactttacttgaaggggggtgcttctctcttcagctgtgcgcaccccctttattgaatataaaaactttttatatgactattgtgcccatttttttgattatggctaagtcc

SEQ ID NO: 81290 - DNA, 893 bp, Homo sapiens
  sig_peptide (271)...(406): this location contains the signal peptide sequence, MFSCFHVYLLSCFATPLYSSLDCLLLVLQDAGVSFPGKHFLKSGD, Run with SignalP
  misc_feature (251)...(382): similar to gi14687 in the genepept database release 114, Run with FASTXY 3.3t00, default parameters
aactaatcctcagaaaatcagattaatattctggctttgcgacctgtacaaagtacttaatttcccagtttagtgcctttgtctgtgaaatgatacgtaacttttatggctattatgatgataaagtaagaaatgcatgccaagtgcctaacataaaatcaatgctaagaaatggtagctattattagtaataatgataaagaattttgcaaaaatttccctttaaatcctaggcgttggtcatattgaattacttgtagtttctcaaacatgttctcttgttttcatgtgtacctgctgtcttgctttgctactccactgtattcttcacttgattgcctcctactagttcttcaagatgcaggtgtttccttccctggaaaacatttcctaaagtcaggggacgtgttttctgttttcctctattattgtacttcttatactctctaattttctattgacctattttcttccaatataagacactttcttcttgtgtgattttcagataagctactaaagtcttggtttcctcatctgggaaacagggatgtaaaaattaaatgagatgcacttggcacttaagccaatgtctaacaccttccccaatcccaagaacataataggcaggcaacaggtgtttacttatgaaatgaaaataatgatttaccaattttatttcatctaaaaaaaaaatcagaaggcggagaccattccttaggagagaggggcatcccccccaaaacctgaaggtaagcgaaatacactaatgggcctgaaccaaaaatgggggtaggcacaacagcttgggaaaaaaggggcaagaccggttattggtttcacgaataaagcactcagtgggataaagacaacaactaaagtggtggagagct

SEQ ID NO: 81291 - DNA, 927 bp, Homo sapiens
  sig_peptide (50)...(185): this location contains the signal peptide sequence, MGEFCIILYFLFACFLLSMHCLKILKIDWFCYYFKRMKGRLSNYC, Run with SignalP
  misc_feature (265)...(319): similar to gi5103043 in the genepept database release 114, Run with FASTXY 3.3t00, default parameters
aagaaactcgtttcttttggagaggaggactatgggcctgggggtcaggatgggagaattttgcattattttatactttctgtttgcttgttttttactaagtatgcattgtttaaagattttaaaaatagattggttttgttattattttaaaaggatgaaaggaagactttcaaattattgtaaaatctatacccaggataataataattggaatttcatttcagactccaagtttaaagtatttgtaattataagtagacttttgcttttattatagtaagaaaagtcttttaaattctcttcttcaatgaaagcaaccacttttgtttggtgaaacaagcagcatttacaagcacagaaacaaggtttagcaatattagtgacaggattatataccttctatttattgggtcctctaaaagatcatcttcctttgatttgcaactatgggaatgaaatagaagtgggaaaaattagcttttaaaccaattagttagtaatgactagtgccaagtttaaagtgtttcagagtgttattgcggcgttttaaaagtaaaacactacctccctcttaatctttttaaaagataccactggcggcaaatgaaaaagtggtccactttaagctgcagaagcgctttctataagcttgcatataatacctgtacttcgaatttcggttcaagcccttcattctggtctgatcttgacaaaccacgcaaacaactccgtacttcgctctccaaaaaccctcttcccagcacacgaacactcagtacgcgcaacacataccctcacactgtatcggggctttgtcctccaccatgccacaaacgcttagtccttgctcgtctccatacatagtcgacccacccctcttgcgaacatcgtccctcttctctcgattgacacatgcagacgacc

SEQ ID NO: 81292 - DNA, 1152 bp, Homo sapiens
  sig_peptide (545)...(680): this location contains the signal peptide sequence, MFSLVLMHLVVLQKIYRQPLYVVFIPNCCKYIYFEVCLVRVRECN, Run with SignalP
  misc_feature (151)...(298): similar to gi4433383 in the genepept database release 114, Run with FASTXY 3.3t00, default parameters
cgtggtggaattccagctaaatcctccttcaaataaaataaataaaacacacagaagagaatctatctagttaaaaaccttcaaaggatgacgatcgtccatgtccaggccacataatcccagttttaacaattaatgcctgatcctgttttttacatcccagttaatttcctaatcttgtcagaactttcatttagttcaatagagatggaaatagatgttttaaattaagatttaagatcagattattatatcacttcacagtattcacattttaagattgattattatacatgggaagaagtgttgtttgctagccaccaacctttcttgggtggtatgactatatttcaccctgtaccaatttataaactgggtttaattatgcacgagtgtgtgcacacaattatatcttgttaagcatttttttgctaagtttttgataaacagccaatcgtggcgtgtcatcaaagcctgagaagactaaataagaagattgtttaacaggaatttaaatatattcgtgtttgaaagaatcattagaatgttttccttagtcttaatgcatttggtagttcttcagaaaatctatcgtcaacccttgtatgtagtgtttattccaaattgttgcaaatatatatattttgaagtttgtttagtgagggtcagggaatgtaatgaagtgccaaaaattccacttgacctacgtactctacagtcaacagaaaagcactccatttttgcagagctctgagttaaatgcactcctcaaagcagatcaactatcaactgggaaagcttaatgcggaacagttggactagaaggtaaatgcaaatcctatccacaaaagccagaatttttaaaggattgtgattatattaagcataagggtgcacaatggctggacaggctgactagcctcagagtccagaggcttcattcttaattcaacttaggggtcaaggtctatgcatgtgctaccatagcttaagaacaggaattcggaaaaagttattattttatgaacccgccagccaaaaacctttatatataaccattttttccagaggaacattacaggataaggccctgtaggtcctcctgtcccttttggaatcacggacaaagggcacacggctctttattgaaat

SEQ ID NO: 81293 - DNA, 757 bp, Homo sapiens
  misc_feature (1)...(757): n = a,t,c or g
  sig_peptide (165)...(300): this location contains the signal peptide sequence, MCYFYNTIILTLQGSLMFLLFSVVTLYLFSHSHPTPISIFSDVFN, Run with SignalP
  misc_feature (144)...(388): similar to gi4063312 in the genepept database release 114, Run with FASTXY 3.3t00, default parameters
tatagagaccactagtccaagtggaggaattcctcccctctagcccccttccttacctggtaagtcaaatgaaccaaatgtcaaacagtttggaaaggagagttgaagcagaaggaaacttccttctgcccctttgaatttgttactttttcttccaattaaaaatgtgttatttttacaataccattatattgacattgcaagggtccctgatgtttttattgttttctgttgtcactttgtatctcttctcccattcccatcccactcccattagcatcttctctgatgtgtttaatatgtatccttggatatatatgtattcttacatggtgttttctgtaaatttatataaatagtattacatgataattctcattctgatcctttcttcatttaaaactatgtttttcagttctgttggtgttgtgtttatatggtgcttttagccactgcattgtatttttattgctctgtctactgcgttttatttgcctgttcccctaagtgacagacaccttatttgttctccctgtaccacaaacaatgctctgtgggtatagtggctcacacttataggctcagatctttggggaggatgacgcagaaagatcgcttgagcccaggagtttcaaaccaaaccgggcaatgagacccaaacctcatctctgccacaaattaaaaacttaattgagcacattggcattgtgctccccccccanctncttcacagactggggaagaaaaaccattcacc

SEQ ID NO: 81294 - DNA, 444 bp, Homo sapiens
  sig_peptide (211)...(346): this location contains the signal peptide sequence, MLTQPLLLSLLLYCACRLVLLPVSLKTQPEVGWLCVHNFNFTCGA, Run with SignalP
  misc_feature (290)...(221): similar to gi407152 in the genepept database release 114, Run with FASTXY 3.3t00, default parameters
agccccccccggatcgagatccatattgagagcggtggaattccttgaaggttttcttctgcacatgtatttgtttgatctgccttttgtgcgtggggtgggagttaggtaggaatcttaaagtggagagccagtttcttctcaaattactgacctaacccatccttaacccccagttcaaggccacctttgtgatagtgaagcttccacatgctcactcagccccttctgctctctcttcttctctactgtgcatgtcggcttgtacttttgccagtttctctaaagacacaaccagaggtggggtggctgtgtgtgcacaacttcaactttacatgtggggctgagtccctatgttgtatatccttgtgcaaaagcacaatatgttaattgctatagcttttaaaaaaataattaatagtttttcataatcaaattttcttg

SEQ ID NO: 81295 - DNA, 452 bp, Homo sapiens
  sig_peptide (324)...(189): this location contains the signal peptide sequence, MVLPVVLALTIYLNWSLSFLTCKMEMTLCAECLQYLSQGKCSIKK, Run with SignalP
  misc_feature (374)...(24): similar to gi4539054 in the genepept database release 114, Run with FASTXY 3.3t00, default parameters
ctgcaaagagaacagaaggggtgctgctgtaggaaataaatgaatggctcagaagaccacactgaggaagttgtgagttgataatggaagatctccaggtttgaggcatccttagagggatatgatggttttgtgtgtgttgggggtgtggtagcgcagctgctacctagggaattagaaggttttctttattgaacatttaccctgtgacaggtactgcaggcattcagcacacaatgtcatctccattttacaggtgaggaaactgagactccagttcaagtagatggtcaaggccagtactaccggaaggaccatctgggggttcagacactggcagggtgggatttgctgccccttgcaaattgagagtgtcttggggtcagttttgatttgctcagctgttggcattctttgggctctgagtgggtgaggtgacccttgacctcctg

SEQ ID NO: 81296 - DNA, 560 bp, Homo sapiens
  sig_peptide (117)...(252): this location contains the signal peptide sequence, MYTVSLLLCLFFKKSDPDPGPFQNNLFHNHGTQSQSCMGSKVGDV, Run with SignalP
  misc_feature (461)...(321): similar to gi3242707 in the genepept database release 114, Run with FASTXY 3.3t00, default parameters
ccagctcacacgtaggttcttgctcctcggcaacgcaggctggaggcttcctctcctgtattcctttctgattctgacctccaacaatgtctggtatgaccgtatcttccactgacatgtatacagtgtccctactgctctgccttttcttcaagaagtcagaccctgaccctggtcccttccagaataacctctttcacaaccatggcacccaaagtcaaagttgtatggggagtaaggtgggagatgttattccaggggctgcccgactgataagtgagactgcccagagagtccatactattggtcagaaacagaagaatgaccagcaccttcggcgtgtccaggctctgctcagtggacgccaggcaaaggggctgacctcagggcgctggttcctacgccagggctggctgatagtggtgcctacccatggggagcctcggccccgcatgttcttcctcttcactgatgtgctcctcatggccaagcctcggcctacactgcacctgctgcggagtggcacctttgcctgcaaggccctctaccccatggcccag

SEQ ID NO: 81297 - DNA, 912 bp, Homo sapiens
  sig_peptide (403)...(538): this location contains the signal peptide sequence, MFLSLSLTLCLCFSFFCLYLSLALYLGSFFCLPFHVSVFLCLFPS, Run with SignalP
  misc_feature (152)...(290): similar to gi1336715 in the genepept database release 114, Run with FASTXY 3.3t00, default parameters
ccaggagccaagagcagagcgccagcatgaacttgggggtcagcatgctgaggatcctcttcctcctggatgtaggaggagctcaagtgctggcaacaggcaagacccctggggctgaaattgatttcaagtacgccctcatcgggactgctgtgggtgtcgccatatctgctggcttcctggccctgaagatctgcatgatcaggaggcacttatttgacgacgactcttccgacctgaaaagcacgcctgggggcctcagtggtgagggatgtggtgctcgggcctggctctgccccacccagcgaggcaccgagggccactctgtgatgctggctacagcaagaatgaacccacaggcgcagagcccaacaggctgtaaaggaaggcagtgacctctgcatgtttctgtctctctcactaaccctttgcctctgtttctctttcttctgtctctatctctctctggctctctatttgggttcctttttctgtctccctttccatgtctctgtctttctgtgtctctttccctctgtacttttcctttcagttgctcttggcagtcctgagaatcacatttcctggagaaaggtgggagaggaactaaaattggcttcacacagaaatttctgttctctcatgcaaaagatgagatcaaataaacccagtcccagtaggccacgaggttgggcctaagtgtgggcggatgggggaaggtctggttacactgcctttgaggcccacgacgaaatttttctcttaattgtggaaaggcctttcccaaggaggactggataggccctcgagaaaaactgacctggctgacggccccgtggccaagccttggcctccctggaccccaagggccagattgaattcatcccttttttaggggtaagcctcagccgg

SEQ ID NO: 81298 - DNA, 448 bp, Homo sapiens
  misc_feature (1)...(448): n = a,t,c or g
  sig_peptide (214)...(349): this location contains the signal peptide sequence, MPHCGLKECGWLVAALGVALSPLCCCACPSWQRDAVTQEWWLPGY, Run with SignalP
  misc_feature (267)...(56): similar to gi1144476 in the genepept database release 114, Run with FASTXY 3.3t00, default parameters
ctgggcnnnnaatcgtagacctctagtcccgtgcggnggaattccccggctcgagccgggcttaccacgaaacccaaaggaaaatggtgagtgtggggacgctcgctctgttttctcccagtctgctgggtgttgcgctgctggcctccccaggagaaggcgctccatggcagaatcttgccgggcttagcgggacacggtagccacgtaggcatgccccactgtggcctcaaggagtgtggctggctggtggctgctctgggtgtggctttatcccccctttgctgctgtgcctgtccgagctggcagagggatgccgtcacccaggaatggtggttaccaggttacgtgatatttacgttaatggcccctcctgaaggacaaccttccggactctgggaggtagggatcgtcttaaatcagaaatgagaggttcttgtcccctagg

SEQ ID NO: 81299 - DNA, 427 bp, Homo sapiens
  misc_feature (1)...(427): n = a,t,c or g
  sig_peptide (119)...(254): this location contains the signal peptide sequence, MLGATALCWGLAGTFFTWGMTAAGAALGSYSLWTEADLKMEVLSL, Run with SignalP
  misc_feature (194)...(79): similar to gi11074 in the genepept database release 114, Run with FASTXY 3.3t00, default parameters
cgtgggaganacactaggcgtcgnatgacacgtccgaaanccnnnnnttatttctgccgcgagagagggcacggggctgaggattgcatggggctggagaggcaccctactgatccacatgctcggggccacagctctgtgttggggccttgctgggaccttcttcacctgggggatgacagcagctggggcagctctcggttcgtattctctatggacagaggcggatcttaagatggaagtcttgtctttgctgcaggggtcatgttggcacttctattggctcttctgccccacagttgagatggccacgtctctggggcttcgtgcctttgcttctccctgggctgtgcttccccttgagcggttttgtctactgctgactctgagcctactgggtgagagaaaccccaacggcctgcactga

SEQ ID NO: 81300 - DNA, 429 bp, Homo sapiens
  sig_peptide (7)...(142): this location contains the signal peptide sequence, MAAAPGLLVWLLVLRLPWRVPGQLDPSTGRRFSEHKLCADDECSM, Run with SignalP
  misc_feature (28)...(424): similar to gi1234799 in the genepept database release 114, Run with FASTXY 3.3t00, default parameters
cacaacatggctgcggcgcctgggctgctcgtctggctgctcgtgctccggctgccctggcgggtgccgggccagctggaccccagcactggccggcggttctcggagcacaaactctgcgcggacgacgaatgcagcatgttaatgtaccgcggtgaggctcttgaagatttcacaggcccggattgtcgttttgtgaattttaaaaaaggtgatcctgtatatgtttactataaactggcaagaggatggcctgaagtttgggctggaagtaaatgagatgccacctgtggtcccaactgacaaagattaaggaaggttggacgcacttttggatattttccaaaagatttaatccaggtagttcatgaatataccaaagaagagctacaagttccaacagatgagacggattttgtttgttttgag

SEQ ID NO: 81301 - DNA, 847 bp, Homo sapiens
  sig_peptide (240)...(375): this location contains the signal peptide sequence, MWSVIPPNNTFSKFLLLIHFQFGTMASCSAVCTLCYPGFVPFYLL, Run with SignalP
  misc_feature (193)...(275): similar to gi161662 in the genepept database release 114, Run with FASTXY 3.3t00, default parameters
ggcgcgcgaatctcttatttttctcattttaatctggatgtatcttgttagtaatttcttaaagcaaagcattgatatgatttttagtgtcatggtctttagattcattactggaatgcatcttatgacaattctctgattttaaaaaattatggtattcttatttatttagaaatgcctattctttgcagttttcacattcataactgctcccatagtaattcaaaatgtccttagccatgtggtcagtgatccctcctaataatacatttagcaaatttcttcttttgatccattttcaatttggtactatggcctcttgttcggcagtttgtacgctttgttatccaggctttgttcctttttatttgctctctttttggtgatggtttcttcagaagttatgatgtttgcccatgtaaatacagggtttgcaggcgattgtcttatgccaccttgaaagtatggccatgaaaataactcttgtggcaagccaacaaaaagaaattgcattaacgctgcttccctgtccctaactagtccagatacgcttgggcattacaagagatcgcaggtcagggtgtcatatttatgtacctatgtgctgcaagtggacacccttaagacaagccgagctggccttatgctctctacccacgacctttgcacactaccctccgcacccgctcgcaagcaccaccacgaccactcgctgagaccccccctcgacgctctcgcccacgccccgcacaccctacccaactcagcgactcacgcccccaagtatcggactctcccctcttctcacagcctccactgcagccccgtcactcctcgacccccaccc

SEQ ID NO: 81302 - DNA, 1850 bp, Homo sapiens
  sig_peptide (1485)...(1620): this location contains the signal peptide sequence, MAIRFYIPTRNVEVISNFCFLRIVGWAQWLTAIILALLEAEAGGS, Run with SignalP
  misc_feature (680)...(543): similar to gi1762084 in the genepept database release 114, Run with FASTXY 3.3t00, default parameters
tcggttctcttaagatatatttcattgaggaaaggctggataaatgcttgatgaatcttagcctatatttactggttttcagaataatgaaaaattaagtatcattgtgacctcatggatttaaaccatagtggatgtcagtctcttgcagttattacccttattgatgcttaaatttcattccatttctggtcagtaggaacctcttcaagctggttatcaagtcctttaaacaacaccctagtggtacttcatggcaaagaagatatctggtgtgacaagatgtctcaggcttatcctgcacttctgtgccccaaattcagagttggctttcaagaccagaattggagagctagtcatgccctttcctactagattggtcactgttcctagtctttttagtagacaaagctaggaagtatgtttcatctgtttctttaagataaaatacatgagtttataccgataattgcaattgaaatttacgaatacaagtttttatgtagctgtttcatgtttatctccttttattctagttggcaacaatacagagaataatgtaattagaatatctcacaattggttaactgtttaatcctacacaagaatataatagtcttggagtaacaacaccagcaacactagcaccaacaatatgattgtgtaaaacagtttagaactttccccccatagggcatagtgtacaagggttttatggtcaatattgtgttttaagtctcttgaaataattgtgtgtttataacaccaactggatacacacttatgttgtttaggtcattaattttattgatttttaaaaaattaaatgttctgagttgtagattcacatgcagttgtgaaataatgtagagtgagcctagatatcttttacctattttgccccagtgttaacatcttgcataactattaatacaatatcacaactaggatattggcattaacacagtcactctatagaacattcctgtcactgccaggagtcatgctaccctttatagtcatacccaccttctacccctgaacttggccaactgttattctggaatcgatttctataattttgtcatttcaagaatgttccataaatgaagtcatacatttatgacttcatttgacccagtatgtgaccttttggcattgactttttttatccagcgtgattccctagagagccctccaatttgttggatgtatcatgattttgtttcttattgctgatagtatttcatggtatatatgtaccatagtttctttaacctattcacccattgaagaccatttgggttgtttctacttttttggctattacaaataaagtttctgtgaacatttgtttacaggtttttgtgtgaacctaagttgtttttccccctctctgggttaaatgcccaagagaacagcagcttgattatatggtagttgcatgtttagatatttatgatattgtcagactattttccggaatggctattcgattttatattcctaccagaaatgtagaagtaatcagtaatttttgttttttaagaattgttggttgggcgcagtggctcacagctataatcctagcacttttggaggctgaggcgggtggatcacttgaggtcaggagtttgagaccagcctaggcaacatggcaaggcaccattgctaccaaaaaaaatacaaaaattagccgggcatggtggcaggtgcttgtaatcccagctactcaggaggctgaggcatgagaattgcttgaacctgggaggcagaggttgcagtgagctgagatcacacagctgcactccgcctgtgtgagagagcgggactgtgtctcaaaaaaaaaa

SEQ ID NO: 81303 - DNA, 413 bp, Homo sapiens
  sig_peptide (92)...(227): this location contains the signal peptide sequence, MPPRACVLNVSLWLLWAEEIPGHTGWITTPWAKVKTDNIWTRKAT, Run with SignalP
  misc_feature (199)...(80): similar to gi4530664 in the genepept database release 114, Run with FASTXY 3.3t00, default parameters
cggccgcgcgccggggcaatgggcagggcaaacaggcagggtcatgtgggatgtgttaagagctttcttctttaattctgggagcagggggatgccacctagggcttgtgttctgaatgtgtccttatggcttctgtgggcagaagagattccagggcacactggttggataactactccatgggccaaggtgaaaacggacaatatctggacaaggaaggcaactgcaggtgggaagaagcaaatagattcaggagggacttcgaagatggaacaatactggggctatttggataaagaagaggcaccatcaaggataattcctcactgacctggatgaatggggggaccagtcactgaattggggaccactggaatcgggccaggtaggaagaaagcactgtgagttctgg

SEQ ID NO: 81304 - DNA, 418 bp, Homo sapiens
  misc_feature (1)...(418): n = a,t,c or g
  sig_peptide (77)...(212): this location contains the signal peptide sequence, MAATLQFLVCLVVTICLLSGVTTTQPHAGQPMDSTSVGGGLQEPE, Run with SignalP
  misc_feature (88)...(353): similar to gi457187 in the genepept database release 114, Run with FASTXY 3.3t00, default parameters
agctgaggtgtgtggcaggcagatgaggtttcagagatttgctgaacagagngagactcaaaggacgtggttgagcatggctgcgaccctgcagttcctggtttgcctggtggtaaccatttgtctcctctctggtgtgactacaacccagccccatgcagggcagcccatggacagcaccagcgtgggaggtggcctgcaggagccagaggccccggaagtgatgtttgagctgctctgggctgggctggagctggatgtcatggggcagctgcacatccaggatgaggaactagcgtccacacacccaggccgccgactcagactcctcctgcagcaccacgtgcccagtgacttggagggcactgagcagtggctgcagcagctccaggacctgcggaaggtgcctcctcttatc

SEQ ID NO: 81305 - DNA, 3415 bp, Homo sapiens
  misc_feature (1)...(3415): n = a,t,c or g
  sig_peptide (244)...(379): this location contains the signal peptide sequence, MTLFILGLASHGCRYYFSSGAGKYVQHTNRIEKKIEDFLLVFFSK, Run with SignalP
  misc_feature (3144)...(3244): similar to gi546739 in the genepept database release 114, Run with FASTXY 3.3t00, default parameters
cgggtcgacccacgcgtccgacagcacaaactaccaaattttaattattggattccagcaataatttttaatggttttcaaactggcggaattttgacagtgctagttcgagtttgaagcttttgaattagatctctaaatggtgacagtttacatggttttatctagctttcttatttatacttgactgaattgtaatgattttttttctaattgtaatttgacgtaatagccatacaaaaaatgactctattcatactaggtttagcttctcatggttgtagatattacttcagttccggtgctggaaaatatgtacaacatactaacaggattgaaaaaaaaatagaggattttcttcttgtttttttttccaaagcaggtaaagagggtagcaaagcatcggaatgatgtgctcaaaaatgcatattcctggtggggatggaggaagaaggcattagtaaaaggtttaatcaaacgttacaacttaaccccattcatgtaggaataaatcaagtgagcagttccagacttttgcataatatttttactatgatgctgttttattaatattttctaaatttcaaaacaaaaagtgaatgtttgaaattgctgggtcccgatgttggtggctgttggagttttggaccactcgctagcagtgatttgaagattataattagctaaaatccaaaacaaaaaaccaacaacaaaaattgtatggtgcggaacatgcaccttgacaatggtactaacttgttattctatagaacacgttagaatagatctatttttgccagagcaccctccttcagtcctccgattacatttcactagagttccttacgagattgctgtatattcctgggacctttttttaaaaaaaaaaaaagcaaaccaaaaaataactttttttctatgtgataaaaatcttacttgatctgcttttcctaaacctcagtggcttttcccttaggcagggttgggggtgggagggcaacttactggagatgactgttttcagatactttaaaacaaacctttttgtagaaatgcttaatttttaagcggttaggcactgagagtagcagaaatcctgcaaagctttatagttccttagactcaccttgtcgattctctgagtaaagtcttgatttcaataattgtgcttctcatgccctgaatctgctggagaggagtgttgttattttcaggtaacaacattcgttagcacaaatatttcagaccaatattagtgctctccaccccaccttttgttatcattttcatttcatttctctcattcttttttattttggaaaatcatattgctatagtgtgtactttaatctgccagcagataccatctacactaacatttgtcccacagcatcctcaagagaaaaagttgttgcaccttatatatatctcaagcaaaccaaaatatgatgctcttctgctttgttttattctaaattgttgtatcatatctttctgaaaccattctgaatttagttgaaattatcaatatttatgcttttaaccttaatttctggattcaagcctgtatataaatcttttgaaaaaaaattgtcctagcccttctctgcgatgctggaagtagaagattgcgtctcagattggagacgcagtactgttccagttttctttagccttttatttatttagttattctgggtatttcctatgtaattttgaagtgtgtagagtatattatagtaactgaagctgcagctgtaagaagctgagtgaaagaaaaaatactgtaagacatccttaaagtttttatttgtttgggtactgtatatgagatcaggaaaaagaaaaatgtcccacagccacattggaaatacaggttcttgtccccaaattaggttagttcccagattttagatcaaaactgttaattcattaaaaccccttttaaaaggtaaattctactgttgtaattccgatagtctttttcccacaaatatcagaaatatatttatttaattctgtcagatgagctttctaccgatgccatgtcccaaagccatgttaaaataattcccacgttatcattgtgattctacttcctgccactaaaattgctggagaaacaaaataatgatggaacactatgaacaaaaaggagcatctgaactggtctggttatttagaatccaatgtgttcaaatccttttgttttcttattaagtcagatgctactgtaagtcagataaaattttgtttgcactctgcagtctttggctcaatgtatggaaatgtttgcacctatgtaaagtcacaagctaattacaaattgctacagaacaggagtaagctgaaaactgaatgccatgttttgtttataaggtggggaggggagggaaaataccaaaaaactctgttccaagtttggcatttgacattaatgtgaagcagtgggaccatgctgcctgctaaactactgtatgaatcgtaaatgttctgaagacgagcagctggaggctggaggatggcattccatacagcaaaggagaagcacccaccacttcatctgggaaaaggaaggaaattgcaggaggcctggagccatcatttgtaaaggggatgttgcggggtgtgatgctgttgaggagattcaccttcaattgcactgctccacagagccctcatataaggccaatcctaatgggctacctcggctttaaaagttaatttcagtaagtcctgtttcaaaagtttgtctttttttgcttctaccttcagtgccactattttccactgcagtgttttgacttcacaaactgcctcctccagagaggaacaatgtattgctggaaaatggggcagtaggaaggcaaatgctgttgtttacatttggacctattaaaggtatttcagagtgactgctagggtagggaaatttaaaacttagggctttccccaaatagggctnccttatttgtcaccttataaaaagtatactaattgttaattagatgttgcttttgtttatacaagcatcccccaaagaactagatttggattttgttttgagtttttggatttttaaaaattatcttatttagattgactaacagcataccttacaattttaaaagaagctgttgttcagttcatcttacccagatgtgtcctggcgaagtattcagggtttgatggactgctttactttcgtttggaagtgatagctaagtttattatactctatattaaacaactttgttcatttcactgaggaccttatcttccttatatttcagaacaaagaagcaacaagcgtgaataaaaagacaaatgtatttgactccctcataatccccatctgtatgtgctacccttccttcaaatatataaatgtgcatctttttttttaaaaaaaaaa

SEQ ID NO: 81306 - DNA, 423 bp, Homo sapiens
  sig_peptide (323)...(188): this location contains the signal peptide sequence, MKRAYRFFLFLFIFLFWGLVLRVLITITLPSSTNTFHNVNFDKCP, Run with SignalP
  misc_feature (255)...(102): similar to gi2447135 in the genepept database release 114, Run with FASTXY 3.3t00, default parameters
ggggtcaaagttaatcttgaaatatgttaatgctgttacatcctaaggtgctgctgggttggaagatgggcaaaaaaattaaaaaatgtataaaggctttaagaaacaaaagtgtgtgtgacacagatggctggaataaattatgggactcaaaaagcggttcaatttgcttagttttaaaatccatttggacatttatcaaagttcacattgtgaaatgtatttgtgctacttggaagagtgatagtaatcagcacccgcaacaccaacccccagaaaagaaaaataaataaaaaaaggaaaaatctataagctcttttcattgaagcctaaaacaagatagttgaattaatgaatctagtgatgactcattttaagcaacaattggaaaaagtatgatggatgatttaaaatatacatacc

SEQ ID NO: 81307 - DNA, 385 bp, Homo sapiens
  sig_peptide (81)...(216): this location contains the signal peptide sequence, MPGYVPLLLLLLLLRCSQRGGGVNFGEKDAKVPGTWRDGVRVPGE, Run with SignalP
  misc_feature (123)...(343): similar to gi5104876 in the genepept database release 114, Run with FASTXY 3.3t00, default parameters
ggtggaaaaagtttgagagaaggagggaggaaaaggtgtcctggctagcaccatgtggattctcttgagatgagaagaaaatgcccggctacgtcccccttctgctgctcctgcttctcctgaggtgttcacaacggggtggaggagttaattttggtgagaaggatgcaaaagtccccgggacctggagagatggagtcagggtccctggagaaggagcctcttgggactcagacagggccagtcctgagcgaaggtacggaataggtgagtgaaccttgggaactccggaccctgttatctaccctcaatcacctgccacagggaggcagggaccccagcgtctttctcatatacccttttaaggaaatgctctgcttttgat

SEQ ID NO: 81308 - DNA, 397 bp, Homo sapiens
  sig_peptide (225)...(90): this location contains the signal peptide sequence, MVVGIVVRVFVRVFGCVLSLGQHPSQQPLKIIRLFFSLRIFIKIS, Run with SignalP
  misc_feature (159)...(253): similar to gi156990 in the genepept database release 114, Run with FASTXY 3.3t00, default parameters
accaggcgtcctttttgactgccttttgctctgactacagttataaaagcagatgtatatgatgacgtttatcggcgcctatattggctacttatttttataaatattcttaagctaaagaacaagcggatgatcttgaggggctgttggctcgggtgctgccccaggcttaacacacacccaaacacacgcacaaaaacccgcacaacaatccccaccaccatagccttcaccttaggcttatgcttatgatagggatgattattggacggctgatcgaatgcctgaactattcttttaaatattgaggttatgcatgtgggtaggacaccgcacacaacgccatgcccggtggtgtgccaggtggagattagtaccggcaactctgccgcctcct

SEQ ID NO: 81309 - DNA, 528 bp, Homo sapiens
  misc_feature (1)...(528): n = a,t,c or g
  sig_peptide (239)...(374): this location contains the signal peptide sequence, MLWALQHFLFMAVPDLFAVCLYLALCLIETVSVVNYLAVCESSFE, Run with SignalP
  misc_feature (385)...(247): similar to gi2326904 in the genepept database release 114, Run with FASTXY 3.3t00, default parameters
ctcgggaagagtctgacattattgcattcatttgtttattaactctccggatgtagcttatctgcttttatgactgccatcttaaaaactgtgatacctcatctggaacaatttttattgaataaaggcgtaacagcatatgctaccatattctatgttaaattctatatgagtacatttcaggatagtatgttattgtcatagtaaaaggaaagagttgcaattaatgaataatataatgctttgggccttgcagcacttcctgttcatggctgtacctgatctttttgcagtttgtctgtatttagctttatgtctaattgaaactgtgtctgtagttaattatttggctgtatgtgaaagttcgtttgaggaaaggagagggttattcgtattctaaaagtgtatgtgtactatataattgatgttgacagtatggtaattagagtttttttatctggcatctcttaaaagtaacaatttttaattctattatcagctntaaatatagaatgtataatgtaaatg

SEQ ID NO: 81310 - DNA, 642 bp, Homo sapiens
  sig_peptide (264)...(399): this location contains the signal peptide sequence, MKAGFLICRWTGFLIGQAIFPSCRFGRFLNMAICGYVLITAHLYI, Run with SignalP
  misc_feature (513)...(351): similar to gi218300 in the genepept database release 114, Run with FASTXY 3.3t00, default parameters
aagtcaagcctcgacccacgcgtccgttgtgtttgcgcacattggtggtatgtgaactcttgagacgggaattggatccctgtgctggaggatgaccatttgcagatagtcctgtctaggtgtatcacaggaacgcttgtgtgtctcacaagatgccttcagagaatttcagtcttcattttgtttagccaaaaccagagaatatttgatgtttacattactgtgagcactttcctaaggggagacataatgcagcttaagatatgaaggcaggcttcctgatttgtaggtggactggtttcctcatagggcaagcaatatttccttcttgtaggtttggaagatttcttaatatggctatttgtggttatgttttaataacagcacatttatatatagtataaatttttataccatttataagtactgttatatttttgaagagatagtcatttggaaatattggtagatttaaaaaagattttagtagttttatttctgtttcttcacttcttgcatttactagaagatgcagaactgtcttcttgattttaatgggaaactcttaaattattaatttcacccattgaatttttgaagcttgacagcaaatttgaagggaaaatccctgggcaatggtaa

SEQ ID NO: 81311 - DNA, 608 bp, Homo sapiens
  sig_peptide (288)...(423): this location contains the signal peptide sequence, MQSPFLINMKTVMFFILNPFIKIFACVFVLIVLVLLRHFMFLTLK, Run with SignalP
  misc_feature (296)...(156): similar to gi213145 in the genepept database release 114, Run with FASTXY 3.3t00, default parameters
caaattacactcaaataatgtattttaaaaactcagtcccaattttagttccaattccaattccttctttttaccatgagcaaaactgaggtccagaaaagtagtgtgtgttactaaaggttaactgagtggttaaatatagaacatctgcattgagaagccagtttacttattttccagtttaatattaggtcttctaccagtaatccactgactcagtcctgtatggctactgattactcagtgaacttcagtgaccttatattcctggagcaaagttacttttaatgcagagcccatttcttattaatatgaaaactgttatgtttttcatcttgaatccatttataaagatatttgcgtgtgtgtttgtactaattgtattagttttgctaaggcattttatgttcctcacactcaaggcaaagagataaaacataatctgaagaaaaatatatacttcttcaaaataaaaagagtcttctttattatgcagatctgggcatattgtacaatacttaatggctcaaggggatcaaagtaccagtttgatgctgcttcacttaataggacctcattcatatttgatgactgggctgtttgcgggc

SEQ ID NO: 81312 - DNA, 659 bp, Homo sapiens
  sig_peptide (174)...(309): this location contains the signal peptide sequence, MGLAESSLGPLSLKVPIICLLYFVFFNKSRFKIVGSKWVHFICGF, Run with SignalP
  misc_feature (271)...(122): similar to gi1171613 in the genepept database release 114, Run with FASTXY 3.3t00, default parameters
atttcaaaaaataaggttgatataatcttatattttcatagaaagttattctttgtaaaatacatgtagttacattatctcatctggtccttagaataactgcatgaaattagtgtctctcattttgtaaaagtggaaaccaagatttatagaagttgaggacctgaaattacatgggactggcagaatcaagtttaggacctctttcattaaaagtaccaataatttgccttttgtattttgtattttttaataagtctagatttaaaattgttggttccaaatgggttcatttcatctgtgggttttttttaaaatttgtttattcattttcagttttattttattttgcctctactattacttataaaaattcatttgactgtgataatttttaaaggatgattcaggaaaaagtatcgtgatttctggaatggccgagtgaagatctcagccaaccctttccccaaaagcacttaaaaaactgaacaaaattgtcaaacaaccatttcaggactctggaaactgaccaaatatatacaagaaattgggaagcatttattcaagaactactaatccttggtgagaacaatggaagtgtgtggtaatttaaccaggagcagctttcatttcctcccatccagcaagtctgcatgggc

SEQ ID NO: 81313 - DNA, 392 bp, Homo sapiens
  sig_peptide (226)...(361): this location contains the signal peptide sequence, MKLVCRFCGVWCLNSWRLSPPFCINRSKDLHCTDYVLLPQCNFVR, Run with SignalP
  misc_feature (250)...(95): similar to gi1620154 in the genepept database release 114, Run with FASTXY 3.3t00, default parameters
aataaataggaatttttcggtttgcttagattttacctagcagctattatggcagcaggaccaccaggatatgggaaaacaggactagaagatgtacaacagcaaagacatgcagagacatgcagagacacctggaaggaagctaggccctcaacaaattggattgcaacctaatatttaaggaagagtccctgaaggaggagacgcctggtgcagacactgggaatgaagttggtctgcaggttctgtggtgtgtggtgcttgaactcgtggagactttccccacctttctgcataaataggtctaaagatctacattgtacagactatgttctcttaccacagtgcaattttgttagaaataaattacaaaagaataattgctgggaaaa

SEQ ID NO: 81314 - DNA, 573 bp, Homo sapiens
  sig_peptide (174)...(309): this location contains the signal peptide sequence, MINLVPLFLLLYLVYPNHLVSRSPCTIYISKRHIACIWLYVFLFR, Run with SignalP
  misc_feature (180)...(114): similar to gi3342119 in the genepept database release 114, Run with FASTXY 3.3t00, default parameters
cttgtggatggacttctcttagttctaccttacaggaataaattacatgagagatattgtttgttaattatcccattacatttcctttgaggtctggatcttgtgtatgtctctttttttgtctgcaccccactccccaaaattaattagtgtctttttaaagattggaccagatgattaatttagtccctttatttctccttctgtatcttgtttaccctaaccacttagtttccaggtctccttgtaccatctacatttctaagaggcacatagcttgtatttggctgtatgtatttctttttcgagggggtatgtgaaatcccttaattttacacattttatactgctataattctgtcatcttcttggccagctagcctcaaatgccatccatttaaaattgagaacagtacattttccctttttttcgtttccttttaaattcaatcatatcacaaatcctgagggcagtttatcacattatgaaatacagacagccctgcaaaccacctacttattatattttctttatttctcccccttaagcatacaggcatatgtgtccctctt

SEQ ID NO: 81315 - DNA, 433 bp, Homo sapiens
  sig_peptide (193)...(328): this location contains the signal peptide sequence, MMCFTIWEAYFFIFSFYLFLLLRYFDFLLTQTLNRKNFHSLRDEG, Run with SignalP
  misc_feature (166)...(281): similar to gi495840 in the genepept database release 114, Run with FASTXY 3.3t00, default parameters
agaaatacacagagagcaggacttggtaacatactttcctctctgaagacaacgaaactgcatattagagcggactgtgacctcatagactgatgaaatttgaaacacttaagctacatatgctgtttctgggttatgagtgctgtgtcatatcttaggccagaactaccctgatttaagtaccatatacttatgatgtgttttactatctgggaggcctacttcttcatattttccttctacctctttttattactacgttactttgatttccttttaacacaaactttgaataggaaaaactttcactctctaagagacgaaggaaagggataccgcacttattgtcaatacttatagcgcatatacctgtgcaaactcttgaaaattaaactatttattgacgcgtgttttaatttttttttgagacggg

SEQ ID NO: 81316 - DNA, 422 bp, Homo sapiens
  sig_peptide (148)...(283): this location contains the signal peptide sequence, MFDILFWVVVTQMYTITKRYPKPIKTEYVKYLCLLYASCTSMGKK, Run with SignalP
  misc_feature (241)...(408): similar to gi3880508 in the genepept database release 114, Run with FASTXY 3.3t00, default parameters
ccacgcgtccgtaaaataataataataaaatgaacatatgtgaaatctaagaacatataaaactaatttttcataataaaaattagaaaatggttgcctagtggtggaaattgggggaagggacacaaattttctgggttgatagaaatgtttgatatcttgttttgggtggtggtcacacagatgtatacaattaccaaaagatatccgaaaccaatcaaaactgaatatgtaaaatatttgtgtttattatatgctagctgtacatcaatgggaaaaaaagtagaaagtatctacatgaatagaaaaaaattttttaattgtgaatataagtttatgtttttgatgttttcagtttttctcttcctctccattactgcaatctagaaatggaacagaagaatctaattttatagttgggg

SEQ ID NO: 81317 - DNA, 397 bp, Homo sapiens
  sig_peptide (125)...(260): this location contains the signal peptide sequence, MPLPSAFCWVLVGEAGIGDFVGACGLNQLPHPHLLLLAAMLFMSP, Run with SignalP
  misc_feature (363)...(197): similar to gi762987 in the genepept database release 114, Run with FASTXY 3.3t00, default parameters
ttttaacaggttggtgtccaggtgatgtataggcaaattaaagtctgagaagccctgtcctaaataacacacctacgaaaaacaaatcagtcatcagaaatggtgtttcttcccccactgggttatgcctctcccatcagccttctgctgggttctagtgggagaggcaggaattggggattttgttggtgcttgtggcttaaaccaacttccacatccccatttgctcttgctagcagccatgcttttcatgtcaccatagcaactacagagcgggggggaaaaaagtgacagtcattgtgggctgctggaagaggtggtggcaatataggtcatcctcccagtagtgtgaggttttgaaggtctatgactgccccaatggcatatgcacttggcc

SEQ ID NO: 81318 - DNA, 891 bp, Homo sapiens
  sig_peptide (101)...(236): this location contains the signal peptide sequence, MMVVLVFLVSIYNALITFLNNVLFTSNTLLEFLTKLRGYKINSFL, Run with SignalP
  misc_feature (9)...(118): similar to gi2154959 in the genepept database release 114, Run with FASTXY 3.3t00, default parameters
ggtcgacccacgcgtccggcttttatcctcctcttattacaggaagcttccaaagtctgaataaacaaatttcagatgctgttttgctgtaccttaaggaatgatggtagttttagtctttctcgtaagcatttataatgcattgataacatttttgaataatgttctgttcacttccaatacacttttagagttccttacaaaattaagaggctataaaataaattccttcttatcatattcttttatataaaaattatgagattttgatatatttttattaaggataaagactcaattgaccctgttttgaagccccagtggagtgtttgggactcagtgtaagcctactagggtgcgtatcttcagaaagaacaagaaaagctaagtaggtcaataaagcctctcattgaattgtttgcctgcattatagctaacattttagagtagtgtttttcaaactctatgagccataggataagtctcttgacatggcatttagcagacaatggattcctcccctatagtttaaagggaagcatcttcattcataagaaagcatgggaaatatggcttacatgccaaaacattgtaaccatagcaggaattgccaactaggcaatgtacatccatggtttctcttagagtgaaaaatacctttttttcattcctaagagaattatactctaaatatgagaaaagtgcattctattctaactctcaacagacaaacaagaatatttcgaatttactataatttattcctggcattttccctcatgaaatgaggttggatgcgcttggtggatgttattaaaagcctcactggccctgggactctggccttatatgcatatttggttacaaaacccaaggccggaacaatgggtc

SEQ ID NO: 81319 - DNA, 377 bp, Homo sapiens
  sig_peptide (229)...(94): this location contains the signal peptide sequence, MMPCSLSPPALCTHCFFLSFCKNSYLSCKSQLRCSFLQKDFLVSR, Run with SignalP
  misc_feature (219)...(70): similar to gi5679802 in the genepept database release 114, Run with FASTXY 3.3t00, default parameters
ttagtgaggacaagcaaaaaggttcttctaaaacagaatgagaatttctaccctagcgatatacactgggaaggataggagtataaactagtcttgagaccaaaaaatctttctgtaagaaggaacatctaagttgagacttgcaagataagtaggagttcttgcaaaaagaaagaaaaaaacaatgtgtgcacagagctggtggtgagagagagcatggcatcatggaggaacagaaatagttcagcatggctggagatggaacatgtttggtaaaaaggagctcagggagggtgaggctgaagaagggagtgaaggtctgactatggaggccttgtatagcatgcttgagtttatttgcttgtttttgtttttgg

SEQ ID NO: 81320 - DNA, 533 bp, Homo sapiens
  sig_peptide (207)...(342): this location contains the signal peptide sequence, MKFLLMSLPYRHLFCITQAILSEIAEGIRNDPFKFYLYSVLALFL, Run with SignalP
  misc_feature (204)...(449): similar to gi557825 in the genepept database release 114, Run with FASTXY 3.3t00, default parameters
gattagtttaaattatcataaaagtgcttgaaaatctttaacttgcatgtaaatttggaattctgaaaaattcataaataccctgccagtatctatgaaaggaaaagctgcagatccgactatataccaataatccatttttctaaaagttcagagaaactctgtagctcattattcctgggatataaggtaatcctggctgggttatgaaatttcttctcatgtctcttccctatagacatctcttttgtatcactcaggctattctttctgaaatagctgaaggtattagaaacgatccattcaaattttatctttattctgttcttgcccttttcctccactattatatgtatgtttttgtttcaaggttcagtatctactacttaaagttacttagaatttttaagttttcctaatataaacaagcatttgaaagaaactactttaattgttatgatgactaaacttgtctcaaaccaaaaatatgcgctaaacactacgtagtaagaatgagaccagcctgggcaaca

SEQ ID NO: 81321 - DNA, 840 bp, Homo sapiens
  sig_peptide (46)...(181): this location contains the signal peptide sequence, MVCFLLYHFNITSTFIISNTHREKSVDFLFQLTSDHLTFLSTFAF, Run with SignalP
  misc_feature (201)...(114): similar to gi2267129 in the genepept database release 114, Run with FASTXY 3.3t00, default parameters
cccacgcgtccgggagtttatacgagaatctatccaagtgattagatggtttgttttctgctttatcattttaatataacaagtacctttataatttcaaatactcatagggaaaagagtgttgactttttgtttcagttaaccagtgatcatttgactttcctctctacctttgctttttgtgtctagctgtgttgtttaaaatttaacaaataattaatcatgtttaatatataatacctgcatttttaccagtttttttcatgaagtgaagcatgattgagatataaatactgtagatctatttaataccaatgatatattttagaaactaaatccggctacagtagatttaggttgttcctcattttttttcattatatattaatagttggattgtattgatctacaaatctttttattatatgttaattaggaattttattgggttgggtccaagccattttttttgcaagagcagataaaatccaaagaatagctatgacctacggctcttggcgtggggcctggcacaagacaatgaatgaggccaatcagattctttgcctcagagacctgaacaaatcggggaaggaatttgcttgttagcaaattgggaaattaagcagagccatgaaggagagttaaggctggaggagctgtgagaaaccatggcgttacgctcgggagggggcccggaaaaacctaataaacctttctcctaataaggagaatggcctataccatgaatttggaggcgccccaaccttgggggcagagagaccccctttatttggtgtgagccccgcagaagagccgccgcaaaacgccgtcgtcggg

SEQ ID NO: 81322 - DNA, 637 bp, Homo sapiens
  sig_peptide (99)...(234): this location contains the signal peptide sequence, MICMHFLLFVSIFSFKIISQITNVPTNRKAKYYALVVLTGNFRIH, Run with SignalP
  misc_feature (103)...(248): similar to gi862343 in the genepept database release 114, Run with FASTXY 3.3t00, default parameters
ctttgctttattatatagacctgaataaaaagcaatgaaatgtaattggtatataaattaaacctcaaatatgaaggctgttaacgtaggtgagaaaaatgatatgtatgcattttcttttatttgtaagcatattttcttttaaaattatttcacaaattacaaatgttcctactaataggaaagccaaatattatgcactagtggtacttactggaaattttagaattcatttatttatatttactacctcttgcatttatgcttttctttctctaaatttgtaaactgtaagctgaatatatgttgctgaatctatgctatatgacaaaacatttttaatcgttatatttttactaatgcatcaaagggttggaatgatcctcttcgtgtagtttcatctttaggcagaactatattctttggattgaggctttacttgaaagcctatttttttaatgttctagaactttattagaaaagtttaaaagagccctcacaatttaaaaaactaattttattggtttaaaatggtttaaggggttattcctaagaaattaaacaagcacaatctattacttgcaatttttatttcacagcacatattgctaataaatgccattttaaaagcaaaaga

SEQ ID NO: 81323 - DNA, 628 bp, Homo sapiens
  sig_peptide (58)...(193): this location contains the signal peptide sequence, MCEVISIVLVLIQTILNILTISKDLWPFFAELIGKGTINMQYVTH, Run with SignalP
  misc_feature (239)...(384): similar to gi4049728 in the genepept database release 114, Run with FASTXY 3.3t00, default parameters
ctaaattagataagttttatttgcttattttatttgcttttaacacattttgaagttatgtgtgaggtaatttccattgttctagttttaattcaaacaatactgaacatacttacaatatctaaagatctttggcctttctttgcagaattaattggaaaaggtacaataaatatgcaatatgtcactcaccattttaatattctaaatttagcaattgctcttatatctaatgattaataatataagttgttctagtttcctttatctgctgtggtataaatttggctgctaatccaataataaaactatttatatttttaacattttcaaatatcattactactgctatttactagtctcagtgacaatctgagattctccctagatgcttaaaggaccctttttcaggggcaaaaataaaaaattccaacgaataaaatcttaaatggtcacaacgaccacgccccttttaacataataaataaatgattagcctctgtattactaacagaaaactccgtactttaaagctcataccttgcaagatgttataatgccggaagcctgtactccacccatagagccgggtttagggaatcttttaaaaatacaaaattgaatgcag

SEQ ID NO: 81324 - DNA, 622 bp, Homo sapiens
  sig_peptide (172)...(307): this location contains the signal peptide sequence, MILAITLLPQAALTLPRRPFLHCSTVIPVVVLTLKFTMHLFKLKD, Run with SignalP
  misc_feature (162)...(491): similar to gi4981870 in the genepept database release 114, Run with FASTXY 3.3t00, default parameters
cccgggtcgacccacgcgtccgcacttttatattcttttatatatatataattttggtatatgtatcctgaagtggcatagaacatgtttcttttgcatgtccaatagactctggaaaatattttaaaatattaagaagcatgtataaaattttgttttgctagaaaggaaatgatactcgctattactttgctccctcaggctgctttgactctcccgcgaagacctttccttcactgttctactgtgattcccgttgtggttctgaccctgaaatttactatgcaccttttcaagctcaaagactcatggtgctttcttccctggatgttatttatatcctggacttcacatcatatccgagatgggattcgtcatggtttgtggatatgcccatttggaaaaacttctcctttgccattctggctttatgtaataatcacatcatctttacctcacatctgttcattcgttatgtatttaacaggaaccagacaaatgatgtcttcaaaacatggagtttgtattgatgtctgaagtacacggcagtcttaaaaagccaatggctcccatgatgatatttaagaggagccaccttaagggtaacccccaccaatacagg

SEQ ID NO: 81325 - DNA, 964 bp, Homo sapiens
  sig_peptide (81)...(216): this location contains the signal peptide sequence, MHQHILVLPLMKVAEIVFSFVCTAVCVTGLYLVFIFSEQCQMCIF, Run with SignalP
  misc_feature (443)...(579): similar to gi1150486 in the genepept database release 114, Run with FASTXY 3.3t00, default parameters
ctactgtccctaattgaatagggaagccaaataagtagtaacttccttcccttatatcagagatgtaacccttacttttgatgcatcaacatattttagtattacccctgatgaaagtagctgagattgtgttttcatttgtgtgtactgcagtgtgtgttacaggattgtacttagtatttatcttttcagagcagtgccagatgtgcatatttgcagacagaaagcttcatctcttttgaatttgcccttgaaaggacatctgcctagaatcggttttctgctttaaaaatttacatagttgtgccatcaatagcagctgctacttctctaacaaagaacaactatggagtcttcaaagtatcagaggcatcaaaaagaacatccccctgccagggcctctctttggaatacgtttattagattctctttgaaagtcagaatgattatcagtttactgtttatccaactaacataaaatattctttgtttaaagttttgtgcctttctttcattttcccgaattattatatgtcataattttctttttgtagtcatagttttttcaaataagttcatggtgttgatcgtggagttctaaggtgtacaattccactctgaatgactatttaatttcatttcagaaaagagctgtttgtttcaaaaatgataaagtctacttaatgacatctcaaaagtgccataagcagaagagtggtgatgagttttatattggcatagtctttgccttatattctcttggcatattatgaaataagcttccccagccccatttcccatttttggccttttttcggctcatttatggggatacaaaacgaatctacatagaaattttccagatctatgaatcttttctcatgcatggccgtaccacaaaatggatctggatccccttaggcatttaaaaggcgatggttttatggaaagccctgggctcccc

SEQ ID NO: 81326 - DNA, 666 bp, Homo sapiens
  sig_peptide (116)...(251): this location contains the signal peptide sequence, MFKIFLHISLPVPCHPFSNLAFFAFVGRVPLGLTNYLLFLFLKIS, Run with SignalP
  misc_feature (19)...(118): similar to gi13263 in the genepept database release 114, Run with FASTXY 3.3t00, default parameters
agtgccataactttcatgttcaaggttacatatgtgaaatctaagttgcagaaaaagtttgtatatttgcagactgctaggtgcatagcggcttaaatacaggactttcattaaaatgtttaaaatatttttacacatctccctccctgtaccttgccaccccttctccaaccttgccttctttgcttttgtgggcagagttcctttgggtttgactaattatttattgtttctatttctgaaaataagtaaattacgttaatatagggtaaggtaaaatcctggcagtgtggatttgagatgacatatacccggcctcagcatgtcaccaagggtgatattagaatcatatattggctggtagctgtgaggatgactcaagtctgctggaatgctggaggagagtgtatgagagtgctgggagtcccttttcagttgctgcatgatcaagaggtctaggggctggagttggtcgaaccgattggccaattgccctgggctcttcgcaaatgatggtcagtttgcctctacggatgtatgccttacgttccagtaaagcaggaggtccctctgggccccattgttccctcaccccctgttcgcaaaagccgaaggagcccagtttccaactttccagggcgccggggggcaagctctccacgcgcg

SEQ ID NO: 81327 - DNA, 688 bp, Homo sapiens
  sig_peptide (383)...(518): this location contains the signal peptide sequence, MNLFFFDSLMDLLISLTLFGTRDSLFFGGGPLPHTHWDFFSPPPL, Run with SignalP
  misc_feature (682)...(170): similar to gi1620154 in the genepept database release 114, Run with FASTXY 3.3t00, default parameters
tttgttttttctttaagacttccagtatgtaacacatgttcaagtggttagttctactccagacaatgttgccttttgtttttgtccaactttaccgtcagaaccaggttctctcctttatgtttgagtattggctttcaatctaataaatggaatttcactttcttcttcattataaaaacagaatagtttgccttctattttctgtgataattataggaatgagggacgtcaatagtaagaagcataattcaggaataatttgtatttggctttggaatgcacattcacagaaagattccctaaagtgtgcatccccactctgttcttacgactgtgtgttttgggggaggtggagggaagtttggccgagaagtagaccatgaatctttttttctttgatagccttatggatttgcttatttcgctaacgctcttcggaaccagagattcccttttttttggggggggtcccttaccccatacccattgggattttttttcccccccccctctttgattttaaatccagtggaaaggccactccggctaatgtaatctcaaggcgaagcccttttgttttctttttaaaactcccccgcggcggcgcccttttccgctccggggcgttgggcggcacaagcgccaaacaacgcgggcgcgctacgcgaaccctaacgcgggcggc

SEQ ID NO: 81328 - DNA, 782 bp, Homo sapiens
  sig_peptide (48)...(183): this location contains the signal peptide sequence, MMNNFVILNGQLAILLPLRLYFSLFFLLFQAEVIDVSYGMADDLK, Run with SignalP
  misc_feature (304)...(390): similar to gi2769725 in the genepept database release 114, Run with FASTXY 3.3t00, default parameters
acgcgtccgaagagatagaattaattctatattgattttttcaaattatgatgaataattttgttatactaaatggacaattggctatacttcttcctctgaggctttatttttctttgttttttctcctctttcaggctgaagtcatcgatgtgagttatggaatggcagatgatttaaaaaggattaggaaaataaaaaacgtaacaaatcagatcgcactcctgaaattaggaaaattgccactgctttataaggttggtccagtgaatgttattcagtggtttggtcaatattttgccttgttttgttggaattatatgcttttgtgagtgtggagtgtgtgtgtgcatataggtgtgtgagagagagaaggggagaggaagaaagagaggcagagagtgtcacagaaagatggcttttccacattagaacattttaatttaagatatttaagaacaatatatttatgcccttatttctttagagagaaaataccttaagtcaggtaacactgagtttgtgggaccttaataaaattggcatactcttcataatggtacctatctggaatagtaaaaaatgagaaccaccctgtgttcatcttatgacatatgtgaaacttctaatctattatcaaatggactaattatcatgttctctatgttagacaagtatctagatgatttacaccctttagtgattattttgtcaactatacaactacagttactaactgtgatcaggattttaattaaaaaataattgctaaaagtaaaaaa

SEQ ID NO: 81329 - DNA, 391 bp, Homo sapiens
  sig_peptide (185)...(320): this location contains the signal peptide sequence, MGEAPSKLILYIMLISLVIWFPSHQEIRKDGLLMTAGWSRGKVTT, Run with SignalP
  misc_feature (133)...(72): similar to gi2944213 in the genepept database release 114, Run with FASTXY 3.3t00, default parameters
acgcagttttgtaaactgtggggttaaacttctagctgaggtatttaatatcctaaatcagcttccaaatatctgaacttgattggcaaagtccagttttaacaaatgctgtgtgtagggagcacagcagagaactgggatgtctaacccaaggatcagggactaaggctcgttaattttgcccatgggagaagccccctcgaagctcattttatacataatgctaataagcttggtgatttggtttccaagtcaccaagaaattaggaaggacgggctgttaatgacggcaggatggtcacgaggaaaagtgacaactgtcggcaaaacaagagatggaaaaatatttttataaactcagtgctacaggccgggccatggtggctcacac

SEQ ID NO: 81330 - DNA, 2527 bp, Homo sapiens
  sig_peptide (656)...(791): this location contains the signal peptide sequence, MLFVPVTLCMIVVVATIKSVRFYTEKNGQLIYTPFTEDTPSVGQR, Run with SignalP
  misc_feature (1576)...(1437): similar to gi3093358 in the genepept database release 114, Run with FASTXY 3.3t00, default parameters
tgcgtaaactccgctggagcgcggcggcggagcaggcatttccagcagtgaggagacagccagaagcaagcttttggagctgaaggaacctgagacagaagctagtcccccctctgaattttactgatgaagaaactgaggccacagagctaaagtgacttttcccaaggtcgcccagcgaggacgtgggacttctcagacgtcaggagagtgatgtgagggagctgtgtgaccatagaaagtgacgtgttaaaaaccagcgctgccctctttgaaagccagggagcatcattcatttagcctgctgagaagaagaaaccaagtgtccgggattcagacctctctgcggccccaagtgttcgtggtgcttccagaggcagggctatgctcacattcatggcctctgacagcgaggaagaagtgtgtgatgagcggacgtccctaatgttcggccgagagcccctacgccgtcgctcctgccaggagggcaggcagggcccagaggataggagagaatactgcccagtggagaagccaggagaacgaggaggacggtgaggaggaccctgaccgctatgtctgtagtggggttcccgggcggccgccaggcctggaggaagagctgaccctcaaatacggagcgaagcatgtgatcatgctgtttgtgcctgtcactctgtgcatgatcgtggtggtagccaccatcaagtctgtgcgcttctacacagagaagaatggacagctcatctacacgccattcactgaggacacaccctcggtgggccagcgcctcctcaactccgtgctgaacaccctcatcatgatcagcgtcatcgtggttatgaccatcttcttggtggtgctctacaagtaccgctgctacaagttcatccatggctggttgatcatgtcttcactgatgctgctgttcctcttcacctatatctaccttggggaagtgctcaagacctacaatgtggccatggactaccccaccctcttgctgactgtctggaacttcggggcagtgggcatggtgtgcatccactggaagggccctctggtgctgcagcaggcctacctcatcatgatcagtgcgctcatggccctagtgttcatcaagtacctcccagagtggtccgcgtgggtcatcctgggcgccatctctgtgtatgatctcgtggctgtgctgtgtcccaaagggcctctgagaatgctggtagaaactgcccaggagagaaatgagcccatattccctgccctgatatactcatctgccatggtgtggacggttggcatggcgaagctggacccctcctctcagggtgccctccagctcccctacgacccggagatggaagaagactcctatgacagttttggggagccttcataccccgaagtctttgagcctcccttgactggctacccaggggaggagctggaggaagaggaggaaaggggcgtgaagcttggcctcggggacttcatcttctacagtgtgctggtgggcaaggcggctgccacgggcagcggggactggaataccacgctggcctgcttcgtggccatcctcattggcttgtgtctgaccctcctgctgcttgctgtgttcaagaaggcgctgcccgccctccccatctccatcacgttcgggctcatcttttacttctccacggacaacctggtgcggccgttcatggacaccctggcctcccatcagctctacatctgagggacatggtgtgccacaggctgcaagctgcagggaattttcattggatgcagttgtatagttttacactctagtgccatatatttttaagacttttctttccttaaaaaataaagtacgtgtttacttggtgaggaggaggcagaaccagctctttggtgccagctgtttcatcaccagactttggctcccgctttggggagcgcctcgcttcacggacaggaagcacagcaggtttatccagatgaactgagaaggtcagattagggtggggagaagagcatccggcatgagggctgagatgcgcaaagagtgtgctcgggagtggcccctggcacctgggtgctctggctggagaggaaaagccagttccctacgaggagtgttcccaatgctttgtccatgatgtccttgttattttattgcctttagaaactgagtcctgttcttgttacggcagtcacactgctgggaagtggcttaatagtaatatcaataaatagatgagtcctgttagaatcttggagtttggtccgttgtaaatgttgacccctctccctgcatcttgggcacccctgggataacttgtgctgtgagcccaggatggaggcagtttgccctgtttgaaggaacttttaatgatctcgcctctctgcacacatttctttaactagaaagtttcctaagcaaaggagttaggagagcagggtggcctgacatctgccagccctgagctgtaaggctgtggatgctgagcaggtccctggactcaattgtgcacgggggaacaat

SEQ ID NO: 81331 - DNA, 908 bp, Homo sapiens
  sig_peptide (32)...(167): this location contains the signal peptide sequence, MILSLYYKLFGKLAVATIEILHCLCYIEFVIIFKGFKKIPICFFS, Run with SignalP
  misc_feature (97)...(183): similar to gi4731219 in the genepept database release 114, Run with FASTXY 3.3t00, default parameters
tttcgtatggatggtagaataacaatgaactatgatattatcactttattataaactttttggaaaattggcagttgctaccatcgaaatactccattgcctgtgttacatagaatttgttataatttttaagggctttaaaaaaatacccatctgtttcttctccttcttgttttcttttgtgccccaccacttaaattacttgggtaaataccactcttcaaaatttgaatactgtctatcaaataagaagaagtgtgaaagatatgaagaagaaaggtgatagcaaattacaagaaaataaatgtgggtgatttcttttagttgaaagcacagagttttatttttccccagtataactattgagtagggtagggaggtccctgtatccccatttttattttttttgagatggggtctcactctgtcacccaggctggagtgcaatggcgcaatctcgtctcaccacaacctccgcctcctgggttcaagtgattctcttgccttggccccctgagtagctgggattacaggcacgcgccaccacacccagctaatttttgtattttttttttttactaaaagaggggtttcaccatgttgggcaggctggtctcgaaatcctgaccccattgatggcccccctggggcctccacaaggctgggataacgggcgggaaccccccgggccccgcccatttccccatgttttaacataaacacaaaccgccatttatcgggaaggaagtttttcccctttaaaaagcgtcttttccaaaggcccaatttctggactttattgggcaccaaaaatcttaaccccccttggcagccccctctctatttgggaaaagaataagctggcggacaccctacgcccaacacggggagagacagccccacccccc

SEQ ID NO: 81332 - DNA, 427 bp, Homo sapiens
  misc_feature (1)...(427): n = a,t,c or g
  sig_peptide (206)...(341): this location contains the signal peptide sequence, MFCLDLVVLFLFFLFIFYLGVGFLRVFKNSDLVLELFSGIVAALT, Run with SignalP
  misc_feature (384)...(353): similar to gi516886 in the genepept database release 114, Run with FASTXY 3.3t00, default parameters
caagtaggagaagaggctttcttgttggttgcttcagagttgccccttggctgcctgtatctcatctggaatttatttcttttacgggtctagggttgcagttatgaagtattgatgtgcttctggcagggttatcacttggaaaaaggttttaggttttgatccacatctttttgttctcatttgatttgcatgtatagagtagatgttttgtttggatttagttgtcctgttcttattttttcttttcatattctaccttggtgttgggtttttaagagtttttaagaactcagatttggtccttgagttgttctctggaattgtggctgccctgacttgtgtggagtgccatttttccatattggaagcattttgtttggcctttgcaatcagtaattctagttgtgatatgcctctccccctn

SEQ ID NO: 81333 - DNA, 932 bp, Homo sapiens
  sig_peptide (70)...(205): this location contains the signal peptide sequence, MRATLAASLFSWVLKYQNGGLLWEDTLESMEELFHITQDSDGPTT, Run with SignalP
  misc_feature (462)...(572): similar to gi1245430 in the genepept database release 114, Run with FASTXY 3.3t00, default parameters
gactggctgcctctggggctgctgggaccagcagagagctttggtccttttaactacttacttcccacaatgcgtgctactctagctgcttctttgttctcctgggtactcaagtaccagaatggtggtttgctgtgggaagacacattagagtcaatggaagaactttttcacattacacaggattctgacggccccaccacaccactccttggagatctacccaactgacaaaaaatacaaatataaggtagaaattagaaggaaatcccaagtgggaaggcatctgagggattattagcacaattcctgtctaccctcttccccagccctgacaagctgtttccagctattgtgtatctttctttattgaccggacaatcatgaccctatggcgcatacaagccataacattttgttagaaaattcttcctcatgctgaaatgaaatgggactctgtaacctgcactcttcatccttgttcaggcctttggagtaaccctaagcaaatcaagtgtctctttaggaggcgagccccttcacgtacttgaagatgtcagaattcctctgacaggaccagtatggcacctccctaattcatgatagaatacctttatatatgcaacccaagacactgagcttctctggcagtgttgacccattgtagactcaaattgaaccttgaaccagctgtgataagagaaagaggtggggctctttaacttctctcagctcggttcaggcctgagcacagtgcaggggcggggggtagtgaatagatgaaggtaaagtgtggcgggacagatgatcttccacaactgcatgatgggatgctttaaaattgttttcagtcccaaccacaggtaacagccccctccagaaatccctggcaatgtgcgggacactggcttgcaaaattacccacaaggaca

SEQ ID NO: 81334 - DNA, 1096 bp, Homo sapiens
  sig_peptide (299)...(434): this location contains the signal peptide sequence, MISFLFIFVGSSEALFVPNISYRIHDLLTGINGVYIVTWSLSDCF, Run with SignalP
  misc_feature (96)...(199): similar to gi2224411 in the genepept database release 114, Run with FASTXY 3.3t00, default parameters
cgttcgacccacgcgtccgcaaataatgccactttttaaattaaatgcccacatgaatgataataatttagaattaacataatttatcatagctaattagaactgaagaatcattttgcgatccaaagaattagaaactctttttgtcttaccagaatttcacagatgtttttcatattttttaaacaaaatttggaaagtaacccatatgtccctgacactgttctctggaaagatagataaagcttatacgtgatcatagccgtttcatcatcctgtctggacccagtgacataatatgatctcttttttgtttatttttgtgggtagttctgaagcactgtttgttccaaacatctcttacagaattcacgaccttttaacaggtattaatggtgtttatatagtgacttggagcttaagtgattgttttggctgaaatctaaagaacttctcattttttttcttccttgactacattttgctacatattgagaaggttgttttggatcaaaatgtgtatatgtgcactctcacatgataattctctctaagatattcggaagttgagtcacaccgggcctaattagtcggacccacagtcggtgcttcctagggggaggacctcggggttctggcgcagtgccactcgtgatgtactggaactcgcgtcgcacaccgcgttacgttgcccttctttcacggcccccagtcccacccccttgcctattcggccgggcggcggatgccgcgtgcacggcgggcgggtggccccccgggcatcccctcggtgttttctccgcctacctgcgcgcatcacgcgctaatcgtgcccctatacaatatccgtcccgtgctgcccccatgccctgtgcgcctggcccgcgctcgcgccgcgcgcccctcgccctctcgcctcgtgccggcgcgggcagacgagtgtatcgcgcgcccccttccctacctcacttacgttgcactgcacgcccgcggtctcgagtcggctcaacttctccgtcactccccgtccgctgttgctggacgcggcctgccgcgctccggggcacgcacgataaggccccggcggtgcatcggc

SEQ ID NO: 81335 - DNA, 1086 bp, Homo sapiens
  sig_peptide (515)...(650): this location contains the signal peptide sequence, MCIRAYMFSLRIRTHSLVSFGLESYYMGIFFLSFFLFFFLKKRGL, Run with SignalP
  misc_feature (86)...(209): similar to gi483523 in the genepept database release 114, Run with FASTXY 3.3t00, default parameters
cacttcttttctctctgtatacatcctgtacagtgttttgtacctctgtgactttagagaccctttctatccccaaatctctgtctctgtcctagaccccttctgctgagatggagtctctcataactactggcttatcgaatatcacactcagagatatcaccaactctccttttctttcgaacattcagaattttttgtacctcagtttattctctgctataattatgtactgtgccttattcaatttgtattcctggtagcacctagcagaattccttgcacagtgggtttacttagtatttgcccacatgaatatttttattttttaaaatgggctattatcctttgtatggggttttattttgttcccctactatcctgaaaaatacccacaaactttttttctaaatctaagaatagtttctaacatggtttttgtggtcaggggggaacaaaaccccttaatattaatggacatacatgttaatagcatttctaaatacatttgggcatgtgtattagggcctatatgttttctctgagaataaggacacacagcctagtgagttttggactcgaatcctattatatgggaattttctttctttctttctttctttttttttttttgaaaaaaaggggcctcttggacccccggggtgggggcccaggggcgcggtcgggtacacggggaccctaaccccggggggtggggggtatccgcggccggccccctaatacgcggggataaggggcggcctccccccgggatgaaacgtccgcacgacacacggtgcccaagaagaacggcttgtggaaagggccccttcgaatacgctgggaaccgggagcgtcactttctcgagcaccaataaaataaagcgttctccgcgcctggcggccctctttcgacctgtggcgagtccgggcgtggtgagccggggcacacgccagcataggacgctgttgagcgctccacgcgccccggctggaaaaaaccaacggaggggggagcccagggcgcacggggcagggagtgcgggagcccgaggcgacgccggcccggagccacgcgggcgctgc

SEQ ID NO: 81336 - DNA, 419 bp, Homo sapiens
  sig_peptide (114)...(249): this location contains the signal peptide sequence, MMGIRCPGPAWCLSWMLCRWGRPCWLRAGAQARAVGWLSLHKLVH, Run with SignalP
  misc_feature (124)...(243): similar to gi3599678 in the genepept database release 114, Run with FASTXY 3.3t00, default parameters
tttcgtccagtttatatttcactttagaaagtaattgtcacagtgcgaagtttcttcccctgaaaaagcgatataaaaaggtccatcgtggccagtgcttttggggacttgagatgatgggtatccggtgcccgggccctgcgtggtgcctcagctggatgctctgcaggtgggggaggccatgttggctgagggcaggggctcaggcaagggcagtggggtggctgagcctgcacaagttggtgcacccctgtctgggtctttttcttaaaactgcaagtccagccttatctctgagacctcctgaggctggaacctgccatcagacaggcttacagttctagccctggtaactgcgatgatgcggatgcctctgtgactggcagagcaaagggaggagcgacagggcagtggtgact

SEQ ID NO: 81337 - DNA, 818 bp, Homo sapiens
  misc_feature (1)...(818): n = a,t,c or g
  sig_peptide (66)...(201): this location contains the signal peptide sequence, MNNYFLACFLVSFCAHLLFSSLFSAFLWEFGISCFRNRHCLNPSA, Run with SignalP
  misc_feature (348)...(235): similar to gi854727 in the genepept database release 114, Run with FASTXY 3.3t00, default parameters
tttactgctatacttccaatatacaatgcttggaccatagtagaagctcaacaaatacttattgaatgaataattattttcttgcatgttttttagtttccttctgtgcacacctgctgttttcatcactgttttcagcttttctttgggagtttgggatctcttgctttagaaatagacattgcctgaatcccagtgcccaccactttctgaggcttatgagccaaccccctacccttggtaatattgggccccactaagcactttctctttcttgagctctacctcccttgacctctttgtgtgtgtgtgtgtgtgtgtgtgtgtgtgtgtgtgtgtgtatgtgagagananagaaaaaaaggatatgtaaaatttttgttacttgggaatttggataaaaaaatattttttgtactttttatttgtgaagagtttttaacacaagcgcccccttaaaggcgctttttttttaaaaaaaaagatgttcgggccaaaaggaaatgttaggtttcaaacctgggcccaggagggccttcacaaaaaacatgggttggccctcaactgagaggggggggataatttaaaacttacgctaaaggcctcgtgggaaaggatattcgtgccggcaatgaatatcggtgggaggcaccctagtctcggaagctattgccgatacgaaaaaggattcgtgaagcctaaaccgctggagaattactccctccctagaggtcgagtcaaatcgttgtgtccttggcaaaagcgatcttaacccgctacccatttcttatatatttagtcttactctggcctggccg

SEQ ID NO: 81338 - DNA, 867 bp, Homo sapiens
  sig_peptide (154)...(289): this location contains the signal peptide sequence, MCQLLSLASFITLKVCFPRFDSLRNNVETFREEYYEWVLGLLFQP, Run with SignalP
  misc_feature (221)...(332): similar to gi4567011 in the genepept database release 114, Run with FASTXY 3.3t00, default parameters
gggaaggttcttttgctttgaatttgttcagttgcagattctctcactatcctcttaaatctatcctcacccctacctcccttgcagccaataatttattacttaccgagttcatcctttaggaaaatatagtgttcattcgtggagttattcatgtgtcagcttttaagtttggcttcatttattactctgaaagtctgttttccaagatttgattcacttagaaataatgttgaaacttttcgtgaggaatattatgagtgggttttaggtttacttttccagccagatcttctggcttttgggacagtggaatgttgcctgtttgttttataagaatatacagtaagattaaccactaactggcctatgttaactaattcaagatacataattcacttcaattaaaaattttctttccaaaactatttagaattttgtgttacctttagaaacattcttgcttacggatcatttaaaaatagctataactgttgtagtgatccaaatatcaggataaaaatgagctaataaagtagataaaaatactgcgtggataactctaagaaattttatatagctctccaaggaagatctgtttcccaatcaacagaaaagtaagatggaagagggaaattttgcctggaagcctggaatttaaactgaagcttccagagagctcttacttgggagacttttttgaaaacatctttcctatatcgtcacgaaagaagaaacttggttaggccaagcacgctatggctttttcttgctaaatttagcgcgggcaaacgaccctggaaacaccatacattaactcttgtaacattgggagggaaccctcataccaatggtcgacccccactc

SEQ ID NO: 81339 - DNA, 651 bp, Homo sapiens
  sig_peptide (238)...(373): this location contains the signal peptide sequence, MNHPGSFLPFTLLVLASVIFPPRTKSTSLPILGPQPFCEPFLLIA, Run with SignalP
  misc_feature (351)...(39): similar to gi3257593 in the genepept database release 114, Run with FASTXY 3.3t00, default parameters
ctactttcatggcacttatattctggaagagggtttttttctgcctaaaactcctgactgaaaccagaaaggaaagataccctccctcaccctgtccccagatgcgacaagcctccttgttcatccacatggcgggcatccagcacctgctctgttctcggttttgagcgaggctccataaacgtgacagtcccccttctgtctccagtggagaggagctcagggcctgtctgtcccatgaaccaccctggctcattcctacccttcaccttgctagttcttgcctctgttatcttcccaccccgaactaagtccacatccctccccatcctgggcccccaacctttctgtgagcctttcttgctcattgcagcccctctgggcataattcttgcagtgtgcagcccctctgggcataattcttgcagtgccatctgcaagtgtcacccagaggacagcgtggcatatagtggcgctgcagaagggtggaagtaaaggggctttcctcagcaagccctgtggtctatgccccttgctaggtgctataggaccaggggagagccttcatcataggaccctgctagttaaatacttgcaggttttcttagagcaccctaattgggggcccagctcccttttctaggatccccg

SEQ ID NO: 81340 - DNA, 735 bp, Homo sapiens
  sig_peptide (381)...(246): this location contains the signal peptide sequence, MCLPLQLSSLFLCVCWAGAVEAAGRSGQGTGRGIQQIWDHNLAML, Run with SignalP
  misc_feature (108)...(719): similar to gi1619795 in the genepept database release 114, Run with FASTXY 3.3t00, default parameters
atactatcatttacatacatatttagtggtttgttcaaagaaatggtatcattatggtctaagaaacacaatttgggaaaggtttttcccaaaaggggtttagtttttcacatatctcaaagggcatatgttttaattcacttgattctcccagcaacagcatgaactattagcctcattttgtggattaggaaactgtagtttaaaaaggtaacttagctgtggtcacaaagctagtaagtagcatagccaggttatggtcccagatctgttggattccacggcctgtgccttgaccacttctcccagctgcttccactgctccagcccaacacacacataaaaaaagagatgaaagttgaagcggtagacacatggtcttcgggggctgccatgcacattgattagaccaggttgagaacaacaaatggattgagagcatgtcaatcgttgccaaccttttttaactcacaaaactcagagtaattcgggtttgacatgtaaaactaaactgacgcgatgctcatatcattcttcagcgatagaatggaaaaaacacttttgtaacgtgacttgattacgcctttgatatgaagaggaggtagagagggccctaggacccatcacaccctctgctgtgtaaattggagaatttaagaaagctgggaacccctggcaagaaggaaaaaccccttggcccttgacctccccctacccccgggtgggaaagaggtt

SEQ ID NO: 81341 - DNA, 741 bp, Homo sapiens
  sig_peptide (132)...(267): this location contains the signal peptide sequence, MGVPSLFFLVLCQIYDHLFWRVACPALVKDPQKKVWDQSSGTFCE, Run with SignalP
  misc_feature (11)...(122): similar to gi1710995 in the genepept database release 114, Run with FASTXY 3.3t00, default parameters
tggaggtctttacttttgtattaacaatgtaagctgtccctgtttttttccacggtgattttgtgaggggacttatttagaagcttggcatcctgggcatttcagtccagacggtgccagtccagggacagatgggcgtacccagccttttctttcttgtcctttgtcaaatttatgaccatcttttttggagggtagcttgcccagctcttgttaaagatccccagaaaaaggtctgggatcaatcatctggtacattctgtgaatttaagtcaatggttcctttctctcaggaagtattttccttagaacttttctctcactgagtagtgagaagtttgctctttgaaagggaattttaaaccacagcagcagatacatagacctttctttgcagcacacttctgcattgctgcggaggctgtgctgacccagagggatcggctgagcagacaagtggcaggatacctgtctgtttacctccctgcacctgctcaggcccactgagtcccaagtcagacttcaggggtaagataaacaagatgggattttatacaatgcgtctttttggtcaaatttcggggaaaaacctatactttttatatcataagtggcctcaggctcccccaacccttgggggagtaataaaataaggggggattttaattcccaaaaatctttggggagaaaaaaaatttgaaggggtttaaaacacaaaaaaaaaaaaccctttctttgcct

SEQ ID NO: 81342 - DNA, 737 bp, Homo sapiens
  misc_feature (1)...(737): n = a,t,c or g
  sig_peptide (97)...(232): this location contains the signal peptide sequence, MHFLIFILKAVLGKGCSGLFGVGLRAWPSELIFQKSSLCGSCWKA, Run with SignalP
  misc_feature (103)...(285): similar to gi1685126 in the genepept database release 114, Run with FASTXY 3.3t00, default parameters
taagtataattattcttaacagctagacagcattgaataaatacttgctttctttcatatcaaagcaagttgggatcagcaatttatgaaatttggatgcattttctaatttttattcttaaagcagtcttaggaaaagggtgtagtggtttgtttggagtggggctaagggcttggccatctgaacttatctttcaaaaatcatccttgtgtggctcttgttggaaggctggcctaggcctccctttgagatagctgtaagagctggtaagagttcttcttctagaacttacatgcctgaagcatgtggtctaaatttgacccatctgatgcttctgccaggaatttggcttcaggaccaaccatcccaaagaagcaggatgggtggaacgttattttggcggcagcatttcatgtccagtgtgcgggagcagaggtgaccctgacaatcctccaaccatgcaatatcttggtttgatgtgtgatctcagaccccatctttcgtgggttctttgtgagtccaaaaatggagngtcagactgtcaaatgattctgggagcttccttcaccttcaacaaagcgaattctggagctttggtttggaattgctaacggccggttgttgaaacggctagttttttttttaccggaatcgggggtccccgggtcacaaactacccaattttccaaaaagggggtgtgtaaaaaaaatttcctttccccttttgtttccacca

SEQ ID NO: 81343 - DNA, 740 bp, Homo sapiens
  sig_peptide (243)...(378): this location contains the signal peptide sequence, MKARRYTWFLFHCCNLVASCITSGKILNFIPSLSPKIRILHRTKK, Run with SignalP
  misc_feature (634)...(245): similar to gi954811 in the genepept database release 114, Run with FASTXY 3.3t00, default parameters
gaaataaatcctgcattttcacatttcattccccccctactcacctcccacttcactatatgcatttaggcagaaagctgcagactgggtgaagcaagttatccagattcctgtgaagaaattaaaaggctcttatttttaagtgtcttttgctgccactttttaaccctgacaattattaacttcttcaaaaataactatttttgacatgccagtgagagacataaaggtggtggttaacaatgaaggctcgaagatatacttggtttctattccactgctgcaacttagtagctagctgtataacctctggcaaaatacttaactttataccctcactttctcctaaaataaggatacttcatagaactaagaagaaattatcttcagagagtctaaatcagctcctggcacatagtagagcacttttatgaggggggaacaacatattcgtctagccaatccttatcgagcagctgttgtatgcagatgacatgctgatagctgagagtacaagaatggtgtccgccatttccttgtcccggagaacttaatctgctgggatagacaagtaagaccatactcattaatagcaccatgaaaagttcttggtaatggaaaactaccaaggtccaacggggggaaggaacgctttctatacatttgcacaccccggaaaggggggtgggtccctattggtccatggtgaaaccagggccctgggataaacgggttcccca

SEQ ID NO: 81344 - DNA, 728 bp, Homo sapiens
  misc_feature (1)...(728): n = a,t,c or g
  sig_peptide (159)...(294): this location contains the signal peptide sequence, MGPSAWFIFFKAMIKPVICLEHDNMQNPCVLRTVFMSSFWFSVQQ, Run with SignalP
  misc_feature (130)...(195): similar to gi2769736 in the genepept database release 114, Run with FASTXY 3.3t00, default parameters
ggcactaatttattttcatgtccaggtctagacagttcctaggtaagggagacatcattccaaattaccctttcagtaggggagtcctgctgccagttggattaaggcatgttacacactccctgaccatttgttttcacccacgagtgacttgacaaatgggtccttcagcttggttcattttttttaaggccatgataaagccagtgatttgtcttgagcacgataacatgcagaacccatgtgttctcagaactgtgttcatgtcatcattttggtttagtgttcagcagcttggaataatcatgccagacttgttaatgaagagaatctgaagatcatgatttattcattcaatcagtaattacttattgaccccctgttggagacaagaaatacttattttgaaggatcacgactcatggatatcgtacttatacgctaagagcttatcacacgctgtacattcattgtgtaatatagtcccctcaaggaccctacgacgtgggaaattctagtcatttaataagaactctgatcagcggtggcaaaagatgcggtatttgagatatccaggaggggaccggggacgttctgttgtggtaaggcttcccccccccgaaagcccaagctttgggtggatacagccttggcctttgggggnnccccttttaaaaaaaaattaacctttttaaatcngagaaaaagnnntttctcccttaaaatta

SEQ ID NO: 81345 - DNA, 733 bp, Homo sapiens
  misc_feature (1)...(733): n = a,t,c or g
  sig_peptide (554)...(689): this location contains the signal peptide sequence, MGIGCWRNPLVLLMALACQASWGLSKGGRVLPNLCPKKMFXTLFF, Run with SignalP
  misc_feature (67)...(287): similar to gi2323281 in the genepept database release 114, Run with FASTXY 3.3t00, default parameters
cagcctgatgggggtatcccaggtgtctggggcatgctgagacggcacaggtctgtgtggcttcccggattactcggaatccttcattatctattctacagcaagtggccctcggcagctcaggctcagggaatttcaaatgtatcacctccaccggctggacaagtcctctcaagacaggctctggggccaagggaggatgttgtgactggtgctagcaacattgtcatgatggaaggtggcctggcttccgggacaggagggacctgacaggccaagggtgaagtgtgggttcagagtcacagaagaatcacgaagaagacattcttatgcacctgacacctgacttgggagcaggttctttgcctacatccagttagtctctaccacaattcaagtggagtctttctccccattctcatattacaggcaggccatcccccaggaaagcctatgttggtgagggttatgatgggagaatgagtgaactgcagcctggcaccaccacaccctggaaggtgcagttgggaagaaagtttctgaggctgtagacatggggatcggatgctggagaaaccccctggtgctgctgatggccctggcctgtcaagcaagctggggactttcaaagggggggagggtcctcccaaacctttgcccaaaaaaaatgttttnnaccttatttttttttaactcccaaaggggccgcggcccccctttttgggcggggggg

SEQ ID NO: 81346 - DNA, 761 bp, Homo sapiens
  sig_peptide (702)...(567): this location contains the signal peptide sequence, MCLRTMVMLVVKTPLVTSSRLGGHRGSRPAAWRVGTMLPLEAACP, Run with SignalP
  misc_feature (353)...(538): similar to gi4756708 in the genepept database release 114, Run with FASTXY 3.3t00, default parameters
cttccatagggagcgagaatgggcatgaaaagacctggagctcacttctggagccatcagttgtctgtcatatgacccagggtccctctgtctcagttaacccttctgaacaatgggataaaaccatctaccttttctcacagagctacacactgtaaggtgctatgcaaatagatgaaagtattatgcctacttccaacagaaacaagtcagatgctaaaggaacagaagagtcacttgctctatccatgcatgatactgagcacctctcatgggaacatttactcttcagagtaatcccggggattatctccatttactgacatggcagctgagggcatagaggtgaacagtcgctgtgcccccaggacctgcagctaggcagcagtggggccaggactcagctgtgctactgacgccagggccaaatccattagctccccatcaggcctctctgcctcctgataccccttcaaatcacacagaaggtgccctcattaaaccctgaaggcctgccccactcccccaggtggcagggaaaaaagaggagcttaagacaggcatggggcaagcagcctccaagggcagcattgtccccactctccaggctgctggcctactccctctgtggcctcccaacctagaagatgtgaccagtggtgttttaactacaagcatcaccatagttctcagacacataagcacagatacacacacacacagaggctgttatgggttgaattgtacctccattaaaaaat

SEQ ID NO: 81347 - DNA, 742 bp, Homo sapiens
  misc_feature (1)...(742): n = a,t,c or g
  sig_peptide (184)...(319): this location contains the signal peptide sequence, MTSIKDLKIVLLVLQTVATTIPLHLPLPLPYFHFPPWSPGKVESS, Run with SignalP
  misc_feature (243)...(373): similar to gi886082 in the genepept database release 114, Run with FASTXY 3.3t00, default parameters
attatgttttaactgttgccaaccacttgagctaaatgagggtaattttgagagggtcttcaggttcagtaggtcagcaggatgaacttaggcaatacagtggatcttcctgggatcaaagtctgatatgctttagaggtctgctatcatgagaataggaaaggtagctttagggtagggtagatgacatctattaaagatctaaaaattgtattgttagtcctacaaactgttgccactacaatcccacttcatctcccacttccccttccgtacttccacttccctccatggtcaccaggcaaagttgagagtagtactcaccacccaactcttctcaggtctatgggaagcccttcttctcaccattctaatgactgcactccaggttttttcactgaaggggcaatacacctttaatgtgagacaaacctggcttccaatcttgccttttgcctaacatgttaagggcccttggacatgctgagggtttactgcctgtgtaatccagttttcttctctgcgaaatggtgatgagaaaaggcactctgcaaagctctgttttttcttttttctggttaactctacaaaaaaaattctttggtggagtaaaaaatggttttttgggcaagggggaaaaaaaaataaccttccttttactgctttcttaaaaccgggaggacacggaagttnnaaatttccccgggggaggggcccagggccctctttttggagggggccc

SEQ ID NO: 81348 - DNA, 744 bp, Homo sapiens
  sig_peptide (233)...(368): this location contains the signal peptide sequence, MRQIAVFQRFMFPFLLPWLSCIFSSSQNSIYYVSTFIKCLALKSI, Run with SignalP
  misc_feature (182)...(392): similar to gi547590 in the genepept database release 114, Run with FASTXY 3.3t00, default parameters
ggctattacatagaaattttgtagaatctaataagataaactagaaacatgacatgttcagctgttttctctacgaataaacaaattggcgctaaaactggtcttgctatctagatttctagttatatctcagttatcttttccccacatgggatgtgaaagtaatgttatatgctttcttatgtacgtacttttgacttaggtcagtctccacactgcattaaaattactaatgagacaaattgcagttttccagaggttcatgtttccatttctccttccttggctttcctgcatttttagctccagtcaaaattctatttattatgtatcaacttttataaaatgcttggctttgaaaagtataattaaaagacaaagatctgaaattaatagcgggtttttagctatctatcatgcattaagaaatcaagtgaccaggtgtggtggcctgtaatcctatcactttgggaggctgaagtgggaggaccacttgagctcaggagttcaagaccagcctgggcaacatagcaagaccctgtctctactaaaaataaaaaaaattgaccaggtggggtggtgcatgcctgtagttccagctacttgggaacgcctaggggggaaagaatggttgggcccccgagggggggaaatacacagaggctttggggggcccccaccggccattataactgggggggaaaaggggggcccccccccccttcctttttttttttttattaa

SEQ ID NO: 81349 - DNA, 736 bp, Homo sapiens
  sig_peptide (318)...(453): this location contains the signal peptide sequence, MSGQAIQSTWLPVSVLLLFAFKSTSYYITALTKKHSLKARKVRVR, Run with SignalP
  misc_feature (220)...(87): similar to gi6002617 in the genepept database release 114, Run with FASTXY 3.3t00, default parameters
cccctttcccactcacctgagattcctttgaaggctgtgtccttaccactgccacagggttgactcatagtaaatgctcattaccaatttttgaataaataaatgagaaagtctgagtaactcattcaaaatctatcttttccacagttgtgtagctgggagttagaacagtgcctggcatatacagacccttaataaacattggaatgaagtagtgaatgaatggacgtcaatcagctgattacacagtttatcaggaagtcacatcaagcttttctgatttcaaacacagtgttacattagccggggccattgtcatgtctggccaggcaattcaaagcacctggcttcctgttagtgtcttgctactgtttgcttttaaaagtacctcttattatataacagctctaactaaaaagcattcgctgaaagctcggaaagtgagggtgagacatggatctgttactcaccatgtaaatttgatcatatccctttacctttctgggccttaatttctccattgttgaaataattatagttgagttaaatgtgagattttctgtgagcaccgccctatggttttggtttggggcccaccccgaaatcatttttgaattgggatccccacgggggaagggggaaaaaattggggggaaccgattggggttgggggggaaattcccccctgcctgggttttatgggaaaggggggctccccgggaaaaatcaagggttt

SEQ ID NO: 81350 - DNA, 753 bp, Homo sapiens
  sig_peptide (376)...(511): this location contains the signal peptide sequence, MIDLFAHTLLVSWKRAKQKTVQMRATLWALTRNAILLFSKIAALF, Run with SignalP
  misc_feature (283)...(178): similar to gi1617191 in the genepept database release 114, Run with FASTXY 3.3t00, default parameters
aatgaacctcagaaattctccctctgacttccctctttcaaagatgaggaaactgagtacctgtggtaaatcacctgtcaaattagaatgaggttaagccaggactcatgttttgggttttcacttccagatctcgggtgctttcctttttgctaagttctcaacatcaaactagtcaagtctttcatgcctcattcattcatttttcaacaaatagagtaggaacaaaataaccatgttttatcttcatgaaactaacggcatagtgactaccaactttgacaagaccgttccattttgactctgtatttttagtgctgttatttttgcttgctagacaggacggttgacctattatggacaccagagctgacaatgattgatctgtttgctcacacactgctggtctcatggaagcgtgccaagcagaagactgttcaaatgagagcgaccctttgggccctgacaaggaatgctattttattattttcaaagattgctgcactttttaggctcttatctaaggtaaggaggaagtcgctgatatctctgttaaaaggcacggagactggatcccatggtatgcgggacttgcttggagaatacagaaggctaaaccatcataaccgggaattagcagccccccccctaaaatcgtgggcctccccaagatctttccggaggatttttccaagaagggggggctttagaaagagaggaaaaacgggggataaaaaaccgcagggggggccg

SEQ ID NO: 81351 - DNA, 738 bp, Homo sapiens
  sig_peptide (108)...(243): this location contains the signal peptide sequence, MVLEVTMMLMTGLLGMELVASGATDGPTGMRATNRNFDSIWQNRI, Run with SignalP
  misc_feature (31)...(65): similar to gi836667 in the genepept database release 114, Run with FASTXY 3.3t00, default parameters
ttttttaccaccgtctggctcctcagagtgtgtgagctccctagtaggtgcagtagtaatagtaggcaccctttgctgttattgttatgaaaactgtcagctccaggatggtgctggaggtgacgatgatgttgatgacagggttgttaggaatggagttagtggcaagtggagctacagatgggcccacgggtatgagagctactaacaggaactttgactcaatttggcaaaatcgtatttcaaatctaaattctctttccaccagctccttttgctataagggaaagccaagtggaaacgtagaggcatgtgcacccagatctcctgaaaagggcaataggagagggtagcagggaggagacaatcctctactgagctgaactggaaacgcctgattgtcatttcttccctgctttgccactgacgcccgcagcagctgatcaggaaggtatcagatgccttcactagctgtcactaacacctgcctcctgaatcctgatcggggagatggtgtcatcgggccctccacataaaatatttagtggcacttgcttcccaaagaggcaagcgtggcctctccttggcatcaggaacgctcccaagtactttggctggaaaactctttttgttaaggcgaaaaccctggaaaaccataacctgtttgggaactggggttcggaaaaggggaaattgtgtgaacagagacctaaggcctttttgggcttttgagaaaag

SEQ ID NO: 81352 - DNA, 749 bp, Homo sapiens
  sig_peptide (176)...(311): this location contains the signal peptide sequence, MNWKVRRELYLLLLIANNNLQSASATCCHSSLPAKYKSTHALLTC, Run with SignalP
  misc_feature (110)...(268): similar to gi58945 in the genepept database release 114, Run with FASTXY 3.3t00, default parameters
actacatgaattacaaaacagaagaacccaacaggttgattatcaagatctaaacaactggcattaaaaaggaatctattaattgctatcatgaaccttaaagatattcattcagaacccaacctgatactttaaattgctgtgcagtttaattattttctattagcatagagaaatgaattggaaggtaagaagggagctatatctcctattgttaattgcaaataataatctacagtctgcttctgctacctgttgtcattcttccctaccagctaaatataaaagcacccatgcattgctcacctgcataaagagaagaaggaaagtctgatttgttattacaaagggatttatttcaaaaaggaaagtgaagggatgacagataagtgcacttaaaccttttgagcattacagaaagcttgtagaattcgggtaactgaatgtaatctctgtattctccgttaacgatagagcctcttggacagactgaagttgtgcctggaaccataatactctctttatgccactgtcttccttcttagcaggccgaaaggcacacactcatggctgattcttctgctctccacctggtgggcccccttgggaagccaaagctttttggagtctgaagaaacccttttggggggttggacaaaggggtggcccacttttgcagggggattggctgccttggccaagcagggggacccccccaaaacctttttaaccccaaaattggggttggg

SEQ ID NO: 81353 - DNA, 391 bp, Homo sapiens
  misc_feature (1)...(391): n = a,t,c or g
  sig_peptide (91)...(226): this location contains the signal peptide sequence, MPLRLAFFMFWLPGMKTTPLSEIFLDSLFVSYLRQCKLNSSSVLL, Run with SignalP
  misc_feature (278)...(85): similar to gi1401244 in the genepept database release 114, Run with FASTXY 3.3t00, default parameters
ttcgccattcgtgctcctaagccccgtgatgctcccacgctatccctcctgttgtgttcctaacaggcaccttctctcccatgcacctccatgcctctgagacttgcattttttatgttctggctgcctggaatgaagaccacccctcttagtgaaatcttccttgattccctttttgtctcctacctgaggcagtgtaagctgaactcctcctcagtgctcctctagagctcctgtgtctgtccctgtttagccctcttcccctgtcctgtgttctgcactagaccatgaaccactcaaaggcagcctctgtgttctaatcggctgaccagcagactgaaggaatcagctgccacctactcagaaatccttaccaagcacagtgcactgn

SEQ ID NO: 81354 - DNA, 412 bp, Homo sapiens
  misc_feature (1)...(412): n = a,t,c or g
  sig_peptide (273)...(408): this location contains the signal peptide sequence, MNRSTAFIHFIILIKTLSSLGGLETDFFWSSPSSPSVAFGIPFAG, Run with SignalP
  misc_feature (92)...(52): similar to gi3322315 in the genepept database release 114, Run with FASTXY 3.3t00, default parameters
aatacagggtggctgatgagtacgaggtcatttatttttagaatctgggatttccaacaggtagcagctataagatggcagtgcttgggcctcacagaagagagcatatttcctgataaaaaattttaaaggctaatcgagtaacccattaatttgttcagcattgttcattttataagtgattataaagcaataactatttgctagggcctgggataagactgggtttcagagagataaatccttacgtgacttgctctataatgaaggtgatgaacagatcaacagcatttatacatttcatcattctcattaagacactttcttcacttggtggcctggaaactgatttcttttggtcttccccttcctcaccatctgttgcttttggaataccctttgctggagcttn

SEQ ID NO: 81355 - DNA, 419 bp, Homo sapiens
  sig_peptide (310)...(175): this location contains the signal peptide sequence, MFAKMYQVTGCVLLCMTPETTGDYCPCCLLSRPCSGAGRAGTQRN, Run with SignalP
  misc_feature (399)...(217): similar to gi1213616 in the genepept database release 114, Run with FASTXY 3.3t00, default parameters
aatacattccctgcctcttggtgcctggacaccttctttttccctggggactcaacggaagtggccttcctccaaaatgcttacctcacactccctggactcctgtactgagtctcatctcatcccaggatgctctcaaataacctccatcgagtcctggactacacagtactgctattacgctgtgttcctgccctgcccgctcctgagcagggccttgacaacagacaacagggacaataatcacctgttgtctcaggggtcatgcacagcagaacacagcctgtcacttggtacattttagcaaacatctagggaaccgagttaaacacaagagacggttctgagagaaacagagactccaggagatacaggcaagatgccacaagatatacaaagttcccaaacagcccacaggt

SEQ ID NO: 81356 - DNA, 383 bp, Homo sapiens
  sig_peptide (184)...(319): this location contains the signal peptide sequence, MLTPGLLKVFYCRYFYLMVQVFSRSQCTFKNCNNSILRSYPKSGT, Run with SignalP
  misc_feature (146)...(54): similar to gi521077 in the genepept database release 114, Run with FASTXY 3.3t00, default parameters
aagccagtcaattgctcaagacagttttttgttgcacacagaagctaaaagcttctgtagtttctctctaatgtgactatgaaatggtaatagaacggctaggattctgagcggttaaattcgtactagtatagcccaagaatccttcaaagaaaagcatctttaaaaaagggattgggggatatgcttacccctgggctcttgaaagttttctactgtcgatatttctatttgatggtgcaagtattctccagaagtcagtgtacttttaaaaactgtaacaactctatactgcgtagttatccaaagagtggtacaaaatgtacggtaaatgagattgcagtttactcacagctttcagggcctattccccagttttagtg

SEQ ID NO: 81357 - DNA, 449 bp, Homo sapiens
  sig_peptide (183)...(318): this location contains the signal peptide sequence, MFHNYLYVLCLESLCLCLASLHVPDLGLRMANGRRSHCVSKLGHL, Run with SignalP
  misc_feature (315)...(127): similar to gi2078380 in the genepept database release 114, Run with FASTXY 3.3t00, default parameters
tttcaatcgccgttcgatccacgcgtgcgaattctataaaactgaggttttgtatattttatatataagatattctgtatcaaattttttaaaaaatgttttttcaactagttgatttcatcacaaggctcaaaccctacaaattctgaagttttatttatgttggcatttctgattctgttatgttccacaattatttgtatgttctctgtctagaaagtctatgtctatgtctagcctcactgcatgttcctgacttgggtttgaggatggccaatggaagaaggagtcattgtgtctctaaattggggcatttaaggactgcagctgtcagtttctttcctgatggctttaccctttgtttgatcactcaagtgttaatgcagtgctgctgctggcctgatttcaccattgcttcccctctaccccctctagagccaaaaaaaaaa

SEQ ID NO: 81358 - DNA, 1045 bp, Homo sapiens
  misc_feature (1)...(1045): n = a,t,c or g
  sig_peptide (163)...(28): this location contains the signal peptide sequence, MVNSVLVFLGIWVIGFLVAEKINAFLHLIVDSKRMYMRCYFFVAV, Run with SignalP
  misc_feature (356)...(286): similar to gi475794 in the genepept database release 114, Run with FASTXY 3.3t00, default parameters
cccacgcgtccgcccacgcgttttgttagacggccacaaagaagtagcacctcatatacattctcttgctatctacaataaggtgaaggaaggcatttatcttctctgcaaccagaaaacctataacccaaatgcccaggaacacaagaacactgttcaccattctgctgtgcttattagcagaagatatatcagctcacaaaatcccctttgaaacagaaactaaaataatgctcaatgatcattctactcccacgggggaggagggagaggagcataaatcaggacaagagctgggtttagaacttggatcacgtgtggcttttctccatgatcacaaaccccagcttcctataattaataattggatgtattaagtgttttatggagcagtccagccagagagcaactataaaatggaaacatggaccagcttggtaaagggaaagatgaaattgtagaattaatttgtttgttcgttcattgagtatttcataacaataaacttattgtatttataaagggaaaaacctctgggtgtaatttggctgcctggttgtttatatcctacagtgcagtttcagtatgtttcatgttagtgtgcctgttctaaaatgttttacttcattatcgaaagacgtttttaatgccatgaaacttcaagccagaaaaatcttagaaaattaacgaaatagggagtagaaagaaatggagatagcattanactaaatacaaagaaaaaatttgaaacaaatttttttatttgacaaaaaatacccgggtgtggtggcaggcacctgtattccaactacttcagaagctgaggcgaagaatcgcttgacctgggaggggaagcagtgaactgaatggtcccctgaccacaccacccggggacagagagactctttccaaaaaaaaaaggggggcgtctggatacgaccaccaccggcgcgccgtatcctctttagggccaaagctcatgggcgtttaaaaggctaagaaacattccactcgcgacggcggcgcaccgccacacactttcacg

SEQ ID NO: 81359 - DNA, 2689 bp, Homo sapiens
  sig_peptide (348)...(483): this location contains the signal peptide sequence, MEPLCPLLLVGFSLPLARALRGNETTADSNETTTTSGPPDPGASQ, Run with SignalP
  misc_feature (31)...(134): similar to gi2318028 in the genepept database release 114, Run with FASTXY 3.3t00, default parameters
tttcttactgactgattatgaacttaaaacaaattcactctgctgctgggaattatacatttatttttaagcatttatttcaactcgagatgagcggtctctcctgtaaatttctccctgctggatctttgctctggtttctggtgacatagtgtgagtgccggcagccgcgagcctcagaaggaaaattacaaagggaatactcagtaaatgatgtattgcctttcgcatcagtagcctgcttggaaatgttcaaattatcagcccaggagactccagtgctgtggacatgggtctgaacgaattgatcacctaggggctactgagaacgcggtgctctgtccaccatggagcccttgtgtccactcctgctggtgggttttagcttgccgctcgccagggctctcaggggcaacgagaccactgccgacagcaacgagacaaccacgacctcaggccctccggacccgggcgcctcccagccgctgctggcctggctgctactgccgctgctgctcctcctcctcgtgctccttctcgccgcctacttcttcaggttcaggaagcagaggaaagctgtggtcagcaccagcgacaagaagatgcccaacggaatcttggaggagcaagagcagcaaagggtgatgctgctcagcaggtcaccctcagggcccaagaagtattttcccatccccgtggagcacctggaggaggagatccgtatcagatccgccgacgactgcaagcagtttcgggaggagttcaactcattgccatctggacacatacaaggaacttttgaactggcaaataaagaagaaaacagagaaaaaaacagatatcccaacatccttcccaatgaccattctagggtgattctgagccaactggatggaattccctgttcagactacatcaatgcttcctacatagatggttacaaagagaagaataaattcatagcagctcaaggtcccaaacaggaaacggttaacgacttctggagaatggtctgggagcaaaagtctgcgaccatcgtcatgttaacaaacttgaaagaaaggaaagaggaaaagtgccatcagtactggcccgaccaaggctgctggacctatggaaacatccgggtgtgcgtggaggactgcgtggttttggtcgactacaccatccggaagttctgcatacagccacagctccccgacggctgcaaagcccccaggctggtctcacagctgcacttcaccagctggcccgacttcggagtgccttttacccccattgggatgctgaagttcctcaagaaagtaaagacgctcaaccccgtgcacgctgggcccatcgtggtccactgtagcgcgggcgtgggccggacgggcaccttcattgtgatcgatgccatgatggccatgatgcacgcggagcagaaggtggatgtgtttgaatttgtgtctcgaatccgtaatcagcgccctcagatggttcaaacggatatgcagtacacgttcatctaccaagccttactcgagtactacctctacggggacacagagctggacgtgtcctccctggagaagcacctgcagaccatgcacggcaccaccacccacttcgacaagatcgggctggaggaggagttcaggaaattgacaaatgtccggatcatgaaggagaacatgaggacgggcaacttgccggcaaacatgaagaaggccagggtcatccagatcatcccgtatgacttcaaccgagtgatcctttccatgaaaaggggtcaagaatacacagactacatcaacgcatccttcatagacggctaccgacagaaggactatttcatcgccacccaggggccactggcacacacggttgaggacttctggaggatgatctgggaatggaaatcccacactatcgtgatgctgacggaggtgcaggagagagagcaggataaatgctaccagtattggccaaccgagggctcagttactcatggagaaataacgattgagataaagaatgataccctttcagaagccatcagtatacgagactttctggtcactctcaatcagccccaggcccgccaggaggagcaggtccgagtagtgcgccagtttcacttccacggctggcctgagatcgggattcccgccgagggcaaaggcatgattgacctcatcgcagccgtgcagaagcagcagcagcagacaggcaaccaccccatcaccgtgcactgcagtgccggagctgggcgaacaggtacattcatagccctcagcaacattttggagcgagtaaaagccgagggacttttagatgtatttcaagctgtgaagagtttacgacttcagagaccacatatggtgcaaaccctggaacagtatgaattctgctacaaagtggtacaagattttattgatatattttctgattatgctaatttcaaatgaagattcctgccttaaaatattttttaatttaatggaacaaaggagaagccactttccccaggacgcaagactctcccctccactgtccgggacagcgttcgccctttagcggggaggtcattacagcctcatggcctctaccaaggccccagatcacaggatctcctgggccttggagcacctcacgctgggggaatcaatccctgagggactcagaatcttctccgtgcaacctggaa

SEQ ID NO: 81360 - DNA, 763 bp, Homo sapiens
  sig_peptide (74)...(209): this location contains the signal peptide sequence, MVLKRACLNLRAAAFFWKKQDSAYFSLLGPYGLCCNYSALLFSCE, Run with SignalP
  misc_feature (306)...(140): similar to gi2634596 in the genepept database release 114, Run with FASTXY 3.3t00, default parameters
cccgaccggttcgttccacgcgtccgttgaattttggtggtgaattattagccagtaagtgctcttgtagtggatggtactaaaaagagcttgtctaaatttaagggcagcagcctttttctggaaaaagcaagatagtgcatattttagccttcttgggccatatggtctctgttgcaactactcagctctactattctcatgtgaaagcagccatagatgataggtaaacatgtacaggtagctgtattcttataaagcattattcataagaacaggcaatgggccaggtttggctttcaggctatagttagctgaaccttggtcagagccactgatttttagttttctggtgaatatgctccttcatgggaatttaatgagaggtatggaccctactccagaaaaataaatattcatgtgcagaatactatgaatactaagccttccatttcttttgtaattttactgcttaagacagggacttgctctggcgacccccctgcagtgcatacggaacgatctgggatcactacaacctttaccttgggttaacgcgaatctccttgactaaccctcccggggacgcgttactcgcaggactagcctccctaccaccgttcccgggcgcacgtcctcaagcaacccgcgcttgacggtctgataactgccctccctcccttacccacaaggggctccacgtcctccgccgtcaccgtccagttccgtggtctaacccctggccagcctacgccccccccgc

SEQ ID NO: 81361 - DNA, 386 bp, Homo sapiens
  sig_peptide (2)...(137): this location contains the signal peptide sequence, MEIVHKFWLTFTIINYILKACSMMSSCFFFFKNMAASVCSYSFSM, Run with SignalP
  misc_feature (114)...(1): similar to gi154898 in the genepept database release 114, Run with FASTXY 3.3t00, default parameters
catggagatagtccataaattctggctgactttcacgatcattaactatattttgaaggcttgcagcatgatgagtagctgcttttttttctttaagaacatggctgccagcgtatgttcatattcattttctatgcggcactgctgtttttgaaattctatgattcgatgtacactaacatgaacattctctattaaattttcctatcctgtgattgcgattttcaggagtttagactttagggattttgatctttagggatttcagcttttgggattatggcatttggcattgcatctttcaagattatgatcccagtatgtcgggatcatagatgactgtggggatcactgccacccagagagctggggcagtgtggatgttt

SEQ ID NO: 81362 - DNA, 1162 bp, Homo sapiens
  sig_peptide (200)...(335): this location contains the signal peptide sequence, MNLMRKLRRGVSRILLNDCLDGSLLKLLLLLLSFLCCRSVIVVLL, Run with SignalP
  misc_feature (358)...(521): similar to gi4105354 in the genepept database release 114, Run with FASTXY 3.3t00, default parameters
aacacaaatgatcttgagaccactttagtgtacttacatttagatgagtttgaaatctcaatggtgtctaattattgcagttaaattctagacatcagttctttaagtctcagaaaacgcccagtgaattggtaaacttagttcttttttttggaagtgctgccttttcacaccaaatccaagaagcctgtgatgtcttatgaaccttatgagaaaactccgaagaggtgtgagcaggattcttctgaatgactgtctggatggttcattactcaagttactgctgctgctattgtctttcctttgttgtcgatctgttattgttgtattattattgttgatgttgtcatggttaatctattttttaaaattgaaatgaagcagaagtaggccttgtgagaactgaaaggtctctttcatttttctcttcctgggattcattttttcaaaacacaatgctggaaaaaaaagatttgtttctgaaagacttcttatggggctattccataaactttttttcaaacaaggtttttgacctttggacccacccaccccggtaactacgaaaggttccctatggctggtagcatttgaagactaaggacttgtcaaatatatcaagaatatattatggaagggcagcactggcctgtgaaacactactataaggctaaaattctcgccaggaacaaccgaacctcctaaacacacctttggagggggaactaaagggtaggtaaataacaccctttgaagaaaaccatttccctgctgaagcttggatttaatatgggggcctgctttctttgtgaaagagtattttgggaggaattttctgtttaaaggcgggggggttgaaaataaggacgggaaaggggaacgcctgagggggcactcccaagggaatattacggggggagaaagacaaagggtgccaacttactgaactccttgaaaagccctcttcggttgggcaagaagggaccgtatttgatgagcctgtaagggccttttttaaagacccttggggactggatacatgcgagacgcctcggtcgcgctggtccgaatgatacggctgcgctgtattcgaatagaaccggcggagtatgttcgtcgggaacgcaccgtccgactcgagatgctttatactggacgggcg

SEQ ID NO: 81363 - DNA, 1181 bp, Homo sapiens
  sig_peptide (137)...(272): this location contains the signal peptide sequence, MSVCKYTVYGFFIFAFFYFTKDNIPYLKVSLQAFCGFQNISWNKY, Run with SignalP
  misc_feature (96)...(368): similar to gi4586208 in the genepept database release 114, Run with FASTXY 3.3t00, default parameters
actcccgttctgttcaacgcgtccggctcattatgaaagttaaaggaaaaaggaaaacacaagtcatctatggttctagtgcccagagtttatcatcaatcaggtatattcctgccaggtttgtttttgtttgtttatgagtgtttgtaagtatacagtttatggattttttatatttgcttttttttatttcacaaaagataatatcccatatttaaaagtgtctttgcaagcattttgtgggttccaaaatatttcatggaataaatatactcttttattttactattcccctttaaccattatataattgtctcaaatatttctgctattataattctgtgatgaacatctttgtgcactttagaaatgtttcctgagactagattttaaaaagtagaattactatctgaaaaagagatatttttagagttcccaatgcacattgctgaattgctttccaaaaatctttataaatttactctcagattagctaagcaatggattaaaatgccatttcattgcactcttgccagaactgagaaatgtatatatgcaggaattatatccatttaaatttaatatcccatgtctggttaatcctaaactgggcttctacactaagacaccatgaaggaagatgtgcttctattattcctggctttgtgctctgtcaaacccttctttagccttcacaacttgcactgaagaatatgatgctggaggatatggaagaccccagagatgatggatgatgatgatgatgatgatgatgacggatgaggccacctttctttttccaccgagagaagccagaaaccattttttttcctttgaccttggtaccagggggccatttggaggtcaggcgtattccgagatgaccccgttcaaaattagtgtgacctcgccccaccaaaattcacttgggatccgacgctcggccctgaaccatatttccgggtcctaagaacatgttggggcgcccttcttatgagaaaaatctccccttaaaactacagaaaccgttccttctaacgaacgctcgccgtaaatagtatctttgaacgaaactaactgcgggactcgtggatcgctggtcctgaatgggccgagggtgtgtatgctgtccccggtggcggttggtcgggccatacgacaccgccgcaaccaacactgct

SEQ ID NO: 81364 - DNA, 1125 bp, Homo sapiens
  sig_peptide (26)...(161): this location contains the signal peptide sequence, MLLLLITSLSLPLTLGHSLTQWFQFLNKPCFLVTLYMCSFIYVNT, Run with SignalP
  misc_feature (173)...(359): similar to gi4261929 in the genepept database release 114, Run with FASTXY 3.3t00, default parameters
cttcaaatgtcttaacaggctcttcatgctcttacttctcattacttctctatccctgcctctgacactaggtcacagtcttactcagtggtttcagttcctgaataagccgtgttttctcgtgaccctttacatgtgcagttttatttacgtgaatactcttccctctcttcagagaaaaaaagtgcctctagttcatcatttagtctcttgcttagagagtttctctaaggttttgcagaaaccacctctgtacctctatctgtttagtatcttttctagatgtttaatgtatttccccacatagtacttaactatgctgtatataattgtctgttgtttgtattcgtcatcatgaagggaaaaaaaatactcaggaaagaaaaatatcaaaatggcaatacctctgagtggtgggattataagtaatgatttcttttccttttttgaatattaatcttttcaaaagtatttgtgatttttaaaagaaaaattttattttaaaaaccttttaatttttaaatatagttaagatcaaattgggttaagacaaaatattctttatccatgcaggtttttggtattcagaacatgttgcttacttgaaaacttgattgaaacttttaatttctaacaaaatacaaattttcgggaaaaatgagaaggagaattttgggggctataaaggcttgggtctgatattcctatacgcattggttcatttaacattttaggaacataatcttatgagaaagcttttgttgcaattaagaaatggaactttggacagcgggccctgaggatagatttgccacctcttggaacgatattccgtcctctacagcgttatggacgcaaattttggggggatcgataagctggggcggcacgtccacatcggtaggatggagggatggtaccgatggactctgccggataggttggccgagggaagagaacggagcgctcgaagcgcgcggccgaatggcggaatggttgctgggccgcgtgtatgggtgcttggtcggactggacggatgggctgcgtggggcgcatgtacggcctcttcgtcggcaacgtaggaccggtccgatctgagcacgcgggtcgagcgagggatcggc

SEQ ID NO: 81365 - DNA, 1159 bp, Homo sapiens
  sig_peptide (3)...(138): this location contains the signal peptide sequence, MSYLTIITSKLCLTFYQIIFTLSDVTFLRTYSYPYITEKPEPHGS, Run with SignalP
  misc_feature (1009)...(224): similar to gi62182 in the genepept database release 114, Run with FASTXY 3.3t00, default parameters
aaatgagttatttaaccataattaccagtaagttgtgtcttactttttaccaaataattttcacattatctgatgtaactttcttgagaacttacagttacccatatattacagaaaagcctgagcctcatggaagccaagtgaagatcctgaaattacatggctagtaagttgcatggccagtacccaaagcccctattttttgtattctccctacactgcttcatatcaattaggatataaaagtgattctaaaaaataagaaaataatctgatgacaaaatatatatttagagtctacatattcaattgtgttccagtttttttttattttggttctcatgcttctatgggcttcaggccagttggcagtgtcattagcaagagatgtgtgcctcttggtcattaagatgagaactgcgtagcagaccaaatcctggttcctaattatttattgagcatctcttatgatcaatacctctaggttacatggaaattctataaagcaattaaagtcaggattcccattctccttgatatgttttctggaaaagtgataaatacacaatttatgacaatggaaagtggtatatgctaagagtgaagtaaatggtattgttacatagccatagaaactcagaggagaaaactttccagaatctgatgtgcagagaatactctatctctttatggccttaatattcaaggggggggttaagcttctactaaaattcttcgctaaactttctaaaaggggacatatcctcttgatattaacatagcaccagtggacacctccactttgttgttacattccaaattctctctttatgaactccggtcactttaaaaggaacctcttcagcttagcattaagggaacttaggggtaacccgctttctttaagaactggcttttgtccttaccgagttggtggggactcaagggattgggtttagccgaaccaacgcgcgaagtgggtttcgggcttttggagatacggattggatggataagatcccaaacggggcgttttggaaacaggaagcgccgtggatcaacataacgggcgggaactgtttgttcctgcgggcatgtcggcgcaaacatcagtaaaggtgatgcggtcgtgaagctgcgcgatatgctccggtgcgac

SEQ ID NO: 81366 - DNA, 1021 bp, Homo sapiens
  sig_peptide (531)...(396): this location contains the signal peptide sequence, MNGRLSASFWFLIFCLLMGFVCSGVLVFLCFNSLDLHFHLIKAYF, Run with SignalP
  misc_feature (127)...(269): similar to gi4007729 in the genepept database release 114, Run with FASTXY 3.3t00, default parameters
acctcccggttcgacccacgcgtccgtttctttgcctgtttcctcttctgtaaaatggaattgtggcttttagcttttatttctgtcaaagttttacatgcatatagcttcaagaatcatacagttttacaaggcttcttaggacaacccaaaatttcccctatttccctttccaagaacatctgccttcaacatcaggtgaggaggaggggagtttagagagtaagggttggcaatgagtgtctcagagagaaagaacctctgaaatcaacatgtggaaatgtgttggagagtgaatgaatgaagtttgattaattttcaggattaacaggcaatagcaaaggcttggtcagtcatcaggctaatattataagtaaaattatgtccttaaatgaaaataggctttgatgagatggaagtggagatccaaactgttaaaacagaggaagaccaagaccccagaacagacaaagcccataaggagacagaaaatgagaaaccagaaagaagccgagagtctaccattcatacagctcatcaattcctcatggacacgatcttccagccctttttaaaagatgtcaatgagctaagacaggagctggagagacagctggaaatgtggcagccacgtgaatctggaaacccagaggaggagaaggttgcagctgagatgtggcagagttacctgatcttaacagcgcctctttcacaacggttatgtgaagagcttcgtctcatattagagcctacccaggcagccaagctgaaaggagactatcgaactgggaaacgactaaacatacggaaagtcattccatacattgctagtcaatttcggaaagacaagatttggcttcgaaggaccaagcccagtaaacgccagtatcagatttgtttggctatcgatgactcttctagtatggtagacaatcataccaagcaggtttgcatttgaatctttggctgtgattggaaatgctctaaccctcctggaagtgggtcagattgcagtgtgtag

SEQ ID NO: 81367 - DNA, 1161 bp, Homo sapiens
  misc_feature (1)...(1161): n = a,t,c or g
  sig_peptide (275)...(410): this location contains the signal peptide sequence, MIAFVCILYLMSCLTHRLNILMIMIFLNSPFRFSWHQKTCNFLIH, Run with SignalP
  misc_feature (316)...(166): similar to gi763090 in the genepept database release 114, Run with FASTXY 3.3t00, default parameters
cggacgcgtggggttatctttgataaagtagtctgctagagggcaaaggggactgactattttgggggaaaaaatggtttagtagaagaaacatgaggcttggagtcagaaatccttggttccagcttagcactagctattactacttgtgtgaccttggacaagtttctgaatgtgttctttttatataaaatggagataatgctatagaattttggcgagggtcagatgaaatatgtatgtgaaggaacaggctgtgtaaactgtataacgtatgattgcttttgtgtgtatcttgtatctaatgtcatgccttacacataggcttaatatattaatgataatgatttttttaaatagtcctttcagattttcatggcatcaaaagacatgtaattttttaatacatttaaaaaatcataatcagattgtgatgaagatgttatagctatctttcattttgttcatgtgtaatttaatattcagtgattactcttggttccaataaaatgttatattgttatattttaaaaannaacnananaaaaaagggggggccgctttaaaggatccaagtttacttacccgggctggcgagggaatagtttttttttgggggcccctaaattaaattccctggccggggttttacaacggggggacgggaaaaaaannnntggggttcgtggctttggactccgctggctcggtctgacgcgtcggaatggccggcgctttcgcacgatcggcggggtccgaggtactcgactggtgggtcggtggggttggccggtccgggacgacggtagggacgtaacgcgggtgatcgcatggacgcgacggaccgacggaccggatggagagtccaccgtgtgaccgggtgcggccggacgggctggacgggctcggctcgcatgtgatgggtttgggtggacggtccaggaggtgttggacgcgagcgttgcatgtcgatgggaccgcgtcaggacggggaggtcgcctcgccacggtattgctcctgaccaatcctcaacccgccagggcgtcgagctggcaggggtgcgggtgtgtccagttgggcgggagcacattattccgagcgcccgcattgcgcgtactgtggcgtgctgcggacgcgcgacgtcgatactcgggctggcg

SEQ ID NO: 81368 - DNA, 1099 bp, Homo sapiens
  sig_peptide (218)...(353): this location contains the signal peptide sequence, MNQYGFAFLSLLLVTNLTWHIITKGIPSIQKHRWIQMSDRGFNLF, Run with SignalP
  misc_feature (246)...(182): similar to gi290622 in the genepept database release 114, Run with FASTXY 3.3t00, default parameters
cggacgcgtgggcacgctttttttacccagccctgcctgtacatacacatgcacaccctttctgatatttttgtcctttagatgttcaaatactcagtagtccttttgtttgcggtttagattcattttggccacacatgtacccattttaaaaaacaatgtcctcgatgcttctgtagtgatttcattttagccaggtatttctttcttgtgtgtgatgaaccagtatggatttgcttttctaagcctcctgttggttactaatctcacttggcacattataactaaaggaatcccctcaattcaaaagcatagatggatacaaatgtcagaccgtgggtttaatttgtttagaacacatggcatttcttcacaaggtaacctgctgtatttatttattttcttttggttaaatataatttccaaactttgtggtcaggcagcgtctaaggttacgttaccacagactgacagttggtatatgtaccagccaatcccttcattaaatgtatacagatttagttaagtagcattaaataggattcttagaagtatgtcctcatagaacttttaatacttaaggctttgtaaaaactatccatgaagggaaagctcctcagcataactgctcagggaaataggggtaaataactgaacattaaataattgggtaaggggctggtagtcgaccctcatgctggctcaagatgtatgtacaaggactgactttataatttgattaattggccaaccagtatttatttttccacgggatgtagaaaaattacagctctggtgcctgcagataacttatttttttagaagtgggagaacaatggaaaaaaacttttttccaaaagtcgggttaccttcaaaatggggccggccatgaaatatttttcaggggagggacgatattccgagctttagaagggggggtcaaattgatggtagggcggcgggatcgatcctctatggaatgtttcgggtcagggatgacaaaagggtgggaagatggatggacggcatcatcgatggaacgaatctctgtcgggacgatcggtccgaaggtcgacggtatcttgctggtgtcgccggg

SEQ ID NO: 81369 - DNA, 776 bp, Homo sapiens
  sig_peptide (603)...(468): this location contains the signal peptide sequence, MTVKVNLIIKIILITPLLEMSLPIMIGIYSVLYQVPGTDKHFTYV, Run with SignalP
  misc_feature (301)...(188): similar to gi1333758 in the genepept database release 114, Run with FASTXY 3.3t00, default parameters
ccgacttgctggatcgacccacgcgtccgaagagagagacacacagagagatgctcatatgaaatgcaaagcattggaaaggcattagattaggaatcatggtttcaattgtcagcttttccttgactttcacagatcattttttcctttgtgctctaagtcctcttgaagggcacttggaacaaaataaaatttcggccatggaatggaaatctagctataggttactacttatatttctgagcacaaaataaatccacatttcatggaattaacttggagaatttccacattgtatatgagatctgatcctcctagaaatattaaaaattattctggatggatcagagtacttactaatgtgtaaactggtcaagttgctcaacatctctaagccaccatttcttcatctatagaatgggcataaaaatacattgtaaggtttctgtaaggattaagtgaaataacatatgtaaagtgcttatcagtgcctggcacttggtaaagcacactataaatgccaatcattattggtagtgacatttctaataatggtgttatcaatattatttttataatcaagttcactttcactgtcatttctttacatctttcctgtttcctgatacttcctgacccccagcctcctatggctgatgacagacatctgtatcagctctttcacagtgtctatgctctgaaattaccggtttttcaatcattttaccttttcttattcctctaaccaacaaccctatgcccccatcaacaatacc

SEQ ID NO: 81370 - DNA, 1139 bp, Homo sapiens
  misc_feature (1)...(1139): n = a,t,c or g
  sig_peptide (276)...(411): this location contains the signal peptide sequence, MSEFQHLWLWMWSGRCCLKCWLDSCTPKIDLSLTCIICVMEIIDN, Run with SignalP
  misc_feature (679)...(416): similar to gi5360807 in the genepept database release 114, Run with FASTXY 3.3t00, default parameters
aaggcaagttatggaaaatgtgtctgtcactcactttctctgttctcacctgtcccattgtagcacttagcagactgaactgttagttgcatgtgaattttgtttgcatttcctagcagattataaatgactatggcccaggcacatggtggtaactcagacaatacttattgagtgaattttgaataagctgcacgagggctgggtcttgttcagcatttatctccagtttcacatgagacttggtgatggtaggtgctctgtaatatttgtgaatgagtgaatttcagcatctgtggctttggatgtggtctggcagatgttgtttgaaatgctggctcgacagttgtacacccaaaattgatctgagcctcacttgcatcatctgcgtaatggaaataatagataatagtatctatcacgtagtgctatctttagcattggaggagctaatgtgctaggtaatgaagcaattaggtaaacagagacttttagagaatcaatggtgactggngagaaaggataacagagacataggaacagaggcaaagatataatggaagccagtgaagagaatataatttatccacttccctcaactagtaactggtagcctagcgcatcctctcttctggatcagagatatagcagtccaactgggaagactggagaagttcctacctggttccaatattaacatggggcacataggggtcccttaactctgtgaagagagcttttgctaaatggttctgggatgggatgcaggtcactgagtccgtggaaacctcaaatgtggaaagctgggccagatccgaagcctgccccataattttgttgcccaagtaaagggtggtttaaaagaccgtccaaattttaacgttaataggtaacccttaaggtggagatggttaaaaattcataaagggagaggggggaaaacctccctggaaggttttgaatggatgtaccggaatgtctgatggtatctcctccacaaggagttcccggcgctcggaccgcatcggacggggtggagggcattcatggattgtatcggcgccttcgataggacgggtatgagcggatcgtaagaccagatacggtgggtgtgaatgggagaggtgacgtagtcgacg

SEQ ID NO: 81371 - DNA, 391 bp, Homo sapiens
  sig_peptide (91)...(226): this location contains the signal peptide sequence, MCLATLMFRSPIYLILLSAFSLALDSKFLICQFWIECRKLHIKNL, Run with SignalP
  misc_feature (220)...(156): similar to gi3745954 in the genepept database release 114, Run with FASTXY 3.3t00, default parameters
cggacgcgtgggaaattatattcaatttttgttgaaattcttcattctttcatttattttcttgaatatattgtcatacttatttaaattatgtgtctggcaactttaatgtttagatcacctatatatctgattcttttgtctgctttttctctggcgcttgactcaaaatttttaatatgtcaattttggattgagtgcaggaaattgcatattaaaaaccttcaagataactgggtgctcttaattattgtatcttccttcctgaataatttattttgctttgacagaaggttaggatagaggtgggtcaccttaaattttttaaagacttagttgatataaagacttcagtctctgtgagtaaattctacttcctgtccaaaaaaaa

SEQ ID NO: 81372 - DNA, 1169 bp, Homo sapiens
  sig_peptide (237)...(372): this location contains the signal peptide sequence, MLLLMLFRNFEISFSVSRLLCLGDHTPVSRLPCPGDHTPVSHLPC, Run with SignalP
  misc_feature (172)...(258): similar to gi2323290 in the genepept database release 114, Run with FASTXY 3.3t00, default parameters
cattggatgtgagcagattgtagggaacaaagccaaattaactcaaatatcagtgattaggtgaaacaatttcccttcactttctgtagttagtgtttataaaaaagtgcctttatcggatgctaaggagttgctttgatgctttggttcaagctcttaaaccatcttcttcatctctctctacatccttccatacattccagaccatcttccacagttgtgtgttttgatgtttgatgcttttgctaatgttgtttcgtaactttgaaatatccttttctgtcagccgcctgctctgcctgggggatcatactcctgtcagccgcctgccctgcccaggggatcatactcctgtcagccacctgccctgcctgggggatcatactcctgtcatagcagttgaagttgcccctcttctgccaaagtctttcctggtatccaattgcaatgagtcatccctttcttctgggtgtccacagattgttcttctgcttcaattataccattcagctcattcttggttttctttttattggaattatgtggggccttctaattttccaaaacctaaaaacctgagggctggggccttggtcatctttgggtgccccattgcacagggaatatacttggaaaacaggcccgcaacaccatacaggctcagtgaatatatttatgtcatgcctcaataaaccaaggataatttataattaaacgttggcatctctcttaattcctggggaaggaaaggtaaaaaaagagggggcttatgagcatgctcagaaaaaaattttacttttgggtgagagaaggacttttcttacattaactttaaacccatgtcatgggggatagcccaatttaaggggtatataaacctttggaaagggcctggattttctgacatttacgaagagatatccatggcaaaagaaaggcttaagcggggcgtcctaagaccccggctagggcagtgtcccgatgggaccatatcggtccggcccgattacggccgacggtaacgattggggaaaatggcgttgggcgaatggggacgcaaggctcggttccgaatcgaacaggcgagagggcaacggaccgggtcggtacggatacgatcgggtcgcaatggaaggggcgggtgccgggagatatcggaccgatcgaac

SEQ ID NO: 81373 - DNA, 392 bp, Homo sapiens
  sig_peptide (5)...(140): this location contains the signal peptide sequence, MGITSRFLCSGFVCLFLLNPTVAACGMNGGHPVEPTFIEFQGPPH, Run with SignalP
  misc_feature (173)...(289): similar to gi530806 in the genepept database release 114, Run with FASTXY 3.3t00, default parameters
aagaatgggcatcacttccaggttcctgtgttctggttttgtctgtttgtttcttttaaatcctactgtggcagcctgtggcatgaatggaggacatccagtggagcccaccttcattgagtttcaggggcctccgcacaggcagattctcagtgagtctagcaggcaccttagtggtcagcttctcagccttgagcctccttcatcctagcagggtgtttcctgtgccagtcccagctgcagctccttgcccatagcttggaccaccagcagccaatgggaggcttctagcctgccagtcccagctcatgttactctgtctgccaccctctgcctagctctggtggactgggtctggctcaggaaaactcagtgagtttctccaccatcct

SEQ ID NO: 81374 - DNA, 423 bp, Homo sapiens
  sig_peptide (43)...(178): this location contains the signal peptide sequence, MWWELGWCLLLSISPSPGSVGAHWGEHPSLGTEDSPPWPGIMFLA, Run with SignalP
  misc_feature (155)...(50): similar to gi5468527 in the genepept database release 114, Run with FASTXY 3.3t00, default parameters
tttcgtggagacagtactcagacctgcgcatgtggtggaggcatgtggtgggagctgggttggtgcctcctcctctccatcagtccatcacctggttctgttggtgctcattggggagaacatcctagtctaggcactgaagactcacctccttggccaggaatcatgtttctggcaattcttggcattgcacagtgggtctttgttcttttgttgtttctttttgttttttcacagtgggtctttgaaggcagagactgagcccttgcaaagtaaggaatgatcttggaaagaacctgctctctcaggctccacgttgtgtctcatgtggagtgctgtggggcaggacttccagctctctgtggcatttctcaccatagcttggcttttctctctcccaggttttgggcttctttatagctg

SEQ ID NO: 81375 - DNA, 409 bp, Homo sapiens
  sig_peptide (165)...(300): this location contains the signal peptide sequence, MCVCWWGAVTEQLLCWWEGMPWAKGFLCIPLSRARWGGLSMGRAV, Run with SignalP
  misc_feature (307)...(368): similar to gi1345536 in the genepept database release 114, Run with FASTXY 3.3t00, default parameters
tttcgtaatcaatgtgggttggtaggaatttgcactcctccccccctagttttcttaaaaacactcttgtaatgggacaaatgtgactgctcagaagttaccacaggggccttttggaatattttcatattcccccatctgtgggaagtgaggggctattaagtatgtgtgtgtgttggtggggagcagtaaccgagcaactcctttgctggtgggaggggatgccatgggccaagggattcctttgcatacctttgtcgagggcccgatggggagggctgtcgatggggagggctgtcgtaccaggtgagatgcaattagccatggaagcagcagtgtttggatctccagctctcagtccaagtataaaccagagttaagcctcagtgtggtgctggattagaaagga

SEQ ID NO: 81376 - DNA, 1146 bp, Homo sapiens
  misc_feature (1)...(1146): n = a,t,c or g
  sig_peptide (587)...(722): this location contains the signal peptide sequence, MWDLFLCLPFFKLLLLTPVGAMCPVLWGSLGCRGNLGXKERPSSG, Run with SignalP
  misc_feature (81)...(204): similar to gi218494 in the genepept database release 114, Run with FASTXY 3.3t00, default parameters
tttcgtcacaatacaagagggggctaactaagggcatgaatcccagggggtggggctcactgggaaccatcttgtaggctggcttccacacatgcagagcaccagccctagccaactcaagcagggtacattcctggagggtgtcctaggggcccccaaatacacccatgtctgtggccacagcacccttttctaaagggaggctctggagccatgagagatctaaggaacacactttggaaggccgtggctcagagaagagaatctaaccccttcccctggtgtctgtgtccttccatgatctggcacgaacttccagtacaaactttcctcctttcacttcgctttttgacacctgcggtacagcagcagcctctacacatccagccattccttgtgctggttattctgccctttttcttgttcatctgttgagctcctgtttattcctcaaggacttaggggaaagccaccattccatgaagccttcccttcatctcccataaaaagaattaatattttcttcctttgcttctccaggtgtttttgctggacattttttggggggcacctgcccctttgcctgatgtgggacctttttctctgtctccccttcttcaagcttttgcttctaaccccagttggtgccatgtgtccagtgctttggggatcactgggatgcaggggaaatttggggaanaaggaaaggccttcttccggctttacctctggcttgctttggggctgggttctgaggagcacgaaaaatcctttatagggcccaaaaaaaagtcttctgccccaggaggccgtggtgggttttccaaaaccgtggggagatccttttaccttttgggggcgctcttaactttacccgggcccggggagagagaaaaagtgtcataggccaatctagtgtctcacgcgggatggagcaacgactgtcgtccgtgaaacgactcgatcttcgaagcatcatccttttgttggttgctagacacaattaattactcgtccacctaagatacaatatcagttgacaacggtacaccgcccacgttcgctgaatcgtcttgtatcgatcgctgcctgccttcgcaacgaacgatacgaactcacccgaccattcatggaccacgcatctcg

SEQ ID NO: 81377 - DNA, 1104 bp, Homo sapiens
  sig_peptide (110)...(245): this location contains the signal peptide sequence, MYLPRLQQLLFSLPFTAWVGSCLVGYSYNIPGRFRYCELEIKLHQ, Run with SignalP
  misc_feature (789)...(642): similar to gi1335706 in the genepept database release 114, Run with FASTXY 3.3t00, default parameters
tttcgtcatttccagctccggccgttgtcccaggtctgcatgctgggaatctcggcctcttagttcactggtgtctggagccatgttctctggaattcccttaggctccatgtatctacccaggctgcagcagcttctcttctcccttcctttcactgcctgggtgggctcctgtttggtaggttactcctataacattcctggtcgtttcagatattgtgaactggaaataaaattgcaccaaaatgagcaaacttccacccccatgaggggtgagtgtgtcctctccctggatcttggggatatgaactcacctctgaagtatagagagagatcaccagagtggagtagactaggatccattggtagtgccctcacccacccaagacatggggggcgatgctctcctccctgcccccagcccccatgagaaaggggggcacacccgctgtaccccagcacaaccccctggaagacgcagaggctgaccctggggcttttgtccttatggcttacaatccagaggaagtggaatcaagtggcattgggtcagaattcacagtctctagccacctgcccttgggcatcttaacctttctgagcctcagtttcctcatctgtaaatctgagttaataacatccacttcctagggtgttaataataataagagctaacgttattgagtgcttatgaggtgccagaagcttcactgcatttggctcatttcgccacataacgctgtgaagagaaattaatttccccattttgcagttgaggaaatgaaacctggagccacgccaaccccgcagagggggagccaaaattaaccccccaatatttttgaatccagagcctggttttcaccaccccattaaggggctaactgggtgagacccggtacaaagaaagcccaaaaaagtggatcctttttcaagtacccaggcccttccttaaggaaaagagttctcaccaccaaacatgcttttacgaaaccccgggaacaagaaaaaatggacgtgcgacgtcgtccatatttccgtgcaaaagacggtcgacagaaggaagtatcgtgtacggacgaaccgaggtgtaaacgacgcaca

SEQ ID NO: 81378 - DNA, 426 bp, Homo sapiens
  sig_peptide (99)...(234): this location contains the signal peptide sequence, MLLDCVFSSLIFPITVLSPFHFCFVTWNVSRSRSHCPCLHQTAIP, Run with SignalP
  misc_feature (148)...(189): similar to gi2072774 in the genepept database release 114, Run with FASTXY 3.3t00, default parameters
tttcgtaagaaaccaaagtctgactgcctccatttctcatgagtgaaaaactgtttctattataggaaacttaggtcttcagtgtgtttgatggtagcatgctattagattgtgtattctcaagtctgattttccccattactgtgctttctccttttcacttctgctttgtcacttggaatgtttctagaagtagaagtcactgcccctgcctacatcagactgcaattccgggacatccaggcaacagcaagggataattaggaataaatttggctggaagaaagggaaaatgcagcttaggcagcctaaaccaacaggcttatttttctcactcggtaagagagctgaggtcgcctgactcagctcaggttctcagtgagccatcagccaccaggtgccacctttcagtgagtgggcttctat

SEQ ID NO: 81379 - DNA, 1081 bp, Homo sapiens
  sig_peptide (195)...(330): this location contains the signal peptide sequence, MYIFQFCVSLYIYLKFYIFMGQNVAKLPTEYIKLLNLDKILNYQM, Run with SignalP
  misc_feature (129)...(394): similar to gi220578 in the genepept database release 114, Run with FASTXY 3.3t00, default parameters
attaaccttaattctagcatctgttgatacttataatattttagtgttcttacaagaagttgaaactattctaattatagctcactgccccttattatcatttcttaaaattaatttgaatggaaaacttgtgtctcagatatttatgtatttaatatctccccagtgccatttaatttttaaattgcatatacatgtatatttttcagttttgtgtaagcctttacatttacttaaagttttatatattcatggggcaaaatgttgcaaaattgcccactgaatatataaaacttttaaatttagataaaattttaaactaccaaatgcatacctttctcttggtgttgtgctacatgatttaatgtgtagtgcttcttgaattctgtcactgagaccgtcttccctgtttgtttcacttttaaaaatgatttaataaaatagtatttttcaagaaaaaaaatggataccatttattttagactaaaggcttctgaaatttttaataaaattatattggccaggtgtggtggctcatgcctgtaatcccagcccttttggaggccgaggctggggggatcacctgaggtcggagtttgggacctacctcaccaccatggagaaaccccatctctactacaaaaacaaaaaattacccggacatggtggcacatgcctgaattccagctactcaggaggctgagacaggaaaatagcttgaaacctggttgcagggaaatacaccattgacctccatctggacaccagagcgaactctgtctcaaagtagtacgacagcaccgcaagggggcgggcctttttagaacacgattatctccccgccgaggacgatatttttttttagggccactagtacgacgaggcgccctatttacacccgcgaaggtgaaacaccaccaggacgtacgaacaaggaagtaagatcgacccctacgctgcaagtcccaataacctcctacgacctaccagcgaccaccgagctacgagagacgcaccacgaacgtagcgaggatgtaagcagcagcaagcagctacgttgcgagcgagccgcgccgcaagc

SEQ ID NO: 81380 - DNA, 348 bp, Homo sapiens
  misc_feature (1)...(348): n = a,t,c or g
  sig_peptide (169)...(304): this location contains the signal peptide sequence, MIMAYGLYLLSFWRLAVHLNNCLQLLTHLPCSSIRKSLSEDSELP, Run with SignalP
  misc_feature (186)...(291): similar to gi1345535 in the genepept database release 114, Run with FASTXY 3.3t00, default parameters
aaagaaaactcaataatcttctaaagatttatacaacacggtatttcatttgttactctatcttgaaaaatcttcacaggaaagtagtttggctaaacaagatattgacagggtacaaatgaataaatgattggttctaacttctcatatgagagcagcaaggggaaaatgataatggcatatggcctctacctcctttctttctggagactggctgtccaccttaacaattgtctgcagctccttactcacctcccatgttcttctatccgcaagtccctgtcagaagattccgagttacccaattaagtttctgtgggaggcatgtaaccatgttgtaagtggtcn

SEQ ID NO: 81381 - DNA, 670 bp, Homo sapiens
  sig_peptide (358)...(493): this location contains the signal peptide sequence, MYVCMHVCIARGMCVLAFLLQIKAEQNVVFVFWYCLNKYQYLLVF, Run with SignalP
  misc_feature (229)...(401): similar to gi862343 in the genepept database release 114, Run with FASTXY 3.3t00, default parameters
aatatataaagggtttagaaataatttacggcgtatatttatggtattacggtaataattgccttgacttttttatcttttccaaatgaataaatcaaaatagaaagaggttgagtaacttactcgagctaacagtcaccggtacacgctaatcagtgccccactcactggtcaaatctaagtaattcttcaagggatggaatgtaaatggaaactgctcccttatgctgcatacagaggtattacattttgcagtaaggattgattgtttcctagcacgtagtaactaacctgttttgaggatgcgttgttagaaatgcatcttggacatttatgtatatatacgtgcatatatatatgtatgtatgtatgcatgtatgtatcgctagaggaatgtgcgtccttgctttcttactacaaattaaagctgaacagaatgtggtgtttgtcttttggtattgtctgaataaataccaatatctactagtatttatttccttgctggtaataatgtgttttcattaatttaagatttataggaacatacttgggtgctccgcctgctagaaactgatctgtagcatgagccatttgttgaaagtacttagatatttctgcatttatttatttctgtttcagaccccacaataactatattactataagaaat

SEQ ID NO: 81382 - DNA, 411 bp, Homo sapiens
  sig_peptide (186)...(321): this location contains the signal peptide sequence, MESWVVSLQLISFCLFRIGLIVQDHSDPMFSSYAYKSHYLLNESN, Run with SignalP
  misc_feature (141)...(351): similar to gi790556 in the genepept database release 114, Run with FASTXY 3.3t00, default parameters
gcgcggacgcgtgggcggacgcgtggtataatatatatggataaggaattgagtagttcagactccctttgaaaactgtagaaaacctttctgtcagatctttcttttttcttcatattctcattttcgccctccccaccccagctttgaagcatacataataggtgttggtttattttttcctcatggaatcatgggtagtttcattgcagctcatctctttctgtttgtttcgtatagggctgatagttcaggaccattcagaccccatgttcagttcatatgcctataagtcccactacctactgaatgaatcaaatcgggctgagttgatgaaattacctatgattccttcttcgtcagcttccaaaaagaaatgtgagaaaggtggaagattgctctgctgtgaat

SEQ ID NO: 81383 - DNA, 401 bp, Homo sapiens
  sig_peptide (99)...(234): this location contains the signal peptide sequence, MVYFSHFEYLFIFLFSLSWPITSKALSICASFPLHCGFPLGYWNF, Run with SignalP
  misc_feature (182)...(373): similar to gi11741 in the genepept database release 114, Run with FASTXY 3.3t00, default parameters
aaatggactccactttaagagactgggcattagtaaattagagtggttaaaagatatgttacaaaacataatctaagttgatcagagaaggcatataaatggtttacttctcacattttgaatatttattcatatttctcttctctctgtcttggccaattacttcaaaggcccttagcatatgtgctagcttcccacttcactgtgggtttcccctaggatattggaatttcaaatctagtttatagttgtgaaataaaagattttatgatactattttagaaactctgcgttataggaaatagtaagtcattttttaagatgccagagacagagagaagcaggatggagtactctcattttatctctgagagaatatgtctttgtaacattcatgtatt

SEQ ID NO: 81384 - DNA, 384 bp, Homo sapiens
  misc_feature (1)...(384): n = a,t,c or g
  sig_peptide (127)...(262): this location contains the signal peptide sequence, MTRKTCLFIQQISAEYLLWVLLCARPCPKCWEDMSDQQTKILDLS, Run with SignalP
  misc_feature (364)...(269): similar to gi5103918 in the genepept database release 114, Run with FASTXY 3.3t00, default parameters
ggtgtgtgaaagcagaggacagggccactttactgtcttaaccctgctgcggcctcctacgtcagcactgtgtgctcttgtgcggggtggacaccaaatcagtgtttggaaagtgttggatataaaatgaccaggaagacctgtctattcattcagcagatctctgctgagtatttgctgtgggtcctcctgtgtgcccggccctgtcctaagtgctgggaagatatgagtgaccaacagacaaaaatcctagacctttcggttgggnnggnnanccttctggctctgggttggaggtttaatcacactgtgaaactgttgatgggaaccctgatgcgcgcactttaagtctatcaaccccacgtctctatgggcaggcttttg

SEQ ID NO: 81385 - DNA, 419 bp, Homo sapiens
  sig_peptide (75)...(210): this location contains the signal peptide sequence, MCFFPSTSLLGSFELGPVFCLAAHMAFFRSEITCWKNLNITLGQE, Run with SignalP
  misc_feature (351)...(217): similar to gi2654173 in the genepept database release 114, Run with FASTXY 3.3t00, default parameters
aggaaatacttttaaatgagaaaaggcaaagatgaaagaccaaagaaatcgccaaaaatgtgaaatatttagttatgtgtttttttccctctacttctcttttggggtcctttgaacttgggcctgttttctgtctagctgctcacatggcattttttagatctgaaataacttgttggaaaaatctaaatataactctggggcaggagatcaaggatcagacatattttctcagaaagatagtaattttaggggaaaaaaatattttctgaagcattctagaagaaaaaactagtccatactacaaagaaaagaagtgtggcaaacatcagggatatcagagttctgaggttttattcttttgtattaaatatttttaagaaacatgttttgttaccatggaaaattttaaacagatt

SEQ ID NO: 81386 - DNA, 392 bp, Homo sapiens
  sig_peptide (210)...(345): this location contains the signal peptide sequence, MCLELVAAIGFFVSLTKNEAVDLPGTKRVEKLRGGLSPVHPGRGG, Run with SignalP
  misc_feature (179)...(277): similar to gi2407909 in the genepept database release 114, Run with FASTXY 3.3t00, default parameters
ggcgctcgtgtgcacaggccactaaagtcacccaatgccagccagccttggtgaaaattaccatttgctcaactgagatactgggtccatgactccaaggggagctcgttctggttgctctgggtatagagactctgaactgtcctgccacgtaaagagaacagtctcgtttctcacactctgcgaaaagacagaacaagactgaccagatgtgtctggagttggttgctgccattgggttcttcgtttcgctgaccaaaaatgaagccgtggaccttcccggaacaaaaagggtggaaaaattaagaggtggcctcagtcctgtccaccctgggcgaggtggtcagatcctgctggcgactgcagctgtttctctcaggaggatgatgaat

SEQ ID NO: 81387 - DNA, 577 bp, Homo sapiens
  sig_peptide (179)...(314): this location contains the signal peptide sequence, MFVAQMLCFVKLFPIKTLTKLLTLFNFCGERPFKIYRTGLPRLKP, Run with SignalP
  misc_feature (531)...(522): similar to gi44068 in the genepept database release 114, Run with FASTXY 3.3t00, default parameters
cataacttggattcttaatccatttttggcctggctttgcttagtaaaagagtggggtagtagctttttctttattacaaaatttagactttttctccacatgagctagtattttcttagatactacataaattaagatattgcagcttcaagaaattttatcttttgtaaatattgcatgtttgtagctcaaatgttatgctttgttaaattattccctatcaaaactcttactaaactgttgacattatttaacttctgtggagaaaggcccttcaagatttatagaactgggcttccgagacttaaaccatcaaaggtaggtaatttaatgctgttcccgaccttgcaaaactaattggggctacaaatgctagtgtggaatacttaaatattagatagcacttattttggcactttttattttttgaagaaaatgctctcagaggtttccattgcaatatttagtgtgtacataatagagtattaaaaactgagttagtgcatgtttctagtagtattctgcttgaatctctaatccctaattgccatgaccccggcaagtgacaccggaaaa

SEQ ID NO: 81388 - DNA, 420 bp, Homo sapiens
  misc_feature (1)...(420): n = a,t,c or g
  sig_peptide (88)...(223): this location contains the signal peptide sequence, MIFNKAADTLGDVWILLATLKVLSLLWLLYYVASTTRQPHAVLYQ, Run with SignalP
  misc_feature (399)...(66): similar to gi5104315 in the genepept database release 114, Run with FASTXY 3.3t00, default parameters
gaccggcaggcccagaaggctggacaactcttctcggggctcctggccctgaatgtggtgttcctgggtggcgccttcatctgcagcatgatcttcaacaaggcggccgacactctgggtgacgtgtggatcctgctggccacgctgaaggtcctctccctgctttggcttctctactatgtggcaagcaccacccgccaaccacacgccgtgctctaccaagatccccacgcggggcccctctgggtgcggagttccctagtgctcttcggcagctgcaccttctgcctcaacatcttccgagtgggctacgatgtgagccacatccgctgcaagtcacagctggaccttgtctttcctgtcatcgagatggtcttcatcggcgtccagacctgtgtgctctggaaacactgcagagan

SEQ ID NO: 81389 - DNA, 570 bp, Homo sapiens
  sig_peptide (251)...(386): this location contains the signal peptide sequence, MATLRKITYTTLPAYTLSFSISSLVIPYNTHNYLMIIICILVNFC, Run with SignalP
  misc_feature (221)...(10): similar to gi677844 in the genepept database release 114, Run with FASTXY 3.3t00, default parameters
aagaccctccaaaggctcccatttgtaatcagaataaaacccaaagaccctactgtggcccatgaggcccttggtacatcagatgtttgtctacttcgtctcttactactataggtgctctttctgtttttgaacagcaagcttgttcctgccctagtgtcattacattttcagttctctttgcctacaatggcatcccatatgcatataaggccctgtattcagaattcagtttatttgatacccccgcatggcaactttaagaaaaatcacctatacaacccttcctgcttatactttatcattttctatttcatcattggtgattccttataacactcataactatctaatgataattatttgtatacttgttaatttctgtttttcccactaaaacatacgttccatgagtatgaggactttggctgcttttctttaacttattcaacacatgtttattgaacacttgttatgtgccacatgctagtcttggtgcaggagtgatatcaatacacaaacgaagcaaacattatttcgtggagcttttatttgtgtgtggatgcgtgt

SEQ ID NO: 81390 - DNA, 687 bp, Homo sapiens
  sig_peptide (526)...(391): this location contains the signal peptide sequence, MALLISTCINKAVLRFTLSSMNNKIILSWYSFNVILIFHENVVYY, Run with SignalP
  misc_feature (365)...(485): similar to gi4151879 in the genepept database release 114, Run with FASTXY 3.3t00, default parameters
aaactaatagaaaaatatatctaatacttagtactttttgcagcttacaaagtgttctcatatattgtcgcatcagattgtcacgataaccttcagaagtagatcttaccatctgttaatttataggtgggaaaataatggtcagacaaggaaattagaagcccagtgtggaatgatgacttgtattctggcactgaagatttgctcttatttactacttaaggtggaaaaaaactttttttttaattgattgataaagggtataatttagaatttagaatttaagcctagatacttcagcagtttttctataactgaacaaagaaacaaagtagctcttgatggtccagtaaaatgagtctaaccagggactccttacaggttttatatatagtaaactacattttcgtggaatatgagaattacgttaaaagagtaccaactaagaataattttattgttcatggaagatagggtaaatctcaatactgccttatttatacatgtactaatcaaaagagccattaaactgtttttccacactattatactaagcacatttcacagctttacatgtcatctgggcccagtgtggtgactcatacctgtaatcccagcactttgggaggccaaggcaggaggatcactgagcaacattaggagacctcatctctacaaaaaacttaa

SEQ ID NO: 81391 - DNA, 577 bp, Homo sapiens
  sig_peptide (266)...(401): this location contains the signal peptide sequence, MFSPCGPASLGLLFVLCTHSQALAFFWGPSSLIGASGFLLQRTSL, Run with SignalP
  misc_feature (444)...(236): similar to gi32329 in the genepept database release 114, Run with FASTXY 3.3t00, default parameters
ctgaaagatggtctagtgcttatgtggcccaagtgtgcttgcctgtaatctctaattcccctgacttaaggtttcatgggctcatctgctgcacgtggccacaggagggccttccctgggttcctgtgccctctctttattggagccactgaccctgcctgctggaagtggggacactccaaggccacctctctaacacctacatgattatgatgttttttaaaaagtgccccgtcgttctggtgaagcatcgccttctcttcctatgttctcaccatgtggcccagcttccctggggctcctttttgtcctgtgcacccactcccaagcccttgctttcttctggggcccctcttctctgataggagcctctgggttcctgctacaaaggacctctcttctccgccatgtattcctcggccttgtctatgcctgctgggcacactggctgtattgctcatcccgtccagttactaaagagtgacaggtatattctaagggcctaatgccaaaccctggctgacctgggccatctgtaggccatgttgctcattctctagcattcctgaaggtattt

SEQ ID NO: 81392 - DNA, 415 bp, Homo sapiens
  sig_peptide (140)...(275): this location contains the signal peptide sequence, MRVTPSLSKQLLIFLPLHLLFGVCYTLLSGDKVEKTTVETPMFDS, Run with SignalP
  misc_feature (100)...(224): similar to gi264079 in the genepept database release 114, Run with FASTXY 3.3t00, default parameters
tgaaaataggtattttttttctttcctattaatatttttccataaggaaaactaaaaaatttgtgactatatcagtatgttcttttgtggaagtaacgtgcttattctacatttcccttttatctgtgaatgagactgaatgagggtaacaccctcattgtcaaaacagcttctgatttttcttccacttcatcttctctttggggtctgttacactcttctcagtggagacaaagtagaaaagaccacagtggaaacacccatgtttgactcatttggcaagatctctctcagagaacttttcttcatacttatcaatacaaaatatcatttttatcctttatattataaaaaacaatgcagtttttaccaccttggcatacataccttttaaatcttttaaaatcacttaatt

SEQ ID NO: 81393 - DNA, 445 bp, Homo sapiens
  sig_peptide (210)...(345): this location contains the signal peptide sequence, MQKYMKVLSICCYGHFLELILFLIISGCFVWSSVFITMIDNICII, Run with SignalP
  misc_feature (260)...(330): similar to gi2224361 in the genepept database release 114, Run with FASTXY 3.3t00, default parameters
ggtcttaactttcggggatacctacccgtccgctctaaaggaagaggacattcgaatagggttttatagttatttctttatagggttttatgattttctcttaaggaattttagagtatgtgtcattgtttcaagattttctatttactactttaaaaatggaaataataggtctttggtaccttcttgaaggtcatatgccacaaagaatgcaaaaatacatgaaagtccttagtatttgttgttatggtcattttttagagctaattttatttttaatcattagcggttgcttcgtttggagttctgtttttataacaatgatagataatatctgcatcatattattgatgtaaaaaaaaatctacctttgaaatgaattagggatgtaccatacttttgaatgtttgtcatcaaacaacatttagcataaactgcatctagg

SEQ ID NO: 81394 - DNA, 778 bp, Homo sapiens
  misc_feature (1)...(778): n = a,t,c or g
  sig_peptide (507)...(642): this location contains the signal peptide sequence, MLPYVHTQVYLVVIIALVLWSMMNFPRAHMQLQLHALESRDHSEL, Run with SignalP
  misc_feature (378)...(649): similar to gi5104201 in the genepept database release 114, Run with FASTXY 3.3t00, default parameters
cgcgtccgcaagggccaccatggaagagcacgggcacacagtcaacatgttctttcttgatgctgaccagactgagggaagagataagctgaaaaggggacgatggtcaggctgtgtttctcctggccacgccaaccccccatggagccatgagcatgtgggcctagtttggtttgatttggtttttgcttacatgtttaaactgaattatgactaaggcaggaggcaactgtagaccttagatcaggatggggtgatctcaccagcactgtccttaggaatgaagccaggaccaagtaagttctccacagtgcttgctctatgatgcccccttcagaatgcttcagagggtttgtggaacttcaggcaggaactgacctggaataagagcccaagatccttcaagataccctttgatgcctcctctgccttccctagccctggcttcttggtgtctttagacagtgtgctagagaggatgctactcagcaagaaccccaagcagcatgctcccttacgtgcatacccaggtatacctggtggtgatcatcgccctggtgctgtggtcaatgatgaattttcctagggcccacatgcagctgcaacttcatgccctggaatccagggatcattcggagctctggctgcggagagcagcatgtcagctggcctaacagtgaattggagccaaggagacaggcanagccaacctcctattcatcctacagaatattgtccccagcctggacactgtcattgtccttagactgtgcagagg

SEQ ID NO: 81395 - DNA, 678 bp, Homo sapiens
  sig_peptide (155)...(290): this location contains the signal peptide sequence, MLLVCVLQTVLNAEEARWREGKTREVEDRVHSPIPVNEKKLLTRS, Run with SignalP
  misc_feature (66)...(258): similar to gi3414946 in the genepept database release 114, Run with FASTXY 3.3t00, default parameters
aagaatatagattgtttgtgccgggcttatacaatgggtctttaaactatattgagtggtcaaaatgccacattcagaatacttagagagggagaaagataaagtgccttggaagccgtgaaacattctagggagcaagagcacaccactgtacatgctcctggtttgtgtgctgcagactgtgttaaatgcagaggaggcaaggtggagagaaggaaagacaagagaagtggaagatagagtccactcccctatccccgtcaatgagaagaagctccttaccaggtctgtgtgggtcacggggcaagatcaaagaatccaagcaaggttcataaaatgccaccacccctgattcatgacctgacctactgaaaggtttaacttccagaggcaggttgtggtttctgatccaatcaagtggattctttttcttggagaaagtctcactgtactgaaagaatcttgtcagatatccaaggctaaaggaaaattttaaatttaatccaatcagatgaagaagctgataaaaaaggtataaccattagtgggagagcagcatttaaaattctctctatggcttttctgggctttttacctctgtctcaacccaaaaccaaaacaaaaccccagaacaacaacaaatgagttgaatgttgctcagatttggagtatttgatg

SEQ ID NO: 81396 - DNA, 1050 bp, Homo sapiens
  sig_peptide (64)...(199): this location contains the signal peptide sequence, MKTGSLLLTLWFSQTFSFNLFFAPPHSLLQSSIFFSVSSITTVHP, Run with SignalP
  misc_feature (755)...(647): similar to gi6009494 in the genepept database release 114, Run with FASTXY 3.3t00, default parameters
acagttaagaaacggtagcagttactccctttccaccttcacggcccaggagttcgatagcagatgaagacggggagtcttcttctaaccctatggttctcccaaactttctcctttaacttattttttgccccacctcattctcttcttcagagttctatttttttctctgtgtcttctataactactgtacaccctatcctggtctttttttttgcattctttagaacttgattgccacatctgtaatcccagctactcgggaggtcagggcagggggatcacttgagcccaggattttgaggctgcagtgagctacgatcacaccactgtactccctccagtctgggcaacaaagtgaaaccctgtctcttaaaaaaaaaaaaaacttgagggcctttaactaaaacataaacagctttgtaaggctttcccccaagctctctgggcttcctgacgtccttgcccttttgttggttcttcctttcccaccccacccaaactcagtacccaactctacatctgggtcttttcccctgactactatttttgttcatgggggtcatgtatgactatctttacccttttatcctttctcttcctaagtggggggggtaaagccagaggaggatttaggttgagcagtggaagaaagattgtgtcaaaaatgagccattaatatttggaaaattgttttaagtttaaaggcctgagaaatgcataaaattgaaatttaattgatataggcaagtggttatgcaaatgatttttgcccatcctcccattttagtcaggcaattttttagaactttcaaccagtactttcttcagttgtctttgagatttttataaattaaagaaaaagaaacaggaaaaaaaagtgatttggaagctcatttaaagtcactgcggttgaaaaggcaattatgtggctcctggcagttgtaggagagtggctgtccccaaatcgagctaccaaggacagattgccaaagcccaagaagaatcattgtgtaaacattagagctcagctggaccttcagaggccta

SEQ ID NO: 81397 - DNA, 866 bp, Homo sapiens
  sig_peptide (123)...(258): this location contains the signal peptide sequence, MKWWLVWANADVLEQSLGCTLYSLLEGGFFRRLFREAFPGEKLIL, Run with SignalP
  misc_feature (416)...(324): similar to gi166993 in the genepept database release 114, Run with FASTXY 3.3t00, default parameters
cccacgcgtccgagacgttgtctacttttcctacaggtcacatgtaagacatgcagtgacaaaagaatcaaaaagctaccttaaaagtgcatagtgaggtccaacatatagaaatctacataatgaagtggtggctcgtgtgggcaaatgcagatgttctggagcagtctcttggatgcaccttgtactccctcctggagggaggtttcttcaggagactgtttagagaagctttcccaggtgagaaactaattttggccataaaatgagaaattagctttccattagaatgaggagaggagtaaaaatctgagcagaacgaacgtattcccaatgcatttcttcttttccatgcaaaatgatcttgaaaactgtgggggagaggatgtcttgtctctgttagagtcgcatctcagttagtattgacattgtttgagtgcggcttctaaaaaaattcttttctgcatctcttgggtgccgtatcctttttgccttgcattcacttacttttcattacactgcttcttataactggatttttatgtttcccggccttacaaaatgctgcgccttttcctgtccgagtgcccctttttacacaccttaaatattctttttttcgactgctttcacccgtctttcccaactacctatcttctttctcctctccggcctcttccttaaaatcggttttttaattgcttagctcggatacgcccgcacgctgcttttttacacggcccggtatatcgccacctcacactctcttgttatctgtcacattgactgtgatattcgacgcgccctcgtctacttatctctggtttcacctcgctccttttctctctgtgcccgtccaaacttcc

SEQ ID NO: 81398 - DNA, 396 bp, Homo sapiens
  sig_peptide (125)...(260): this location contains the signal peptide sequence, MSFGCLTLLFTSRFCIPGGDKMVTLTMMMANICSFIHNSYVSGTS, Run with SignalP
  misc_feature (56)...(4): similar to gi5817271 in the genepept database release 114, Run with FASTXY 3.3t00, default parameters
ctcagctctcaaaatcacctgtctccagaggcatccaaagattaatttaaaagggaaaagaaaagtaatttccgaaagctactttaaaagagaaaaataactccattacactgcccttcttgtgatgtcctttggatgtctgactctgcttttcacatcgcgcttttgtattccgggaggtgataagatggtaacacttacaatgatgatggcaaatatatgttcatttatacacaactcctatgtttcaggcacttcacataccttatatctcatcttcaatataatggtcccattttacagagaagttaaatgacttattaaatcacagaagcaattttgtggtggagctaaaattcaactccgggactgactcactttaaaagccaagctgat

SEQ ID NO: 81399 - DNA, 1036 bp, Homo sapiens
  sig_peptide (99)...(234): this location contains the signal peptide sequence, MFVLFLILVLRNHFLVTIKYGVGCGFIISVCLRAKHFNFDEAQFV, Run with SignalP
  misc_feature (643)...(704): similar to gi2353243 in the genepept database release 114, Run with FASTXY 3.3t00, default parameters
acaacttccagtaaaatattgaatagaagtagtaagggtatcaagttcttttgctctgaaaaaaatgaaaaataaaataagtagtagtgagggtggacatgtttgtcttgttcctcatcttagtcctcagaaatcattttcttgtcaccattaagtatggtgttggctgtgggtttatcattagtgtctgtttaagagccaagcattttaattttgatgaagcccagtttgtcagttttttcttgtgtgattcatgcttttgtctcctcagaaatctgcctacccaaagattacaaagatttttcttctgttggttttttttaatataagttttatggttttagctgttaaatttaggtctcttcatttctgttcacaattcagtctttaaatgcatataggagagttggaggggagaggagacacttgtccctcttaacttgtttcttggtaatgagtgaattggcgaaaataactacatgtacacctgtagtcttgctttgtacaggttttgcatttggtagtctgccagtgctcaaaaattcctggtggtggtttttcagggataccacccagtgaccatctgtggtggtcatatgttatttgttcacccaacatccccctggggtaccaacactcctcattttataataattcgttttatccacatggttcaagtgggtctttttttaccctccagtggtgataggctgacccaagcccaggcccatcagaatgctttatcttggtcaggcatggtggctcatgcctgtaatcccagcactttgggagaccgagatggatggatcacctgaggtcaggagtttgagaccagtctgaccaacatggtgaaatcccgtctctactaaaaatataaaaatcagccaggtgtggtggcaggcacctgtaatcccagctacttgggaggctgaggcaggagaatagcttgaacctacgaggtggaggttgcagtgagccaagatcgcatgactgcactccagtctagttgacagagcaagactctgtttcaaacaaa

SEQ ID NO: 81400 - DNA, 474 bp, Homo sapiens
  sig_peptide (13)...(148): this location contains the signal peptide sequence, MTHLCGVTLCSFWTWIIFRGSMLECTAMWEHWPTDLVRSSPTAMR, Run with SignalP
  misc_feature (387)...(462): similar to gi456134 in the genepept database release 114, Run with FASTXY 3.3t00, default parameters
tttcattccaagatgacacacctctgtggggttactttgtgttcattctggacctggatcattttcagggggtccatgctagaatgtactgcaatgtgggaacattggcctacagatctagttaggtcctctcccaccgccatgcgcttagtcacttcacctgctgccttccaaaacaaatgggctgtgtgtgtctccttcccttaacaaagtattctataatcatattttctagcttaaaacaaaattagtcttttagatgtaaaacacatctaaagcacttttattaatggatcgctttccttcagggattacagtgcttagtatgaggtgctgactcatctattttcatgccatatagggaaggaaagtgttaactattttcgaatgtagagaatacttttgttgggagtctctaaaccttaaacccaggacctgtttgacaaaactgtcatcctcccaaccccttgaaaa

SEQ ID NO: 81401 - DNA, 809 bp, Homo sapiens
  sig_peptide (84)...(219): this location contains the signal peptide sequence, MQNRTGLILCALALLMGFLMVCLGAFFISWGSIFDCQGSLIAAYL, Run with SignalP
  misc_feature (236)...(132): similar to gi553623 in the genepept database release 114, Run with FASTXY 3.3t00, default parameters
tggttgacttcccgggacgacccccgcgtccggggaagcagaggagcagcagggtcagggtgctgggttcctaaggtgcaaggatgcagaacagaactggcctcattctctgtgctcttgccctcctgatgggtttcctgatggtctgcctgggggccttcttcatttcctggggctccatattcgactgtcaggggagcctgattgcggcctatttgcttctgcctctggggtttgtgatccttctgagtggaattttctggagcaactatcgccaggtgactgaaagcaaaggagtgttgaggcacatgctccgacaacaccttgctcatggggccctgcccgtggccacagtagacagagctgctcttctgaaaatcatgtgtaagcaattgctttaaaaagaaaaatgaagaacccttctgacaagagacaaaagacctgagaagggaatttgatttcatgaataccaacataatgatttccctttcatgtttggatgcaaacaaaagctatgttgttcaacctcagaagcctcatgctgtttatttccaaaaagaattgacccttttttccctaaaccttcgacctggatctagggattcatttcttcactactaccatagtcattttcctttcatgttcgggtgcaaccaaaagctatggagctcaacctcaaaaacctcatgctggagacgtcccgaaagaattggcatctttttccctataacttcgcccctcatctatggatacctctttcccccaaaacacaggtattttgccccgcgcgccccgcccccaaaaacccc

SEQ ID NO: 81402 - DNA, 4000 bp, Homo sapiens; identical to SEQ ID NO: 81134
  sig_peptide (1275)...(1140): this location contains the signal peptide sequence, MGRKEDIFLNILFVPSLKCINILIWFYFNFSFIISQLSFWVALQH, Run with SignalP
  misc_feature (378)...(122): similar to gi1294789 in the genepept database release 114, Run with FASTXY 3.3t00, default parameters

SEQ ID NO: 81403 - DNA, 1038 bp, Homo sapiens
  sig_peptide (459)...(324): this location contains the signal peptide sequence, MQKVLHGLYLFNFLACYLDKNLFRTKLLALYHQGSGVRTPLGESL, Run with SignalP
  misc_feature (376)...(241): similar to gi1185141 in the genepept database release 114, Run with FASTXY 3.3t00, default parameters
cagataccacagaaggatgggaggaaaatgccttgatcatgtttctaaagtattaactctttatcatagacaaacaggctctcttttcccatatgtgtgtgagttttggtaccaatgatctcatttcccaaaaaacataaactcttccaaagttatgaccagttatcttagacctggacattgcttagcagtgcttcttcctttccacataataagtaataattatcagtatatttcctgtgtataccacgggtgttgtcttacccacatgaagagctgtgagcccctgtaagatgtctttgatggagtgctgttctttgagcaaactctcccctaagggcgtcctgaccccagaaccttggtgatacaatgccagtaatttggttctgaacaagttcttatcaagataacaagctaaaaagttaaacaaatacaaaccatgtaatactttttgcatgtaggaattgtttttgtgaattttgccagctgtgttagattttaaattctagcaaaatcttattaaaagccttagattttttatgctttctgggtagccgaggcaggtaatagagataaagtgtagctgctgctattcgtagtttgctgactggtgaaggaatattctagtacctcaggtttcatttttacacagtataaacagaatttggtgaaaggttttttcactccagctttctcttcaaaggcatgtttcctatcagcaaatagtttttaggtatgttctagtttctttgctctgatatacagagataaaaatccatctaaaatagagatatttttagtgctaagaatttttttcttttcttttgttttttttttgtgaaaaaaaagtctctccttttgctttccaggcttgtgaacaaaggtcccccgatttgggtcaaatgggaaatcttccgcttctggggttaaagaaaatttctctgggctataaacccccgggaaatgggcgggaaattaaaccccccctgggcacacaaaaaccccaggtaaatttgttggccattctgaaacgactgg

SEQ ID NO: 81404 - DNA, 690 bp, Homo sapiens
  sig_peptide (136)...(271): this location contains the signal peptide sequence, MRSPSVRHHSISLFLRLPESLLLAIAAILGFILYSMTIGKLHISL, Run with SignalP
  misc_feature (81)...(264): similar to gi602377 in the genepept database release 114, Run with FASTXY 3.3t00, default parameters
cttctaatgatcaatcccattgtttcctgctagtgtgctcttaactgggccatacatttgattcatattattgcagcggaggtagttactagatttgtcatatttctgtatttctcttatatgcatacctcagctatgagaagcccttctgtgaggcaccacagtatttctctttttctaaggcttccagaaagccttctgttagcaatagcagctattctaggatttattctttattctatgaccataggaaagttgcatatatctttatacatcagattttttgatgaccaagttctttttgttgtgaatgtttaccaagtgacatatacatccttattagcaacttaataaattaggaactctttactttagaagctagaaacaaccagaaatgccactttatcttccagttttgtgaattgatgtttttgtatttctttgataatctcagtcaaatgtagtattgactttctgtgtctgctttgaaagcagtcatctatgtgatgtggtttttaagaaaacatttatgcaaatatccctgtgattaaaggagaagtttgaacatgaacttttaaaaaatgagtaaattcagctttctttaagcaggaaccagttaaccagggtaaggaaaggctggaggggattgacttgattaggcagttgaaagagtggatgccattttcatcc

SEQ ID NO: 81405 - DNA, 1449 bp, Homo sapiens
  sig_peptide (1245)...(1110): this location contains the signal peptide sequence, MCLLKAAPFFFFYVPQVGKGNPRPPRGCSAFHPPTHLRPGSCSVA, Run with SignalP
  misc_feature (288)...(117): similar to gi2689666 in the genepept database release 114, Run with FASTXY 3.3t00, default parameters
aaatagccattttcccgtcttatctccataagttttaatctctacctaccagttccccaggccctaatatttaccaccatattggtaactgccagtgttagtatgtcatcttctggattcttttgccaggcccataatgctgccaatcattccctagtttccccgcttccctcttttgtttttgtactgcatccctctactgctctaagctcattttgcactttgcctggtctcctggtctcactgtttctaaatatttcttatccatcttggtattcttaacacccagcacagaaaaatcaataaataccatgggaaggagcaagcagggctagaaacacaatggatggtcactagatattaatcatctttgagtaattcttctaatcaaacatgctctgcatctagttaggcaagccagctccgaacacagaggctccaagaacagcaaaaggtgcatatccctggggagagcccatggctggagttagttctccaaggtgttcctgcccacaccttttctaatgagtccagttagtttaactcaatagtgtgtgaacacgtaagtaagctgccattatccaacaccgcctggaaaaacaaccatgcatctggtccctcccatatccctcagctgcaaacttgagagtaggataaacttctagctttctcttacagtggccaggtgtttgtgggcatagggtaatacagatggtctcttgaaaaaaagtttagcggctagtctgaagaaaaataacaaacctttgattgggacttagcatatgatacaactgttcttcatactatacatacaaaatcaagtgtagtaagtagcattaccagtattttaaagatgaggccaggtgcgggggctcacgcctataatcccagcactttgggaggccaaggcaggcagatcacttgaggtcaggagttcaagactagcctggccaaccctatctccgctaaaaatacaaaaattagctgggcttgtcctgcacacttgtaatcccagctactcaagaggctgaggcaggagaatcgcttgaacccaggagacagaagctgcaatggagccaagactgcgccactgcactccagcttgtgctacagagcaagaccctggtctcaaatgcgtgggaggatggaacgcggaacaccctcgtggggggcgggggttacccttccccacttgggggacgtaaaaaaaaaaaaagggggccgcctttaagagacacatttcccccggttcgcgagactattttctttgttggcccaaaataataccggccgggtttaaaggcgtgtggagaaaggcggacacctcctgtctgtgcggatggtgcgctggctctctcctctcgctttccatcataataactatggtcaacgctcgtctagtgccgctatctagagacatcgctacgccgtgaggactcgccgcgtgca

SEQ ID NO: 81406 - DNA, 823 bp, Homo sapiens
  sig_peptide (245)...(380): this location contains the signal peptide sequence, MCDVIYHDLVAFVMSFFLCFLLLGAPPTGPLWQSGCDTSIVSISC, Run with SignalP
  misc_feature (172)...(48): similar to gi624223 in the genepept database release 114, Run with FASTXY 3.3t00, default parameters
agctccctctagtggtcaaggtagcaaaatgtgcccaaggactagaacttgggtccctctgccttgcctggaggcagaaggagggggctctgggtttgactgggattgtggtccccaggggtccgtggcctttaaggctcttctctcttttctgtttcccccacctgtgttacagtcttaaaaatactgtacataaaagatatatgtagagagagagagagagcgtgagaatgtgttagtgactatgtgtgatgtaatttatcacgatttggtggccttcgtcatgagttttttcctttgttttcttttgctgggggcacctcccacgggtcccctgtggcagtctggctgtgacacttccatagtcagcatctcttgttagccaaacagttccctttgacaggtacttggagggacaatggttttggaagagagacggcccttctctctcctcactcacccttgttctaaaggttacagggttcaaacatacctgattcttgttgttattgttgttgaatttttattttaaccaaaggttatcagagccagttgggcttggacctcagctgctaaaaagattttccgtttcctcgagggcaggaaaacatccaccctcgtgggtctcctccgtccagggccgagggaggcattggacaatgtggtatgggagtttcgtgggcagcgtggaagccggccctgggttgttccccaaggtggtgggagggtgacagatatatctttagacttaagactgtaaggcagcagtgttagcatgggagtaattaaggttactgtggttatcggtgtccggcggtgtatt

SEQ ID NO: 81407 - DNA, 1545 bp, Homo sapiens; identical to SEQ ID NO: 80148
  misc_feature (1)...(1545): n = a,t,c or g
  sig_peptide (26)...(161): this location contains the signal peptide sequence, MWAAAGGLWRSRAGLRALFRSRDAALFPGCERGLHCSAVSCKNWL, Run with SignalP
  misc_feature (704)...(638): similar to gi4376595 in the genepept database release 114, Run with FASTXY 3.3t00, default parameters

SEQ ID NO: 81408 - DNA, 730 bp, Homo sapiens
  sig_peptide (47)...(182): this location contains the signal peptide sequence, MPCGGLCCTIPALQTLRVVCCLPRRVYIDNSQKPGVQGASIWRPV, Run with SignalP
  misc_feature (363)...(469): similar to gi1345539 in the genepept database release 114, Run with FASTXY 3.3t00, default parameters
gtgtggtggaattcgccagagcaattatattcatccaggggctcctatgccatgcggaggtctctgctgtactattcctgccctgcagacattaagggtagtctgctgtttacctagaagagtttatatagacaatagtcaaaagcctggggtccagggagccagtatttggaggccagtggccagcctggaggaagaagagagtaggtggagagagctggagacatagtgctcttttccaaaggccacacctatgctcacgaacttgggttatgcctcaggccttgggtgctgggggacagcccaacaggaacgagaacgtttcctaagcaaaagataaactctgagggcactacctggttccaggcccaaggaaggcgtgtttttagccccctgttccagcctcgtaccctggcagtcctggtccatcttactgagcacatatccgcacgcctcatgctccccagggccagttttgtaagcccagaagtcaaggcctaacttgaacctgatgaatgaatcagatcaaatacatgctgtatgctcccaggcctgatttctccagctcctccaggccacatccaagggggagctgccgaaatgtccatgcctcagtttccatgagggaatagtatttaacaagtcagggcttgtgatggactcttaaaaaagcgcccagggccaggcgcggggggctcacacctgtaatcacagcactttggggatgcca

SEQ ID NO: 81409 - DNA, 392 bp, Homo sapiens
  misc_feature (1)...(392): n = a,t,c or g
  sig_peptide (153)...(288): this location contains the signal peptide sequence, MKQAFSLPIWLPPAWSMLLSPCPHPSSSPCLPXGSVFMHAALESR, Run with SignalP
  misc_feature (95)...(45): similar to gi930041 in the genepept database release 114, Run with FASTXY 3.3t00, default parameters
aaattttggtaatcagggtttcaccatcgcatttattactattcccggaaatcaaggtaaccttgggctatacttcccatatttacaaggtgataaaaatccttaataggctgtcagggacgaatgtgactgcttttcctcacactcctcccatgaaacaagctttctctcttcccatctggctgccgcctgcctggagcatgctactttccccgtgtccccacccctcctcatccccatgcctcccggngggttctgtcttcatgcatgcagcgctggaatcacgcaccgagagaatggcccaccccttagaggtttttggtcattttagcaataccgctttgcattttaaataccattcatctggcttcaaagatctgcactcttgcatc

SEQ ID NO: 81410 - DNA, 2553 bp, Homo sapiens
  sig_peptide (217)...(82): this location contains the signal peptide sequence, MFPSSLPFLLPSSLSLPTYLIFICHEVFGFANDLLDIMPHVIENK, Run with SignalP
  misc_feature (366)...(558): similar to gi695512 in the genepept database release 114, Run with FASTXY 3.3t00, default parameters
ttttttttttttttttttctgaataaataagcatcaattttattgaatcatgaataatttaagactggtacaatcatcagctttattctctatgacatggggcatgatgtccagcagatcattggcaaatccaaaaacctcatgacaaatgaaaattaaataggtaggaagagagagagaggaggggaggaggaaggggagggaggatggaaacataccgtacacaaaatactcaattcctagttttctctttaaaaatggctagaaaaaattcatcaaaatgcagcactttaatcaattatttacaatttctatgttacaatgaaaaaatgtacatcttatagaacatatttcataaaactgctccactggaaacaactagatcaaaacagcaaaccttccatttaatatccacaaagttggattatttttcctttttgaagtagattcgccacaatcaaatttgaatacagagaattttgaagtttaagcatcaaacaacaaagtaaaagtccccaagatacaacaaagatctaggcaagtcttgttcctgtcccactcccaccccacccctaatgaaacttaaaaggtattcccatttcaattatggcctgtatcattcttggcagtttgggaagagaacttttggcttccattggtaactcaacataaatgttgcatagaatttatatatttcaaaattggcctaactgtagaaaaggcaaaatggaagcatttccgatagagccctaaatgagtacaaagtcactttgtaaaaggtgagtgacactaaagtaaaaatatgaccaaaataagaaatgtgcatattagacaaccctgcttcccgaaactttaggaaggacacggagttgtgagtcacacaagggctatgctacttgaagtcaatgttcaccaatcaggcagcactaggtacagaagtcttggttctgaacctggacccaggagggaagtctgtgggaaaggggagaagagaatgacaagagaggatgtcatattaaaaaaaggtttcaaacaatattggcaggtgtctactcacaaggtgattggaaaactgcccacgaggagaagtcaactttacctcctcccaaattcacagtacgcgagtgtagtagggtcattgctgggagataaattgtctgaggagggcccacccttcaggtttaccagaaatcttagggtttggcccccctggtcacaggctaaatatatggtttaaaagttttattaaaaagaaaaacagaacaagacacactcacacccagatgactaatgaaggctaagcagaatagtctgagtttgctgagactaaagcagggatagtgttgaaaagttttcctttcactagtgggacacattccccttttcttttcaaagaggaagaacatggtgtcatccaatgtgaagtgagcagtttcgggtcaaactcttatggtaagaaactaaaaaaagatgccaagagacaaaccttcagaaaaagaagaaatgcaaaagatggaataaaaaccctgatcattaaaacagagacaccttcactggtgtccaataaggattctctttacaaaacagaaacaaacaactcaaaaatttaccatactttgtaatgaaaataccagtatgttgaagacccagcagactgggtttctattagaacaagtatcagcaaggtcatgtagacttgtagaaacttttgccttttcctgcaccagacagatcattgtccagttgggttgccagctggagaccgaaaagaacctaaaaaatggatctttttttttttctttttcccatggtcacgcatccacacaaatgagtcttttggatgagaaaagtcacagcaacttgagttctcctaatgaacagatgactttttagccctgtttgtttcaatggggaaaacaatgacaaaaaaaacaaaccccaggcaggcacgacacttatgtaaaatgaacacagttagtacaaaaccagtaaggcatcactttgggaaggtcagcaccgaagaggtcaggcaaggctcgtccagacggggcttctgggagggagtgaccctcacccttattgagctgcgtcatgttggttctgagggaaagtgcaagtcttttgcagggtgaccgcatcaccccaccggaagctgggggcggggacgctgggaggtgttgggtgtgtgttctaaaccctcaaggacgagaagggaaggcaaggtccatggctcacccacatgtcgaggaccaggtcctcatccattttaaaggacacagatacccccagccctagcaggaggaggcgagtgtgtaggactgtgaggatggacaactaaaaaccaaaactgagcaggaccaaaccaaaactcaactactgcggttcttactttcaccaaaggattgattctgaccaagaggggacagggggaaaaaaaaatcttcaaaaatcaatgcatcagaaaggaagaaactcaacctcattttcaaaaggtaacctgttctccaaagtagaacaagtctcactatacacagtgtttgcagaaaaaaaaaa

SEQ ID NO: 81411 - DNA, 685 bp, Homo sapiens
  sig_peptide (243)...(378): this location contains the signal peptide sequence, MNLAVLSFPQFLPCFSSIFSDFVNYSISFHRIPILLKLSRICYFQ, Run with SignalP
  misc_feature (390)...(257): similar to gi1480120 in the genepept database release 114, Run with FASTXY 3.3t00, default parameters
gccactcacgtgtgggcacatatctaggcccagccaactgatggctctttattagaacttggagcccgatgaaatgatgcaaaagacctgaaagaatcagagatgattctgagaaattgagcagagatgcaggaccaggaatgtggcagcaaatgcctaggttcagcagagcccagctacatggtgacaagtgacaaatgacaacatcctagtggtggcatcccaagatctgctttcgtcgaatgaacttggctgtgctgagtttccctcagttcttaccttgcttctccagcatcttcagtgattttgtgaactattcaatatcctttcatcgaattcctattttgcttaagttgtctagaatttgttattttcagtgaaaaatataaaccagttatcccctcacattaaaacacactccacttaggcatctcctgtgatctcactggagaaaagtgtggacgttatttgtaatttgactcagaatgataggattagtttggtactagtaacaatggagataagtaactaactttttgtgaaacttcttcctggggtgaaacaaaatctattgtggaaactctttccaatcatctctggaaatttattaagtgacctagtatataatgataatttaccatgatacttgataaaatagttttgtgtgttcagaataatttctttt

SEQ ID NO: 81412 - DNA, 403 bp, Homo sapiens
  sig_peptide (191)...(326): this location contains the signal peptide sequence, MKLQVFAVNITALKAARLELFVLPGGFIVFLASELKLQTSLESVA, Run with SignalP
  misc_feature (89)...(315): similar to gi2645300 in the genepept database release 114, Run with FASTXY 3.3t00, default parameters
ttttgtatgttgtaatggggatctcccccctcctgtgtccagaattggtgggttcttggtcttactgacttcaagaatgaagctgtggaccctcacagtgagtgttgtgtccggagtttgttccttctgatggtcggatgtgttcagagattcttccttctggtggtttcgttgtctcgctggctcaggaatgaagctgcaggtctttgcagtgaacattacagctcttaaggccgcacgtctggagttgtttgttcttcctggtgggttcatagtcttcctggcctcagaactgaagctgcagacttccctggaaagtgttgcacctcataaagacagtatgagcctgaaaagtgagcactagcaagagtaattgcaaacagcaaaaagaataaagctccta

SEQ ID NO: 81413 - DNA, 400 bp, Homo sapiens
  misc_feature (1)...(400): n = a,t,c or g
  sig_peptide (183)...(318): this location contains the signal peptide sequence, MPCILLFPELPTSSFLCLPTWIESSSRTESAITLCSLSLQCPAHH, Run with SignalP
  misc_feature (67)...(209): similar to gi11605 in the genepept database release 114, Run with FASTXY 3.3t00, default parameters
aaaagatgggtgttaggcatttgctggtacaccactgatttgaaaccaggtcatctgatgctacagctgactctccaacctctatgctacagacaattggcttcatgattccctgacacatttctgatgcaaaaaattcctgaaaccaccctcctcctcggaatccctgtggagagcttgccatgccctgtattttgcttttccctgaattgccgacatcatcatttttatgtctccctacctggatagaaagttcctcaaggacagagagtgcaatcactttatgctccctgtctttgcagtgtcctgcacaccacactgctcagtaactattcactgttgaaggngatgctgattgatatacatcatcaccctactggtgattaaggattggtaacat

SEQ ID NO: 81414 - DNA, 404 bp, Homo sapiens
  sig_peptide (262)...(397): this location contains the signal peptide sequence, MSLRLRFFKKIYLLHSWDVLTNHLNTQWGKTVRNFYLLLFKSLWV, Run with SignalP
  misc_feature (294)...(184): similar to gi3127900 in the genepept database release 114, Run with FASTXY 3.3t00, default parameters
cccacgcgttcgcggacgcgtggaacacagcacaccattcatttacatacgccctatgactggtttcactctacgatggcagggttgagaggttgaggcagagactgtatggcttacaaggcctaaaatatttattagccagtcctttacagaaaatgatttcttgaccctagggatagatcatcgtggatgaaaacttacaatggtgtagaatcccagctccatctcttatcagctgggttgccttagacaagtgactttatgtctctgaggctcaggttttttaaaaaaatctatttattgcattcttgggatgttttaacaaatcacctcaacactcagtggggtaaaacggtaagaaatttttatttgttactgttcaagagtctttgggtgagctagat

SEQ ID NO: 81415 - DNA, 605 bp, Homo sapiens
  sig_peptide (82)...(217): this location contains the signal peptide sequence, MIFLLGISFIKFFLPEIYKVHTSKYYYISLSLRGYPSLDALSLHI, Run with SignalP
  misc_feature (94)...(267): similar to gi552132 in the genepept database release 114, Run with FASTXY 3.3t00, default parameters
aggcagttgatccttccgaaaacagttatactggccactggttagacattgtccagcaatgagtgatgaatactgtgagccatgatttttctcttgggcatttctttcattaaattttttttgccggaaatctataaagtacacacaagcaaatattactatatttcattgagtctaagaggctatccctcgttagatgctctgtcattgcatatatcactttaaaagactgttaagtaaacatgttttcttaccattcaactgtttacatgcatcccagttttgaggatattataattttttttaaagtccatattggaatctctggaatctctatgtcttgatgagaccatgctttgatggcaaaggtcagtagcttaaatactgctgttgacagttgaactttttaataagagtaattaatggcactaatacttctttggagcaaggatttatgtagaacatgtaaaatgtatgaattattctaatagcctacaatttgagacagactgacagggtttttgtttaatgcttaaactttagaaggtcaaagaagaccatttgcaggctattataatggaggggaaaaaattttggaccttggg

SEQ ID NO: 81416 - DNA, 337 bp, Homo sapiens
  sig_peptide (39)...(174): this location contains the signal peptide sequence, MPRRTRGGLWLCNAHKSCQKYLSSLKLSTLLSPLLVLPFYTPSLK, Run with SignalP
  misc_feature (108)...(325): similar to gi2224437 in the genepept database release 114, Run with FASTXY 3.3t00, default parameters
agaactgtttgtggaaaacaacggggctcacttacgacatgcctagaaggacaagagggggattgtggctgtgcaatgcccacaaaagttgccagaagtacttatcatctttgaaattatccactttgttatcccctttgctggtgttgcctttttataccccatctcttaaaggatggggcatttttgttttgaggttttattttatggtaattatagccgactgtaacctgttcaaaataataatttaggagctcttctagagttgggaatgctgagaatttttaaaaattactaaaacttggaatagctttttcaaatgccaaagcagatttgg

SEQ ID NO: 81417 - DNA, 403 bp, Homo sapiens
  sig_peptide (96)...(231): this location contains the signal peptide sequence, MNSCRNLILNCFLLCFSLGMNIKNDYQKDWCQIIFWPIKSILLST, Run with SignalP
  misc_feature (131)...(330): similar to gi1142588 in the genepept database release 114, Run with FASTXY 3.3t00, default parameters
gactaatgaagggacaagtgatttgcagttaggtgttcacctactttctgggtacatggaaatgaagagaggagagtgaaatttcttttttatttatgaattcatgtagaaatttaatattaaactgctttttgctttgtttttctttaggtatgaatattaaaaatgattatcaaaaagattggtgtcagattattttttggcctattaaatcaatattactatccactaaatttttaaatttgtcttcaacaatcattttttcttagggttatatttattatttcatttcaggatatgcctatgtctggaaatcattcagttgattcaaactttattaggaaaccctgcttagaaaattagtttaacccagagaaagtacaaattagcctgaaaaaaaaaa

SEQ ID NO: 81418 - DNA, 412 bp, Homo sapiens
  sig_peptide (155)...(290): this location contains the signal peptide sequence, MFTHWLGPPVYIKQFIVMIVSILTLFPVLQGMLRNFLYLNIMFVV, Run with SignalP
  misc_feature (101)...(333): similar to gi2636573 in the genepept database release 114, Run with FASTXY 3.3t00, default parameters
accacgcgtccgggtgaaatgttaaccctctcattagatctactagtttatcctgttgattctattgtgttttctatgtaaatgattttgtcagctataaataataacattttattttctctttccttgcaatacctatgctcatttattttttatgtttacccattggttagggcctcctgtatacattaaacagttcatagtcatgatagtgagtattcttacactgttcccagtattacagggaatgcttagaaattttctttatttaaacattatgtttgttgtagccttgttaaaggctattttataatttttactagaaatattttgacatttattgggatttttttctatctctaatctattgagataggcacattccttttgcttcactccattataaagggag

SEQ ID NO: 81419 - DNA, 4000 bp, Homo sapiens; identical to SEQ ID NO: 81134
  sig_peptide (1275)...(1140): this location contains the signal peptide sequence, MGRKEDIFLNILFVPSLKCINILIWFYFNFSFIISQLSFWVALQH, Run with SignalP
  misc_feature (378)...(122): similar to gi1294789 in the genepept database release 114, Run with FASTXY 3.3t00, default parameters

SEQ ID NO: 81420 - DNA, 794 bp, Homo sapiens
  misc_feature (1)...(794): n = a,t,c or g
  sig_peptide (231)...(366): this location contains the signal peptide sequence, MHCSFISAFLLPVFLSLTVSASIFVSLHSFPLSLSYFSFLGSFFL, Run with SignalP
  misc_feature (423)...(229): similar to gi3135267 in the genepept database release 114, Run with FASTXY 3.3t00, default parameters
cacgcgtacgtgaattctggaaggttatgtgattccaaatcctttaggttgtcgacctaagcctaagaagtttgtcttcctcctagtctaaaaagctttctcctgattaaagccttctggctccactcacatgccaccttagagacattttataactctttgaaggagacaaagacacaacctctaaccaggtctctttgaaaaagatgataataaaacttctacacacaatgcactgttctttcatttctgcttttttactgcctgttttcctgagtttaactgtttcagcctctatctttgtgtctctccactctttccctctttccctctcttacttctcttttcttggttctttcttcttatctgtctgtcttgatctctattctagcctctttttctgattggccctctcccctctcttctgtctgattggcctgtatccttccatcaccccatctgtctgctggattctccctgtctgcctgcagtaatgtatgtgatagcactttataaattataaagcactatgttgtataaaacaccattatcactttgtcttccttcttaccttattttttcttcctttatctggcttcccttcttctctctttctctctctctctgaaagcctgtctgcatcccttttggagaatttgcctgccttctctgtcagtcaatctccattccctccctgccagcctatttttctgccatccctcttctctgtctgctcagttcttgcatctcctccttctgggggncccaggtttcccctataattctttttgccg

SEQ ID NO: 81421 - DNA, 718 bp, Homo sapiens
  sig_peptide (235)...(370): this location contains the signal peptide sequence, MILFKLCFPNRFKFAFYCGFSRAPDHHNPFLDFLLAISGMGFDST, Run with SignalP
  misc_feature (117)...(277): similar to gi1813528 in the genepept database release 114, Run with FASTXY 3.3t00, default parameters
ctgaattatcttgttccatgaagacatctatcaacacctctctttctttctctaagggccatagttttcagtttggtaattagtaacacacaaaaaatgcaaatcaaaatgaaaatagcctagaattactttaagcctagatgccaaaattgaatcacagtctaagaaactcatgtataagcaaatctcacctttgtaatatcaggctcctagtaaacattcttctcaaggaacatgatattgtttaaactgtgtttccctaacaggttcaaatttgctttctactgtggattttccagagctcctgatcaccataatccttttctagactttttattagccatctcaggcatgggctttgattcaacatgtcattcaactctctttgcaaacatggagagtcagaatgtatttaagaggcttgctaccaccactggatcagatgaccccaggagagtccaggacaggtccatggattgctgtgcatctatttattacaagaggactctgcctcatggcttattcatccaactcttcacaactttttagtaggatatgtctgaaatcttgacgacgctcaattcccattgggctgctggtattagacaacctgggaaatttttaaaatggggcttaatttaaaatgctgaaaaacagaccccgggctggttgttcaaataacacccaaatttatttttttaagtccgaacggtgaaac

SEQ ID NO: 81422 - DNA, 899 bp, Homo sapiens
  sig_peptide (424)...(559): this location contains the signal peptide sequence, MLGFLFACFHLCAVDLAAHCSQIPFPALLFVTYDNAIILELCTML, Run with SignalP
  misc_feature (390)...(542): similar to gi5802370 in the genepept database release 114, Run with FASTXY 3.3t00, default parameters
caattaattcagaaaatgttgaattttactgcatgcagagctacaagttgctagatgttacacattctaaagtatattactgtttacaaagtggtggaaagaagaaattagggctgttcttatgagatatctttgtaagacttaagagtttatgaaaaatataatggatgccttgtaaagcaggagctccctaccactggaaatgttcaaataactttgaaaaacacccccattagagatgtgatatacataatttctacaatggaaaaaagtaagtctagattcaatgtaatggtatttatctacgcaatgaacactctaatatttttgtggctacaaaactcagcattgtgcaaagttccagtataaagcacattttacactccagcaacatgaactgcctgtaggatcctcaaacaccgaatgctgggttttttgtttgcttgttttcatctttgtgctgtagatcttgctgctcactgttcccaaataccctttcctgcacttctgtttgttacatatgataatgccattatactggaactttgcacaatgctgagttttgtagccacaaaaatattagagtgttcattgggtagataaataccattagattgatctagacttacttttttccattgtagaaattatgtatatcacatctctaatgggggtgtttttcaaagttatttgaacatttccagtggtagggagctcctgctttacaaggcaaccattatatttttcaaaaactcttaagtcttacaaagttatctcataagaacagccctaatttcttctttccaccactttgtaaacagtaatatactttaaaatgtgtaacatttagcaacttgtagctctgcatgcagtaaaattcaacattttctgaattaatt

SEQ ID NO: 81423 - DNA, 984 bp, Homo sapiens
  sig_peptide (814)...(949): this location contains the signal peptide sequence, MSLMSYLLWRMTVLFVNVHNQDLGLRRGPSPKEFEVSQCVGRWEP, Run with SignalP
  misc_feature (282)...(384): similar to gi854727 in the genepept database release 114, Run with FASTXY 3.3t00, default parameters
ctcaaacatctgaaaagaaagatgttgcctgtgccaattccactttttccagctgccccttgatgaacactcccttataccagaccactcttggacttctgactggtgtcatcaagtcctcagaaaatattttaagttattttaagttattaaggaagggatgatttggagacaaggagtaatgaaagatgggtaaaaactggaaaagattctggtgctaagtactaccccttcatcttccatggatggtcattacctttcctgtcctcctgttatatgaacacacacacacacacacacacacacacacacacacgcacacacataccacatttcaataagtcttcattgttctgggcccttacctttcctgtcctcctgttatatgaacacacacacacacacacacacacacgcacaccacatttcaatgtctgcatggttctgggggtaacaaaggcaagaagttaaagtaagaccacatttgagtattacttactctgtagaatcaaaacagagtagttaacaccaattatgcaaactacttttttttccagcagaaagggagctgacatgatcaaatccatgttttcaaatgaactgaaaaaggcatccagcaccacttataacacatttatttcagttccaggctgacagccctggggcatctagcaggatgcataattgtcatctggtgagagttgggactttgctcaattttaataccaatctctcctgattgtaattacctccactactttcatgatccccctacaatatttttttaaatgatatatttattcactgaatcaaatgtcattaatgagttatcttctgtggaggatgactgttctctttgttaatgttcacaatcaagatcttgggctgagaagaggcccttcacccaaggagtttgaagtatcacagtgtgtgggaaggtgggaaccaggatacccattcatttccaaccgagacacagagaag

SEQ ID NO: 81424 - DNA, 412 bp, Homo sapiens
  misc_feature (1)...(412): n = a,t,c or g
  sig_peptide (275)...(410): this location contains the signal peptide sequence, MLAYIILCKKFPPLLICVXEMYPLRRSSLRHLLESFTKNSISEFL, Run with SignalP
  misc_feature (65)...(159): similar to gi396221 in the genepept database release 114, Run with FASTXY 3.3t00, default parameters
cccacgcgtccgcggacgcgtggggaaatggcaataggttgttcatgacgaaagcattccatagtccaataaattgagtacgcatgaaattctcatcttagagattcataatactcattagcatattaaaggtcccagatattttacactgaagaaacctgcctacctctttttcatatagatttcccatactcatttgaccacagcaccctttatctcagagcacccttcaacatctcctggaaatagtgttttcatagagcttagttgagaaatgttggcatacattattctctgtaagaaattccctcctttgctcatctgtgtgngngaaatgtatcctttaaggagaagctcattaagacatcttttggaaagcttcaccaaaaactccattagcgaatttctccga

SEQ ID NO: 81425 - DNA, 760 bp, Homo sapiens
  misc_feature (1)...(760): n = a,t,c or g
  sig_peptide (42)...(177): this location contains the signal peptide sequence, MLFTVFLLFSSSSFTQSPLKPHLLQDDCLSGAMIAAGSRVQRWED, Run with SignalP
  misc_feature (251)...(536): similar to gi1127773 in the genepept database release 114, Run with FASTXY 3.3t00, default parameters
tttcgtcttaaacctgctgtgatgtccactgtggggtctccatgctcttcacagtcttccttctattctcaagttcttctttcactcaaagtccactcaaacctcacctcctacaggacgactgtcttagtggggccatgattgcagctggttcccgtgtccagcgttgggaggattctcctggcatgtttctaaaatgtgtgtcacctaggaggtctgtcctctcgagagactgggtttccagacaagggccaatgctagaagaaacatctctaagtgtaaactgaaatggattaatcaagccaagggactaatcacatataaaatagggagacgagttttctttagttctttgcgtttgtgggccatttccagctgccctggcctgaagagccgcctccaggatcctgctcctgggtccctctctttgcaataggattttctcttgctcacatattggagatggagtcaggactagatgtcagattttcccagttgtcatccaagttaccttgggtcctcctgctacttcctgccagccagggcccaaataggactaacatctactgtcctttatcaatcaattcaaggagccctgatatctaagaagccctccacaaacacccacacaacaggttctatgttccaaataatttaaaaaacattgttaaacaaaatttcacgaatggtgaagatttataagaagattactgaggtatgggggtatgggtntggaaatgccccccccccctggacgtat

SEQ ID NO: 81426 - DNA, 4341 bp, Homo sapiens
  sig_peptide (3206)...(3341): this location contains the signal peptide sequence, MMGRIFAALSLIKLMMYSLFPVIESSLCHLEVWAWRHIWPTAGRG, Run with SignalP
  misc_feature (2971)...(3034): similar to gi847847 in the genepept database release 114, Run with FASTXY 3.3t00, default parameters
ttttttttttttttgatgagcaataaaattcacatgttctttatttagtccatatgatacaccgttttttagagtttttgaaaattagataaaagagcatattaaatggcaagtgtatgaagtttctcttcataaacaatgtcaaaacaaaaagttttgaattacaaaatgttaaaaaatatgtcggtacttaacagtttcactaatgcataaagttacagatattttctaaagaaaaataattgtgccacttacctatatttgctgtttctatgaacttttttattctgtacataggacattttgtacaaaatatgaagtctacatttttattacttattaccataaaacaaagatacaatgtatgtacaatattaaaaggaagccatactaaagccacactaaaaagacacttggaatagtgacatttctgatgtacagatacattttggaaagagtgaagatgccaaacgcagaactttatgaagaaaaacagtcaccggtttattttcaatgtagtacttttgaaatcagtttggtacagaataaacagtctctatacaatgatatgtaagctgacaattagcacaggagtccgagtactaactagggaaactttaggaggccaaaatattaagtaatactcttgccaaagaaaattagtttctctgaaaacttttatttttctttttggtgagtgtttgtcttcaataaagagcagaaagaaaacctagacaaaaagatgttcttacacactgagctttacacagtcacccaaacattgatattttgctttttcccgagggcaaaaagagagtcttcccagaaacctctctcacaaacatactgaacatccaaaatcaaggatatttgagaatctatcagctaaagacggaagttcaaacaatggtatatcaaaatacataagacgctgctttatacaataaaaagcaccctttttccctcaaaaggagaaggcatctaaactgttttttttaatgatagttttcataatggtaaaatggagagatacttgtcaagtttctcaggaagtattcatctcacaaagcggacttgtccacttttagctggggcaatcttcgcatttcatacctgcacttgctcttaccacaagaagtcccctccccccaggtgattttcctccaagacacgaggacagaagcattgccagtggcttgaagtgacagcagtgggcagcaggtaccagagctgcacaaggagcagtgtctgcttttcactatctttgaaaggatacccgagacctcgatgaaaaaacagatcctaaaataagccacattttgtcttttatgcctcaagacacttaacattaagttatataatcttatgccagagatgaaagaaactagatcacgtgtttagaatagcagtacacatctcaagtagctttcaagcaggataaataagtcaaaatactggccaccctgagagaaataaagaatagacaaagcactaagtttaaagatttttctccttgtgctattccatctaaaacaaaagctcagtacatgcaaggaactctgtggaatatatagcagcatgtgaagaccgatgaaaactcagacactgtattttccttacaaggtgttgataacgtgagctcttttcaacagaaagagctccactaaacgtcatcctcgctggtgcctcctccaagctctcagaacagcactgcagccttcagtgaaggcagcggcagtgccggccccgtgcaatgctgttgtgttactttatgcttaaagggcgcctgccagtttgccattaggcctaaagaactggccttaaactcaaaatgattttgcctcctaactttcccataaaatgtgggaattcttaggagactataattttattaattcaagagccttgttgaagggcaacaatgtttaagttgacggaaacgaaatctgcaaataaaaatattaacacataattttaaaactccaatttctgtcaaggtagacagagcaagctcttttaagataaatttcagagcaatctcttttaaaataaatctcttctacaggcttactcctggaatcctggagtaccacagacttggaaatatggctttaggtacacacaagagaaggagacacggtgttcatgtcactcatcaaagtgaagagaccccttagaaaataccagcggctgaggattgtcatttgcccagtacgttgcgtgagaactcgaaagcaaagagccatttcactgagattgaaaaacaaacaaaagaactgctggcgtaacaatcacgtggaaaccatttcaaaggctgtaaagtcttaaaaaataggtcctattttttaaagcgttcctttgatttggaaaacactgatgttatcacagaaccacctatgttaaaagatcctaagttccatttgggagaacatgaagatgaagggcagggtgctttcctatcgctctgactttgtgaaatagtctgacttggactacgctggggtggcggcgacactgcgaggacaccgtcgtcaacccgcggctctgccagcgggctctgggaagtcaccattgtttgaactcctaatctcgcgctgaggcggacgcacgttattgcctacggaacggggtccaagaaagctttgagtgtaactgattggtatggcacaggaagtatgtattttctacagaatccggaaaagaactggcgggcccggccccgacgcggcgccccggaggctagcggccgtcctgggaggccagctcatcggccctgcagtgagcttccaaggctttcttggtgtgggggtcctgaggcagctcggacttgcggagtgcaagaggacggtccttcttcggatctttctgtgcctgatgagcctcgtccttcactgtctttctcagcatctgcacatcttcaaataaaggcccatctgtctccattgcaaccggaatgctcatggtgctggcttgactatacactgtgtactggggattggctttggctagattttctattttaacccatgcttcttcccgttctttcatttttagcttctcttttagtttctctgctttgaactgttgtgtacagtcatcaaatagcttttggttcatctccatgaagagcttcagggcgttgtatatcaagccatgtattgtcttgttccaatgggtctttgagttgcggtacaaggaaggaaacatgatgggcagaatcttcgctgcgttgtcactgattaaactcatgatgtattcattattcccagtaatagagagctcgctctgccacctggaagtgtgggcttggagacacatttggccaactgccggaagaggggttccatgatcttcacaaattctgatggttcaatgacatctaaaatctcttctaattcgtttaagaacattacttcttttggactgtgagtctttggccagtatttgagaagtgccatcaccactggttccgtgagggtgctgtccttttctaaaaactgcactacacagtatgccagctggggatggtagacactcagagatttcactttgtgcaaaggtagtaacaccttcaataagaaaatcttgtgctcttcttttagtggtaaggcaaatccattaattatacttcccaatatttccagtaactctgctatgccattatgatgctctgtttcataaataaacctataaaatatattatttatctgttttctgatgtaagctctcaagcctaggaatttcccatagattctgtgaagggtggttttaagaaaatctctctcccgaggatcttcactgtcaaagagctctaaaagctgcaatacaaacttctgatcaatatatttcttcgctatattaggttggaaatctggagactctaaaaatctttaggaaaaattcataaacaagctgtagatgaggccaggctgcttctaacgttggttcatcttcctccgggtcaaattccgctcccgtaggattggaggaaggtggtaatgttcgaaacatgttaactgcaaacatatggactacttctgggtaaataggctctgtgatcacattccgattatgggtgatatattctaccatttcacttaaagcagctcgttttacttccttccactttaggtcacttagtggatcagaaacaaagtcaaagaggacgcaacactgacgtaacttctggataaaaagcttctcttgatcagcaggaggaacatctcgaatatggagaaggaccacgggctggaaaggcccattggagttggccgcatccaccaccatcctgctgcccgctttattacatgtcaacatctagacttcagcgggaaaggcaat

SEQ ID NO: 81427 - DNA, 781 bp, Homo sapiens
  misc_feature (1)...(781): n = a,t,c or g
  sig_peptide (87)...(222): this location contains the signal peptide sequence, MKPTFFAITLSLILLGLFLSMPAQSLSSRQTLLFACGSAEVLVSC, Run with SignalP
  misc_feature (302)...(151): similar to gi2626745 in the genepept database release 114, Run with FASTXY 3.3t00, default parameters
ctcccgggtcgacgatttcgtggagaggttaagtcacgtctccagagttataaatagaggggctttgaacccagggctgagtaaggatgaagcccacattctttgcaattactctgagtctcattcttcttggtttgtttctatctatgccagcccagagtctttccagcaggcagacacttctttttgcttgcggttctgcagaggttctagtcagctgtgggttgccttcaactctgagctctccttccccagctgtttatgaaagtttgagcctattatatttgtatttaccttttatgatgggattttggattcagcttttaaaaggcttatccatccctcaaaatgtgctcctcaaaatccaaacctctggactgtgtagtttgtatgtgcatacatttgtgctaattttatcacagagcagaacagatatttgacagatttattgtggagcctgcagttctcttgggagggttaaatgtggggcatccaacatactataaatctccattgctgttaattaataatcactagtaacggagtcttcttctcacctttatgttagtaaacactgactgggccccgcgacccctaaaactttaggggcaatttaaacggtttaatggttaaggggaggggggcccgccgaaccaaactgcggaatggggggagggggctcggcacaccacgcgagcgccgctcggtgggggattaagttgggggggaaaagtggtggngagttaaaagggggagggcacccccccccccccccccccct

SEQ ID NO: 81428 - DNA, 503 bp, Homo sapiens
  misc_feature (1)...(503): n = a,t,c or g
  sig_peptide (165)...(30): this location contains the signal peptide sequence, MKNLSAFLALGLVMKTITSYQIRVAKRFDFTWFSCLLSLVHVKEG, Run with SignalP
  misc_feature (235)...(342): similar to gi555490 in the genepept database release 114, Run with FASTXY 3.3t00, default parameters
caaattgtatctttggtttctctctttcccttccttcacatgcaccagggacaagagacaagagaaccaagtgaagtcgaaacgcttagccactcgaatctgataagaagtaatcgttttcatgaccaaccccagtgccaaaaatgcagacagattcttcattaactaggttcagcttcttccaataatttattttaggtctgttgagaaaagactttatattttcagctgataaactttgctttgcttagatgtattctgagaacacaattaaactccactcagcatatgcgtgtgttgaatacaaacatataaggtaggtatatgtgtgcagtgtgtatgtgctgtgtctaaaatgcttgtacccaagcagaaaataccgattttctttcaaatgtccctggaatatgtacagaagttgactacagactggatcacaaagaaaatctcaacaaattccagaagaaagtacgaaatcgtcgacacggnnnttccggaccgat

SEQ ID NO: 81429 - DNA, 440 bp, Homo sapiens
  sig_peptide (296)...(431): this location contains the signal peptide sequence, MLPVLTGGWPLTSPGHLICVLLNFFNSPNSYFHFLPLSYHFWSHF, Run with SignalP
  misc_feature (73)...(234): similar to gi5708242 in the genepept database release 114, Run with FASTXY 3.3t00, default parameters
tttcgtacacagtggaggacagtgcaggaggtttgtcccattgagtctcatggacaggcaatgagggaaggggctctccagagggaaattcagagctgtttccagaagaaaacaagtagagtctgtgtggccccaggactggtgcctgctgcccacatgccatgtccttgtccaggagactccatatgagccctgctcatttctcagagacagaaagcagggccccaagcagtttgctatcttgcctgaaccatgtgatttgcaattcagactcagacagactcaccatgtcctaatgcttccagttcttacaggtggctggccactaacatctcctgggcacttgatatgtgtcttactgaacttctttaattctcccaacagctattttcatttcctacccttatcctaccatttttggtcccattttacaggtgggg

SEQ ID NO: 81430 - DNA, 652 bp, Homo sapiens
  sig_peptide (169)...(304): this location contains the signal peptide sequence, MGRRKSFFFLFLECRQKGLHIPLCTCSHAPRPPLAAPSALILPPE, Run with SignalP
  misc_feature (377)...(402): similar to gi258911 in the genepept database release 114, Run with FASTXY 3.3t00, default parameters
tttcgtgttatcttctagcctaggcaataaaaaatgcctacagatgtttcaatagcaggtggctggattctatatcttcctcattctctttaactctatagcctgtctccaaaattaacctaaggataatcaccataatacttctggagcctaggactaataacctggatggggagaaggaagagtttttttttcctttttcttgagtgtaggcaaaaagggctgcacatccctttgtgcacctgctcccatgcccccaggcctcctctggctgcccccagtgccctcatcctgcccccagagatctcccacacttcccgtgggattctactcagccatggtcttttccctacagcgacaatgcctcttttctttcccagccacgcctcccattcccccacagtgacaatgcctcttttctttcccagccacgcctcccattcccccagtacttaaaataaaaaaaaaaggtgaaacaggatcttgttatgtggcccatgctggactggaactccggggttcaagggaccctccctattaaccctcccaggtagccgggaccacaggggcacaccacctggccgagatcgtcatgtttctgagttgtctagaaaagcaagaaggcggacggtctttgaaaggactccatact

SEQ ID NO: 81431 - DNA, 681 bp, Homo sapiens
  sig_peptide (295)...(430): this location contains the signal peptide sequence, MWDHFILSRVLFCLFVFHSRVLKDHMASNAYKSALFFTVRYLETK, Run with SignalP
  misc_feature (464)...(323): similar to gi157004 in the genepept database release 114, Run with FASTXY 3.3t00, default parameters
taccgctccggaattcccgggtcgacgatttcgtgaaaaatcattgttgtttatgagatgaagatcctgctattcatatcttgattgagctgcttaataaaatgaacaatattaaaatatgttttgaattccaggcaaaaaaagtttattcttgtatgtaggtgcttcagaaagcaaaacaccaaaattgttcattggaacctagcctgtagagtttagcatatcaaagaaatagcattgtttgtaggttggcagaaaagaacataaacaaatcattggttaagtgatgtagtgatgtgggatcattttattctttccagagttcttttttgtttgtttgttttccattccagagttttaaaagaccacatggcaagcaacgcttataaatcagctttattttttactgttaggtatttggaaactaagcagttcctattaagatgctgttgctggccggacgcggtggctcacgcctgtaataccagcactttgagaggccaaggcaggcatatcacctgaggtcaagagtttgagaccagcctgcccagcatggagaaaccctgtctctgctaaaaatgcaaaaaattagccaggcgtggtgacaggcgcctgtcatctcagctacttgtgaggctgaggcaggagaatcgcttcaacctgagaggtggaggctgcata

SEQ ID NO: 81432 - DNA, 1221 bp, Homo sapiens
  sig_peptide (533)...(668): this location contains the signal peptide sequence, MCSCLHTLQRRFLHFVSIALSKIWQNNAFHLQVEVSWLSTFVDKV, Run with SignalP
  misc_feature (37)...(274): similar to gi1763261 in the genepept database release 114, Run with FASTXY 3.3t00, default parameters
tgcagtgcggtggaattcggaggagtggtttctgggaaacaaaaaacaaggttgttctcctgcaatttgttcattctctgttcccatcagagctctcgtgttgaaagggattaaggagatgttggtgtcttttttttccttcctctggattgtgaggaactgaagtctttaaatgaatcagcagttcattccttgaagttagtcttgaagacatcagtattttcccatttcatggtctgtcattttgtattagaggagagtaagacactgtataaatggtattttgcaacaaagtataaacctttgggttgtatgttttctgttgctttatagtttaaaatggaatggacaggaacgtttttagaaatatgcaaatacatgctctcagtggataggcttacactttggcaaaagtaacctaaatccaagcggtcatgaaccgttgagaattgtctcttctctggagacactgagctggaacctggtctcgctgtgcagtgggtggcaggcagcctctgccttttgattaatcatgtgcagctgtctccacacactgcagagacgctttctgcattttgtctctattgcgctctcgaaaatttggcaaaataatgcatttcatttgcaggtggaagtgagttggttatctacatttgtggataaagttattgtcatgagactcatttcttcaaagcatttcacagatacgatgaatgacagagtgcattccttcctcaacgacattggctttgtttgcctcctcagttaaatcaaggtgtgaaacaaaccaggagaaaaagaaagattatttaaaatgaggccatcagtatcaggaatgagaagaacagctgcttgcaaactccagcactgtgtggcgttgtttacaggacagaaatcttgcttctgtaagttgtggaaagttaacgggatgttaaccttgtcggaccttgtttttgttctgcacccctcctttgcttaagagactacctaggtggagaaacgtactggggccggggtctgcacctctacaccccattacctttccgggcaggccagggtgggtttggagaacttttccgaacacacttctttctcaacgcaggaaaccctctgcgaccttaactatggggaggggccccaaacctaatattcgtaaagcgggctgaaggcatccccttggtcttacgggggccgggaatggtccttaagccttgggaaacc

SEQ ID NO: 81433 - DNA, 905 bp, Homo sapiens
  sig_peptide (163)...(298): this location contains the signal peptide sequence, MPFPFLWLVLIWLLLCIFLAYPPGSDCCEGRPCWILCLTPPLGTL, Run with SignalP
  misc_feature (400)...(875): similar to gi3641328 in the genepept database release 114, Run with FASTXY 3.3t00, default parameters
tttcgtgcctgggtcttggcctggggcagggctcagcatgaagggcctcgacccagctctgcttgccccggtgcatgactagggaggggccgcatgtgcgggaggcagcactgcccacacgtactgtgcagacatgtcagatgacttgtgacctttgtacacatgccatttcccttcttatggctggttttaatttggcttttactctgcatcttccttgcttatccccccggatctgactgttgtgaaggaaggccctgctggattttatgccttacccctcctcttggcaccctgacccatagcattttgcacagaagtcatcaaaatcagctcctgagcacccctgggccttgttcctcgtcccctacatcagtcctcctttctttgggccctccctctggtgttgtcctctccctggcatgactttgatgcagcttggtgccctgtggggtggggaggagcgtgctgactgcctcagtctcaaggatagatgggcaggctccctcctgttctggctctccgtcgggattcctgcttgctcctttctggcatatgggtgtaccgtgccgaggctggaccttggcgtacagtttaacgatgtatgtaggtgggcccatatttaggctgcgtggtgggggacaataatgagggtggaggctggtgtactaatatagaccctggccataacagtgcgcgaaaaaggcttggaagtttggagaaccgcttaacaaacctgtttcttaagtttctaaggcctaacgggattcctcggggtttacacccccccacgttggctagacggtcctacattgcctaccttcctctctgttatacgcacgaacccgtcagtccccaagtctctcccaaaaatccgcccccatataggagggcgggcgactccc

SEQ ID NO: 81434 - DNA, 933 bp, Homo sapiens
  misc_feature (1)...(933): n = a,t,c or g
  sig_peptide (403)...(538): this location contains the signal peptide sequence, MFLSLSLTLCLCFSFFCLYLSLSLYLRSFFCLPFHVSVFLCLFPS, Run with SignalP
  misc_feature (152)...(290): similar to gi1336715 in the genepept database release 114, Run with FASTXY 3.3t00, default parameters
ccaggagccaagagcagagcgccagcatgaacttgggggtcagcatgctgaggatcctcttcctcctggatgtaggaggagctcaagtgctggcaacaggcaagacccctggggctgaaattgatttcaagtacgccctcatcgggactgctgtgggtgtcgccatatctgctggcttcctggccctgaagatctgcatgatcaggaggcacttatttgacgacgactcttccgacctgaaaagcacgcctgggggcctcagtggtgagggatgtggtgctcgggcctggctctgccccacccagcgaggcaccgagggccactctgtgatgctggctacagcaagaatgaacccacaggcgcagagcccaacaggctgtaaaggaaggcagtgacctctgcatgtttctgtctctctcactaaccctttgcctctgtttctctttcttctgtctctatctctctctgtctctctatttgaggtcctttttctgtctccctttccatgtctctgtctttctgtgtctctttccctctgtacttttcctttcagttgctcttggcagtcctgagaatcacatttcctggagaaaggtgggagaggaactaaaattggcttcacacagaaatttctgctctctcatccaaatgatgagatcaaataaacccagtcccagtaggcaacgagggtgggcctaaatgtgggcggatggtgggaaggtcttttgacactgcctttttgggtcaagaaaaaatttttttttcttaaatggggaaaggcccttttttccaaacagacctgggtgagggcccctcgaaaaaaaacccgagcctggcggccatggcccccattggcacaaccctttgggcctccctgggngccccaaaaggggaggcattggatttggaggccgccccccttggagggggtgc

SEQ ID NO: 81435 - DNA, 450 bp, Homo sapiens
  misc_feature (1)...(450): n = a,t,c or g
  sig_peptide (9)...(144): this location contains the signal peptide sequence, MTSHRGLTSHLSDCCCRFSAPLLLALFTLFPILQSEGDEPCTSLT, Run with SignalP
  misc_feature (237)...(144): similar to gi3514060 in the genepept database release 114, Run with FASTXY 3.3t00, default parameters
tttcgtccatgacctcacatcggggcctcacctctcacttgagtgactgctgctgccgcttctcagcgcctctcttgttggccctgttcactttatttcccatcctgcagtcggagggagatgagccatgtacctccctaactcgctgctggttaggcgggacatgggatccctgcagggagcttggtcttacctgtctgcatgtcctggcctagttcagcacgggcacgtagtaggtgcattataaatactagaatgaatgtattcattggtcaaaacttaacagaaagcaactaagttgtttcctaataagaaagtcctaagaagtttttaaaaaattgttttggaaaagtagcatgtcttgacaccaagggattgtcttcttatttcttaaagccttccttctcatcctccataaacgnctcttccctgttttagggttttcatagg

SEQ ID NO: 81436 - DNA, 434 bp, Homo sapiens
  sig_peptide (160)...(295): this location contains the signal peptide sequence, MLHWGFFSVALPLSCDFHGYHVGGSERKSPEKKRSLQMPEPVNLR, Run with SignalP
  misc_feature (350)...(406): similar to gi311522 in the genepept database release 114, Run with FASTXY 3.3t00, default parameters
tttcgtgcagtttataagaaaccaaggactcatgagcctaaggattttattaataagagccctctggttaattaacaggcctggatctcagtactgtgaaggctggcagtaccagctatggtttgactgtggtcacagacacttttcctaaactgtaggatgctgcactggggtttcttttctgtagctttgcccttgtcctgtgatttccatgggtaccatgtaggagggtcagaaaggaaatcacctgaaaagaagaggagtttgcagatgccagagccagtgaacttgagatgaaacttgagttggtcacgtctccaggatgtaggagtggcatgggctaggctgcccatggggtcctctgctcaggcatggctgactgggatcacattttttattctttctcaggattcaggagcagttccagaaaaatc

SEQ ID NO: 81437 - DNA, 623 bp, Homo sapiens
  sig_peptide (173)...(308): this location contains the signal peptide sequence, MDFLSRLMLLRMCKCVTATYQYIRRSLFLNLVPLLQTLSILTAHS, Run with SignalP
  misc_feature (419)...(294): similar to gi404786 in the genepept database release 114, Run with FASTXY 3.3t00, default parameters
tttcgttttaagactgagtaatcaggtttctgttaatattaagaggttaaaaatgattctagtattcaatatgagcttccagcctgaagttttatttaatttcaggttataaccttaaataaacaattttcctagcctcattaatgcttaatctaatgttgcataacaaagtatggacttccttagtcggttgatgctactgagaatgtgcaaatgtgtcacggccacataccagtacattagaagatctctgtttttaaaccttgtccctcttctacaaacgttgtctatcctcactgctcacagtgtgctcctcaggccagcactctcatcactggttaaaatggaagattctcaggccctgtccttgtctcttgagccagaatctgcattttaacggaccccccagaggattccaaagtactgtaaagtttagaaagcaccgctatttacagtaatgcagacttgcagaattctgagcctgcatagtatatcattcttaaaatgatactgtctttattctgttaaaattgtaaagtttcactattagggcttgattttgtttttctaattattgcaaaatatttcaaacagaaaagtatcagggcttatttccattgtca

SEQ ID NO: 81438 - DNA, 777 bp, Homo sapiens
  misc_feature (1)...(777): n = a,t,c or g
  sig_peptide (173)...(308): this location contains the signal peptide sequence, MLHTPQTCRPGLCVLASRPVLYTLCLLIPVLCGDTFWASWSLLTK, Run with SignalP
  misc_feature (49)...(214): similar to gi2231335 in the genepept database release 114, Run with FASTXY 3.3t00, default parameters
tatccactgtggtgtaattcgttcctgcagatggtccggcagcatatcccatcccagtgcagaacatcaagcctctgctcaccgtcagcttcacctcgggagacatcagcttaatgaacaactacgatgacttgtctcccacggtcatccgctcagggctgaaaggtacagaatgctgcacacaccccaaacctgcagaccgggcctgtgtgtgcttgcctcaaggccggtcttgtacaccctgtgcttactgattcctgtcctctgtggtgacaccttctgggcttcatggagtctgttaactaaagccactccctcttcactcctttgcttatctgataagtccatacctagtcttatctcaaagggagattcctgacattcagcctttgtcttagcctgctcttttcctcactatgacaagaatgatcctctctcaggtgtacaggtatgtttgcatctggcttacgcatgtctgcacaataaacggactgcagcacctgccatccctaaggcagcagatggtgcacaagacatcatttacacagaagcccctgtaattntaagaatctgacagtcttattaaggaactgatcatcactgtgcgataaagttaccttgaaagacttggggagggtctgcaattactagactgaggctttgttgtgaagggcaccaatcaaggggctgatacctttcttgataaaaattatggaggggtggtaaccccaaaaaaaaaatcagcgggcccttagccttttggaggggccgtgaacg

SEQ ID NO: 81439 - DNA, 1157 bp, Homo sapiens
  sig_peptide (270)...(405): this location contains the signal peptide sequence, MRSKIMIHIHIFLLASFRFKEHVQNNLPRDLLTGEQFIQLRRELA, Run with SignalP
  misc_feature (1069)...(344): similar to gi2984717 in the genepept database release 114, Run with FASTXY 3.3t00, default parameters
cccgggtcgacccacgcgtccgcttccctagtcagataaccagtaacagacagaactgaggtttgaatttatgcccgtccatgccttctccattccactgtaaaggtaggaagaaattgaagatgtctatagactgttttatcatatggtagtgttttatcatatatggtaggattttactatagaaaagaaggagaaaaggtatgatattttggtttcttttttaaatcaaatcctttgaaagagtagtatatagtaggaatctcaatatgagatctaaaattatgattcacatacatatatttttattggcttcctttagatttaaagaacatgtacagaataatttgcctagagatcttttaactggtgaacagtttattcagttgcgaagggaattagcttctgtaaatggtcatagtggtgatgatggtcctcctggtgatgatctaccatcgggaattgaagacataaccgatcctgcaaagctaattacagaaatagaaaacatgagacatagaatcattgagattcatcaagaaatgtttaattataatgagcatgaagttagtaaaaggtggacatttgaagaaggtattaaaagaccttactttcatgtgaaacctttggaaaaggcacaactaaaaaactggaaagaatacttagaatttgaaattgaaaatgggactcatgaacgagttgtggttctctttgaaagatgtgtcatatcatgtgccctctatgaggagttttggattaagtatgccaagtacatggaaaaccatagcattgaaggagtgaggcatgtcttcagcagagcttgtactatacatctcccaaagaaacccatggtgcatatgctttgggcagcttttgaggaacagcagggtaatattaatgaagccaggaatatcttgaaaacatttgaagaatgtgttctaggattggcaatggttcgtttacgaagagtaagtttagaacgacggcatggaaatctggaagaagctgaacatttgcttcaggatgccattaagaatgccaaatcaaataatgaatcttcattttatgctgtcaaactagcccggcatcttttcaaaatacagaaaaaccttccaaaatcaagaaaggtgcttttggaagcaatcgaaagagacaaa

SEQ ID NO: 81440 - DNA, 839 bp, Homo sapiens
  misc_feature (1)...(839): n = a,t,c or g
  sig_peptide (295)...(430): this location contains the signal peptide sequence, MLWQVLRDCLPICILSFPFYRLSTFQQVRQVCVCVWGCVGVYLHM, Run with SignalP
  misc_feature (449)...(363): similar to gi854727 in the genepept database release 114, Run with FASTXY 3.3t00, default parameters
aattcccggttcgcccacgcgtccggaagttggaacagcatttgcaaaaacatgagatggtgaaatgacatgatatcttcagaaaaatgtcaatgcttggagcatgaagtccatatactagttgaaattgaagttggagagagaggtgaggaaatctacctttactgtttggctcttctacccaactggattatgtgttcctgcaacctagagattacatagtatattattaattatttgagaagttttacatttttttcatttcctgggtaaagttaatacaatgcagtaaaaatgttgtggcaagtactgcgggattgtctcccaatttgtattctctcctttcccttctatagactctccacatttcagcaggtaagacaagtgtgtgtatgtgtgtgggggtgtgtgggtgtgtatttacacatgtatgcatgcacaggaacatatgttttaatcagcaggttcctgccccgctggaagtctattcaagcagggacttaatattttatttcctgctgttccccagagcctagacaatatcaatcatgttgtaggtgttgaaaaaattcttgttgaattgattaaccaattagtttataaaaagaagatagtggaaatgatatggctttgtgaaaaaagacaatattttcattttaaagttacgctttgtaattgaaaacacataattgganatgaaacaaataagtcaataaacaggttttccttcacatctgatagaagacaagggtaaaaaatactctccaactgactcatttcttgagaaaananaancnncnncccccnanaccaccgncaaaaccaaccccccccgtggg

SEQ ID NO: 81441 - DNA, 814 bp, Homo sapiens
  misc_feature (1)...(814): n = a,t,c or g
  sig_peptide (248)...(383): this location contains the signal peptide sequence, MACETFIVIMIVKSIFWEICIKANWDISIYLICILLRIAVQLNAI, Run with SignalP
  misc_feature (156)...(265): similar to gi2920988 in the genepept database release 114, Run with FASTXY 3.3t00, default parameters
attttattttggttactattcggtgttattatggaactaagaatatttccttgatgttaagcaagtatataaatatttaaaacatctgatgagcattgaattgtgggaataaaagtttaaaatttttaacattgcagtggtaatactgacttaagacatacttaaaacagtgaaattccttgtatttttatatttgtatactattttctttcctaattataagttatatcacatttgtcaccacttaatggcttgtgagacatttatagtgattatgattgttaaatccatattctgggaaatttgtattaaagccaattgggacataagtatttatttaatttgcatattattaagaatagcagtacaactgaatgctataaggctagaaggacttcattattaaagaatgtccatgcagattataaaaggacaattcaatatttaagtccacatttataatgccagtaatagaaaatacaatgtgaggtgaagcatttgcgaggcagctgaaatagaaattattctggctttttattgcggcagcatttttgttttagaaactactcagtcatctcaatgttcatagaatagaatagcttttttggggaaggttatgtttgaaattttagattagctttaaaaacctttaggtgaattcttttaacatcttgtatttgtttacagagaatatctgtttcgattactgaatgcctatggtatgatgaaaccatgctatatttcaaagtagtaaaataaacagttttcagcactttgcaattnttacagggtaagtatacccaaggtggactgc

SEQ ID NO: 81442 - DNA, 1517 bp, Homo sapiens
  sig_peptide (538)...(673): this location contains the signal peptide sequence, MLWYGLLGYLRLPCKQLWPDWIPGRGQQTKECSVGSASSDLQDHP, Run with SignalP
  misc_feature (275)...(189): similar to gi3582414 in the genepept database release 114, Run with FASTXY 3.3t00, default parameters
tcattacgccaagcttggcacgaggcctcgtgccaggggtttctgcctgtctttgggtattcactttagtggcaggagcaaagcagctgggaggggagtgggggttacctgctggagactgtgtgctatttcactaaaggtggtgttggcttggggcaggatactggccagtaaaggttttgatgccttctctgtgccccccaagaaggaatgattgttcagagtgtgggaggataccctgttctccgcacagttttaccacaaaggccagggtggggctttctggctctctacccaccaaagcttcatctacaatggcaattgctgggagtggcaggggcatactacatttccatttgctggtggggcaagcaaagccaaactcacctttgcagacatgtgccagcaaagtaatatggggagttgccatggtcttgggggaagctggagtatagggaagaaacatgtgagctggtgcagtcacaggggctgccttgccggagctcttcatgggtcaggcatggcccaccagtgcagatgctatggtatgggctcctagggtacctgagactgccctgtaagcagttgtggccagactggatccctgggagaggccagcagaccaaggagtgctcagttggatcagcttcttctgatttgcaagaccatcctgcagaaattaggtccaacagttcccctagggctaaagtctcttatgggagaaagttgaacctatggaaatggccgtcaatggccacactctactacaggtgctcttgcactaaaccctctgggtaccacatgagctgggttgctgccccacctctttgcctgtcttctggttgctgcatctcagagacgtgtaggccagcaatcactcagtgcagtccgaccaggatggaggatctgtgcttttggccaaattaggggttcactggtaatgagcagtgggtagtttgtgggacccatggaggatggactggccctctctccttgggtaaactacagctcgtttgaggtgtgaataaggcacttagggtgttggatttttcattagtctgagggtagcaaggacagttctactgcagaggcaatggcaaaaatattttcagttgctcttggaggctctgtctagggagttgcgaagttgctactggctcaatagctctggcaatgattggctagtggcccaggcctggagaacttgcccagtgagaatatatgagaacaggcactcatgtaacagtctggccacttttctgaagggctgctgcagtatgctgggtgtccactgcagtttctagtcacctcagattttccagtacctgacgacattatcaccagtgaatactgtaaaacagcaacaatggcagcatgcccttttttctaagagctccatctaagggaggtatagacctgtttccagccccaaagcaactgtaggaggtagctggaaacccctgttgaaaggtcttacccagtgaggagatcatgactggcgacccacttaagaaagc

SEQ ID NO: 81443 - DNA, 487 bp, Homo sapiens
  sig_peptide (79)...(214): this location contains the signal peptide sequence, MVFNLVLSKILISFLLGVSFKSIHWPRVIIGHGVSQSVQLPEIPR, Run with SignalP
  misc_feature (349)...(458): similar to gi1499977 in the genepept database release 114, Run with FASTXY 3.3t00, default parameters
tcattccgggaaacggccccgcgcaataatgactggggcacccaaggacttaatttgtttttccaatccattattttgatggtcttcaaccttgtactttccaaaattctgatatcatttttattaggggttagttttaaaagcatacactggcctcgtgttatcataggacatggagtttcacagtctgtccagttgcctgaaataccaagaggtcaccaaaacagataccagctaggatctcttgacatatggaggctgccacccgtctaatcatgaatgcctttagctactgctgcaggtagtaattaacaaagagtatgatattttcagtttcctagctgtgtttttcctgtcttagggcatataaattcaggtttatatgttctggtatcagggatatgtggatggggcaaagaaagtcaatcctgaaacactgaagaatttttactatcacttagcaaatgggtcattacagacatataga

SEQ ID NO: 81444 - DNA, 1158 bp, Homo sapiens
  sig_peptide (954)...(819): this location contains the signal peptide sequence, MCLLKAAPFFFFYVPQVGKGNPRPPRGCSAFHPPTHLRPGSCSVA, Run with SignalP
  misc_feature (476)...(371): similar to gi653 in the genepept database release 114, Run with FASTXY 3.3t00, default parameters
cagaaaaatcaataaataccatgggaaggagcaagcagggctagaaacacaatggatggtcactagatattaatcatctttgagtaattcttctaatcaaacatgctctgcatctagttaggcaagccagctccgaacacagaggctccaagaacagcaaaaggtgcatatccctggggagagcccatggctggagttagttctccaaggtgttcctgcccacaccttttctaatgagtccagttagtttaactcaatagtgtgtgaacacgtaagtaagctgccattatccaacaccgcctggaaaaacaaccatgcatctggtccctcccatatccctcagctgcaaacttgagagtaggataaacttctagctttctcttacagtggccaggtgtttgtgggcatagggtaatacagatggtctcttgaaaaaaagtttagcggctagtctgaagaaaaataacaaacctttgattgggacttagcatatgatacaactgttcttcatactatacatacaaaatcaagtgtagtaagtagcattaccagtattttaaagatgaggccaggtgcgggggctcacgcctataatcccagcactttgggaggccaaggcaggcagatcacttgaggtcaggagttcaagactagcctggccaaccctatctccgctaaaaatacaaaaattagctgggcttgtcctgcacacttgtaatcccagctactcaagaggctgaggcaggagaatcgcttgaacccaggagacagaagctgcaatggagccaagactgcgccactgcactccagcttgtgctacagagcaagaccctggtctcaaatgcgtgggaggatggaacgcggaacaccctcgtggggggcgggggttacccttccccacttgggggacgtaaaaaaaaaaaaagggggccgcctttaagagacacatttcccccggttcgcgagactattttctttgttggcccaaaataataccggccgggtttaaaggcgtgtggagaaaggcggacacctcctgtctgtgcggatggtgcgctggctctctcctctcgctttccatcataataactatggtcaacgctcgtctagtgccgctatctagagacatcgctacgccgtgaggactcgccgcgtgca

SEQ ID NO: 81445 - DNA, 476 bp, Homo sapiens
  sig_peptide (238)...(373): this location contains the signal peptide sequence, MTTLPSFLLCRLLHPIPSTFPNVTWFSLTSLLDHTRMWPFSKAPI, Run with SignalP
  misc_feature (441)...(286): similar to gi2182077 in the genepept database release 114, Run with FASTXY 3.3t00, default parameters
gtaaagcgccggggaattcgttagaagtcatttaatccaactcgccacccaataaaacagtcctctgaatatttccagcgagctcattcatgatcaactctaatcactggaaacttcttcctcagtggggagccaaaatctcactttctgtaactgatttatccctgtcctctcaagctacccaggataagctcagtccctcctctgcaggctcgcctttcacgggttggatggcaaatgacaacccttcctagttttctcctctgtagactgctacacccaattccttcaacctttccaaacgtgacatggttttctcttaccagcctgcttgaccataccaggatgtggccattttccaaggctcctattcaaagtacatgcccagggcccagcaccctgctctccatcacaggggatcttgtccctgcagagcacaaggcatctgtgaccctcttgagtgtcccctggaaaag

SEQ ID NO: 81446 - DNA, 459 bp, Homo sapiens
  misc_feature (1)...(459): n = a,t,c or g
  sig_peptide (81)...(216): this location contains the signal peptide sequence, MSYTTILGYIICTRVLHHTLLLHVVKLCDYHRTCVYIRNDDMSLH, Run with SignalP
  misc_feature (117)...(318): similar to gi1171613 in the genepept database release 114, Run with FASTXY 3.3t00, default parameters
tctagggngagggtgccgggcgcaaaaaaaaggactttatactcactattatacagatgtgacgcgcaaacctccaaactatgagctatactaccatactgggctatattatttgcacgcgggtattacatcatacactgttacttcatgtagttaaactatgtgattatcataggacttgtgtgtatataagaaatgatgacatgtctctacacactttaataatatatccttattttttgaataataagattataagtaatattgtaaaccaaatatattaattacttgtaacaaaagcaatgattatacataatataaaaattcattatttctaggcaagtaacattatggtatatcttgtactattgtattattctgtttactttttgaagaggatgcagatgagaattgatgattatttgatctttgtatacataaaaatgtatcttttaatgt

SEQ ID NO: 81447 - DNA, 963 bp, Homo sapiens
  sig_peptide (127)...(262): this location contains the signal peptide sequence, MCYEWVITTVGSWALLCQRTLWKPHRTYQKLTLNSCPTPIVEGGL, Run with SignalP
  misc_feature (430)...(274): similar to gi454354 in the genepept database release 114, Run with FASTXY 3.3t00, default parameters
ttcgtacagtgcggtggaattcctttctccaaaagtagaccaactgcaaggctcagtgcctgttgtttacctaggaggtgattccaggaagaacatttgaggaagtgggtaaagtcattaaaggacatgtgttatgagtgggttattaccactgtgggcagctgggctctcctgtgccagaggaccctctggaaaccacacagaacataccagaagctgacactcaactcctgtccaacccctattgttgaaggtggcctggagtcattcccatcccccaactttccaagctgcatttcctggtcctgagaaagccctcatcaagagtaaatgagaaacacagacacctgagaagatggggactatgagatcttacggcatctcaaagggcagaagtctggacaggaagaccagttgcatagtggaggattcccaaggtagaccacgtgtgtgccagcccagcaggcaaactgccccgtatgagtttgtccatcaactgtgcgtgcagatctttactcgcatgcatgacacaggaagcccacgggacacttccccagcacgccccgcttcctctgcactcctggaaggaagacctgttcttgcttcttccgtactctcaggatctggcacagaacccgacaaaggaaatatttaatgaactatggcgtaggcctggccctgaacgacaccctggggacccagcagcagcaaggtgcagcttctgccctcagcaacctcacggtctaatggacgcggcacagtgggcaggaagtgacaccaaagagcatcaggattaggaagtctgctcggattagcatggaatcagactctctggagcagcccagcttcccagaactgagatcactaaaccaagaagaggaggcaccttggacctgggtaaaggctcctttccaagctactgcacaaagaggcccaggagaaatcaaaagatcatggactgtt

SEQ ID NO: 81448 - DNA, 842 bp, Homo sapiens
  sig_peptide (248)...(383): this location contains the signal peptide sequence, MWVWVTAAHLLCSLAASFVKKKSLGKLRVDVCRSPPPEGSRTQTS, Run with SignalP
  misc_feature (22)...(174): similar to gi2911486 in the genepept database release 114, Run with FASTXY 3.3t00, default parameters
aagtgccgtggaattccgccaccggctcctcagagcccctgcccaggtcacctgtgtaaggagaacacagtgccaatgcagcacagcatagtgacacccggcctgccgggatttagcccccaccctacctagcggttctggagctgccactgtgacccatgcagggtcgagcatcccagcttcttgcagaactattgctacagggccatcagcatgtgacactaggagactgtgccatgtcatccttatgtgggtctgggtcacagccgcccatctgctgtgctccctggctgcctcttttgtgaaaaagaagagccttgggaagctgagagtagatgtgtgccgatcaccaccacctgagggttccaggacacagacatcgtcatccctgttctacagaggaggaaatggagcctcctatgcaaattacattcttcatcacaccatggctcttgaagggcagaggtctcactgggctccctgtgtctcatgtcctgcacaaggcctggctctgaggaggggctgcacaaccttcctgcacaagaataaaggcgggaccgaagcagtgactgtgtgagagtccatggaatgcccaggaccagcactcagggcctttgtcttcttgtccaagcaccagggagcagataggagcagcttcggcaagacccggctcaactgaatgaagtcgagtgtcttaaggcatgaacagtacagaaagagctggccctcttcaaattccaacgctgcggggaagggagggtgtagcgagggtcatctagttttgtgctcactcccctggcccgaacggacagggcaggcctcaccctgggggggcggccacc

SEQ ID NO: 81449 - DNA, 787 bp, Homo sapiens
  misc_feature (1)...(787): n = a,t,c or g
  sig_peptide (39)...(174): this location contains the signal peptide sequence, MLGKFPFLLCSCGAHWLKEPQRLDSRRYVSINTMISIGIIDVGGL, Run with SignalP
  misc_feature (391)...(767): similar to gi1050419 in the genepept database release 114, Run with FASTXY 3.3t00, default parameters
aattcatcacatctgaagtatttgcttgcatatggtgcatgttgggtaaatttccctttctcctttgctcatgtggtgctcactggctaaaggagccccagcgtttagacagtagaaggtatgtatcgattaatactatgatatctattggtatcattgatgttggtggcttatttgattctttggcatcaggctaaccaccagtatttaagaaccctgttcaagccagctctgacttgtattacgatatttccctggaggatgaacactgtatcatgaagctgtaaacataatttatttagatgtttctaccttctttttctctctcccatgtagtacttattttttctagcttggaatttaaaatttactgttgcaaatgaacgacctgagtctttcagatcacctcccctggctgtgtgagtagctaccaacaggtgctaaagtggggcagctgccgctgtggtcacccaagaagtcatttccagaatcaactacttggagctccagctgtttccctcagctttcctggctgcagtatgcgacaaaagccaactctgttgttgtaggggctactgaaatacttctcatttctccctcttcgccctggacaactatgtagaagctggaccctatgaaacctgtttcattgcttctctgtcctaggatgtgnggatgaattcgggatttacaactaaccgtgccatagcctgaggggcagctgatgctctgtatccggagacccatttgagcaacattaaggtctagacaaatgtcaagatcccga

SEQ ID NO: 81450 - DNA, 796 bp, Homo sapiens
  sig_peptide (82)...(217): this location contains the signal peptide sequence, MLHSWTWAWRQVLLLTLVICELPLWTAPSSCLHELAPRPQGRANS, Run with SignalP
  misc_feature (282)...(778): similar to gi1786165 in the genepept database release 114, Run with FASTXY 3.3t00, default parameters
ggaattcctaccccctcacatgatgagccacaaaggcatctgaggatgtccagctctcttgggtcaccccagatccacctgatgctacattcctggacctgggcctggcgtcaagttctgctcttgacactagtcatctgtgagttacccctctggaccgccccttcttcgtgtctccatgagcttgctcccagaccccagggcagggctaattccatcagggctctggactgggggtcagttgcacctgtgcccaaaagccagagccaagaagctgcaatgtcctttgctcaccacactgcactgggtagcacctggtgtacagtcagagcaccagggtgagaatggacaagggccaacttggactcctattgtctgaggggaatgtggctgtcgctgccctgaacaggcaagtcagagaggagctggaacagaggcctgatttggttccttgcacctgttggcacacctctcaatacagggtctcaacaggagctctggactgagagtcacaatcatttatacccctgggtaaaagtgttcaaaagagaaaggctggaggggactccctggccaatgacaaacacagtgtccctcttcaggagctggagaagcttaggcttcaacatggagaaacatgggtctgtctcaagcctacatctgccaatgtaagcacatgtttccctgccaggggccagctggaagcttcctggagctccttatgcttctggcctcttcaactcacaaactgttcagcagggcaaaaacccttaccaaggctggaacataatcaaaa

SEQ ID NO: 81451 - DNA, 877 bp, Homo sapiens
  sig_peptide (318)...(453): this location contains the signal peptide sequence, MLPSFLFVLFLLSTFILFFSFLLFSPFLSPSPTTSLYFFFIYSRL, Run with SignalP
  misc_feature (491)...(205): similar to gi1255424 in the genepept database release 114, Run with FASTXY 3.3t00, default parameters
gcggtggaattcggaactttggcagggttgtgcagagacaaaggaagggaaggattggccctagtgtgtgagctgtgagctgctattagcccagagttttgtttagtggatacttaacctgtgtgaggataaataatacacagtttgacaggataaactgaagtcaacatggtagcttcttcttttagggttctccctttaaaaattttcttctattccccattttctttaaccactctgcgttcattttcccatttttccccatctccctctttttcctcctgttcctgtccttttgtgtttttggaccccaatccatgttgccctcttttttatttgttttatttcttctttctacatttattctctttttttcctttcttttatttagtcctttcctttctccctcccccacaacctccttatatttcttcttcatctactctcgcttgatattttctgcaaagcgctgcctgggccccttgacctcacaagaagctctctgacgaaacgcttaagaaaaacaaggtattatgcattatcctacacattctgcaatcgccctagcaatttagtaactacagtccaatttaaaccaggcctcaaggcaacaaaaattgcaccaaatgccaactaatttaccaaacttatagaaggaatatttgggagtctattcccttcaacccatctgattcatattattgactcatttaaaaaacagaaagtgaacagagacaagtttttaaggagtttggtttcatgcaaatgacttgcaattggcagcccattatttttataccacgacttcattagtcatatccctgtcagacctgtgaccagtgtcaaatgttttcaaaaagcacaccaggacaggcag

SEQ ID NO: 81452 - DNA, 451 bp, Homo sapiens
  sig_peptide (88)...(223): this location contains the signal peptide sequence, MVWTYILIKAILSRLFCNRLRIGSQSGLFQGIFEDWRSVGGSGEG, Run with SignalP
  misc_feature (352)...(113): similar to gi1314040 in the genepept database release 114, Run with FASTXY 3.3t00, default parameters
tgtagtcagtgtggtggaattcgttactggcatagtcatgacaacctctggtaatcttaccttctcctttttatgaagggaagagcaatggtttggacttacatcttaattaaggctattttaagcagattgttttgcaacagattaagaattgggtcccaaagtgggttatttcaaggcatttttgaagactggaggagcgtaggagggagtggtgagggaacctagaacttcttgctccttgtgactatgacagatgtctgatgcccccagcgcactggagtctggggcttggtgcaggtggtgccccatcagtgtggacagacactacttgcctttgtggtttagtgttggaagctttaattattctacagttccatagattcacaattttatagccaaacagtttgtatccacctgctttcagaggaggaaccctcagggcatattt

SEQ ID NO: 81453 - DNA, 794 bp, Homo sapiens
  misc_feature (1)...(794): n = a,t,c or g
  sig_peptide (204)...(339): this location contains the signal peptide sequence, MFALQKMRLCVLWRVLEEGGITRFGDSHSDSLLFSVTFRIHRDMF, Run with SignalP
  misc_feature (244)...(104): similar to gi3928929 in the genepept database release 114, Run with FASTXY 3.3t00, default parameters
ggtggaattcgaaactggtaggaaaatttattttaaaaagtgttgaagggaaagaatcaagaccacagatccagatccggagattattttgctaaagaatagcaattgtgaggcatgaagtgggaggggggaagaagctatgaacttaattttgaggtttctgagaaggaaacttgagtgaattcacttcagatgcatttggaatgtttgcactccagaagatgagattgtgtgtgctctggagagtattggaagaaggaggtattactagatttggcgactcccacagtgactcattactcttctctgttactttcaggattcatagagatatgttttgttgatattatttatttaagtgagataaatttgaatatgaatccattggcttttttttgtaaaatttctgctttataaaatctgttagaaggctgggcccggtggctcatgcctgtaatcccagcactttgggaggccaaggcgggcagatcacttggggtcagcagttcgagaccagcctggccaacatggtgaaacccagtctctactaaaaatacaaaaattaattagctgggcttggtagcacatgcctgtaaacccagctactcaggaggctgaggcaggagaattgcttgaacccagggggcagagactgcagtgagctgagattgctccactgcactccagcctgggtggcagagtgagactcccatctcaaaaaaaatanaaatgaaaaaataaaaatttcttagagactaacatgataaatcagactgattttagaaacaaacaac

SEQ ID NO: 81454 - DNA, 794 bp, Homo sapiens
  sig_peptide (374)...(509): this location contains the signal peptide sequence, MRHPSPWPFLFFCFVPATLRSFPSGLVWPGCWWEPRASPSSLAPG, Run with SignalP
  misc_feature (448)...(765): similar to gi5104682 in the genepept database release 114, Run with FASTXY 3.3t00, default parameters
ggaattcggaatagagccacctccaggccacctcctgcttctccatcatcctctttctctattctccagacattaggcacccactgtgtgcccagcacagttttgggagtgaatacaggccctgttctcccagtcaggtttaagccttgatagctccccctgggaatgggttgcggattggaacaccacaggaagcaggactccttcagcccctcttcgcagcaaccctccaagtgtgcagcgagtcagggggtccctggggcgaacccacctgttggggaaaagggagaggctggtgtggaatgcaccatggtacctccacattgaggactctggcagtagggggcggggcatggtatgcgggtcacagcacatgcgtcatccttccccatggcccttcctgtttttctgttttgtccctgctactctgagatcatttccctctggcctggtttggcctgggtgctggtgggagccaagggccagccccagcagccttgccccaggaatgaaaagtcagctctgggcagcagcctggaggcctgggaccagcctccagggcatggcagggatattgaggcaggcagcagaggcaggccctgcaggggtagccttgatactaattaagggaactggtaatgaggagcccctgggacccctgccaagcaggtgtctgtgccctccccctgaggaacccagatttcattgggcgctgggcaaagagcccactggacctggcaggccccaacctgtccagcaccacattgagggaccgcacccggttggttttgggt

SEQ ID NO: 81455 - DNA, 800 bp, Homo sapiens
  sig_peptide (219)...(354): this location contains the signal peptide sequence, MVSPGSEFYLPLRFFLFLPSFTLIGISSVCPHQLTYRTQSLSSYF, Run with SignalP
  misc_feature (372)...(506): similar to gi2664279 in the genepept database release 114, Run with FASTXY 3.3t00, default parameters
ggtgtaattctaggcagcctcagagtcagaacacccacagttgaatcctcagcctgacagacactgaatccagggcaaatcttagctgaatattcatggtctgtagaggtggacatgagctagatatgagctaaggaccatagccagctcatggcttttgtgatgtccaacaccgctatcctctaagatgtcacaagtgtccctaggcttttattcccatggtctctcctggctctgagttctatcttccattaaggttcttcctgttcctcccctcattcacactgattggcatctcttctgtctgccctcaccaactcacatacagaacccagtctctttcctcttatttccacccaaagccctcccacaagccactgttatatgttcacatccctgtaataccagtgagtaataattgctaatgagacatttttccttttatggaacaaaggctgtcccatttctcctcaggcaccagcctcccacatgttgtcatgcctctttcccccactttccctaaaccttctttctctcttgcactccttattccctggttcctattgatttctcatttagcacaaggaactaggtctttcttttgtggcccttttcccaatccaagcctgctgggctctccctcacccccaataacttttactcttgccaagctacttctctaaaccaaaacagggtccctcctatgagggactctgggcacttccactggctgcggaagcaaggtcgaacaaggcgaacccttgcactcacacctttttccaatggtttgctccaccttt

SEQ ID NO: 81456 - DNA, 427 bp, Homo sapiens
  sig_peptide (59)...(194): this location contains the signal peptide sequence, MGASGLCLMPVLLLLWLSLYPRCKTMSSLLFPLLSSSRRKVSLWS, Run with SignalP
  misc_feature (239)...(396): similar to gi508522 in the genepept database release 114, Run with FASTXY 3.3t00, default parameters
gaattcacttctggcctacgggatgtctagaaatgtcatcctggagctagagcttggaatgggggcctcaggactctgcctgatgcctgtcctattgctattgtggctgagcttgtatccgagatgcaagacaatgtcctctttattattccctctcctttcctcaagcagaaggaaggtgtctctttggagctctgctgcctggggttacgggaaggggtggtgcaagcactctaattggctaccctagctggtgtctcactaggtcacatgccccccatgtccactgactccaaacccagcacagcaccaggacttgcccaggaatggcagtccttatggcctagaccacctttcagctctatttaagaccgcagagcactttagcccgtggtatgaggtctgccagaatgcattctgagcactg

SEQ ID NO: 81457 - DNA, 5650 bp, Homo sapiens
  sig_peptide (965)...(830): this location contains the signal peptide sequence, MQEPLTFLQLLRWQLFPLPDSPTFSAFILVGLCRMLFAGRIISGL, Run with SignalP
  misc_feature (3793)...(3914): similar to gi806276 in the genepept database release 114, Run with FASTXY 3.3t00, default parameters
atggaaacccctggagtagtgaatggctttggggagtggtcagattcaaccaaaaataacagaaatctctgtcccccagacaggaatacgtcatttgtggtgtctggagaggtcagtcgctatgtggtatggacaggaatggagtcactcgtagggtcttgggttcaacgggagcagcattactcaagtgtcagtggtgtagacaaacaggtgaccaacagctctagtgtagacaggggctgggtcactcacagtgtctgtggagattcagccctgatggaggctgaggaggcccagcgtggagcctctcctcccatctctgccatagaggaattcagcattatccctgaggctcccatgaggagcagccaggtctctgccttggggcttgaagctcaagaagatgaggacccatcctataagtggagagaggaacacagactctcagcaactcagcagagtgagttaagggatgtgtgtgactatgcgattgagacgatgccctcttttcccaaggaaggttctgcagatgtggagcccaatcaggaaagccttgtggctgaggcctgtgacactccggaacactgggaggcagtaccccagagcctagcaggccgacaagcaaggactctagctcccccagagctctgggcctgccccattcagagtgagcatctagacatggccccattttccagtgacctgggaagcgaagaagaggaggtggaattttggccaggacttacttctttgacattgggatctggacaggcagaagaagaagaggaaacctcttcagataactctggtcagaccagatattattctccctgcgaagagcatcctgcagagaccaaccagaatgaaggcgctgaaagtgggactatcaggcagggggaagagctgccatctgaggagctgcaggaaagtcaagggctcttgcatccccaggaggtccaagttctggaggagcagggacagcaggaagcaggatttcggggggaaggaactctgagggaggatgtttgtgccgatgggctattaggggaggaacagatgatagagcaggttaatgatgaaaagggagaacagaagcaaaaacaggaacaggtacaagatgtgatgcttgggagacaaggagaaagaatggggctcactggggagccagagggtctgaatgacggtgagtgggagcaggaggatatggagaggaaggctcagggtcagggaggtccagaacagggagaagagaggaagagggatctgcaggtgccagaagagaacagggcggactctcaggacgaaaagagtcaaacctttttgggaaaatcagaggaagtaactggaaagcaagaagatcatggtataaaggagaaaggggtcccagtcagcgggcaggaggcgaaagagccagagagttgggatgggggcaggctgggggcagtgggaagagcgaggagcagggaagaggagaatgagcatcatgggccttcaatgcccgctctgatagcccctgaggactctcctcactgtgacctgtttccaggtgcctcatatctcgtgactcagattcccgggactcagacagagtccagggctgaggaactgtcccccgcagctctgtctcccttgctagagcccatcagatgctctcaccagcccatttctctactgggctcctttttgactgaggaagtcacctgacaaggaaatagatcaaaacagccagcaagaggaatccaggctgaggaagggaacagtgtccagccaagggactgaggtggtctttgccagtgcatctgtgactcctccaaggacaccagattcagctcctcccagtcctgctgaagcctaccccatcacacctgcctcggtatctgccaggcccccagttgcctttcccaggagggaaacctcttgtgctgcacgtgctccagaaactgccagtgcccctctctcaatggatgacccatctccctgtgggacttctgagatgtgcccggctgccctctatggcttcccctccaccgggaccagccctccgaggcccccagccaactccacaggcaccgtccagcacttacggagtgactccttccctggttctcacaggacagagcagactccagacctggtgggaatgttgctttcctactcccactcagagctgccccagaggccccccaaacctgccatctacagctctgtgaccccaagaagggacagaaggagtggtagggactacagcaccgtttcagcatcccctactgccttatccacgctgaagcaggactctcaagaatccatctcaaatctagagagacccagcagtcctcccagcatccagccctgggtctccccacataatccagcctttgccacagagtctcccgcctacggttcttccccatcctttgtctccatggaggatgtgaggatccacgaacctctgccccctcctcccccacagaggagggacacccatccctccgtggtggagacagatggccatgctcgtgtagtggttcccacgctgaagcagcatagccaccctcctccattggccctaggttcagggctgcatgccccccataaaggcccacttccccaagcctctgaccccgctgtggccaggcagcaccgacctctgccatctaccccagacagctcccaccatgctcaggccacccccaggtggagatacaacaagccgctaccccctacccctgatttgccgcagccccaccttcctcccatttctgctcctggtagctcaaggatctacaggcctctacccccactacccatcatagaccctcccaccgaaccacccccattgcccccaaagtccagggggaggagcaggagcactcggggaggacatatgaactcagggggtcatgccaaaacaagacctgcttgtcaagactggacagtccccctccctgcctctgctggacgcacctcctggcccccggccacagctagatcaacagagtctttcacttccaccagcaggagtaagagcgaagtgtcccctggcatggctttcagcaacatgacaaacttcctatgcccctcttcccctaccactccctggactccggagctccagggacccacctctaaggatgaagcaggggtctcagaacaccctgaggcccctgcgagagaacctttgagaaggacaacccctcagcaaggagcgagtggcccagggaggtcacctgtgggccaagcaaggcagccagaaaaacccagccatctgcacctggagaaggcgtccagctggccccacaggcgggactcagggaggccaccaggggacagcagtggacaggctgtggctcctagtgagggggccaacaagcacaagggctggagccggcagggcctgcgcagaccttccatcttgcctgagggctcttcagattcaagaggtccagccgtggagaaacatccgggaccctcagacactgttgtttttcgggagaaaaaaccaaaggaggtgatgggaggcttttcaagacgctgctccaaactcatcaactcctcccagctgctttaccaggagtatagtgatgttgtcctgaataaggagatccagagccagcagcggctggagagcctgtccgagacacccgggcctagctctccgcggcagcctcggaaggccctggtctcctccgagtcgtacctgcagcggctctccatggcctccagcggctccctctggcaggaaatccccgtggtgcgcaacagcaccgtgctgctctccatgacccatgaagaccaaaagctgcaagaggtcaaatttgagctgattgtgtcagaggcctcctacctgcgcagtctaaacatagctgtggatcatttccaactttcaacttcactccgggccacactttccaaccaggagcaccaatggctcttctctcgtttacaggatgtgcgagacgtcagcgccacgttcctttcagacctggaagagaactttgagaacaatatcttctccttccaagtatgtgacgtagtcctgaaccacgccccagacttccgccgggtctacctgccttatgtcaccaaccagacctatcaggaacgcaccttccagagcctgatgaatagcaacagcaatttccgggaggtcttggagaagctggagagcgaccccgtctgccagcgcctttccctcaagtcctttctgattctgcccttccaacgcatcacccgcctcaaactgctgctccagaacattctgaagagaacacagcctggctcctcggaggaggcagaggccacgaaggcacaccacgccctggagcagctgatccgggactgcaataacaatgtccagagtatgcgacggacagaggagctaatctacctgagccagaagattgagtttgagtgcaaaatattcccgctcatttctcagtcacgctggctggtgaaaagtggggagctgacagccttggagttcagtgcttccccagggctacgaaggaagctgaacacgcgtccagtccacctgcacctcttcaatgactgtctgctgctgtctcggccccgagagggtagccgattcctggtatttgaccatgctcccttctcctccattcggggggaaaagtgtgaaatgaagctacatggacctcacaaaaacctgttccgactctttctgcggcagaacactcagggcgcccaggccgagttcctcttccgcacggagactcaaagtgaaaagcttcggtggatctcagccttggccatgccaagagaggagttggaccttctggagtgttacaactccccccaggtacagtgccttcgagcctacaagccccgagagaatgatgaattggcactggagaaagccgacgtggtgatggtgactcagcagagcagtgacggctggctggagggcgtgaggctctcagacggggagcgaggctggtttcctgtgcagcaggtggagttcatttccaacccagaggtccgtgcacagaacctgaaggaagctcatcgagtcaagactgccaaactacagctggtggaacagcaagcctaagtcttctctgagaggagtttcgtgagctgaagaacaagctgctcatggcaagggctggccccagaaccctgcaagagaggccttctgtggatggagaactaggccttctcaaagctcaaggacaaaatccagctaacccagtccctcggcccaggcctcctttcgtgctttgtgcttggtgggggggatttccgagggactttgcactggactctgggaacctttcatcattaaaaaaagggggaccattggggcctgagccaaggaactttccttctactgccttatagtgcttaaacattctccgcctccagggtgcagattcagagctggccagagtttcagtgatagccgtatgttaaacagaatctcacctcagtctcctggagggagatgtttaagaggggttaacacatcagatgggagggtcagcccggtgacctctaaggtatcttctaacctagaaactcaccataattatggtgcaaggtcagtgtgtctctgagatctatgtctgttggtggcaatgtgagggtgatactctctcactctaataaacttggcacttctccgagtaaa

SEQ ID NO: 81458 - DNA, 643 bp, Homo sapiens; identical to SEQ ID NO: 80287
  sig_peptide (412)...(547): this location contains the signal peptide sequence, MFSRLFAVFLILYKLLGKYYGIRFKIVITCVWRYVLGGRYILCSF, Run with SignalP
  misc_feature (184)...(317): similar to gi2959422 in the genepept database release 114, Run with FASTXY 3.3t00, default parameters

SEQ ID NO: 81459 - DNA, 538 bp, Homo sapiens
  sig_peptide (304)...(169): this location contains the signal peptide sequence, MLRLDIINSLVTTVFMLIVSVLALIPETTTLTVGGGVFALVTAVC, Run with SignalP
  misc_feature (339)...(496): similar to gi5771451 in the genepept database release 114, Run with FASTXY 3.3t00, default parameters
ttttttttttttaagaatacagaaatatgtttaatacttagtatcaaactaaaaagtaatataaaattacaaaacttcttttttttcatgcacaggctttttctggtaaggaccgctgggattgaacagaagcttccggtaaataagggccccgtcggcaagacagcatactgctgtcacaagtgcaaacacccctccaccaactgtcaatgttgtggtttctggtatcagtgccaacacagatacgatgagcatgaatactgttgttaccagtgagttgataatatccagccgcagcatcttcacgtggcctttcacactgaagcagaaggggcgatgttttattttcggctgcacgttatccatcgcgtctgcagacccagcagcagcactttccctcaactcttctcagctggctgcctgagtaggttctgcgaagcgatagcaaccgccaccgcggcggagcaccgccctcccctacttctcgcccagctcggcttcccgaattccaccacacggactagggacggagacgaag

SEQ ID NO: 81460 - DNA, 446 bp, Homo sapiens
  sig_peptide (68)...(203): this location contains the signal peptide sequence, MRRALVNVLTVTSFGTCNFLYRPYISDIRKAGPREKYILGYFRAT, Run with SignalP
  misc_feature (366)...(67): similar to gi4049536 in the genepept database release 114, Run with FASTXY 3.3t00, default parameters
cgtggtggaattcaatctgaacacttagatgatactgcattttaagcataagaacaattagttttcaatgagaagagctcttgttaatgtattaacagttactagttttggcacctgcaactttctgtatagaccatacatatctgacatcagaaaagcaggccctagagagaagtatatactagggtactttagagcaacttaatgaggggaggaaatgaaagaatagatcagaatgattttgttgacatgactacagactgaaataatgtgaatgaattaactgaatttgctctgtcaactttagtaaattgcccattgcctttgctttgttcataatttcagcagggcagaataaaaaccatgggaggcaaagaaaggaaatccggaaatatagtcttaacctggtgttgttctaattttccatctgttcttctgactcaact

SEQ ID NO: 81461 - DNA, 1209 bp, Homo sapiens
  misc_feature (1)...(1209): n = a,t,c or g
  sig_peptide (416)...(551): this location contains the signal peptide sequence, MLTTLLLLLHKRIFRGNFHILHFHICIQIKKQIPILENDLFKMYT, Run with SignalP
  misc_feature (457)...(349): similar to gi3878096 in the genepept database release 114, Run with FASTXY 3.3t00, default parameters
attatgacgaattttcgctctcgttgcccaggctggagtgcaatggcgcaatctcggctcaccgcaacctctgccttctgggttcaagtgattctcctgcctcagcctccctggtagctgggattacaggcgcctgccaccatgcccagctgatttttgtatttttggtagagacggggtttcaccagttgaccaggttggtctcaaactcctgacctcgggtgatctgcccacgttggtctcccaaaatgccgggattacaggtgtgagccaccacgcccagcctttctgctgttactttttattttattcctcatttgcagaaaggaaataatactatgaactaggattatcctgaggttttaatgagttaatccatgcaaagatcttctaacagtgccaggcacattgtaaaatgttaactacgctgttactattattacacaaaaggatctttagaggaaactttcacattctacattttcacatctgcatacagataaagaaacaaatacccatattggaaaatgaccttttcaaaatgtatactgttagtaacaaagctaagactagaacctggtcttgaaatccaatgcctaagcggcattcaaacgatacaggtgtatgattatttcctttccaggtaggtggaaaacacttgattttcacttgttaaaaaccccagaaatggatcatttaactataaatgatggtttggttatttgggtggntgggtctgcctgcattaattactgggtattggaaagtcctcaaaaacccagctctggaaaactgaaagaagggctaaagggtggcagttcttcttttgccactgggagggggcttcggcacccccttaaaggacaaattggggcgggaactggtttttttttggagcggctaaaaaaagaaaaactttttgggcggggcccccaagaatttttgaaaaggggagaaactccctttggggggggttttcccccgccccccccccaggaaggggaatcttggtggggcacccacccccgggggttgggtggattctaccgacccacacagggtttggtggcaagagaaacttctttctttttttctcggcgggaaaaaaagagagggagggcgccgccgtttcctcacccttctcttaataaaacaaagggatgggcggcgcggttgcttgaaggcaaaaaaaaataaaccgcgcgcgcc

SEQ ID NO: 81462 - DNA, 716 bp, Homo sapiens
  sig_peptide (245)...(380): this location contains the signal peptide sequence, MMLTWVFMTVHLTDRFICHLVRVTCWDGSTTCVPLTLGCLKSGQS, Run with SignalP
  misc_feature (329)...(123): similar to gi3342392 in the genepept database release 114, Run with FASTXY 3.3t00, default parameters
tgaaggggtagaagatgattccatggcccttgtcacactgcacttgagccataccgtgcttggcacggaaaccaccctgtagccgttgtcagaggtggagcgtcctccctgaggtgcgtaacccccacatcatcgttgcttccttgggctgtgttctagcgattgcgtccgtccctttttctccttgattgcagatggaagggccctgctctgagccgtcgccacatgcctggagcttggctccatgatgctcacatgggtgttcatgacagtgcatttgacagacagatttatttgtcaccttgtcagggtgacatgttgggatggctccaccacttgtgtgccattgacacttggctgtctgaaatcaggacaaagcatccctgagactgatccgaatgaggcttatcagcaccaggcgtaacttaccgcctgctttcctctgtttctttaacttttaattgaaaccatttagttaccacccctgctgctaggaatctggggacaattaggaaagtcccatctgtcctttgaaccacattatattgcgtttctcctcgcaatctcaagaagacggcacattctagcagcagtgtctttgccttgccgtctcgcctcccactggatggtttttatctcacttgaatgagttatagcaactctttaattcaattattttctccagtgcaggctttgagatgatttagttgaatcag

SEQ ID NO: 81463 - DNA, 725 bp, Homo sapiens
  sig_peptide (215)...(350): this location contains the signal peptide sequence, MLFKLQTSPPHYRGAQFILPYFIFLCSTYSLLIYNFLTCCIYCFC, Run with SignalP
  misc_feature (270)...(362): similar to gi11605 in the genepept database release 114, Run with FASTXY 3.3t00, default parameters
tcgctccacgcgttcggggtaaaacaagagacagagtatatctaacagcctgattagccttatttctattcaacaaaccaattagtcactctcctacttccaggtatgtacattgctcttctctctgcctggaacagtttcctccaagtatctacatggcttgctccttggcccttctccaggtccacatcatttgacaaggccttccctgaatatgctttttaaattgcaaacatccccaccccactaccgtggtgcccagttcatccttccctattttatttttctctgcagcacttattccctcctaatatataattttcttacctgctgtatttattgtttttgtttttccgctagaaacaaagctctatggtaggaggaattttcagatatttcattcttaggttcaattcattgctgtatgtctagcacctacaattgtaactgcagcattgtgatgctcagcaagtgtttgttaaattaaacaattcaggagacttggctgttatggcaaggggatgtagcagtagctagaggagagtgtgaaggagagcactttctttttaacagtagtgtaaacttgagcatatttaaatggagcatgggaaggagatcagagtaggaacagccccacatctattcattcaaataaataaaatttctgagcgcattctatgggccagagaattttctaggcatttgaaatatacctgtaaacaaga

SEQ ID NO: 81464 - DNA, 1083 bp, Homo sapiens
  sig_peptide (316)...(451): this location contains the signal peptide sequence, MVCRLPCTLLPWPLKHKQGALLYICPASLPAFNPRNLSVYLLFSA, Run with SignalP
  misc_feature (485)...(602): similar to gi522145 in the genepept database release 114, Run with FASTXY 3.3t00, default parameters
gcctggtgtaatgcgaggttgccggaaacagcaaagatagatttcagagcacagcagcaggggtccctggtcagccccgctccctagagcaggagatcttgagtgggagaacattcttgttgtagccacagctgaggccctggaccagctctctccacaccgcatgctccgagttgggactctaaggagtctaggaattttcattcaaacttggccttacaggtcactcatcagaaaaatacttttttcaaggtcaaccaatagaacatactttattcaacagtttgttagtttgctttttaaatatttagccacatggtatgtaggcttccatgtacactcttgccctggcccctgaaacataagcagggggctcttctgtacatttgcccagcttccctgccagcctttaaccccaggaacctctcagtctacctcctcttttctgcctctgaatccctacctttaaagtcagaacaggccaggcccggtggctcacgcctgtaatcccagcactttgggaggctgaggtgggtggatcacttgacatcaggggttcaaaaccagcctggccaacatggtgaaactctatctctactaaaaatacaaaaataagcaaggtgtggtggcgggcacctgtaatcccagctactcaggaggctgaggcaggaggatcacttgaacccaggaggcagaggttgcagtcagcggagatcatgccactgcactccagtctgggcaacaacagcgagactccatttgaaaacacaagaaaatatctgggggaggccaggcacggtggctcacgcctgtaaccccagcactttgggaggctgaggtgggcagatcacttgagatcaggagttcgagccagcctggccatcatggtgaaacactgtctctactaaaaacaaagtacagaaattgccgggcgtggtgctggacacctgtggtcccggctacttgggaggctgaggcaggagaatcgcttgaacccgggaggtggaggttgcagtgagctgggatcgcggcactgcactctaggctgggcaacaagagtgaaacgccatctcaaaaaaaaaa

SEQ ID NO: 81465 - DNA, 710 bp, Homo sapiens
  sig_peptide (20)...(155): this location contains the signal peptide sequence, MLSFVPLLSSWLGTWITDRGAAGSCQAEAPRLAGETAGQRVWERG, Run with SignalP
  misc_feature (136)...(611): similar to gi11076 in the genepept database release 114, Run with FASTXY 3.3t00, default parameters
ctgcaaggcacctgtcagtatgctgagctttgttcctttgcttagctcttggctaggcacatggattacagacaggggtgcagctgggtcctgccaagcagaagctcccaggctagcaggggagacagctgggcagcgagtgtgggagagaggaatgcagagggctgcagctgtgggcaaaattttagaccccaaaggccacacagcaagtccacactaaatatgggctatttgaagttgcttagggcatcagtcatagatgcacaaaatgtcagagttggcagcgggaatgttagaaatcatcagttctaacaacttatttaaaaatatttaattatagaattgttagaaaatactgccaagcataaagaaaaaaatgagaaatatgtaacatgacccaaagataaccacttaattgtcatgtatattccagactgtttatttcctgttcatatagatcacatcttatttttaaaaaatggagtcgccgggcacggtggctcacccctgtaatcctagcactttgggaggccgaggcgggtgaatcacctgaggtcaggagttccggaccagcctggccaacatggtgaaatcctgtctctactaaaaatacaaaaattagctgggcgtggggacacacacctgtaatcccagctacttgggaggctgaggcaggaaaatcgcttgaacccgggaggcggaagttgcat

SEQ ID NO: 81466 - DNA, 728 bp, Homo sapiens
  sig_peptide (171)...(306): this location contains the signal peptide sequence, MMLCHLELQLPALLMRKMIPTKPGVVNSRQYHKTPSKMHYIQGNE, Run with SignalP
  misc_feature (634)...(666): similar to gi2635685 in the genepept database release 114, Run with FASTXY 3.3t00, default parameters
tgtctaccgcgttcgctcaaaatggcccctccaactgggcacagctctgtaccaggaacagtgccaatgagcatgtgtatttgtgtgtttttatacccaagtgctgtaaaagaaggcggtctgcttaaagacttacagttccaaagaaggcaaatgtaagggcaaaattcatgatgctctgtcaccttgagcttcagcttcctgccttgttgatgaggaaaatgatccctactaagccgggtgttgtaaatagtaggcaatatcataaaacccctagcaagatgcactacatacaaggcaatgaagaaaaagtggctactttttcttcacttttgtttgttctctgatctgtgcaattatttgtaccaaatatatttgaagtatgaagttggtggctattgtcacaaaggtaacaaaacctgcttttaagagacttggagtttatcaaaggttacatgtagacagaatgaggcccagtagacttttcaccaggaaggcagactttgtcctgggccttggaagattgcaaagagaggaagaaagaaaaaggttctccttacactgggaaaagttcatgcaaaggcacacaggaagagcagagcccgagaagttcaagacagggctagtgtgcaacaagcaagtgatgtggacacacccaaccagctttcctgctggtttaccaggtaaaatcaaaagaccctcatgccagcccggccccagggggtcac

SEQ ID NO: 81467 - DNA, 625 bp, Homo sapiens
  sig_peptide (271)...(406): this location contains the signal peptide sequence, MGNLGFLILLLEEILALSTMDSVITRLCDLELWAIRPSPTFGEGM, Run with SignalP
  misc_feature (182)...(309): similar to gi1262722 in the genepept database release 114, Run with FASTXY 3.3t00, default parameters
agcaggtctttcagggtggcctagtggctatttcagagaaatgggcttcagggctcaccccagactgcctgtggcctgccccgcactgccctggagctggtcatttccttccaggcaggaggcccagggacatggcagtgactgtgcttcttgttagtagctctgaacagtggagctgttgttctggcatatctggtaaccaacttcctgtttttcccagagtggagatgttcctttagtcaacagcaggagggaaagaaatagtcctggatgggtaacctcggctttctaatccttttgctggaagaaattctggccctttccaccatggactctgtgatcacgaggctgtgtgaccttgagctctgggccataaggccaagtcccacatttggggagggaatgaggagacagcgagtcactattgcttgtaattcaggattgtggtgcccatgaactaatgctaatgtaaaggtgtgttgattaaacattaaacatttatttcccactgagagaacggcatcacacattcctgttctcacattctaggaagaatgattacgacatgatcactggggccagactgcctgaattcaaatcccagctccatcatttttagcgataa

SEQ ID NO: 81468 - DNA, 480 bp, Homo sapiens
  sig_peptide (47)...(182): this location contains the signal peptide sequence, MKAVWAFILQTGTNSSMLFVLPVQPCWEGLGELPTRRDSCCFGKL, Run with SignalP
  misc_feature (432)...(138): similar to gi2318003 in the genepept database release 114, Run with FASTXY 3.3t00, default parameters
catggctggctgaaccctggatgccttttcttccgcgtccccatgaatgaaagctgtctgggccttcattctgcagacagggacaaacagctccatgctgtttgtcctcccagtgcagccgtgctgggagggtctgggggagcttcctacaaggagagactcctgctgctttggaaaactgagaaaaaataggggtctaaccctctcctcccattttacaagtggggaaatgaggcgtgaaaggagaggcgtctgggttactccgtgggtctggggtccagggaagggcctgtatgggggagggagctgggaggggacggtgtctggctctacccctgtggggtggggaggtggggctcccctgtatcacaggacatcccccctgaaaggtccctcatatgtttgggtcctgtgggtgggggactaactgcgcaatgtagttaggtgctcaataaacggagttgccgctgaaaaaaaaaa

SEQ ID NO: 81469 - DNA, 646 bp, Homo sapiens
  sig_peptide (241)...(376): this location contains the signal peptide sequence, MAMSLLRAFSSPCLVPASPRPPHNPLVSGRAGNLLHLAAVQPLVS, Run with SignalP
  misc_feature (225)...(385): similar to gi1743003 in the genepept database release 114, Run with FASTXY 3.3t00, default parameters
ttccgggtcgacccacgcgtccgggactggcgtgatattggggttctgtgaaattgtctgtgttcaacaagactatgagtgccaacaccagctcctagcagcaccaagtcctggctgacagaaccaggccatttctgggatgttaggacctgtttttcttgttctcaatttggtacactctgtacagctatattgattgttaaaatatagaaatacttctgtactgcgtagtatttagccatggccatgagccttctgagggctttctcatctccctgcctggtgcctgcttcccccagacctccccacaacccactggttagtggtagagcgggaaaccttctacaccttgctgcagttcaaccgctagtgtctgttctgatgagtcagtgctgtgtgggcccgtttggtaacattttcaacattacctgggtttgaggttggagcttctctctacattaagattgagaagggacgtgaacacggaatactgaacatataaccagccggcataagagtgacgtgaaaataagtgagggtgaccatacgagatggtgaaagacctttataacatgaacaaagctgtacgtggaggataaagcgtttggatcacctgagggcaggagcttaagaccaccctggccca

SEQ ID NO: 81470 - DNA, 420 bp, Homo sapiens
  sig_peptide (30)...(165): this location contains the signal peptide sequence, MVFLLSVCHFYGMISKDGAPRMRHPPSRRGPGCLAVIVRALWFTE, Run with SignalP
  misc_feature (52)...(199): similar to gi4433492 in the genepept database release 114, Run with FASTXY 3.3t00, default parameters
cggacgcgtgggagaacatattgctttggatggtgttcctgctgagcgtctgtcatttctacgggatgatttccaaagatggagctcctaggatgaggcaccctccgtccaggaggggtcctggttgtttggcagtgatcgttcgggctctctggttcactgagcctatgggaggcttggggaggttggagctgcagagagggatctttgcatccggaattctgagcagtgttggtttcatccagctgtcaggggagtggggaagttgcagaggggaccacgtggtttcccctcattcttgtcacagtttcgtgaaatactgaggtcatttgattttttttcgtcatttggaagtaaaatatgtcatacagagaaccttaaatcgcaactgtctcgatctgtcactgaaaatcctcctag

SEQ ID NO: 81471 - DNA, 626 bp, Homo sapiens
  sig_peptide (388)...(253): this location contains the signal peptide sequence, MINTNILRAGAVRVLLWLQLPYPQKDHDHFVRISCCKDQRATFVT, Run with SignalP
  misc_feature (43)...(138): similar to gi1217977 in the genepept database release 114, Run with FASTXY 3.3t00, default parameters
tggtggttccagaccaaaatttctagcaaaggccaggaccactatggcatgttgttgattgaagtgaaaactatgtccttcaaaacctcaggtgtgtgagtgacaaaaagattggcatgtaccttcatctggacaaaggccattctgcagacagcccagtaaggagggctacagggctgcctgtggtgggatcaagattttcagctgatggaagctttggttggatgcaaccattctgcctcattatagctgtaacaaatgtggctctttgatccttacaacaagagattcttacaaaatgatcatggtctttttgtggatagggaagctgaagccaaaggaggacacgaacggctccagctctcagaatgtttgtattaatcattaatgccaacaatctggtttgcttgttaatagactcatggtagaagtgcattttcttgtccccttgaagtcgggagtggcattggatgtgcttgggtcagtgaaatgtgtaaagtaacatgcattgcttcaagcagaagcatttcatttccagtttagactctttcccatactctttcgtcttggtagggattactgatcatgacgatgaaagcatatatcaaaacgaaccttgtgtcaga

SEQ ID NO: 81472 - DNA, 422 bp, Homo sapiens
  sig_peptide (95)...(230): this location contains the signal peptide sequence, MRTPSCLIGFPCPYFASSLISYFLILLIRLPKWPQIIFPKPQSAH, Run with SignalP
  misc_feature (279)...(55): similar to gi3065823 in the genepept database release 114, Run with FASTXY 3.3t00, default parameters
taagctctttactgcaaaccctgctatcttattgcattggactattactgtgcagcaggcattcggaccagtccatcctgtaacagtcacctggatgaggacaccatcttgcctgattggtttcccatgcccttattttgcttcctctctcatatcctatttccttattcttctaatccgtcttccaaaatggccacaaatcatttttccaaaaccccaatctgctcatgtcaattgaatacttgtttccttaaaatctttcagttacttccattgcactcagaataaatctcaactttctcagtttagagctctttcttggctaggcctttcatgttcagcctccagcttgcttttctactgatttttctatgatctctagtgtgaacttcacaggaaaatcatatcggactatttgtacg

SEQ ID NO: 81473 - DNA, 417 bp, Homo sapiens
  sig_peptide (31)...(166): this location contains the signal peptide sequence, MIICQLLTGVHVSVSCARPAPGLGAHIRCDYFSTASSTQHQPPCQ, Run with SignalP
  misc_feature (274)...(340): similar to gi3093363 in the genepept database release 114, Run with FASTXY 3.3t00, default parameters
agaaactccacccagatcctagattggagtatgattatatgccaacttctgacaggtgtgcatgtcagtgtgagctgtgccaggcctgcacctggtcttggcgcccacatcagatgtgattacttctctactgcatcctccactcagcatcagcctccttgtcagaccttctccccttcctttcctaggtccttgcatgagagggacccagcaaccaattcctttttagattggtcctggaatttttatttttctttggaaagattactagctgaccctgctccttagccctgcccttgcccatcctgcgctgggccctgccccttctcctctcctcctttgcttgccttggtttcaatactgcttcctatagaacattgaccagattggttcctgcctctctccctcatgctgata

SEQ ID NO: 81474 - DNA, 831 bp, Homo sapiens
  sig_peptide (235)...(370): this location contains the signal peptide sequence, MLIFICACCFPADSHWINRVPQDKSILEQPFSKCSPWTSVGPRDH, Run with SignalP
  misc_feature (243)...(52): similar to gi1334788 in the genepept database release 114, Run with FASTXY 3.3t00, default parameters
gcgttgctacggaacttccgggtttacccacgcgtccgaacaaataaatcaataatgaaattttaattttttttaaagcttacttagttaatagtaaaagcattataaccacaaagccaattattaagaatatgtatggatcacttcatcatacttaataccaattttttcatataataataatatttagagaactttccctgagacaagccctgcatgggagtgtcccattaaatgctcattttcatctgtgcctgttgctttcctgcagattcccattggatcaatagagtgcctcaggataaaagtatcctagaacagccattctcaaagtgtagtccttggacctctgtaggtccccgtgaccattccaaaggtccgtgacatcagaactcatctgataattatgttaagatattatttgcctgaggcaggtggatcacttgaggccaggagttcgagaccagcctggccaacatggcaaaaccccgtttcaactaaaaatacaaaaattagctaagcaagttggtgcctgcacttgtagtcccagctacccaggaggctgaggcacaagaatcacttgaacccaggaggcacaggttgcactgagctgagatcgcgccactgcactccagcctgggagacagagcaagactctgtctcaaaaaaacaaaaggatgttatttgccttttccgctaatagagctgctgacaccttagcacaaatcagggcagtgggatgaaattgtactagtcatcactgtgttcttcacccctgtgctcacacaaaaaaaaaaaaaaggggcggccgttttaagggatccagtctaa

SEQ ID NO: 81475 - DNA, 441 bp, Homo sapiens
  sig_peptide (22)...(157): this location contains the signal peptide sequence, MYPRVRPRVRPRVRLFILFGLFTRGKFFPVRRDKNLKISLNDQVM, Run with SignalP
  misc_feature (230)...(398): similar to gi673414 in the genepept database release 114, Run with FASTXY 3.3t00, default parameters
ccattgcacggaactaccggaatgtacccacgcgtccgcccacgcgtacgcccacgcgtccgcctttttatattgtttggcttgtttaccaggggtaagtttttcccagtcaggagagacaaaaatctcaaaatatctttaaatgaccaagttatgcccagcccctcctttggctggtgaacagggctgtgccctggacccagagttctgggccgagccaaggacctgacctgaccctctaggaacatagcgtaatagcaataccatgttgagagcaccctggggtgagactcggtacaggagtccagggggtgtgagcggaggagtctcccctgatgaatgggggcaacttggtgggcttgatgggctgctgcttcacctaggaatgctgcccatgtgaatctgccctcccagattttaagaacttgagataaaattcag

SEQ ID NO: 81476 - DNA, 406 bp, Homo sapiens
  misc_feature (1)...(406): n = a,t,c or g
  sig_peptide (259)...(394): this location contains the signal peptide sequence, MLLVCFVFKIVNSTIHRCQECSAKSSYQLCLTVKQVTPDSIDKDL, Run with SignalP
  misc_feature (189)...(316): similar to gi53687 in the genepept database release 114, Run with FASTXY 3.3t00, default parameters
catgggggaggtggtggcattgtttcaggctatccatagctagcccttgtgaacctgttagtgatgtagggttacagagtcccctcatgaagctggtccctatgctgaggtcactggcaagaggccaccctcctctgtatgtacttcctttggttcttctctctcctcagcagctggggagtggatgaggtagtattgcctcttgtaacacaaccctctcgggtgctaaattaatctctgaagatttatgtggctgtgatgctgttggtttgttttgtttttaaaatagtaaactctactatccaccgctgtcaggagtgtagtgccaagtcatcttaccagttgtgtcttacagttaaacaagttactccagatagcatagacaaggatctcgcatctttcanan

SEQ ID NO: 81477 - DNA, 618 bp, Homo sapiens
  sig_peptide (61)...(196): this location contains the signal peptide sequence, MFPLLLFYPEHSPPLSIWCNLLIYFLSLSCLPLQLDFQLYRNRDF, Run with SignalP
  misc_feature (83)...(251): similar to gi31653 in the genepept database release 114, Run with FASTXY 3.3t00, default parameters
cttggtgaggtcttctctgattaccctaataaaaacttcagcatcctccagacactccttatgttccccctgcttttattttatccagagcactcacctcctcttagtatttggtgtaatttacttatttattttctttctttgtcttgtcttcccctgcaattagactttcagctttataggaacagggacttttgtctgtttggttcactaatgtatcctgagtgtcgggcatatagtaagtatcaataaatatgcaaataaatgaatagtctttagaggagataatgggagtataaaaaagagctaaggagtgcagtcagtatgattggggtgagtgatgcttttcatgctggaaaagttgtcatgacgggccctacatgtcattctaaggagcttagattttatactataagcggtaaaaggtgaggagagtaggcagaggactgaatcggaattttataaatgcgctctggctgcactgtttgaatgacgacagccgacgggcggtctaccttgagattcagcactttgggaggccgaagcaggagcatcacctgcagagctgatgtgaggaccattctaggcaacaccagcggagccgatctatgataactg

SEQ ID NO: 81478 - DNA, 425 bp, Homo sapiens
  sig_peptide (69)...(204): this location contains the signal peptide sequence, MFLCSSTRISVSLHALCYLLMENVPQLPCLIWASVQAQCRCHFTH, Run with SignalP
  misc_feature (205)...(348): similar to gi217867 in the genepept database release 114, Run with FASTXY 3.3t00, default parameters
tgattcaaagcctttatttataatctggctccaggctacttttccagcctgtctccctactatcacacatgtttttgtgcagctcaactagaatttctgttagtctccatgccttatgctatcttctcatggaaaatgttccccagttgccatgtctaatctgggcatctgtccaggctcagtgtagatgccacttcactcatatgcatactctttcactcatcacactaggtatgtcaagatagctctctcttttaacagacagtgaactccttgagggcagtgtcctttgctgcctcagcacctgactcattggtagtactcaaaaaatgtgctgattcgactggactacaaggtaattcattgagaattggatcatgtccatttttttcaccagttttttcccagcctgctagatattaatg

SEQ ID NO: 81479 - DNA, 626 bp, Homo sapiens
  sig_peptide (69)...(204): this location contains the signal peptide sequence, MTRSKCIGDCKLIITGWVALCMILFSSIYSFKFLQCTGIFYSGKI, Run with SignalP
  misc_feature (157)...(348): similar to gi2447076 in the genepept database release 114, Run with FASTXY 3.3t00, default parameters
aaatcatcagcatacaaggttacataaagtgtgatggcaactattttaaaatatataatcagtgacaaatgactagaagtaaatgtattggggactgtaaactaattattactggatgggttgcattatgtatgattttattttcttctatatattcttttaagttcttacaatgtacaggtattttctattcaggaaaaatatttaaacaattgtgcacaaaactattcatcttttttcttgtacatggaatcaagctttactgttggaaacacttcaaaatatatgttagcaaagtgaaaaaaaacaaattctcaaataatttcagtatctagagataatcactgtaaggattttcgtgtatgctcttgtaggcacttttactagcatattttcttgtacaaaatgtaatcatactgcaatttaacctatttctttcttacacttaataaattgtgaacaactttctatgtcagtaactgtgcagctatgtaataattttaatatataatttacttactccatctcttattggtgagcattaagttccttccaattttcttgtattataaaaacttctgtgatcagcacatactttatgtaaggtgtgaagaacacaaactgtt

SEQ ID NO: 81480 - DNA, 619 bp, Homo sapiens
  sig_peptide (40)...(175): this location contains the signal peptide sequence, MCYKHLLPICGLSFLFLCGAFQGTKVLHCTVYVNFMFSILHHYSF, Run with SignalP
  misc_feature (277)...(434): similar to gi967242 in the genepept database release 114, Run with FASTXY 3.3t00, default parameters
aattcttagtatattcttgatactacttttgttgattctatgtgttataaacatctccttccaatttgtggcttgtcttttctttttctctgtggggcgtttcaaggaacaaaagttttacattgtactgtttatgtcaatttcatgttttctatcttacatcattacagcttcttattccttatttaataactcttccactgttcttaatcattaactattttcctatatcttattctagaaatttcaaaggttttgtctttcacatggcagttagggatttatttgcttgtatgatgtgaggtagaactcacttttgtttttatatagataccaactgtcccagccagcacaatttactgaagaatttgtttttccctagtgatttgcaatcaaattttcatatatgtgggaatttatttctgctctctgtaatctggtcaattctgatcaaattgactatctctttacaataaaaatcatggacttaattactataactttataataaatcttgatatcttgtggggggcaaaaaaaaaatccatgtctttccacacctaaagggtgaccaccgccgggcttttatggggacccttgtgctttgggcaattcctca

SEQ ID NO: 81481 - DNA, 583 bp, Homo sapiens
  sig_peptide (47)...(182): this location contains the signal peptide sequence, MKMLRLLSLGVFYLCCEIRASVEKIFKYISSLRAVRSQGSIEYLK, Run with SignalP
  misc_feature (158)...(255): similar to gi808699 in the genepept database release 114, Run with FASTXY 3.3t00, default parameters
gataaattctggaaaatactcttttccaaagtaagcacattgttttatgaagatgcttcggttactaagcttaggggtcttttacctgtgctgtgaaattcgggctagtgttgaaaaaatattcaaatatatcagcagtttaagagctgttagaagtcaagggtcaattgagtatttaaaataaagtacgcttaaattgaggagtgttttaccagattaaaatagttctccttttgagacatgtatacataaataggttatcacatgaaaagtatctcgagttttcttagaatttatgattgaaaaattatttttatagatcaattttaacataaaagatgtagtttctgcccagtgtcttcggagatgtgacctgtctcacacttggttttcagctgctctgaaagacgactgccttattcctttgaggcgtccctgagggaactccaaagcgaattctgtgtataccacctaacccatatttttaggcataccccaccctccaaagagtgccctgtacaaaagggctgaaaaaatcatttggcccatttttgggccggataccaatagccgataaaacagc

SEQ ID NO: 81482 - DNA, 953 bp, Homo sapiens; identical to SEQ ID NO: 80839
  sig_peptide (76)...(211): this location contains the signal peptide sequence, MALFFCKIICTMKKVLLLTKFSISHSTNTRLSFLHIRLCCSRCCG, Run with SignalP
  misc_feature (735)...(607): similar to gi1213152 in the genepept database release 114, Run with FASTXY 3.3t00, default parameters

SEQ ID NO: 81483 - DNA, 590 bp, Homo sapiens
  sig_peptide (204)...(339): this location contains the signal peptide sequence, MRLHLGFSHFLLWFCDWRLEMTLSIEYLLLGDLPECNDGVNLCQD, Run with SignalP
  misc_feature (227)...(343): similar to gi3549848 in the genepept database release 114, Run with FASTXY 3.3t00, default parameters
ccttggagtccctggcagggtgataaatcaactatggtgttggtctccctctccaaacgccttgagtcaatgatgaaatggaaggagaattctggtgtctcagtgacccaagttgagcctgaaatttgagaatgacagggcccagagtaggtgtttttgtggtaacctacactggggaatgtcgagataagtttgggccacatatgcggctccatcttggcttcagccactttctgctctggttttgtgattggagactggaaatgaccctttcaatagaatatctccttctgggggacctgcctgaatgcaatgatggtgtcaacttatgtcaggacccatgggccctccccatgcacacagcactcttggaatctcatccttttccatggctctggctcacacttccacagcatttactcctaaatatgtctttctaactgggggtgcctcatacactgatagtaaccactggaatggggatattctaatctgaaggaaagctgcttggttcccgtcaaggccttgttctctggttgggctacccttattctggcccattgggtcttgcagatccccttgtaaggtcc

SEQ ID NO: 81484 - DNA, 405 bp, Homo sapiens
  sig_peptide (25)...(160): this location contains the signal peptide sequence, MFVYMYILYVCMSVCMYIYLQFSQTSYHSLELCSHVNHNNSNSTR, Run with SignalP
  misc_feature (17)...(167): similar to gi862343 in the genepept database release 114, Run with FASTXY 3.3t00, default parameters
ccaaggtttttcttgaatttttgtatgtttgtgtatatgtatattttatatgtatgtatgtctgtatgtatgtatatatatcttcaattttctcagacttcataccacagcttagagttatgcagtcacgttaaccataataactcaaattccaccagatacaactccaaatgcaagtttatgatgactccatgagtttgtaaaactgttacagactttcaaggatctcaaagcacgggcagaaggcatttgtttctgggcaatgtgctctgcttgttggagtgacccagctaaacagagcaagaagttattttgccttttcctgccatttctccatgcatttgggggctttaagagtgctttgagtctaagaaatatatttgaaatatagggtggaatcatctg

SEQ ID NO: 81485 - DNA, 638 bp, Homo sapiens
  sig_peptide (258)...(393): this location contains the signal peptide sequence, MPRLFSPLILLHTLSLKSHETFQWSQFLYQNTRDACFTWTYIFPR, Run with SignalP
  misc_feature (177)...(70): similar to gi3676723 in the genepept database release 114, Run with FASTXY 3.3t00, default parameters
aaagaagcctatatatcagatgcatagacaaagaataaaatggcatccagaactggtccccacctattcccaatcctggttccacagcagaatacattcatagttcaggcattcttccttgagatagatataatgtaagtgaccaagtctcttggacaagtattgtctctgatcaatccctgccaaactcctttccttggttaactcaagtggttagatcttactccctgaacagaaggaatatgagaggtcaatacatgcctagactattcagtcctctgatattgctccacaccctttccctcaaaagccatgagacctttcaatggtcccagttcctctaccagaacaccagagatgcctgctttacatggacttatatattcccaagaatcacttggataaatgagtggtgctgctttcccgtggttggggaaaagctaggaacctgacaatgcagtgctcagaacctgctgaccggtactagttatgctggcttgccatagtagtgcagttctttaaaaaggtgatacttgctctcttatcaaagggtgggttttttggttttttgacaagacagggtctcactatgtcacccatactggagtacagtggtgtgatcttggcttactgcaacc

SEQ ID NO: 81486 - DNA, 619 bp, Homo sapiens
  sig_peptide (86)...(221): this location contains the signal peptide sequence, MPVLTLVRPGLVLRSAGRRGAQLTRKLNCDEIHTQQAPSQMSWNH, Run with SignalP
  misc_feature (56)...(297): similar to gi1002863 in the genepept database release 114, Run with FASTXY 3.3t00, default parameters
cggcactagcggcacgagcggctcgagaatgtagccagcatctcctcttttggagatcggtgtcctagtggaagcggagccaggcatgcccgtgctaacactggttaggcctggcttagtgctaaggtcagcaggcagacgaggtgctcaactcacaagaaagctgaactgtgacgagattcacacccagcaagcaccttctcagatgagctggaatcacaaggcattagcgggagcaggggcttgttccagaggccaatttgatggccaagggtaggggcggggggtgaggtgggaactgattgctgaatgtgtctcaacaagagggaccagcacctggaaagctggtgaagggctcattccaaaattgccattgccaattcaaagatgagagagttagaatccctgtgtattgattctggaaaagtcctttaatagggtgtggtggggaggaaacctagtttttggggacgctaggagcgtggggattgcagaaagacccgcgagtgaggagagcgctttgtggaggctcaaacatgttcagtaccttgagacccgaggggactgaggtgcgggccagatgagattacagggggagtagagagtacgggcgggggcg

SEQ ID NO: 81487 - DNA, 3043 bp, Homo sapiens
  sig_peptide (1710)...(1575): this location contains the signal peptide sequence, MGLLNKYASVIIYLYFSLVKSESLFHLMYLPSLFIQFFLGIFSLK, Run with SignalP
  misc_feature (2604)...(2522): similar to gi791134 in the genepept database release 114, Run with FASTXY 3.3t00, default parameters
tggcggtattcgtaggatgtgcatcctagggaagataaaatcgtatatggtaaaggcatttgagttaattttgcattatatctaggaaccatattatttaaaatttgaatcctattaatgctgagagatcctaagagctagtatgttgtaaaacctgccacctgaataaaatgaaaaaaaaagtgtttttttgagacagagtcttgctctgttgcccaggctggagtgcagtggtgtgatcttgggtcactgcaaactccgcctcccaggttcacgccattctcctgcctcagcctcccgagtagctgggaccacaggggcccaccactgcgcccggctaattttttgtatttttagtagagacggggtttcaccgtgttagccaggatgttctcgatctcctgacctcatgatccgcccgcctcggccccccaaagtactgggattacaggcgtgagccaccgcgcccggcccatttactaaatgttaagttccttataattccatctctttcagcacccaatacaggggtttacatagaggaagtactcaatatttcctttctttttttcttttttttctgagacggagtctcgctctgtcgcccaggctggagtgcagtggcgcgatctcggctcactgcaagctccgcctcccgggctcacgccattctcctgcctcagcctcccgagtagctgggactacaggtgcccgccacctcgcccggctaattttttttgtatttttagtagagacggggtttcaccgtgttagccaggatggtctcgatctcctgacctcgtgatccgcccgcctcagcctcccaaagtgctgggactacaggcgtgagccactggagatttttttatttttttttttgagacggagtctcgctctgtcgcccaggctggagtgcagtggcgggatctcggctcactgcaagctccgcctcccgggttcacgccattctcctgcctcagcctcccaagtagctgggactacaggcgcccgccactacgcccggctaattttttgtatttttagtagagacggggtttcaccgtgttagccaggatggtctcgatctcctgacctcgtgatccgcccgcctcggcctcccaaagtgctgggattacaggcgtgagccaccgcgcccggccaaaaagaagaaatattaagttgtccataatctgttatatctaactattataaagtataaataaaacaaaataagttttacattacttgtttctgtcacattgttcaaaattcttttgggcttaaagccaactatgaattttagttgagtaggaggacaatgggaaacagattctttttttgttgttattgaaatgtaagcaacttgcccttaaaatagtatgaatatccagttcaggtaacaactttcacttttaattagtcaaatatatattaaatataaaaatctaatgctgtacagatgtgactttggacattttaagtattagtttattcagaaacgcctttaaaaatcagtgtgtatagaactagctcatttcttaactgtcaaatttagaagtgcaacagtgggtcttcagagagaatatgcccaagaaaaactggataaaaagactgggtaaatacatcaaatgaaacagtgattcacttttgacaagactgaaatataagtatataatcactgatgcatatttattcagtaggcccatgtgattatgtggtttttaactaacagcatttatttttgcaaactgcttggcattcctccaagggaaaggagcttctagactacaaacactgagcacatacattttaaattaacacatgaattgcatatggattgttgatatgcttttagagtcttgtctctacagaagaaaaacacgttcctggggtccatgcctttttcagaggcacaatctatagcttggaacttaattgctgtccatggtatctggcctttaattataagaaattgttgacaccccaatacagggtgcatctaaatacataatgcaagaaaggaggttttagtggttaaacttcggcacgcttaaagattttaggaatgtaattatgccattaggcagtatttctttgtctatggacttaaaaagttttcttggggcattttaaagaggtttatcaaagttatattgttgaaaaactattttccctggaaataatgtcccctccttcccaccttctgccttgatattcttactggaaaaaaagtgaaattgttcagaattacaaccatatagggtttccaggcatagcatgggcacattgggaatggaagactagaagaccccagcaaggaatgtaggtacattaattgctgcctaccctgagaaataactctgagtttcttctcccaagtattcctcaaggatccattcattgtagagtcaacagatgtcttttagaattcattataataagaagtccatgaacatacacacactatccttgaatagttttacattatattttttctaggtagttcctgaatactttaatgagcttaataaatgagaaaatgtattgaaaggtctttgtaagttactatataaatatgacatgtgttttaataatatctgaatttggctgggaacaatggctcacgcctgtaatcccagcactttgggaggccaaggcgggtggatcacgaggtcaggagatcgagaccatcctggctaacacggtgaaaccccgtctctactaaaaatacaaaaaattagccaggtgtggtggcgggcgcctgtagtcccacctacttgggaggctgaggcaggagaatggcgtgaacctgggaggcggagcttgcggtgagccaagatcgtgcccactgcactccagcctggcagacagagcgagactccgtctcataaaaaaaaaaagaaaaaaaaaaagggggcccgttcaagtaaaaaggcccctttaaacccggttaatcaccctcgagggggcctttttagtggccaccctttggtggtgggcccttccccgggcctttttttgacctggaagggcccctctcccg

SEQ ID NO: 81488 - DNA, 958 bp, Homo sapiens
  sig_peptide (538)...(673): this location contains the signal peptide sequence, MPVCVLQLNNCLGAYCVISSFFTNTFLLLNAVINFLYLGYLGFSE, Run with SignalP
  misc_feature (368)...(564): similar to gi3882068 in the genepept database release 114, Run with FASTXY 3.3t00, default parameters
agatattttgcactagttgtctattttctcattgaaaaccaatatggcattcttatgttaaacacaaagttttataactaaataactcctgaaataggaataacagagtatactatctttttatttcataaaagtagtcattttagtgactaagaaatcaaaataaaatatcgctctgttcgctacaaatgaaattctcaaatacaaagctatgtcctaagataattctgatttgagatttttcaagcaattgaattttcataggtattcattagatatttatattcaacgtctagtataagaatatgacaatgccccccacttactagaggtatgaccttggatcagttgcttaaactttctccagctcagtttctttatttgtaagatgaggctagtaactgtttctccttgatagggttattataagatcatatgagtaaaatacatagcaccgtatttagaatatagtaaacaaacaattattgtattctataactgatatttctttacatatcccccaactcccatttttaaatgcctgtatgtgtattacaacttaataattgtttgggtgcctactgtgtaatcagcagcttttttacaaatacatttcttctccttaatgcagtcattaatttcctgtatttaggatatcttggattcagtgagtccccacataaataattaaggtcaaaaataaggagatagccttcccatttgccatgactactttattttttctctttgctctcatcactaacatattacgttttttacttactgatttcagtatggctctcttgctagaaaagaagctccacaaagggcgggctttttgacagtacctggcacgtagtaaatgacaaatatttgttatatatatgaatgaaatattggcatcaaactttaaaatttctccttaaaaattggggtagccctttttttggcactttca

SEQ ID NO: 81489 - DNA, 693 bp, Homo sapiens
  sig_peptide (206)...(341): this location contains the signal peptide sequence, MPVPLARICWVSFLHQAPCWELCYYCVVLTSALIGAVNSSILQMT, Run with SignalP
  misc_feature (242)...(29): similar to gi3745882 in the genepept database release 114, Run with FASTXY 3.3t00, default parameters
gtcagggctgtgcttggacttggaattgaaataagtcctggaaaattggttaatccccgcttggcatacatattatgtaaagtgtgttgggagaggtacttgaaggttttcctgttgaaataaattccctacaaccttagccttccagtccctctgcctgacactcccatggcagttggtgcacttgcgttttgccctgttgaagatgcctgtgccattagctcgcatttgttgggtatctttcttgcaccaggcaccatgctgggaactatgctattactgcgtggtcctcacatcagctctgataggtgctgttaatagctccatcttacagatgactggatctacagggagattagacagttggccatggtgacagtgaacttagttcttgggtcattgctcctggagcctatgcattatagacctgctggtgtgagctctttctcctcattcatctgagaagacttctgtgtctgcatttgcctcttcctatgttagtaaaaggaacatttttccactggaaaacagttaccaacagttttgtcagtggctactctattataccttcaaacatgcctaaatcttatgtaactcaacacccagctaatcttgctatctattctagccactcttcttggttttctctctttaaactccccaacaggcaggctgtttccattgcctccacca

SEQ ID NO: 81490 - DNA, 459 bp, Homo sapiens
  sig_peptide (305)...(440): this location contains the signal peptide sequence, MEITKSWFVFLWLIKFLENRDTYVSFFADLKKIVREIRCVIIISS, Run with SignalP
  misc_feature (133)...(328): similar to gi2650181 in the genepept database release 114, Run with FASTXY 3.3t00, default parameters
cagcataccagcttaattggccgccctaattggaaaaagaccctccaggccgccaatactgcacgagggggcgagcatttttgaggacaggttttccgcagagcgcctaggcccggcccaggcatttccttattttccgacgggtcctcggattcctgacggatgagcttttgtttcgcaggacaaaaacttgacataactgcataagaattgtcgattgcaactttaaaaaccttactgtattttctgaaaagtggggctgtaaagcatctaggcttttactacgctcttaaattgcttaaatatggagataacaaagagttggtttgttttcttgtggcttataaagttccttgaaaacagagatacctatgtcagtttctttgctgatttaaaaaaaattgtaagagaaattaggtgtgtaataatcatcagttcagcacttgcgagaattatgaa

SEQ ID NO: 81491 - DNA, 749 bp, Homo sapiens
  sig_peptide (187)...(322): this location contains the signal peptide sequence, MHVLFTLYLVPCCLHFELFIGDLAVKNGTKHSAEVLSRVPKHKKA, Run with SignalP
  misc_feature (456)...(397): similar to gi4886381 in the genepept database release 114, Run with FASTXY 3.3t00, default parameters
ctaaggtattcggccctctagtgcgcagaattcgcgctcgagccccaaatcactacttgtggtgctttcacagtcactcaccgacatggacagagcggggggatttttgagttgaccagtgcacacgttcccagctgaggctgagcgaagcagtgctctgctttcttgtttcagctcttatattatatgcatgtccttttcacactgtatttagtgccatgttgtttgcattttgagctttttattggtgatcttgctgttaaaaatggcaccaagcatagcgctgaagtgctatctagagtccctaagcacaagaaggctgtgaggtgacttaaggagaaaatatgtgtcaggtaagtttacaccagcatgagtcatagtactgttggccctgagttcaaggaatcaaccatatgtatttacagaaggtatggttaaacagaaacacacctacaacaaggtcatgtattaatccattgaggaaaatgttgtggccaaaggcttgcaggaacctaaccttgaatttcccctacgagcaatggttcaggatactctaacttggtttcgaagaaacttagtactatgaatagcatgtattcgtagtaggataaatgggcctatttgaaggagaagaagaagtccactgatcccttttacatttttttttttgtgttttcacggacccatcactgaaaggttggccggggacttaatcggcaccataacccttaagggggacaaggggcctt

SEQ ID NO: 81492 - DNA, 709 bp, Homo sapiens
  misc_feature (1)...(709): n = a,t,c or g
  sig_peptide (663)...(528): this location contains the signal peptide sequence, MFRNEFSLTFYCFLWGRLAFVVIIDRTQSSSRRVSGSQGRRPAQG, Run with SignalP
  misc_feature (598)...(272): similar to gi169424 in the genepept database release 114, Run with FASTXY 3.3t00, default parameters
cctatttgagcccattcatttcttttcctaatctccttcaagcagtatttattggggtactcacctgggctttccctaggttgtgtgggatcccaggaaaatattcttatatgagggctctgtctgtagtaattatttgattaataaatgtgtgacaagacgtatgggcccatgtggggcatagtgatttatcaataaggatttagaataataagtagcatagaggtacttatgtatttacatgttttccaattgaggcatgtgaaagtggctctcctccccaggtgccatctctttctgttcagatctagaaaccatagcttgctagtatttattgccaaagacaacattccaaaacaattccacatgtcacctggttgttacgttaaggctgtcactcataacctctttggctctttgcaagctgtttgcattgaaatggcatagctcatcttgcctctgaatgtccccagtccatttacttaaggctggggacaccgttactcatgacactgtcccatcccttgtgctggtcggcgaccctggcttccagacactcttcgagatgatgactgcgttctgtcaatgatgaccacaaatgcaagtcttccccagagaaagcagtaaaaagtgagtgagaattcatttctgaacatggtaaatgcacagatttttagcatanagggagagcagcacatctcccaacccg

SEQ ID NO: 81493 - DNA, 756 bp, Homo sapiens
  misc_feature (1)...(756): n = a,t,c or g
  sig_peptide (265)...(400): this location contains the signal peptide sequence, MFSLVIIRFLFGVVISDFFRGKKIGNFNVLNEFTFDFTISFHLVP, Run with SignalP
  misc_feature (730)...(523): similar to gi572610 in the genepept database release 114, Run with FASTXY 3.3t00, default parameters
cccgactacaaattacacgacctactatagggaattccctctcgccgccaaaattcggcgcgaggttaactttttaaaagcccattacagattaaatagaagagagtgatgtgagtattagtgaccatacacagtaattcagtctagatttcttttcctgtggttggaaagcaaaaatacatgatgtggaaaagcctgaatttcttgtagtcacttttgacagccctctaagggtcattgtctattaaaatagcaacagatctgatgttttccttagtcataattaggtttctttttggtgttgtaattagtgacttttttagagggaaaaaaataggcaattttaacgttttgaatgaatttacatttgacttcacaatttcatttcacttggttccataataagtgctctttttttttcttttctctcttctcttctctttctttttctttctttctttctttctttctttctttctttctttctttctttctttctggctttctttctttctttctctctctctctctctctttctctctctctctctggctttctttttttgggggcaagaggacatgtgtgtgngagaaagagacaaacagggtctggtttcttgctgtgggaacccgggtggggggaaggcaacctcaacctcgggggtaaggaggctcttttcccccccccggtgctaaaaaattggcatggccccccggcggtaaagggtaaagggtttttttaggggcgcacggcgc

SEQ ID NO: 81494 - DNA, 693 bp, Homo sapiens
  sig_peptide (194)...(329): this location contains the signal peptide sequence, MWLVVVLLSHTFVSHLAEGDSATWVAHFTSGSQLCGVFPLLACTL, Run with SignalP
  misc_feature (313)...(124): similar to gi5031125 in the genepept database release 114, Run with FASTXY 3.3t00, default parameters
caggcatgagccactgtgcgaggccaagagtcgcaatttttaatgagtttacatcataaggtggtggtaaggattaaatgaaaaatggatatgaagtggcaagcacagtacctagcacatgggaagagccacatcaatgacagtttgtgatagtatcaataggatttagcattggagatttgtgcagtttgccatgtggctagttgtagttttgctaagccatacatttgtgtcccacctagctgagggtgacagtgctacctgggtagcccatttcacaagtggaagtcagttgtgtggtgtgtttcccttgctagcatgcacgctccatcaggttaggggcaatggctgacctattggtggctccagctcagcatgtgtctcttagaacctgacacagatcagatgttgaatacctttgctattttaaaaagtacttgagcatatgtattcatttatcttgcagctttggcatccattaaaccaaggctggaatcctgggtcctgtgtctcccacctaatacccgggtgttcctaggcaaattatctcgcctttttggccggttccccatctggaaaataacccatgttatgacctaaattttgtctgggttccaaaagatgaggggaagccccagggaggctgtcccgggataatttgtgggaatgctggataagagggttccagcctgg

SEQ ID NO: 81495 - DNA, 686 bp, Homo sapiens
  misc_feature (1)...(686): n = a,t,c or g
  sig_peptide (187)...(322): this location contains the signal peptide sequence, MLAAFFLLSLKIPFLLKKLPVLMLSHVGGVKRAFIVGFTCQPFFL, Run with SignalP
  misc_feature (147)...(278): similar to gi210877 in the genepept database release 114, Run with FASTXY 3.3t00, default parameters
atattttaagtaagttaagtggattctgattccttcttccgcatagatgatgaaatatgttaccgtggggaatgtgcttctaggctgctgaaaactttgggtctataaaaggttaagatggttactaagcccagacagacttggccttgttgtacacaggcttcccatctaccagagatctctcatatgttggctgcttttttcttactctcactaaaaataccttttctgcttaagaaactccctgttttaatgctgtcacatgtgggtggagtgaagagagcatttatagttgggtttacctgccagcccttcttccttaagggatgttccttagtggctgtaaacctggaagatcctgtaggtcgcctaagtctttgtccccatggtgtccccactatgctagacagtacctagcatgcatgggtttcatttttgcaaaaaggagatattattagcttggcctgaaggtggaatggagccacattaaacacttcttggcattccgggcataggagagatttcggaaagtgtgggaccctattgtgaaaatttgggggcttgcttctggggccccctggctgatttttttttgtgtgggccnaaacttgggcaatacaaacgcgggggcccccccgggattccacactttggggcccaggcgggggttggaaaccccagtttgt

SEQ ID NO: 81496 - DNA, 661 bp, Homo sapiens
  misc_feature (1)...(661): n = a,t,c or g
  sig_peptide (502)...(637): this location contains the signal peptide sequence, MSLFYPRIPSRSLWCVCPVSLAPPIRIPSRSLWCVCPVSEFHDTD, Run with SignalP
  misc_feature (236)...(330): similar to gi987183 in the genepept database release 114, Run with FASTXY 3.3t00, default parameters
tgaaatcaagctagccttttacaaacagagctttcagtttcccaagaaataatcagttttatgaatttcctgccagcatctaacctgattggccttatctcttagattgttagcctaatcacaaggcaaatctgaggaaggaggagaaatgtatacacaacatatttcaaagtccagtgtaggccattatctgtcatcctggactccttatatgctatgtttccatccattaatgcagattaagcctcactgtgtaaactatagcaaaactgaatgtcaattaaaagggtatacatacccataaaggtttctgtaaacttcttactttgagataattttaaatgtgaggaagagttgtaaaatcactagagttcctgtctactctccttaacccaccttctccagtgtttacatctgacagctgcagtgcaatcatcaaaactaagaaattaaattggcatactcctattattatttgaatttcaccagtttttctgaataatgtccctcttctatcccaggatcccatctaggagcctgtggtgtgtttgtcccgtctccttagcgccccccatcaggatcccatctaggagcctgtggtgtgtttgtcccgtctccgaattccacgacactgactacgaactcagtnnnnnncccctct

SEQ ID NO: 81497 - DNA, 1441 bp, Homo sapiens
  sig_peptide (271)...(136): this location contains the signal peptide sequence, MTAQHHSIAVLLLNLEVTCECMEYNKVFYSGSFASTSFLIGYCSS, Run with SignalP
  misc_feature (994)...(1160): similar to gi3875847 in the genepept database release 114, Run with FASTXY 3.3t00, default parameters
gttaagatggaatagttttattcagcaaacaaaaaacttgctaattcagagtatcctctagtccaccgtaatgtgggtttagactacatttgcaaaattagggccttgacggctgaacaaaataaaatccagaggaagaactacagtatccaatcaaaaaggaagtactagcaaatgaaccagaataaaagactttattgtattccatacattcacaggtcacttccagatttagtaacaacactgcaatgctatgatgctgtgcggtcatttagcttaaaccacagtgtaagttggtagctctctcctgctctcttggcctctagatgtatcacaatacaattcctaactgtggcctggcaaccaatgcttatttcattggattattttctgactgggacatgagttcatcgcatcttcccagaattttaaagtaccttcccttacattataagagatgaccaaacactctagtgtgagggctgcttcacacactgttcttatctatcatgattgctcttccttacatacacgtcccgtacagatcagctacacacggcatggtcctgaaaccacagcttttgtttctttggccagaatgcacccctcaccttgagtgcccgccttagaaacacaggtacttggttctcacagggtgtgcatggttgacacaagttcatctgccccacggtaaaagctcttcaaaacctttgcatgacttgtggggagcagggtcacaatttgttgcatgtgacctgcctcagcctcaaaagataagagatcatgaggctccaccgcccccgggctcaggaaacttgatccacatcgctagggctctgcctgttaggttatggatgctcacctgactctctgaagcagagggaggctgacacagattagcttttattgaaattattaaagtgcaactttgtgttttcactctatcaggcactgaaaagcaagaagcttttaattttttcttttctataatgaaatatattttctttactcttatttgtatctgtaatacacctgcaattagaaacagcagttaaacataaaacaaagaacagagcagaaggcacagtctaaagagtgggtatcagaagaattttaccatttacgctcataggaatactaaaccaaacccaatcagaccaaactccaaagcccattgtgtttacaagtctgcctcttttgtgtgatagcaagtcagtcctttaaagcagaaaccccatttactaaccctacatcccaagtaagcaggcctgtatcagaaccaaacagctgtcctcttacatcagaaaatctaagtgatctgaaagacaattcatcacaagtgtttccaattttcttctgagaacatcaccaatcccactaatgcaaactcagaacattacttcagtcaaatttcgctaaatgctatagctttcttcaaata

SEQ ID NO: 81498 - DNA, 329 bp, Homo sapiens
  sig_peptide (91)...(226): this location contains the signal peptide sequence, MVSALLCCAVLLYILYMKWRVHRVGTLKGFSEPREAFSKAKARTG, Run with SignalP
  misc_feature (141)...(22): similar to gi2695651 in the genepept database release 114, Run with FASTXY 3.3t00, default parameters
atttaatttccatttattagggagactaaatcaaggatatagagcagcacatgttagaaacgggattttaaccccgggcagtctggtgctatggtcagtgccctgctctgctgtgctgttcttttgtacatcctgtacatgaagtggagggtccacagagtgggcactttaaaaggtttctctgagcctagggaagcattttctaaagcgaaggcaagaactggctttacttcgtaagcgatccatatccactttgtttggttctttaacatatggtttaaaaatgcctttaaaaagacctgaatgcatctcaaatgttcccctttggg

SEQ ID NO: 81499 - DNA, 879 bp, Homo sapiens
  sig_peptide (147)...(282): this location contains the signal peptide sequence, MSLLLGRIIWQHIPCTVSGVYCCLTLVTDWELWLAGTAQHHTKIL, Run with SignalP
  misc_feature (838)...(349): similar to gi2224377 in the genepept database release 114, Run with FASTXY 3.3t00, default parameters
aaagtacagctactccttgacttacatctggataaacccatttgtaatttgaaaataatgttaagttgaaaatgcacttaatatgcctaacctacgaagcatcatagcttagcctagcctaccttacacgttttcagaatgcttacatgagcttgctgttgggcagaatcatctggcaacacataccctgtacagtatcaggtgtttactgttgtctaacccttgtgactgactgggagctatggcttgctggcactgcccagcatcacacgaaaatattgtactgcgtattgctagcctgggcaaagatcacaattcaaagtatggtttctggtgagttgctttctcacctcacaatattgtaaagttgaacaatcttaaattgaactatcgtcctaagttagggaccatctgtaatcacagggtagggagaagatcaggatatgttaatacagtggttgtcactcattgctgctctctgacaaagacttcagccctttgtgaatattatcaatgtaagattgttaacttttttttaaggtgagttgttcctttttccaagatttgtcttttatgacatactgtctttaatgaaattgtgatattaaaatttttaatcttctacttatccaaataaaataggcaatcctgtgtcagtccttaaaacatcttttgaatttttttagcttgatgtaatccaggtttgagaactgctggtctaatgatgtaatgtcatggaaatcaggggatttaagatgggttttgctaaggaacatgtaaacagtgtaagccattgaagttggggattcacaggttattgactttttctttttttgacaatttcactccagcctgggtgacagagtgagactccatctc

SEQ ID NO: 81500 - DNA, 664 bp, Homo sapiens
  sig_peptide (241)...(376): this location contains the signal peptide sequence, MKSLYRRMSLMLLLRRKSSFQTTYWVVPFSFLYSGCVYVCAHHVH, Run with SignalP
  misc_feature (348)...(421): similar to gi1480863 in the genepept database release 114, Run with FASTXY 3.3t00, default parameters
cacaaattggcgtaacatttagagagcagcctgctaatgggtccccatatttaaataggcttaccctctgatctcttaattccactcatactatctactttaaagaaataactggacagatgcttcatgatgtctatacaagggtgcttaaatgcctagatggggaaaacttagaaataccatgtctcatagtgagggattggctaaataagttatgttttatccagtcaatggaatgctatgaaatcattatacagaaggatgtccctgatgctgttgttacgtaggaaaagcagttttcaaaccacatattgggtggtcccattttcttttctctattcaggatgtgtgtatgtgtgtgcgcaccatgtgcatgagaggggatgtgtttttgttgtgtataataacttaagcacataggacaaaaggctgaaatgttacacaccaaaacacgaatagttatctttggaagatatgattttggttaatttttaccctcctcttacgtatttttttttttttaacaagggaggctggttttttatagtagggaaaaaccatagggctcctattaactttggaaagaaactattctttaaaattatagcctctgatgggctttgccagaagggaacccctattggattttaaaaaaagatttgcg

SEQ ID NO: 81501 - DNA, 709 bp, Homo sapiens
  sig_peptide (166)...(301): this location contains the signal peptide sequence, MKCLLCGRYSGSTFYSLSHLILMTALSLSPNPPPSHFTAEEVKVQ, Run with SignalP
  misc_feature (66)...(280): similar to gi4579707 in the genepept database release 114, Run with FASTXY 3.3t00, default parameters
aaatcttattaagtcattttaagttgggggttctgtttcagtcaaatcatcctaaatgatatcttttaaaaataattcttcccagaagaatggatcatggcagaatacagaaaatgagctcatgtgtgcaagcctccttccggaaatcataacagctatgtgtatatgaagtgtttactctgtggcaggtactctggaagcaccttttattcactgtctcatctgattctcatgacagccctgtcattatcccccaaccccccaccttcccatttcacagctgaggaagtcaaggtgcagaaaggttaaaggaactcataagtgaaggcactgcgatctgaactcaaacaatccagcctaaaaacccatggtctcagccaccatgccatgtttcctaaaaaaattacgctatgacagtggaccgtttttgcttaactccagagactttaattcacccacctagaaaacctgtcatgaaaacatagaggattttttcctgagagttcttaggaccgtgaaacagtgtcacaaatcctgttcagaaagctgggatcatgccgatgaccaggccgaatggaaaaaaaggaaaatatttaaatttttaaacctcggatcactgtttttaggttcaccgagctctaaatttttgggaaggggaaaattaccccgaccttcccttggaaaatgaaggggtgggatccggccaacc

SEQ ID NO: 81502 - DNA, 371 bp, Homo sapiens
  sig_peptide (140)...(275): this location contains the signal peptide sequence, MLAHLSFERSLILHLIFSGIAVSIKALTKTWMPPEMGSSPVYKAF, Run with SignalP
  misc_feature (127)...(219): similar to gi2522524 in the genepept database release 114, Run with FASTXY 3.3t00, default parameters
gcatcagctcgtagggactgagccagggttggagtccagactgacttgctggatctgcagctttctccttttcagcactgctgggttctatcgtgagaacagatgggctcatggccatgacggttaggaggtctgccttatgctagctcatctctcctttgagcgtagcctgatccttcatcttattttctcaggcatagcagtgtccataaaggccctaacaaagacttggatgcccccagagatggggagctcaccagtctataaggctttcagccttctccagtgcaggctctctgcacagaaatggggctcctgccactcccagaacacccttcactggcctgtgtggggtcctcagaccacccttc

SEQ ID NO: 81503 - DNA, 659 bp, Homo sapiens
  sig_peptide (40)...(175): this location contains the signal peptide sequence, MVMGWHWPQGLGLSLSLCPSDLDGWVSREVPLLDRPQALPPCVQI, Run with SignalP
  misc_feature (144)...(266): similar to gi4775290 in the genepept database release 114, Run with FASTXY 3.3t00, default parameters
gcaaaccacctaatacaaggcacatagtaggagcttattatggtgatggggtggcattggccacagggccttgggctcagcctgtccctctgtccctctgatctggatgggtgggtatccagggaagtacccctacttgataggcctcaagccctccctccttgtgtccagatcctttcagcacctgcctccacgtcctgcccctctgccctctctccctggcatgatcctggccttccagtcacatcccaaaatcactttgcctggtttcctttgggaagcaaagcctgtctggggccctccatagacagagaagctgtgaaggagataaatgctgaagaaggggtgaggagacagactcaggggccaatcaaagtcaggaaacaggctgggtgtggtggctcatgcctgtaatcccagcactttgggaggctgagccgcggatgacctgagttcaggagttcgagaacaagcctgcccgcatggggaaaactcatctccactctaaatacacaaatttaccccgcccgtggggcatgcccgtgtaccccctactccgaaggctgggacaggagaatcacttggacccagtgagccgagatcgcttcaatggagtccagccctgggtgacagagcgagactccatctcaaaaaaaaaa

SEQ ID NO: 81504 - DNA, 383 bp, Homo sapiens
  sig_peptide (112)...(247): this location contains the signal peptide sequence, MFYLFLLYFGSFNCYVFTFTDFIIYIFYSTEQTSNKFLISDILIS, Run with SignalP
  misc_feature (155)...(344): similar to gi4049794 in the genepept database release 114, Run with FASTXY 3.3t00, default parameters
aaattattggacattatttcttcaaatatttgtttttacctccttgcttctagggtaccaattacacatgttgatccaattaatatggttccatgagttactaagattccaatgttttatctctttttgctttattttggcagcttcaattgctatgtcttcacattcactgattttatcatctacattttctattctactgaacagacatctaataaatttttaatttcagatattttaatttctagaagttctgttattttttcctgtgttttaaatttgtttgttgattatataaatgatttattttgaattcttgagcatatttataatacatattttaatgtccttgtttgctaatccattattattattattagctc

SEQ ID NO: 81505 - DNA, 514 bp, Homo sapiens
  sig_peptide (62)...(197): this location contains the signal peptide sequence, MTFCMYFTFFSCLNARHIVYPTLVCSQLYVIGPLPFTYLLLVSCP, Run with SignalP
  misc_feature (78)...(187): similar to gi3127821 in the genepept database release 114, Run with FASTXY 3.3t00, default parameters
aaaaaatctgagttgcagtcacattaacaggtcagtagacatagaggtttggttccctcatatgactttctgcatgtactttacatttttttcttgtttaaatgctaggcatattgtgtaccccacattggtttgtagccagctctatgtcatagggcccttaccctttacctatttattgttagtatcatgtccataaacaagccaatggctcagcatgaactgatgctaaagaaagctcatgcctgagtgataaattaagtgacctcagctatttctcttcagtgttgtgaaagttatttttaacagtaggtttcctggtagattctctaaccactcggtatttcacatggcccaacttggttaactcgactggttacggcaaatgctgataaaggcaagatcacaggtttgctccccatgaaaaccaataacttctcggagattaaaaaaaaaatctcccttctgtgaccacaagcagcatcactcatgcaaatgtcggaagagaggaatt

SEQ ID NO: 81506 - DNA, 804 bp, Homo sapiens
  misc_feature (1)...(804): n = a,t,c or g
  sig_peptide (217)...(352): this location contains the signal peptide sequence, MTSRPHFFRYLCSLPPLLFPLLXQSQLLPGSPLPIALQSRVGSLL, Run with SignalP
  misc_feature (349)...(235): similar to gi217384 in the genepept database release 114, Run with FASTXY 3.3t00, default parameters
gaaaaataagatgtctacatatgtgctttccttctactactgaagactatttaaaaactaaccttcacttaaaaaatactgaacatacaactaagtaacattaatgtctaggtctaggttactaagttctcagtaaaaatgatgtttagtaaggaaatgatgtcagtcagcctgcagctcatattgataagccatccaaaattggtcccataggtgatgacatctagacctcacttcttccgctacctgtgctctcttccccctcttctctttcctctgttgncacaaagccagctactgccaggatcccccctccccatcgctctgcagtccagggtggggtctctgttagcatgaggaaacgtgaaaggaaatgtatctctgtgtacctttattttccctccagggcttaaatggaaaaagagagaaggtggagtcccttttgccattgtaactggaattaaaaaccttaaaaaactcaagttggagctctgagtgcattttcccacaaaaaccatgttatatatagtggtttggttctatggtactattaataagacagaatacttcagctatgatttctgggctggcctgggaaaccactaaatatgacatagtttcagtgaaaaagtgcgttcagggttcccagcaatgagttttacaaacccacaatcagaacacaacccatctgaaagctgagggccgcctacttcgcagtaggtttgacagcctcacaaaggcatccgaatgtcatagacgtcaacgccaagcttaagagtctcctgcgtggcgctccagcagtac

SEQ ID NO: 81507 - DNA, 703 bp, Homo sapiens
  sig_peptide (23)...(158): this location contains the signal peptide sequence, MVVARLRILLFVPLSSMRSLFFINGCVFTGANTHLDFELPSYSLH, Run with SignalP
  misc_feature (146)...(68): similar to gi4433448 in the genepept database release 114, Run with FASTXY 3.3t00, default parameters
cttcaaccctgcttctgtcagtatggtagttgccaggttaagaattctgctttttgtccccttatccagcatgagatccctgttcttcataaatgggtgtgttttcaccggtgctaatacgcatctggactttgagcttccctcctactccctacacacaccccaccttgtttatctctggtctatgttcatattcatgtctgaagggaacattggtctcttcctcatgtgtaggaatgaataaatctgacagaacctaaaagcatacccagaggaaactgtataagcccattatttatatccctcgttttcttattaactaactgccagatttcagaaaactggagccaacccaagaaggacccctggcagccggtatgaaccctaagaccagagactagtatgccacagttgctgaagagtgggggtaatggggaggatgagtggggagaaggtaacaaatggcttctagaaacttgacatggccgggtgtggtggctcacgcctgtgatcccaccactttgggaggcccaggtcgtgcgatcacttgagcccagaagttcaagatcagcctgtgcagaatggaaaatatatggttctataaaaacgcagatatttgctgtgcatggcgaccgtgcccgtgctttcagatcttcggtggcccggggggaggttaattgccctctttcccaccaggggaggg

SEQ ID NO: 81508 - DNA, 710 bp, Homo sapiens
  sig_peptide (148)...(283): this location contains the signal peptide sequence, MLLFLIVITVIYIKHPEFWTACFTCIILFNYQQFILHMNKLSFRK, Run with SignalP
  misc_feature (46)...(273): similar to gi4574726 in the genepept database release 114, Run with FASTXY 3.3t00, default parameters
cctatatgtgccctctgacgctattaatataactattttgtctttttcatcaaatgtttgctgaaatgttgttgttgtttttgttgtgtgtctcattatttccctgggataaatataaattattcactaccttagtcttatttaaatatgttactttttcttatagtaataactgtcatatatattaaacacccagaattttggacagcgtgctttacatgcattattctatttaattatcaacaatttattttgcacatgaataaactgagtttcagaaagattaaataactttaagttcaggttcatacctttgaattcaaagtccttgcttctctattcaccattgcctccgggggggtaattaatacattaactatgatactttgaccactgtcttaatttaaaaagcaaaactgcttctagcataagatctgtgcagataagcaagggacaatattgattgtccatttaaaaaaaagtcattggccaggcccagtggctctcacctgtaatcccagcactttgggaggccaagacgggcagattgcttgagctcacaaggtcaagactaacctgggcaacatggcaaaaccccatctctacaaaaaaaataggaaaattagttgggcatggtggtgcgcgcctatagtaccagattattggaaggcttaagcgggggacgaatcttctccccccagcagccaaca

SEQ ID NO: 81509 - DNA, 411 bp, Homo sapiens
  sig_peptide (100)...(235): this location contains the signal peptide sequence, MALLHICVGHPLLSFPKAGDFSFSSQDDPSELTAGAKDKEFSCLL, Run with SignalP
  misc_feature (273)...(102): similar to gi2104665 in the genepept database release 114, Run with FASTXY 3.3t00, default parameters
ctggctatctacatggaagggtagggtttatgacggcaatacacaatagaagatgcctttggcaagaccgctgctctccttagagagaatatcttgccaatggctttgcttcatatctgcgtggggcaccctctcctttccttccccaaggctggggacttttctttttcatctcaagatgacccctctgagctgacagcaggagccaaagacaaagaattttcttgccttctcgttatctgcctccaacccgccccgagcactcgttccctcttctcttggcagctatttttgctcagtttctctctggtttcttttactttgatttataggggtgaatttaagaaatctggtgaggctaaggactatttgacccaagtccagggacccatagactgtgggaaactctta

SEQ ID NO: 81510 - DNA, 834 bp, Homo sapiens
  misc_feature (1)...(834): n = a,t,c or g
  sig_peptide (147)...(282): this location contains the signal peptide sequence, MQVLLLAYKNLIYLFVFRDNTEPLFLYSVFLKFKQSVERHFSSSM, Run with SignalP
  misc_feature (404)...(503): similar to gi5639729 in the genepept database release 114, Run with FASTXY 3.3t00, default parameters
tagattagtacaaaagacacaaaagttgtcttgtcaaaattagtgacaggacagcagtctcctccaaccccaactttaagtagtctactttaaaggattttaagaattgttaatgactgaacctcaaggtaatgttagtatctgagatgcaggttttgttgttagcttataaaaatttaatttacttatttgtgttcagagataacacagagccactgtttctgtattctgtgtttttaaagtttaagcaaagtgttgagaggcatttcagttcaagcatggagtgttgaaaataaattccagagcctccctggtacaaacagactgaatatgttaatggtaaccttcacttcctgtccctgctgtttctccattgtgggccactaatgcctttcctttttgtagatttcatagccattcttggcctccctgaatttctctgcttttccatgggcctttaggaagaatgagctggcccgttttcctcgttcctggacactgcctatctgggcacactgatttgtatgagccaacctgctattcttatattttctatattccaagacaggttttacttgattgatttacaagtttttacatccacctagagagtcagaatctcctttggaaggtaactgcagtccagaacattagactctaagggcatatacttccaagcagcctggccacttctctctgggtccctccatgtctgctgagagcctgtgcttctcacctgcacttcttcacccggtttcatgagtgtgctttgctgactgtactgggtagggaaggagctggttcttanacctgctggcaaatgacttcagtttt

SEQ ID NO: 81511 - DNA, 707 bp, Homo sapiens
  sig_peptide (151)...(286): this location contains the signal peptide sequence, MIFHFTQNKTKVLTKILLPYTTLLPVNAVTSCLTAIHLAYHSCSW, Run with SignalP
  misc_feature (147)...(236): similar to gi563168 in the genepept database release 114, Run with FASTXY 3.3t00, default parameters
caaatcaggctattctattggatttacttccaaaaaaatatccagggaatctgatcacatctcaacactagactagtctcccagcttccaccctggtgatcctattaaaccttacatcagatggtataactccttgcttaaaacactctgatgattttccattttactcaaaataaaaccaaagtccttaccaagatactgttgccctacacaaccttactccctgtgaatgctgtgacctcgtgtctcactgctatccacctggcctaccattcttgttcctggaatttgccagacacaacttcctcttcaagcttctgcatcggtcattcccttttcctgaaactctttctacccagaaatctgcatggtttgcttcctcattttcttcaagtttttgctcaaaatgttatcttagaggggcctttccaaaccatcccatttaaaatagcaaattcctaagaagaatcctctattgctcttactcgacttatggttatattttattctatttactggcttctccctcccactctaccattacatttgggggtattttattcactgctatgttcctagtacctaaaacacctagggtctactggcacctagtaggtattcaataaaaatgtgtaaaaaggcaggggtggtggctaatacctggaattccagcactttgggagggtggggcggaggaacccttgggt

SEQ ID NO: 81512 - DNA, 714 bp, Homo sapiens
  sig_peptide (323)...(188): this location contains the signal peptide sequence, MLFFLSLMPFFFLSRSLSLSLSTSLFYSPSSFSSSFSSFSFSYPS, Run with SignalP
  misc_feature (176)...(320): similar to gi1280134 in the genepept database release 114, Run with FASTXY 3.3t00, default parameters
cttgatgttttacttattttctccatcatgggatatttttccagattcctgctctttttgcctttctgtcttcattcctctctccttctctcctgtcctccatccttggcttcttatctctcttccttccttttctacctcttttataattcaaaaagaatgaacgtgtataatgaaagaagtagaagaaggataagagaaggagaaggaggagaaggatgaggagaaggaggagggggaatagaagagagaagtggagagagacagagagagagaccgagagagaaagaaaaaaggcataagggaaaggaaaaaaagcataaagtggtaagatgagaagatgggaacagggaagaagaaaatacctaaaactacaaggcctaacattagtggacaatgtatttagcactgaatgcttgtccagtgaacactaaaagggaaatatgactagttgcaaaatatacactgctgctaatgtaaaatcataccatttgcttaacaaaatggaagaatattacagtttgaaactacagtaagataaagatttcttaattgaatatcagcccctaaattggcttttaacaaccaaaagttttgatgtaataatttccattcaatgggaagtgaagccgacgacttcactgaggcactgacccgccaatgcaaagctgcatcttcaaaaaggggtggcagaaagctagttgtaaaaaccct

SEQ ID NO: 81513 - DNA, 721 bp, Homo sapiens
  sig_peptide (10)...(145): this location contains the signal peptide sequence, MVFDERFLFLFTFHFISFYIGCTYTVYMNFAQKILCSCEEKVTLC, Run with SignalP
  misc_feature (157)...(266): similar to gi3717132 in the genepept database release 114, Run with FASTXY 3.3t00, default parameters
ttacgagcaatggtgtttgatgagagatttttatttttatttactttccattttatatctttctatattggttgcacatacactgtttatatgaactttgcacaaaaaatactgtgcagttgtgaagaaaaggtaacattatgtacaaacataagtttccaaaacctagtattaagtacaaaaagctagttttgaaatattatgcataatttgacctcacttatgtttttaaaaattatgtacaggagtattcataaaaagaaaaagatggaaggacactcaaaacttgtttaacaatgttacctattcagagaagagcacatttccatgtaacccgagttttaatttctaaagagtaaaacaaaatattaaattgtctctcctacctctagagaaggatgttgttgtaaaggactagaagtgactcaatgacagtctagttatttccacactgtggctctcagagtaagattataaataaatggtcccaggctttttaaagtctaaaaaccattagtctaatcacaaactcatcattataggtgacaaatacaaaaaccaactttgcctaaggttacattgtggcagaatagaactagaaactaggggttttggcctgcaaatccttttggttttaaacctacccctgaaccttattttagggaagcccacatttggttgggctaaaggcctattgccttggaatccccaccattttttg

SEQ ID NO: 81514 - DNA, 400 bp, Homo sapiens
  misc_feature (1)...(400): n = a,t,c or g
  sig_peptide (33)...(168): this location contains the signal peptide sequence, MLWVIVVTVAGRSLGFQAVLAHVSGGSVTQVGQSPGLHVACVYGY, Run with SignalP
  misc_feature (158)...(40): similar to gi1019443 in the genepept database release 114, Run with FASTXY 3.3t00, default parameters
agggtgagttcttgagttcctgagcagcatgtatgttatgggtgatcgtagtaacggtggctggacgttccttgggcttccaggcggtacttgctcatgttagtggtggcagtgtgacacaagtgggccagtccccaggcctccatgtagcatgcgtatatggatatcancagtgttggttgtggcatgctgctcaggttgatcctcagacccccaggagaactgcccatattccagtggtggtggatggggcagagtaatctccaggcctccagatggcatgcttggacaacagcagcaggttttctggacctgttgttaggccttctggtggtgcgcatgtgccactgnggtgactgatgaagtggcaatccccaggccttcagatagtgagcccaag

SEQ ID NO: 81515 - DNA, 688 bp, Homo sapiens
  misc_feature (1)...(688): n = a,t,c or g
  sig_peptide (357)...(492): this location contains the signal peptide sequence, MITSLPAYLFTLPSCLTPLYLLSGFFCLREASLIFTLSLRARLSC, Run with SignalP
  misc_feature (105)...(238): similar to gi2252608 in the genepept database release 114, Run with FASTXY 3.3t00, default parameters
cgaatctgtgcttgcatgaggacagtgtgcttgccagaatctgattgcatgaatctgtgcttctgtgagtctgtgtgcttgcatgcataagctactctgtgtgcccctggattctgggccagggaagccctgtccatctagtgaggacgacaacaccactgccagctgcagatctaagcatggcttctcgctctaaaggtagctaattcaatccattgtaattggaaagatcgtgcctagattgacttgtgtacccttcagtggcagcaggggattgattcaaatgaccttggatgcgaatcagctctacaaaagtggcctcttgtagctggtttctgccccttcctggctattcaatgataaccagtcttccggcttatctctttaccttgccctcctgtcttactcccctatatctcttatccggctttttttgcctgagggaggcaagcctaatatttactctgtcactgagggcaagactttcctgtgtacccctgctacaaaacttgntcagcttttaaggaaggcgaagtcaggaaaagctcgaaaaagaaggcccagcgttgggggtgacgccttgtgcccccagccacccccggggtgtggcgccccccccccccacccaggggcagattttttttggacagaattgttaatgcactcattctgccggccaccccccccc

SEQ ID NO: 81516 - DNA, 698 bp, Homo sapiens
  sig_peptide (65)...(200): this location contains the signal peptide sequence, MHGNEFIKHAFCLFASWFGLVWFCCQTQDPNRIRILWGKDEAVEE, Run with SignalP
  misc_feature (105)...(209): similar to gi36317 in the genepept database release 114, Run with FASTXY 3.3t00, default parameters
agaaagtcaggtacagtgaggttgctcccagggtgagtggcagagggatgcgttagactattaaatgcatggcaatgaattcatcaaacatgctttttgtttgtttgctagttggtttggtttagtgtggttttgttgtcaaacccaagatccaaatagaatcagaattctatggggaaaagatgaagcagttgaagagcatgtggttcactttgccccattcacaagcatccacctgtgtgccagagagaaacagtcaggcctcacatggatttccctgacccattccagtaagaggactgactgtactttggccaattttgtcctctatgagggtacagaaacacattatgacatgatgttggactgtcttcccctggctaccacccctctggtagaacaactaattaatctatccttacatatgggaatcatggactttaaggatagggtacattcacaccatatttaacaatttattttagctaccagttctaatgttgcaattatttggtccctacattaaatatttttaaaaatatactgcccaaaatatatagtattggtaggcgtacaaattcccggtttccccctttttgtaagacgggcaacctggaaattgactcctggagacataaagattggggttgttttttgtgaagaataccccccccccccccttccacacagactttttt

SEQ ID NO: 81517 - DNA, 690 bp, Homo sapiens
  misc_feature (1)...(690): n = a,t,c or g
  sig_peptide (340)...(475): this location contains the signal peptide sequence, MWGFSFLLCHWRAAIPLLMRHTGIIHCRSRTEHARYLLGSSRPMN, Run with SignalP
  misc_feature (171)...(66): similar to gi295461 in the genepept database release 114, Run with FASTXY 3.3t00, default parameters
agttgaacctattcaaagacaaatgactgacatgctaactcctggggccctcccactcttcaaggccccaccctgggtgacatttcctgttgccacatcttagtcaacagcccagttgatggtagagtcagtgtttttcccaagtttgtgtctcccacacaatctgacatgatgcctggcacaaagcccttgctcaaccgatgtccatggaacaaatgaaagagtggatgtaatggatcctcactttccccatctataaaatgtggaaaacacctgccttttaagcagtgtgtgcagtggagaaattcctcttcatccctttgctggtgggaggtgagaatgtgggggttttccttcctcctatgccactggcgggcggctattcccctcctgatgagacatacaggaatcatacactgtcgctctcggacagaacacgctaggtacttgcttgggagcagcaggcccatgaatctgtgctgcatcccccgcgggtacctaaggaactctggggcacagccaagaagggggactctgtagacagagaaggctctgtccaaggtccccacctctgcctcgcagccccgggggaccctcgcttttttaatttggaaccaaattcttttngtttataggaaccggaaaaaagcatgaaaagattaaggtgccccccaaagctcaacccccgac

SEQ ID NO: 81518 - DNA, 704 bp, Homo sapiens
  sig_peptide (131)...(266): this location contains the signal peptide sequence, MLAWIWWPLCCKMILGTIDQISLSNHYSLPFVTCSHCFSCPECLL, Run with SignalP
  misc_feature (270)...(133): similar to gi2650141 in the genepept database release 114, Run with FASTXY 3.3t00, default parameters
cctctacatgacctaatgttttgctcatggtagatggtcaggaaatatgggcagatggattaataaacccttcaccaccattgggctgaaggctctgcgtggtgaagaggggcaagtcaaaacgcatggcatgttggcctggatttggtggcctctttgttgtaaaatgattctagggacaattgatcagatttctctgagtaatcattatagcttaccatttgttacatgtagccactgtttctcttgccctgaatgcctcctgattcctcccttccccagttatttttctgattaaggaatcagagttgaataatctaaatttagtttgtgtagctcagaggtgccaatcatggcaaataatgaatgaagagatttcccacccctttccctgaagcactgagctgaaaccaacaaattcattttatttaggatcacaggctgcactcagagtggtgtctgtgacaggtgagtgctttattcactaatgaactcaccaggccccagacaaaccctctccctcctggttggggtgctccttatctccgttagcccacacactgggccctttttaaccttttcgttggtaatggaaatgggggggccatttttgttaaaaatatggtaagtcaaaaaaaattcctattaatgatttcataggggtccggcaaaattttttaccctttaaagggctttttcggaag

SEQ ID NO: 81519 - DNA, 380 bp, Homo sapiens
  sig_peptide (129)...(264): this location contains the signal peptide sequence, MYVLDWVAMCAFPLFQTGAFGSILRAFVYRYISDILEITKLLGHN, Run with SignalP
  misc_feature (227)...(147): similar to gi853601 in the genepept database release 114, Run with FASTXY 3.3t00, default parameters
caacattccctttttgaagctgaccttaggtagtgcggaaacccccaaagggttgtctttttcagcagaggacattagacaagaatgagcctcccaggggacagggttactgcaccctaataagaagcatgtacgtcctggactgggtggcaatgtgtgcctttccccttttccaaacaggagcttttggtagcatcctcagggcatttgtctacaggtatatatcggatatattggaaataactaaattacttggtcataatatggagaactatttatgaactgggttgagaagatgaccattaaccagagatctgggacttgtaccacagaggcccctctttccctcgctatactgtagcaagatgtgaattgagaat

SEQ ID NO: 81520 - DNA, 631 bp, Homo sapiens
  sig_peptide (111)...(246): this location contains the signal peptide sequence, MFRSNPGFFFFCCCKSCILAISLGEIPRNEFTENMSLRESEDLKP, Run with SignalP
  misc_feature (339)...(412): similar to gi515955 in the genepept database release 114, Run with FASTXY 3.3t00, default parameters
atgttacgtgggttgtaaatgtaattgttaatattatttaaaaatttttgaaaagtgatttttagtggtggccttatcatatctacatattattactccaccattttgggatgtttaggtcgaatcctggttttttcttcttttgctgttgtaagtcatgtatattggcaattagcctaggagagattcctagaaatgagttcactgagaatatgagcttaagagaaagtgaggatttaaagccagatctgtctgccttcaaatccagcgctctttatactgatgtgagttctcctgtcttttttacctatcagaattctagaactctcccagagaaaccaggcagatactgctccacaccggtgagctgcttctcacctgggtagtctagggtggtttgctccagaattgtatttctgctttttctttttttaacttggcagtggttaaccattccctggagcagcaccaggtaagtcagcttgtatcagagtcatctgctttacctgacatgagcacacgttggcatatatttgcacatgcagatatcatatgttaaacaatatcacattgttgaagaaaattacactggaaagcgtaaaatatagcttggatgccacattgagtggac

SEQ ID NO: 81521 - DNA, 403 bp, Homo sapiens
  sig_peptide (212)...(77): this location contains the signal peptide sequence, MLCRVVMISIKCLAVPGMCKHSIPIICLAPWLGDLRNTTKLQSTR, Run with SignalP
  misc_feature (224)...(291): similar to gi11075 in the genepept database release 114, Run with FASTXY 3.3t00, default parameters
tactctatgttttgttctaccatgtagcattaaggatactgatttgtcatgaaatgatgtacatgctgcatctcctctagtggattgcaattttgttgtattcctcaaatcacctaaccatggtgctaagcaaataatgggaatagagtgcttacacatgcctggcactgctaagcactttatagatatcataacaactctgcacagcatatacttcttgagtgcatgtgctggtccatgtggaaaaagcagttgctgccactaagccccctttccctctgctatgggaaccatcacagcagaaaacctgaagtcactgctggtggtggggctgtgcagccatgggcaaggtagcagccaggaaacatcagttaacactcaaacatatactgggatatgtggg

SEQ ID NO: 81522 - DNA, 848 bp, Homo sapiens
  sig_peptide (31)...(166): this location contains the signal peptide sequence, MLKTKWSIVDFAVVVLPPICPIVLLLLHFYEMNKYQIECNFFGTK, Run with SignalP
  misc_feature (322)...(393): similar to gi2811272 in the genepept database release 114, Run with FASTXY 3.3t00, default parameters
agcattgcagttaaaggcacccacaatagaatgcttaaaaccaaatggtccatagttgattttgctgttgttgttttgccacccatttgtcctattgtacttctactcttacatttctatgagatgaataaatatcaaatagaatgtaacttttttggtaccaagtattttatctcagtagaaagtcttgactgggtataattattaacttgaaaatgaccttttctctggctcgggtctcaaggtagacttagcttcatctgggaggccttggctggctccctggcctggagtggtgtgctctcctgtgtgcctgtagcacccagtgcttgtccctgtcacaaaaacagttggcatttggattttctttaaggtgctagatgcggagacactgaccatagataatggtatataatctttacaatcaccactctgtgacgctcacaacggctgcagaatttgctcaaggcttccgctagtaagtggtggccagggtaagccctggcatgggactccactcataacagattcttaacaatctgtctgcttctgtcacgtgaaacagagttctagcttctacctgagagctcgccatagtttccaaggttaccttattacattttagctgttctgaattaagattggggtaacatttgtatactgggggtattgtttgagacaactcttgcaggtctgggtacaggaggagagaaattactgaaaaggtttttataactggcctaaaccctcctaacctaggggtcccctacatggctttaaaagccctacttacttttagagacatattgcaccaaatcagcgtcaaacacccccccttttctttggcc

SEQ ID NO: 81523 - DNA, 853 bp, Homo sapiens
  sig_peptide (213)...(348): this location contains the signal peptide sequence, MEAWKALIGLFPLRSSASPFTYHCWEPAQPAHQEFHSTIALRGRG, Run with SignalP
  misc_feature (314)...(390): similar to gi1049414 in the genepept database release 114, Run with FASTXY 3.3t00, default parameters
cccacgcgtccggtgatggttcagagccgggctgggagcaaggttcactgctcagccagccttgtctagctcctgctctgactgagtgtaaatcttctcatgtgtggaaaatgggtataatcatgcttctcagagaggtggtatgaggattaatcaccgtcatggatgtaacatacttagattgagcccagcccaggaggagaagtgagctgatggaagcatggaaggccctgataggtttattccccttgcgaagttctgcttcccccttcacatatcactgctgggagccagcccagcctgcccaccaggaatttcattccaccatagctcttagaggccgaggtgggaaacctcaagaagagagcagtccatgaggggttttggagtagggactcggaagagggacaaggatggaaaaaaggcttagggaagaactatggaattcctagtgatccagagagggcctggaagaagagcaccagccagctgggaagacaagtacttagccttgaaacagagcaactgtgtaccagggcccaggcagggtaaattccaaggagtatcaaatctttcaaaaagagccaggcatggtagctcacacctgtaatcccaatacttttgaaggctgaggcaagaggattgtttgatcccaagagtttgagaccaggcctgggcaatataatgggaccctattgctacaaagaaaaaaaaaggcggggcgtttttagaaccccaatttgcgcccgcggcagccaatgtacctctttttatgggccacaaaaccatctcccgggccgggtttaaaacgcgcgattgggaaaccccctgctgccccattatactctcttcc

SEQ ID NO: 81524 - DNA, 1435 bp, Homo sapiens
  sig_peptide (393)...(258): this location contains the signal peptide sequence, MFFKTSLCFCLFHCWYLECNLTVLTHGLVINSVLPFRDINIHFFL, Run with SignalP
  misc_feature (801)...(683): similar to gi862343 in the genepept database release 114, Run with FASTXY 3.3t00, default parameters
agaatttttatgatagtattatttctttaggaaaaaacaggatactaattacatcatttttcctttatagaaaatccacctataaatccagggattgtatgaacacaccaaacaacctttggttctgttgctcttctgaatcccaatgtgattaaaatgttcctgaggtttccctaaccaccaactcaggttctaagtatttaggatgtagtaaagataaaattttgttaaagagacagctaaagctaatttttacatagaaaaaaatgtatatttatatccctaaaaggcaatacagaatttataaccaaaccatgtgtgagaactgttaaattacattccaaataccagcagtggaacaaacagaaacacagagatgttttaaaaaacatgcagcacgttacaaagaggccgtgtaataattcacaacttttgttagcagccgttaagtttgattagtattaagcagcaatggtttaagcaattttaaatcatgatatgataggcacatatatgcattttactgttccaattatagtttagtaataggtcaggggtttgaggcaacattttaaggcattataattttctcctaaattatttactatggggaaattggcttccacttaaggttttcatagaaactgatggttattttatgagggagatgtctggacgtatgtgtgtatgtgcatgtgtgtgtgtgtatatacacacacatagataaattagaatttgcagatattatgtgtatatatatacacacatatataatatatatattatatatatatataattttttagtcatgtttttagtcatttgcttttttttttagtcatttaaccggtttctcataagacatccagtcacttcttttcccttgccctttcctaacactgttcctaacatttgggtaccaccccttagctcctgcgacccatgtggttttggagaaagctgatcacactcacggtgacaggccatggttggaagtaacatgttccacttttcacgaaaagtaatagatctgaatatcattcatggttaacaatagatagtgtgacatttgggtatgacctgctggtagaaatagagcatgattccctggaagtaagtcacttacaccaacccaagttctaattctttaagatgtagtaaagacaaaattgttcttgctatattaaaatggaagaaaggatttgcagagttcaaggatgatatgctctagctctatatgcactccgctatcaatctttccttttactttctgccttgaaaaaatcattttaataaaatcaaaaattttcattctaaaatatagttcaatgatttcactaccctttatgaacaaaaacagcacgaatcctctaaagaagaaaattgagccaaattgttatgttttgcctagatattcacacaatatttcacacca

SEQ ID NO: 81525 - DNA, 859 bp, Homo sapiens
  misc_feature (1)...(859): n = a,t,c or g
  sig_peptide (262)...(397): this location contains the signal peptide sequence, MNGNRRWQLEAAWGPVRAVQFVVCAFFLVLIGFCAADRQKAGMWL, Run with SignalP
  misc_feature (692)...(646): similar to gi386918 in the genepept database release 114, Run with FASTXY 3.3t00, default parameters
cccacgcgtccgtgagtattgtctatttgtctattctgtgagtattggactatttggactatttaaatgtgaaagaaactttgtactctcacactaggaagccataaactctaatcctcacattctgaaaaggaagtaagaaaaaacaagacttcacagacaggcttttccctggctgcactacatggatacaataggatgctttagaaacagatcttgtctctgtttttgccctaaatagatgccagcgcctcgcctgaaatgaatgggaaccgtagatggcagctcgaggcagcctggggccctgtcagagcagtacagtttgtagtctgtgctttcttccttgttttgattggtttctgtgctgctgacagacagaaagcagggatgtggttacggcttctgtgtctggtggattatcaaaacaagactggtgtgtactccattttacgagccaaaatttagaaaaaaaaaaaaaagggggggccgctttaaaggacccaagttaacgaacccgggctggcaaagtaaaagtttttttaaagggcccccaaatttcaatccccgggccggggtttaacaacggggggacgggaaaaacctgggggggacccaattaaatccctctgtggaaaaaaggnggggtggggggagatagggggtactacgagcggccccgggcgaataagggccgcccgaccaaccgtcatcgcagcgggcgcgagaagcggcgccggtcgtcctctgggccgtgtcggccggggttacccacggcctccacggccgggagtctcgtgtacacgcccatgcacacgggcggcctcgtggatgtcccgccggcctgagtcctcctggcgcc

SEQ ID NO: 81526 - DNA, 414 bp, Homo sapiens
  sig_peptide (92)...(227): this location contains the signal peptide sequence, MCRLYSCARMPLFSTVLFSNVYINDFLLQKPENTTSQPLSNQRVV, Run with SignalP
  misc_feature (141)...(246): similar to gi2353246 in the genepept database release 114, Run with FASTXY 3.3t00, default parameters
atttaagagtatgtgcttaaacagtttaatagtgcatgtgcgttggaacttttaaaaataagtcatatggatacagggctgctgcttaaggatgtgcaggttatacagttgtgcaaggatgccattgttctccactgttctcttttctaatgtttatattaatgatttccttctgcagaaacctgaaaatactacaagccaaccactttctaatcagcgagttgtagaggtggcgatccctcatgtagggaaatttatgattgaatcaaaggagggggggtatgatgacgaggtaccttttacagccctctgcaccattgctacttaacttttgctatttaatacaaatactttgggcatgcctgcaccctcatacttaatgtctattgccacataacatacagctttgccccc

SEQ ID NO: 81527 - DNA, 847 bp, Homo sapiens
  sig_peptide (148)...(283): this location contains the signal peptide sequence, MWLTKSRILIFVLQSMAICHLVEIYEVYEENLALHRSVVGKGRSH, Run with SignalP
  misc_feature (817)...(685): similar to gi4704728 in the genepept database release 114, Run with FASTXY 3.3t00, default parameters
attaaattatgaaactcattaaaaataataagcccattacatgttaacataaataacacattttgtgaataataattacatttttcaaaacaaaaaagtttagcaagataagtatcattgttttacatttttgcaaatctctttgacatgtggcttactaaaagccgtattctcatatttgttctgcaatctatggcaatatgccatttggttgaaatatatgaagtatatgaagaaaatctggctttacacagatctgtagttggaaaagggaggtctcacaaaccccatgaaagggtctcaggaactcccagctgtctttagaccacactgtgataaccagtgtacttttgtttgttcaacaaatatttattaaatgctttccagtaaataggaaaaaaataatctgataggaatacaaagtttggagattgagacttagtttggagtttctttagcaaacttatcctatatctgggaggcaaggtacaaaggatgagtgggaataataaaacagtatgggaaagagctgattggaaatacaagcccgtatctgttgaagtagattgtgaagttagatattaagaaactgaaaaatggagaagcagctggtatcttgaagagggaatagaataccctaaagaaggtattaatatccaatttttttaaaggttgggatctttgctacgtaaagaaacagctcatattggagactgagggatggggattccggtaggcgagacagaccgaaccggtaccgcgatctcaagaagaagttctccaggcgagacgatccctccggacagggactcccacctccgagtgcccaccatccaaccctttttct

SEQ ID NO: 81528 - DNA, 852 bp, Homo sapiens
  sig_peptide (143)...(278): this location contains the signal peptide sequence, MGIQWTCEWPSSLSPGWKFIACLWFSMWGSRPPLSQAMSHKQWPM, Run with SignalP
  misc_feature (27)...(75): similar to gi261695 in the genepept database release 114, Run with FASTXY 3.3t00, default parameters
aaagagctaagggaatggggaagtttcaacatcatgggactattgaactgtaattcagaagacacagtcaaataaaactacaagtagaagctcggagaaaaagctgctgccttctcagctgctacgaggtgaggagtcagggatggggattcaatggacatgtgaatggccgtcgtctctgtcacctgggtggaagttcatagcatgtctctggttctccatgtgggggtcacgccctccactttctcaagctatgagtcacaagcaatggcccatgctgtgtagctccatttctaacccggaagcttctggaacggaactgttcacctaccattttcatatgatgggatacattgaaaggttttggccgacagaagaattagctcaacgctgtagtttgcataaagagctgccctgcactgtgttcacagagaagcactgctcttgcactttcctcatggtgtttggggtttgcacatgagacttagctcatgtggctaagcccatgggtttccaggcgaaagaaaaggcttataactagcaaggtgtccctagggtctcaagtgagggagacagagcagaggggacttctgaaggcctgaggcacccctgactgctgcatggtaaaatttcttaggtgaagccaagttttctttctggacagtggtcactgggggcaatgaaaccggatcatcgggaagggatctgggcttccttctgggtaaaagcctcgtgtagatgaaattgaaactaccctcctcttgttgtctgccctttttgtccagctgcattttcaagactcctgaaaaaataaaggcagggaaaaaaaaaaaaggcgccccttttaaaacc

SEQ ID NO: 81529 - DNA, 848 bp, Homo sapiens
  sig_peptide (35)...(170): this location contains the signal peptide sequence, MFAIFSVYFTYASTPFCLLLLLARVWKDLEFRALSVLFFSWLESH, Run with SignalP
  misc_feature (114)...(284): similar to gi5360829 in the genepept database release 114, Run with FASTXY 3.3t00, default parameters
gagggtatgacatgagaataaacaaaaaaacagcatgtttgctatcttttctgtttattttacttatgcatcaacccccttctgcctccttttactccttgctagagtgtggaaggatcttgaattcagggccttgtctgtcttgtttttcagctggctggagtcacacttggcttatttatgagctcaataaacattatgaatggatgagcaattttgaaagattgacatattgaaggaaaaaaatgacgtgaatctgaaaaattctgacatggccacttctaaactctctgggacttgtactaaatgcttatagatttaggtagcattctgagcattacctcacttattcctttcaaccagcctctgaggaaggtactgttattatcaccatttcacagaggaagaattgagatccagagatgttacataatttgcccaaggttacataataataatataatagctaaagccaggatatgaactcaggtagtctggcttcagcagcttctctcttaactacgaagctatattgtttccacatggtgattataattataactgcctgttctactttcctgtacgttgtgaggctgagtttaagtgtgaaaggattaaggaagaagtatatcaactagtgaaggcgagacaacacacaaaccactataacttaaagtagatagaaacttgcagagaaagtcagagaagaaaaaagactattattttcaccagggtgaagggcaggagccaaaaaagccttctgggggaagggactagttggcccttgatgagacaatattgtaaaggagaggcttccaagcacagaactccaagggaaaaagcccccc

SEQ ID NO: 81530 - DNA, 863 bp, Homo sapiens
  misc_feature (1)...(863): n = a,t,c or g
  sig_peptide (491)...(356): this location contains the signal peptide sequence, MYTLFQPYCLSLHPNVSHFFSCLKPLLMLLCHLPRCLLLSLHQST, Run with SignalP
  misc_feature (826)...(321): similar to gi5105225 in the genepept database release 114, Run with FASTXY 3.3t00, default parameters
taagaagccagaagagaaaggcatacaaatagtgatgagtcattcagcaaacattccttactccccttctcggagctacccgcatcataggcatgatgtgggctcagccatgcattgaattgctgtacttagaaatcatctggtccaaccccttccttttacggatggggaaactgaggttcaagatcttctccaggaagttcagatgtacacatctgcaaaacgacaccatctttaggtggctctccagagaacgtgccaatgagtggcacagacaggggagcaggaggtcagaactaggaggtaggcagagcaggctatggggtcaggtgaggcccctggccagaccttanaatgttgattgatgaagagagagaagaaggcatctaggtagatggcataatagcatgagcaaaggcttaaggcaggaaaaaaaatgggatacattgggatgcagtgacagacagtatggctgaaacagagtgtacataggggcagaggagagatcctggcttcagtgtagagcaagttctggagttcaatgcaccaggattctaatcctggctctaccagcaccctgggcttctctcctatgtctcacaggcctcctctgtgaaatgggaataagaagagttctcactttatgaggttgttgggaaaaattaatgaatggtgcttaaatgctacctagtagcaagagaactcatatagggactccctcctcttcaggttggtgtaaaaattcagggggcaatggtgcctggcacttggaaagccccaataaatgggattgctgcttggccgtgggcttgggaacaggtcaaggctttcggcgaacacctgtggtgcaatgagataatgcc

SEQ ID NO: 81531 - DNA, 1121 bp, Homo sapiens
  sig_peptide (396)...(531): this location contains the signal peptide sequence, MLDYQLLSLMLLPVSVTSNFPSKTPLTYFLKVTGNLIGKIQKDFL, Run with SignalP
  misc_feature (378)...(96): similar to gi5104414 in the genepept database release 114, Run with FASTXY 3.3t00, default parameters
agaatattcttaaagagaacatgtttttttaatgtatacagatttctgaacaaagtatgcaagtatttaaaaatacctgaccatgaaaaatctttttcaggaaggggttaaaggggtcttttgtactctggaaattcaagtgactcaatttgtctgctacccagaaccacataaagccccagttttaggttattgttcctagttcctatgtttctgttgtttgagacaaaaagttcaagccatggacatgtaactcttaggagcctcttaaaaagtccatccttaacctcagaaaagtgtctaataggaccctgaacatcagcccactgccttgctttcagcctcagcctctgcctgccgtgagatctcaccactgtcttgatttccttcattcaatgcttgactatcagctcttatctctgatgctgctgcctgtctctgttacttcaaattttccctctaagacacctttgacttacttcttaaaggtcactggtaatttaattggcaaaattcaaaaagactttcttctttaaatatgaagctgctacttctaataagagttgtaagtttgtcttcaacaatggcttcagggacaagccgtagtctgtctagtcaatttggaatttcaaaatagctcttttatatttgtgaagcagaaattagttatggaaagccatcacaattccatctttttcatagttccactgaattgctaacatctaaactcaccactggcttttaaaaactcagtggtataaggaaaccctgagtttgtcatccttaagctttaaaaaggttcattttaataactaaaatgcagagcattacatgttagcatgtcctatgaaacagaatccttcattacaacttgtagcttcatatccctcagggcagatacctcctttaggggttttgtcacgagaggttaaagcttgtcctaactgacaatttaagtgcagttgtaccctgtgagctttcacgttagatacagaagattttctaacaactcattccgtaaaagagataggatctctttaagacagtatgtttaagtcaaaagtatacttaattacacctttcagccaacatctgccctatactgtttattccctcgtgcc

SEQ ID NO: 81532 - DNA, 688 bp, Homo sapiens
  sig_peptide (126)...(261): this location contains the signal peptide sequence, MSLRIRAARNWARDVQKLWTIVVLLVLILIRSAVNLLINSRTEDK, Run with SignalP
  misc_feature (233)...(572): similar to gi1209825 in the genepept database release 114, Run with FASTXY 3.3t00, default parameters
tttcgtattaagataaaattctttcatcatgtctgtgccctctaaaataatactcctattgctttgtcttccccttctcccctcctagtccttctttagtcattctatttagaatcaagtcgctcatgagtttaagaattagagcagcaagaaattgggctagagatgtacaaaagctttggacaatagtagttttgcttgtcctcattcttattagaagtgctgttaatttactgataaattctaggacggaagacaaatctttgcaactggtactatatcagtcggtaattatttgttttccttagaccatattgagctcccgaagtacagaacaatgagtagatgtgaaccaagatgctgggattttttaagtttcaaatatgtgtgtgtatatataagagacagaatcttgctctgttgtccaggcaggagtgcagtggtatgatcatagctccctgcagccttgaactttcaggctcaagagatcctcctgccttagcctttcaagtagctaggcttacaggcatgtgccccacctggctttttttttttttcctcttgtagagacaaggtttccctgtgttgcccaggctagtctcaaactcctggccactagtgatcctcctgcgttggcctcctgagatgctgggattacagtgtgagccaccactcccaggcttgtatt

SEQ ID NO: 81533 - DNA, 647 bp, Homo sapiens
  sig_peptide (91)...(226): this location contains the signal peptide sequence, MLLPLRTWCLLEVLAVLGGPVQAKAIHLLAALQPRPADTMHVLHF, Run with SignalP
  misc_feature (155)...(358): similar to gi710336 in the genepept database release 114, Run with FASTXY 3.3t00, default parameters
tttcgtcggaattttgccttcacacaaaagatgaatttctgttttgaaactttgttaacctccaaggacacagatgatcagctctaacttatgctattgcctctgagaacttggtgtctcttagaagtcttggctgttctgggaggtccagtgcaggccaaagcgattcatctacttgctgccttgcagccaaggccagctgacaccatgcacgttttgcactttacctcctcagaggccacagacccagacagaaagaagctgctcctgtggtctctgcagtcaaccccagctgtgatggctgccacatcttcccaaggctttctgctgttttcttggagcctgcagtgcactctgcattgctcagggagctccagctggaacagctcttgagggctctcccagaaatttgcatcacaaaggccaaagaggccaaccttcttgggctttgtcagagattgtgtggcagaaaattccctaaacaggatctgccccctcctcactccttttgctttctctgtgcgtctttgtccttcactatgtttatctccagtggggagctcataccagctcctgagagccacttttgtacaactctgttctgctctgcgttcattgacctcatgttggttctttaagttggccat

SEQ ID NO: 81534 - DNA, 412 bp, Homo sapiens
  sig_peptide (269)...(404): this location contains the signal peptide sequence, MRVLILLCGERMAIIQELLRVSCIATHFSAILSGWVIVFLLIVEN, Run with SignalP
  misc_feature (74)...(147): similar to gi1929361 in the genepept database release 114, Run with FASTXY 3.3t00, default parameters
tttcgtagcagtgaggaagcataatgatgctaataataatatcaacacaataaccataataatagctaatactaattgtacttatttgcataagtttaagttttccgtatattaagtctacaaccctggaaacaaccattttagataggtccaattattttctacttttaatagatgtgaagtgaagtagcttttccaagatcacaaagctagtgggtggtgaagccaaaatattcataaagtagagcctgcttttccattggtttatatgagggtacttatcctcctgtgtggtgagaggatggccatcatccaggaactcctgagggtttcatgcattgcgactcatttttcagccattttgtcaggttgggttatagtatttttgttgatagttgaaaatagaaagtaa

SEQ ID NO: 81535 - DNA, 1120 bp, Homo sapiens
  sig_peptide (229)...(364): this location contains the signal peptide sequence, MGNTDILLLLSLFCFSYELVAGKTKAQFGVPFAEFSVFLILENVT, Run with SignalP
  misc_feature (54)...(47): similar to gi295751 in the genepept database release 114, Run with FASTXY 3.3t00, default parameters
tttcgttgaattattggccacttggctggtaattacaaatggtgtgggtggtaggcagtggctgtcagtgttcagtgctttaatgccattgtgtaatggatcagtaatgaaccttaaggctctttctgggtttgtgtgataaacctttttatggctacacagattttcttactgatgtagcaaagattgtaactgttctcattttgaaagcaaagatgcccatacaacatgggaaatactgatattttgttgctgttgtcgttgttttgcttcagttatgagttggttgctggtaaaactaaagcccagtttggggttccctttgcagaattttctgttttcttgattttggaaaatgttactgcttgtcgttttctgtatatttaactggagctggggaataattggtgtttggcaatctctgtatcattcattgtaggcaaagctgctactgtcacccacagatacatttgtttgcattccattgcaaggattgaagtcagcacattcttagtcccaaattgcttttggatattaatgtttatcacttctataaccataaggagaatcaaaaggctattggaaaaagtcaaagcttgttatgcgccttacatattgggtccgagaacccattaaaatgcccgaggtctaaaataccctccagaagttgcactatcatttcttccttctttcttcccccggcaacgctatttcatttgtcccctcccgcgtcctgccgcagttcacaaacactccttccctgcgcctccagcgccgccatgcacccatactctccatcccttctcgtgccgggtcgtggcaacacacatctcgcgtccccccccccgcgttccgtccccccccacacactcccctctccccctcactcccggtatccagccctccccacactacaccgctggggcccggcgccccgccccccccctctccccgtctcggccgcggccccacctggacaccacacaccctctcgcccgccccccccctcctcactttgcgcaaaaccccacatacccccgctccctcgcccccggatcacagcccgatcaccaactcaccccgcgcgcccctccgcgtcgccccgcgcgccacaccgccc

SEQ ID NO: 81536 - DNA, 1187 bp, Homo sapiens
  sig_peptide (823)...(958): this location contains the signal peptide sequence, MGPKRGLFFFIFFLDTEPSVLGGGGGGQYGLTRTHLWRQGASYLT, Run with SignalP
  misc_feature (343)...(173): similar to gi1345538 in the genepept database release 114, Run with FASTXY 3.3t00, default parameters
aattcctgggtcgacgatttcgtaagatcgatagtatctcaggcaagtaaagtggcaatgagatacagcagagtagacagcaacttttacatatgtattttggaggtggaatcagaaggatttgcttaatgggttggctgtggagggagagggaggaatcaagggtgccttcaggttgcaggctccagccttgggctgctgatggtaccatttgctggttggagaagactggaggaggaacaggtggagaggagtgggtagcaagagttctgtgtaaatacttgggaggcatccaagcggagagttaagtaggcactgaatatttaagttgagctgaggggagtgatctagactggacataaattttgggagtcactagtatacagatggcatgtcatggaactgattgagattgtttgtggccttaagatcaagccctgcgagactggagtaataaaactttggtctcccacacagccagctctgtgtggggaaaaaaaaaagccctaaaacactaacaacggttaaagcttgggcaaaggagactgaaaaggttcagccattaaagggggagagtattttattattttcaagaaagagggaatggtcacctctgtcaaatgctgctgagaagttacacaatgagaatagagaaatgtctatttggatttgacaacatgatggtgactgttttgacaagtgcgccaagccacattgggatgcttcgaagagaaaataggaaatggggtgaatatcgacagcttcgttgggaaattttgctgctggaaagtggaagaaaaacacttatgggcttcgagggagatggggccaaaaagagggctttttttttttattttttttttagacacagagccttcagttctcggcggggggggcggggggcaatacggtttaaccagaactcacctttggcgccagggggcctcctacttgacgcttctgagaaacggaacacagagcggccccctggcccacttataaaaaaaaattcttttatcacaggttctcctgtacggagagcttttgttaacagcggactcaagcccttcgagtagtaccgccgggcctcgccgcaaaaacaaaacagtctccttcttttctttcttgacaggggccgtctgccccccgcccatctcatcctatacgtacgccggcgtgggcggccg

SEQ ID NO: 81537 - DNA, 1179 bp, Homo sapiens
  misc_feature (1)...(1179): n = a,t,c or g
  sig_peptide (60)...(195): this location contains the signal peptide sequence, MHSSCCRHQPRVLCCLYSWLMSLRRQSRRGGTGPFPHQPLLQATR, Run with SignalP
  misc_feature (26)...(206): similar to gi37632 in the genepept database release 114, Run with FASTXY 3.3t00, default parameters
tcccgggtcgacgatttcgtcctgccgggcccacaggtgttgaagaagataaaggtgagatgcattcgtcttgctgcagacatcagccaagggttctgtgctgtctgtattcctggctgatgagtttgagaagacagagcaggcggggtgggacagggccatttccccaccagccccttctgcaagccacacgttcatacatcaggaaggcacctactctgtggacgggcatcattggggccccagctgaccttgtgcatcaatagtgagccccctccctacagctgaggcacagatgccctatgtcctggaataatcccaggcccctcacagcagactcctgattcatttagttcaccttccctagtcagagatgacagaaaagtacagaaggtagatgcgtggcccaagggaaggaggctgattggggagtgtgcctaggctgagggtgcagcacctcacctgcttaccactttccctggcctgcttcccttcctccccaactcactttgtgttagaagcctactaattcagcctcagcagccttggggacccgccttgctcaggcatcagtgctgagaccttctgcctgcggggaaggcagttgcctaagtgcatggaagtaggaatgggtgggaaggaaacctctcctgcctgggggctctgatgggaagtgaattccagncctccctcatttttcttctcttttcctcctcttctgcctctctttggcttttgggttctggctgaatctaaggccttctttcttgcctaacgggggccaggaaatgggggcagataaacccgattttaatcctctcgggctttaatacacatacttgctttgggcatagaagttaccactggatttaaagcctgctctcgccatggagaaatgaacccctgcaggggaaaacttaagtcgtgcattgaagaatcttgccttggcccgtgctccgcacaaagccatcactgatacgtcgcgatgcgggtcgatctaggaaataacatcacatacatattcgccgggagaggcggccccgcacaaacactggtttctacgaacgtcactacgcggggcagccctttgccctacctctcaactcttcacttttactcggcgcgcgggtgggttacgtctgttagccatacgcatagaccacactcgctctcggggcc

SEQ ID NO: 81538 - DNA, 1127 bp, Homo sapiens
  sig_peptide (1098)...(963): this location contains the signal peptide sequence, MRWIAFAVMIVLALIRIGHGQGEGHPPLADFSGVRNLFGVCVYSF, Run with SignalP
  misc_feature (1090)...(782): similar to gi3873920 in the genepept database release 114, Run with FASTXY 3.3t00, default parameters
gctccccgccgaggctacggtctttacctgtcgcgtagagaggacgcgccgcgcgcgagtattacgtaggagggttacctgcaggcgccgcgctgccgcaggctttgcaagagtgtaaaaggggcccggggctaggggagatacgaatttgattgcagggggtcgtagcgagcagtagaggcgtcgataatggggaggtaaccggggggggggggtcccgaaaggaaagtccgttttccctgagcctggagcaactaatcggatttcgcgtgaggggggcgtgggaccctttgctcccggccgaggctgcctgtcctgccatcagagcttggtctcgctgaggatgatattggccgtgacgaaaatgaagcaggagaaagcccagagcagcacgaagcccacccagaaggtgtggcggaaaggggacctgtgcttgttgctgaccccacagccaaaggccagctgggtgtccctgcggcagtggtacaccaggaaggcggggatgacgtactggatgccggtgcccgcgtaggcccctgtgatgcccaccagggactccaggtcgtgggtgcagaaggccaccagcacaggcggcaccagggtgatggtgggaaacacgacgcggtccaccacccacgggtacgtgccgccctcgcggtggaagagtgtcttccagttgttgcgcagggtcacggcaatgatggggaagttggtgctgatggtgaagacggggaagaggcccaggaaaaggcgcgcagcggccaggcccacgacgtcacagcgcgcgaagttgagggtgtacatgtccatgaggctgtcgccgcggaagcagaagatggcggtgaaggagaggaggccgtagaaggccaggatcagcacgtagtccaggaacaccagccttgtgaggtggcgcttggaggagacgggggtaatgagggatggcagagagtgctggcacatgaaggagtagacgcacaccccaaacaggttccggacccccgagaagtcagccaggggcgggtgcccctccccttgtccgtgcccgatgcggatcagggccagcacaatcatgacggcgaaagcgatccatctcatcagagaggtcaggatctgcaggtactacgaaa

SEQ ID NO: 81539 - DNA, 1175 bp, Homo sapiens; identical to SEQ ID NO: 81209
  sig_peptide (955)...(1090): this location contains the signal peptide sequence, MLGIIPSLLRRALLQVHGSLCSIGRRPGDTGEARERGQVAPPDSL, Run with SignalP
  misc_feature (1084)...(733): similar to gi553885 in the genepept database release 114, Run with FASTXY 3.3t00, default parameters

SEQ ID NO: 81540 - DNA, 1146 bp, Homo sapiens
  misc_feature (1)...(1146): n = a,t,c or g
  sig_peptide (146)...(281): this location contains the signal peptide sequence, MGFLCEIGAIPTMVLALWGFLRASSASPPSLNRLPGQGSAFSFQI, Run with SignalP
  misc_feature (494)...(854): similar to gi3242155 in the genepept database release 114, Run with FASTXY 3.3t00, default parameters
cccgttcgacgatttcgtagcacaggagattagaaccaagttttgagcagcagcaagacgctggaaataaagtgcatcctagtgtctaattcaaacagatcatcacggtgtggtttcaacagaacattttcccttcctttcttgcatgggattcttatgtgaaataggagcaattcctacaatggtgctggccctctgggggtttcttagggccagctctgcctctccgccttctctgaacaggctgcctgggcagggctctgctttctcatttcagatctgctaacttcacatgtcacctactgccgagtcactttcctgatggactcatgggacttttctgcatgctatttctacaaattcattctctctccacgtaggacaaaaaacatgcttggcatgtgctttgtggagtgcgggggtgctggggtagggaggctggttagtcagaagcagctgttgagtgagcttgaacattcctggagacttgaggtagctccatgattttacccatctgtcacaccctcctgggcatgtgacctccagattctgagttgaccctcatgcgggagagagatctgtgtttcggtgaagcagccctggaaactacctccttcctgagggaaacccttgatcttttcgggaatgggctctaacccccattgcctctctattcctcggggtgtttaccccacccacctttgataccgggaccggccagacgccggcaaccgaaaccagtaggctggccccggccgttcctcacctcgatgttcggcggccacggatgcgtgtggcttgcgcccgggcgaccatccctccttcatatgccgggcccgctgcccgcancgcttgggcgaccgcctcggcccggggtcggacgcgcacaacttaaacgcaccgcacggagctcaagcgctggtcgcagccgcgactatccgcaggccccgggccgcggagcgctctccgtcggcttcatccgggcgcgccggagtctcgcgtcccagcaacgccccgcccgcgctactcacgaccgcgccctcgacggggcagcacgactcccagatcggcgccctgacggcgaccctcgggaatcccgacacctgcccctcctcggtgcgcgcgtgcccgaccgcctctctgccg

SEQ ID NO: 81541 - DNA, 985 bp, Homo sapiens
  misc_feature (1)...(985): n = a,t,c or g
  sig_peptide (497)...(632): this location contains the signal peptide sequence, MISWVLLFSLLCLSVNYLLAFEPTYVAFYYGNNNIEAMYVFTYPC, Run with SignalP
  misc_feature (83)...(261): similar to gi3257141 in the genepept database release 114, Run with FASTXY 3.3t00, default parameters
ccgaattcggccgagatcgtgtccagcctgaaatcagctttaattgtcccccaggtaaataaacacctggtgaaagtcacctttggaaaattaatgcttttgaaaataatccatgagtctaagtatgactttcaaatcaccttcaccgtgtgtctgggaacatttcaggttgatttcctacatcacatcactcctcttctgcttattgtattcccacttactagacgtcaggtgttggtttattaggagacattgctgtgcatgtcacacagccagttggcaccacatttttggctccttctgttgaatctctttctagttggctggcaagttaaatctgttcattgagaagggagcgtgtgcatatttgtgcttgtttatgtatgtattactggcaggggatgagacagaagcaaaagttgggtcagttaaatacaatcgtctctcttctactttgtagtttttggagatatttttccatgccattttgtaacagatgatatcctgggttttattattcagtcttttgtgtctgtcagtgaattatttgttagcctttgagcctacatatgtagcattttattatgggaataataatatagaagcaatgtatgtatttacatatccatgtctcagattgttagagactggtgaccagagtaatgatatccatgagttagcttacatgagaatttctggggacagtagtgggttcttactgggggcccagccaatgggttaggtactttatgtatattaacttatttaattctcatagcaacactacgaagtagctgctactattatctccattttccaggtgaggaagcagacatagagaggctacataacttgtttaaggtcacaccaactaataagcaacgatcttacttagtctaaattatggaatagtatgagacactcctgaaatttgagatgcttaatacagcagaggcttatttctcactcaagggatacngtgcgg

SEQ ID NO: 81542 - DNA, 450 bp, Homo sapiens
  sig_peptide (61)...(196): this location contains the signal peptide sequence, MAILFIWLFLNYSISFSLLFFSATKLTFSSLPKIIFFTLPILVSK, Run with SignalP
  misc_feature (292)...(151): similar to gi243544 in the genepept database release 114, Run with FASTXY 3.3t00, default parameters
cctgcaggaattcggcacgagctgattttgagttgttaaggaaccacaattcagtccataatggctattctctttatttggctctttctcaattattccatttcctttagtttattgttcttttctgccactaaactaactttttcatctctgcctaagatcatctttttcaccctccccattttggtttctaaagaaaacttagaaaaggaaagtgcaaaggtagaaatccatggtcaagactgtgagagaaagaaacagagaggaaagagaggctgaggagggccagtagctggtgagtgggtggagtagattgtcattaacacttcagggctccttcttcctcagctagctaatctaaagccaggacttggccattgcaactccctagggcttctgttcacaacttcaagaccatttgcaaggcagactgccttagaaggcaattgg

SEQ ID NO: 81543 - DNA, 899 bp, Homo sapiens
  sig_peptide (308)...(443): this location contains the signal peptide sequence, MLKASLKQDRLLWKLWKLAVTFCQRGFICFLAQSVQTTGSSVVFT, Run with SignalP
  misc_feature (387)...(238): similar to gi193589 in the genepept database release 114, Run with FASTXY 3.3t00, default parameters
ttgtcgaattcggcacgagggcaaatgtccaaacctggggtctgaatgatatttttgatacgaggtaggcacctttctgaaaaattgtctttacttcacacttcattttatttctaaagcattcaggactcagcaaattgcactgactttatcatcagtgccttttgtgatttcctatcctagaacttaatacgtccccgatgagaaagtaggaagaagctcctctcttcagtcgattgttgatttatggttccaatgaggctgctcatcctgaccttagtttcaggaacggaacccatagacctggatgcttaaagccagcttgaaacaagaccgccttctttggaagctttggaagctggcagtgactttttgccagcgaggtttcatttgtttccttgctcagagtgttcagacaactggatcaagcgtagtcttcaccagcggttgatatcacctcccacttatatgtgaaattccatgtttaggacttaaaattcaccggcaagtcgtgaatactattgcgtgacacttccttgcaggcgcagtaacagctttagcaaaaatttttatttgaaagttcatttccggcactggttttttcgtaacaatctgatgatatgctatatgttgaggaaataaaagtcagcgacttccatcggacactaatgcgggacacttccttgcattcgcaccatcacttatagcaaaaaattttatttggaacctagcttcggccactgctctttttggaacaccctgaccagcccctaactcttgggggaagggtgggaggcacattccatcaaacaggattgtattgccccagctgatattcccacccttacttacccctcccaattttcagtgacgggttcgcttgagccactaccacaaac

SEQ ID NO: 81544 - DNA, 965 bp, Homo sapiens
  sig_peptide (216)...(351): this location contains the signal peptide sequence, MSLNPEFLWLKWFSLLLRGRRNSCLIALKGYHSVMIFHLPLIPSS, Run with SignalP
  misc_feature (154)...(261): similar to gi4582220 in the genepept database release 114, Run with FASTXY 3.3t00, default parameters
actgacttgtggccttcactgtggagcagttagtatctttatgtctttgctggaactgttaattttttccagagaaaactctagtctcctgactgaagggtatgggtgtaaaaccatcttcatctaaaatgaagtaagcattttagagctaaattagagaagggataattccccatttttcattccatgcctcactctgtccttctttatgcccaatgtccctgaatccagaatttctctggcttaagtggtttagtctcttgttgagggggagaaggaatagttgcctgattgcattgaagggatatcattcagtaatgattttccatctgcccctcatcccttcctctgttacctcctgtcactgagtctttagagttccacagagaaaatctgcttgtatctagtctctgaaaactttcaggtttggccttctttctctctgttaaaccttgctgccatctgctttctgtttttgcatattatgatgtctccccattccagtgaacatggagtttttgtatctgtttcttgttggattggagtggttttaagatatagagggagaagacatgtctttatgctgctgtcttcaaatctagcagtagctcttaatgagcacatattctgggtgactccgagagaacaacttcgttcgaacaatttttgtcatggggcggttctcagccactgaaaccccactagaaaggaattaatatatatacttgagcagacattggcctaaggtttgcccttcttggggtaataggcaatattacaggtccgttcccggggacggggagcgccctccgggacccacaagaccccctgaattctggccgcgttggcggggcggtaaacgagactccctcgtcccctccctcagattggggacacgccctttcccaggtctgcgccccctcgggtgtgaggggggggggcgcccccccccccccccgcccccg

SEQ ID NO: 81545 - DNA, 422 bp, Homo sapiens
  sig_peptide (106)...(241): this location contains the signal peptide sequence, MPCFMPNPGAVLGLPPWLLSTQRLTHTRAYLNWLASDRWMRRHWR, Run with SignalP
  misc_feature (326)...(54): similar to gi181853 in the genepept database release 114, Run with FASTXY 3.3t00, default parameters
cgtgcggtggaattccctgggttggcatgtacattctatggaggacagacacacagacatgccaatccccacaggaaggacaggaacaccacgcagagagtgtgaatgccttgcttcatgcctaacccaggggctgtcctgggtctacccccctggttgctttccacccagagactcacccacaccagggcgtacttgaactggctggcgagtgaccggtggatgcggcggcactggaggacaggagagagtcaggtagagaggtcttccaggccctggtgggagacccaacacctcagcccagcgtccctggggcggaggccggcgccaggcctgcaggaacacttccttgacacagatgggaaggtggctgactctggtctgcagatgggttttggtttactcagcttgcccagcattgc

SEQ ID NO: 81546 - DNA, 439 bp, Homo sapiens
  sig_peptide (107)...(242): this location contains the signal peptide sequence, MICYFHVLFTAKLLKRCLFLLSLPPLLPLFLESTPSCFCPHQSTE, Run with SignalP
  misc_feature (121)...(392): similar to gi170454 in the genepept database release 114, Run with FASTXY 3.3t00, default parameters
cacatcattacgccatgcttggcacgaggagtcttgtgaacataaaacgggctgcgattgttcccaccttataaaaagaagtccctccctgggcgtcacattctctatgatctgctatttccatgtcctctttacagccaaactcctaaagcgttgcctattcctgttgtctctacctcctctccttcccctctttcttgaatccaccccatcatgcttttgcccccaccagtccactgaaacagctctcttccaggtcatcaatgggatgacctccatgtttccagatagtcttatcctactcaataatagtacttgctttacccattaaccactcctcccattgctggtcccttctcatctcctggagctttgaacaatcctccaccctgggcctcagtctagagaatcctcttctgtcgctactcattctctagtt

SEQ ID NO: 81547 - DNA, 435 bp, Homo sapiens
  sig_peptide (104)...(239): this location contains the signal peptide sequence, MLCNLALKLLNCVSAWNMNIRLKCLLKPKNVSKVCSRGLYFIYVM, Run with SignalP
  misc_feature (140)...(82): similar to gi4530165 in the genepept database release 114, Run with FASTXY 3.3t00, default parameters
tgcggaattcggcacgagaaagtattgagttaatgtgttcagatgaatttgggcctttggagcaaaaacaattatccattctcaaactgatgaaattagtgccatgctttgtaatttggccctcaaactacttaactgtgtatctgcctggaatatgaatataagactgaaatgtctgttaaaacccaaaaatgtctccaaagtctgttcccggggcctttatttcatatatgttatggactctctttaattcagccatagatggcaagccatttgttagaaattatggccaggtgcagctgctcacgcctatagtcccagcactttgggaggctgtggcgggcagatcacctgaggtcgggagtttgagaccagcctggccaacatgatgagaccttgtctctacaaaaaaaaaaataaaaaaattagctgggg

SEQ ID NO: 81548 - DNA, 452 bp, Homo sapiens
  sig_peptide (51)...(186): this location contains the signal peptide sequence, MVTSGRKPHLLPALACLTFAHFPSAQSLAGRSLPLEFDELKCDFE, Run with SignalP
  misc_feature (442)...(418): similar to gi2979590 in the genepept database release 114, Run with FASTXY 3.3t00, default parameters
cacgagctgcactgcactgagcggtcccttcctagttccctttatgctttatggtgacctcaggaagaaagcctcacttgctaccagctttagcctgtctcacatttgctcatttcccttcagctcagagcttggcaggcaggagtctccctctagaatttgatgagttaaagtgtgactttgaaattgactttaaaaggactttaaactttttttttgtattcctattttagggttacctttgttcactgcagtagctttccatgagtggtaatagtataaggtcttctaaaacaaattttaagtgtaaaaaggagttaatttaaaggatatgactaagcaaataataatgcaggtgctgttcaggtgtagccaagatcgtgggagtagcctatcgggacttaagtttatgaaaactgtgtttactctcaatggttgattgtcattcactt

SEQ ID NO: 81549 - DNA, 416 bp, Homo sapiens
  sig_peptide (207)...(342): this location contains the signal peptide sequence, MTLLGLAVCQRLCPLGIIRVPAACAMGNRVWLAPVHRQNRAYHLQ, Run with SignalP
  misc_feature (242)...(129): similar to gi4028019 in the genepept database release 114, Run with FASTXY 3.3t00, default parameters
agagagtgttctgggaaaagaagaaagctgagtgagatacaatgctagacaggggatgtgggtgatttacttggtgagaatgcccctacactgggcaaatctaaggccagggccctgaagcgggccacctgttttgcacagactactcacctgcaagcacttaagacaggcttgtggcccagaggtaagagcagagccctcctctcatgaccctactaggcctggctgtttgtcagcggctctgtcctttggggataatcagagttccagctgcctgtgccatggggaacagggtgtggctggctccagtacacaggcagaatagggcataccatcttcaagcagcaggggctgtaggattcccaccttatttgccttgcagggaatgtcttgcgccagcagaagagacaaaatgg

SEQ ID NO: 81550 - DNA, 429 bp, Homo sapiens
  sig_peptide (125)...(260): this location contains the signal peptide sequence, MFMYVYTYKLAVAMLKLNQLLLKSTKYFLSYNFCPPKNQLLFLNS, Run with SignalP
  misc_feature (421)...(188): similar to gi2224477 in the genepept database release 114, Run with FASTXY 3.3t00, default parameters
gggtcgacccacgcgtccgaaaacactgttttttgaaaggaaactcccctttcctacttattttttataaatatttcaaaaaatatatttaattttattaagatataacaccataaatttatgtatgtttatgtatgtgtatacatacaaacttgctgtagccatgttaaagctaaaccaactgcttttgaaatctacaaaatattttctttcctacaatttctgtcctcctaaaaatcagttattgtttctaaattcaaaattattgttatatttaaacaaagattaccccttttgtatgttgaacaaatagttttcccttctactaagcataactttttgtcctattaaacatatgaaagtatatctacaaattaatgggagtgattgtttgattattcccactgataaaattcttttttggcgaag

SEQ ID NO: 81551 - DNA, 828 bp, Homo sapiens
  sig_peptide (179)...(314): this location contains the signal peptide sequence, MQTWALSLSHSTLIYFPYCACVKGQNFSTASMFGQGPWARRPWWV, Run with SignalP
  misc_feature (343)...(211): similar to gi554646 in the genepept database release 114, Run with FASTXY 3.3t00, default parameters
tggagagtgagtggagtagaatgcactaagggaaaggaaaacttaaaggaagggtcttgaaagcagattgtggttctcccttcacagttgaatacaagggcttttatatacctgctgatggggctgcgttccctatttctgtaagcgcgaattcctggcggctccacccgtccttccaatgcagacgtgggcccttagtctgagccactctacattgatttatttcccttactgcgcatgtgttaagggacagaacttttccaccgcaagcatgtttgggcaaggtccctgggcacgacgaccttggtgggtcagaggttctccggggaccctcccctgtctaccggggagagttctctgcttcctgcctccatctactccccagtctgcagtctggccctcggtggtcctgcagatctggtgttgattttgcagggagtttggaaaggaacctgcgtattttcatttatggaagagactgagtgcccacgagaggacgataaagcccctgataggagaaattagtagtttatgaactaataaaaaggggcccacccctacatgcagggcacaggggaaacaccactcgggatcaaacgcgaattgtgaccaaaaaaaggtgccgatggtaaccttaaacgcgttaacagcttagagtctcgggagatttgtaaacgcatgttgcagccccttgggagggcctatctcccactagcaggccagaaaaaagaaaacaggccagacgcggttgcccacctgaaacaaggctttgggagaagtgccaacctttactgacgggcaaaaaagattcaaagccacacctctctc

SEQ ID NO: 81552 - DNA, 862 bp, Homo sapiens; identical to SEQ ID NO: 81277
  sig_peptide (110)...(245): this location contains the signal peptide sequence, MQSLVCFENGLGVFDVLGCPGFLFCLMATMWLVSISLYTEVPFGS, Run with SignalP
  misc_feature (465)...(341): similar to gi3510484 in the genepept database release 114, Run with FASTXY 3.3t00, default parameters

SEQ ID NO: 81553 - DNA, 741 bp, Homo sapiens
  misc_feature (1)...(741): n = a,t,c or g
  sig_peptide (129)...(264): this location contains the signal peptide sequence, MVCWWVFVAVVLFCFVCLRGPHGSCDMYCKNKSVLLTMLLTNIQT, Run with SignalP
  misc_feature (31)...(247): similar to gi559489 in the genepept database release 114, Run with FASTXY 3.3t00, default parameters
gtcccaaagccacaactctttgtagggggaattttcttcatttcttcaattctatctctaaaactactgcttagttttctttttataaaaatccatttagatatttctaaatatcacagacaactcttatggtctgttggtgggtttttgttgctgttgttttattttgttttgtttgtctgagagggcctcatggttcttgtgatatgtattgcaaaaataagtctgttctgctcacaatgttgctcacaaacattcaaactgggtttcttgtttcattttccacactgtctacaaatccaaacgttcacccagcatcctcaatgcaaaagaatagacggttaacctgaaggacagagtggtgccagccttataaatctttttttatagaattgtgaaggggttagttgtgtcagattacgtatgaatttcttgatggtatattattttatggcaggtaccggaacacccaagtgatttggggaaacttctgagaataagaacctttcctggcacccccttctgggaatttggccctataagccttgggacccgggggccccggaaacctgggcttttgccccccaacttttccccccggagccggcaaataggggggggtttntaagggattaaaaaattggggccctcccgcacaaaaaacccgtgggcttcttacttccccctatctgcgtctccccccccgacaaaaaaggcccgccacgctcaacaacccttccc

SEQ ID NO: 81554 - DNA, 710 bp, Homo sapiens
  sig_peptide (77)...(212): this location contains the signal peptide sequence, MFLIIGEKVRLLLLSFLPTPTRRQEVDRDQIELEEDSICGLPNKF, Run with SignalP
  misc_feature (198)...(341): similar to gi5732603 in the genepept database release 114, Run with FASTXY 3.3t00, default parameters
taacttttacttctttctgacttacgtgttagttttgtgatgttttattctagattaagtatcctcacttaaagtcatgtttttgataataggggaaaaagtcagacttttacttttgtcttttcttcctacccccacaagaagacaggaagtagatagagatcaaattgagttggaggaggatagtatttgtggacttccaaacaaattcttttatcctcaggacatatgtagcttggtatgcagaggcagcatgacttttggaaattaggtgctggtctttttcttatttctgttacattttaaagttttgcaagctactttgctcgggtatctttaatgttgtatgttagccagttgattagtgactttttattgtgataaaactttatttgcagtagatctttacaaactgagatcacagaacatgtaaactcattagaactgttattttcaattggtgtatttctgatttaagcttttcttttagaaatgtttacttttatatttgctaaatagatatttcagtcattgattcaatgaataaactgtataaataggttcattgctgaaaatgctgctggggggggattacccaaaataaccggatttcttcctaatccaagtaaaatcccatatcccccattttatttttgggaaatgaaaatggttaaaaaataattttttataaaagggggtccccctcggcc

SEQ ID NO: 81555 - DNA, 397 bp, Homo sapiens
  sig_peptide (78)...(213): this location contains the signal peptide sequence, MFDCVRLVLTFLNFPLANKPLNTAATLILLPSYMHRCKSRQFALY, Run with SignalP
  misc_feature (104)...(249): similar to gi1262690 in the genepept database release 114, Run with FASTXY 3.3t00, default parameters
gcacgagagctacactgcgtgggcttgaatatcagcttctgccatttattacctaactaatcttgagcacgttactcatgtttgattgtgtgcggctggtgttaacatttctgaattttccactggccaacaagcctctgaatactgctgccactctcattttgcttccaagttacatgcacagatgtaagagcagacaatttgccctttattgctacatgagagatcaccccaagcccttttgtggactcctagcgaagtgggctggaacattgctgagcatactgggatacctctttttttgagtctccaccctataacttgtattgcccccaaagtatgaggatagcgtacattttgcaatggcacaacatttaatacgcgtttactgtatgcg

SEQ ID NO: 81556 - DNA, 394 bp, Homo sapiens
  sig_peptide (112)...(247): this location contains the signal peptide sequence, MWVLIPDCTFTPFLLLVLVLCVPCEQGPGTCVFKRFSASRVVLHP, Run with SignalP
  misc_feature (307)...(347): similar to gi4091813 in the genepept database release 114, Run with FASTXY 3.3t00, default parameters
ggtgtaggatttgctcttctaacatgaatggaacatttgatttaggatcagtaattacaggttttagaactggagtttgaagtatctgtgacacatctctctttgacagtcatgtgggtactgatccctgattgcactttcaccccttttcttcttcttgttctcgttttgtgtgtgccttgtgaacaaggacctggcacgtgcgtcttcaaacgtttcagcgcatctagagtagtgcttcacccagcaggccctcagttaacaggcatatggattcgactggtgtttgtgtttttctgtaagaaaggttatgccatgtctcaaaaaatgaatggctaatgtttctaggtagatacaattacaaagacgtaccaaataaaataatgagacaaaa

SEQ ID NO: 81557 - DNA, 666 bp, Homo sapiens
  sig_peptide (456)...(591): this location contains the signal peptide sequence, MCDLLLTLLGTSPSSLGLLPPLSHEKVGLHHLSKYSLPISLLFRD, Run with SignalP
  misc_feature (299)...(440): similar to gi14913 in the genepept database release 114, Run with FASTXY 3.3t00, default parameters
cgccacgcaggcccccaccccaactgtaatggtgttcctgggaaggggatgggaacagaatggctgtaggaagggccattcccctttagtcctgcaatttaaaaatcccttccatctcctcactataaatctcattaaactacaagaaacaaaataatttgaagtttgacccagggcaacaatttacacttgatgattttttccttcctacaatttacataggaaagttctatgagctagaattagcttagctcatgtttataaagaactctgttatggatacaaagctagctaacgccatgggtggaaaatacttaagactctgaaagattaatcttgggctcagtcctatccaaatagaaacaatacttttctacaaacaagaaaacacacatcaggaaaacccaagtcttcaggttttctcctctcaagggtggagagcatgtggcactccaatgtgcgatctgctgctgacactgcttggcacatcaccctcttcacttggcctgcttcctcctttgtctcatgagaaggtgggactgcatcatctctccaagtactctcttcctatcagtctactcttcagagattaagcctcacttctggatataaagactccctagaaacgcttacttatataactgtctccacaaagagctaaatcaa

SEQ ID NO: 81558 - DNA, 942 bp, Homo sapiens
  sig_peptide (456)...(591): this location contains the signal peptide sequence, MGKKFKICLSLCPLLLSAPSLLEKCGKVLTTLFVLPGAYWCFSKQ, Run with SignalP
  misc_feature (544)...(406): similar to gi490701 in the genepept database release 114, Run with FASTXY 3.3t00, default parameters
gacggaggaacaaaggctttctacagggaaatgagcgggaagacagagggaatcacattggagaggtttgaatccaggcagtgtgattacacttcgcggggcaattatactctgcctacctgaaatttaaatcaagtccctttaacagaggcgtgttcgcaaaagttttatcttttttcatcccagcctgaaccatcaccttggcttctgttaatatagcaaagcagtagctgcaacccaaaatggtctattattaaaaagaaaaagtcagtgaattttttttaagggcctctaagcctcctggatggatgtggtgtgcgctctgcaattttcagagacttactatatcctcaagtaagggaacatgacagccccttcctccctgtccacctggacgattccagctctgccttgagaagcagagagtgatgccaggtccaaaccaaccctggcaaatgggaaagaagtttaagatctgcctgagtctctgccctctcctgctgtcagccccctccctgctggagaaatgtggaaaagtgctgaccacactctttgtactccctggggcttattggtgcttttctaaacaagttgtgctaatgttgacttccccatgggaggaacagcccaagtttgagcaagagagagttggctggatgaataaaagcacccagcggcccacctgtggacaacaggacagggcaggagatggcgggatgtttcctgggaagaaggttcttttctcttgctggggatcctgatgcagcccttcctaaattggtggtaggacatagccccccatgggggttggttccaccctgaaatatttccatcaagggcccggccctggggggctcatggccctgtaatccccaacacctttggtaggcctgagggcagaagggatccctttaagggcccaggagttttgagcaccaaccc

SEQ ID NO: 81559 - DNA, 798 bp, Homo sapiens
  sig_peptide (179)...(314): this location contains the signal peptide sequence, MWYAILHLKQIFISYLLCISPKLQLPSTVIPKDCILIRPPNQSHI, Run with SignalP
  misc_feature (787)...(91): similar to gi2623032 in the genepept database release 114, Run with FASTXY 3.3t00, default parameters
cggcacgaggtataaacttacttagtgctcaaaaaagccactgaattagataactatcaacacagatgagaaaagtgaggtgtgaaaaagtaaagtagtttatcccaagttacacagctagcaaaaagcagagttggcctccaaactcagttgttctggctcttgatccagaaagcttatgtggtacgctatcctacacctgaagcaaatatttatcagttacctcctttgtatctctccaaagttacaactacctagtacagtgatacccaaagactgcatcctcatcaggccaccaaatcagagtcatatcagagtgaataggaagtactcagtaagtgaggggtaactaacggaattagtgaacagatggatggactgatagaggaagactctctaatctttattataatccaaggcactaggaacactttagtgaataaaacaattttgactcacaagtagatcttgttttttttgtgtgtgtttagagaacatatcaaagcagaaataagtagcaatgcgatgaagatcataattttttggacaggtgtggtggctcatccctataatcctaacagcttgggaggccaaggtgagagaattacttgattgcaggagctcgagactagcctgaacaaaatagtaagattccatctctacaaaaaaaaaaaatagctagacttgggggcaaggcccctatagccccagaacctcggaaggctgggggaggagaatcatttggcctcgagaaaggagggttatgggagcttgaacagcccctgccctctggctggc

SEQ ID NO: 81560 - DNA, 852 bp, Homo sapiens
  sig_peptide (186)...(321): this location contains the signal peptide sequence, MCSGLSTYCYFLCSLSLILPISQCPLACGPQVAWSLGRGILTQLG, Run with SignalP
  misc_feature (55)...(298): similar to gi3257924 in the genepept database release 114, Run with FASTXY 3.3t00, default parameters
agctgctccaatatttaggagctgagccactactcaggcagctgatttttgaggaatttgtcatcattaccattatcattttcagtcatctgcatcatcatcaccattcactgaacagtagctggatacagaccccctactaagcactttacatacatcatcttgtccacatagcttgtcactttatgtgcagcggcctttctacttactgttacttcctttgctctctcagcctcatcctacctatctctcaatgccccctggcatgtggtcctcaggtggcttggagcttgggaagaggaatattgacacagctgggaaatctggggagagggcgatggcattagggaggtgcccacagaactgcatgtcttagaaaaccaagtacttgctgggtgcaaagccaaattcactctcctctatccgacagctaggcaacttagtccttagactaagaagtagataaaatatagcattctttttctgagtcccctgaccccacataccatgggatataccatccccactgccctttccagcatcctctacctgacccacacagagagctgcatatagaaaggagccattcacaagtttatgtgaaatttaaagattttgatttcttcttccaggagaatttttttctacaaggctaatctcttatcatacaatgaaagcctttgctcctctattattaaacgagtacgatggttcagagagcaagtgggagtgttttgggggatttgtcaggaaggtttatttccctccaactatgctatatgggcaagtgccagcataaacaagaatggatgagggaatggggggttcttgttaatgggcacatagtttcag

SEQ ID NO: 81561 - DNA, 713 bp, Homo sapiens
  sig_peptide (441)...(576): this location contains the signal peptide sequence, MCALLIFSVTIVNIKLNKLPTVVLINDLRASWFGQTVYPNFYIPS, Run with SignalP
  misc_feature (275)...(370): similar to gi924717 in the genepept database release 114, Run with FASTXY 3.3t00, default parameters
ctggaagataacaggccaaccctgaagtactcccagtttgctgcagaatctcacatattttggatgttatagaagagtcctatttgccctagttaatttaactttttttttgcctgttttggggactggctggctcttttagaactctgtccaaaaagtgcatggactataacttgtaaagcttcccacaactgacaatatatatatgtgcatgtatttaaaccaaatctggaaaacttacaatacagctgcataatggtagtatttattaaagaatcacaattgtaaacatgagaataacttatggattctagtttagttctttagtaattgcaaattatatttttgctgttgttatattagaataatttttgaatgtcatcttgaaatagaaatatgtattttaagcactcatgcaaaggtaaatgaacactgtttaaatgtgtgctttgcttattttttctgtaacaatcgtaaacattaaactgaacaaattacctacagtagttttgattaatgacctaagagcaagctggtttggccagacagtgtacccaaacttttatataccatcgaatgttattacacttgtgaaattctcctgtctaacctgaatttacattccatggtggttacatggtatatgtattattattaaagtaagtgagccatgtcaaaaaaaaaacaaaaaaacaaattgacctcttcaagac

SEQ ID NO: 81562 - DNA, 391 bp, Homo sapiens
  sig_peptide (199)...(334): this location contains the signal peptide sequence, MKPLFLLWQFNLLKLPCRGHVYRPLGSHSTLQLLAYDGTHVHSTA, Run with SignalP
  misc_feature (252)...(370): similar to gi3204191 in the genepept database release 114, Run with FASTXY 3.3t00, default parameters
taagaaattattaaacactcttgatatacaataaagaggaacataattctgttttgttaataatctagatatttgcacgtagctatacctaactgctttgcattctaatgacaaattatttgtctttagcaaccaaaaataactcagcagatgttatacatgtggctaccttttggtatgcagcagttagaaccagcaatgaaaccactattccttttatggcagtttaatttgctaaaattaccatgcagaggacatgtgtacaggcctctgggaagccactcaactttgcaactgctggcatatgacggcacacacgtacacagcactgccttactttgttaagatcctggaataactctttgacactgggttgttctgcagggagtca

SEQ ID NO: 81563 - DNA, 336 bp, Homo sapiens
  sig_peptide (195)...(330): this location contains the signal peptide sequence, MCVALRQEHTWLCYKRCSKWGMFSLIFMHRAMFLFLFFAIYLKYS, Run with SignalP
  misc_feature (255)...(132): similar to gi62756 in the genepept database release 114, Run with FASTXY 3.3t00, default parameters
acttaagaatccagatctctttattcccagctatggcttctactttggcaatgagtctgacccaagttctaagtccaagtcagtcttatgaggatttacccagagattgtttttctcatacaaatagctagaagttgagcttgtgagaaggtagaagggtagctattgggaaagggtccttatgtgtatgggggatgtgtgttgcactcaggcaggagcacacatggctctgctataagaggtgcagcaaatggggcatgttctctctaatatttatgcacagagctatgtttttatttttattttttgccatttatttgaagtatagcttttcat

SEQ ID NO: 81564 - DNA, 802 bp, Homo sapiens; identical to SEQ ID NO: 80822
  sig_peptide (140)...(275): this location contains the signal peptide sequence, MHFHCTVFFGSCVNSSCLLVIFYFSLRIIFFNLPGYLIVFKNYFF, Run with SignalP
  misc_feature (50)...(381): similar to gi6009503 in the genepept database release 114, Run with FASTXY 3.3t00, default parameters

SEQ ID NO: 81565 - DNA, 1054 bp, Homo sapiens
  sig_peptide (363)...(498): this location contains the signal peptide sequence, MMTVITVTTIIINILFCRGGNQNQEGLFLSPNPKLARFPDPPSMP, Run with SignalP
  misc_feature (644)...(759): similar to gi555351 in the genepept database release 114, Run with FASTXY 3.3t00, default parameters
cgtgcggcggaattcaaaggattaccaaactgcactagtatgaagagagccatgttcctcagctgtacagggctgatgaatggggaggaggcctgcgagcctaccaggagaaccggggagactctcggtctaccgagagcctggatatcctcccgagtggcccctcatgagactatctaccaacgtgtaacagactgtctgtgacaggtcatgggcataatatgtattagtatctctaagaaagaggtggcttttcctatacaaaatttgttggtgacagttggtcaacacttatgtacctgataagccatgtgggtacagtcgatcctcagtacaaatggcagtggtatgctgggtagctaatgatgacagttattaccgttactactattattatcaatatcctgttttgcagaggaggaaaccaaaaccaagaaggattgttcctttccccaaatcccaagctagcaagatttcccgatcctccctccatgccctttcctaacgtctctgtgatttgggagcttctgagctggagttctgtaaattcccaaggaatgggcagttcagaaaaataccaaaaattctaacattattagactttaaagagatttattgattccttttgaatggcagcagatgggaacattcctggactgggggaaggacagtcctgtgatgtgaaaccccttcccccaaggtagacaacaaaagccgttttttaaatgaacaccttagtagaacaatcctagaagaggaaaaaccctcataagtaggaagccctagctgggcggttgggagaaggagtataagtgatttattacagcttatgaagagactgtgtgtgggctgcccagggtcccagctctttctcagccccaactgagaaagggtggggtggtttgcctctgcctttgctgtgggtcacaaaccttcagtggcccaaaaggtggcaagcctgacagatgacctggaaaaatcaaggatatcaatgttttaaatgcttttattcataagcagggtattggtggtgggtctgctgaaaaaaaaaaac

SEQ ID NO: 81566 - DNA, 1003 bp, Homo sapiens
  sig_peptide (228)...(363): this location contains the signal peptide sequence, MRVILLWYIEYFFALDPVLVCIYSHVLIVTIFSEYYFSGEKILLQ, Run with SignalP
  misc_feature (453)...(586): similar to gi829333 in the genepept database release 114, Run with FASTXY 3.3t00, default parameters
cattgtctataaatgaatttttaaataattaaagttataaatttatggatgggatcacttattaatattgcatcatctgaaattttaaaaatatgtatgccagtcttgttgctataatctgcttagaaaaaagaacaaaacaaaaagactacatttttcaagatttgatttttaagaagtacttaattcttggagaggagaagagagtcatataaataaaatatatcatgagagtgatattactgtggtatatagagtatttctttgcattagacccagtgttagtttgcatatattctcatgtcctcattgtaacaatttttagcgagtattatttttcaggtgagaaaattttacttcagagattaactggtggaggtaacataataacaggaagagccaggattatcttaatttcaaatcccacttcataccattatgctatacttaagatatgtgttcacagtgtacctactgcagttgtatgatctggttgcttctttgaaattttcattctggttttaaatttaaaattgagtttgatttttgtggagttctttatttaacctcccatccttatatgtcaacaattctttttcatttttattgcttttagatttacctgtagtttgtaattttcctccaaattacttgaatccttttccctcccttctctccatagaaataccctgatgtattaggagaatgaagatttaaaaacaaaattttgttttccacacagcttttcaagcatatttcatacagtgttcttgtccttcctctctgctggctggaatgcaaatgtgatggctagaactcaagcgagccctcctggacttcatgttaaagacacatgctgaggatgattgagcaacaagatacaaggagcccagggcatgatgactttggaagggaagatgcccaactagtcctgactgcttacctctggatgtgttttacatgagagaaataaatgtgctttctggtttaaaaaaaaaaaaaa

SEQ ID NO: 81567 - DNA, 485 bp, Homo sapiens
  sig_peptide (123)...(258): this location contains the signal peptide sequence, MVLWLVLLISVIEWLMTCHSTTEMLSFGNLLQLEGLAVPHLFLGL, Run with SignalP
  misc_feature (280)...(351): similar to gi984517 in the genepept database release 114, Run with FASTXY 3.3t00, default parameters
agataacttgagtaagacacggtcggtccttgcgctcaaagagctcttggtgcagtcagggaatttgattgttaaagcataaataaattactgtgtgctggtgaatagctcttgtggttgatatggtgctttggcttgtgctcctcatttctgtcatagaatggcttatgacatgccattctacgacagagatgcttagttttgggaacctcttgcagctggaaggcttagccgtgccacacctcttccttggcctggatacaagaccccttatactgaacacacctctttcctggcagctctgccacactcttaaccataaacccaacacacgagtgatatcaaatgactcatttacttcttcagcatgccatattgtttcatcacacatgggcttttgtatatttgttcctccctctgcctgctttctcttctcctcacctgtcaaccttctgctgatcttcagagtttagttaaaaaaaaaa

SEQ ID NO: 81568 - DNA, 484 bp, Homo sapiens
  sig_peptide (273)...(138): this location contains the signal peptide sequence, MLLLSSSLLKCGTCQWQVQPAVAGSLEGGEEESMVSALLISALPF, Run with SignalP
  misc_feature (287)...(82): similar to gi178252 in the genepept database release 114, Run with FASTXY 3.3t00, default parameters
gaaactacagctactgaacatactccaccagagtgaaagagaacacttcttcattcacagggcaagaaacaaattagtttagggaatacagtatattggacatccaaagtttcaacagtgacatgggaagttcccaggaaaggaagtgctgagatgagcagagcagacaccatactctcttcctctcctccctccagactccccgcaacagcgggctgtacctgccactggcaagtgccacattttaacaacgatgatgataacagcaacatttcatcttcaccacaaccctatatggtatgtacgttatcatcccaattttacagatatgaagaactgagggacgtagagttcgagaaacttgcttaaaattacacactactggcagaactaggattcaaaccagcgtgtctggcccaaggcactgccttcttcacctgactatgccaccttgtctccccatactcgttaactcacttgcctt

SEQ ID NO: 81569 - DNA, 678 bp, Homo sapiens
  misc_feature (1)...(678): n = a,t,c or g
  sig_peptide (13)...(148): this location contains the signal peptide sequence, MLNSISLTNWINIFWCYSMVVFMVSKCVSYTLCSIFHLGGVTYQM, Run with SignalP
  misc_feature (227)...(335): similar to gi801985 in the genepept database release 114, Run with FASTXY 3.3t00, default parameters
cgataacagcatatgttaaattcaatttccttgaccaattggataaatatattttggtgttacagtatggttgtttttatggtgagtaagtgtgtatcctacactctgtgttctattttccacctgggtggtgtaacatatcaaatgtttaagaaaaataaggacaccattctaaagagatcaggaagctattgctaaatgttattctgggggggatttcaaatagatgttagcgagatacctactgaattattgaggatatgaactgtacaaccgtataataggacattataaatatgtaggctggtatacacctgttttgagtaaacagtatatttttcttatcaatcttagttctatcttggtggtttgcagcccatgagaccaaagcgttttatgattaaacttaagaacccgggctttaatggcccaaaataaagcccggttacctattttataggggccttggaaatccgcgcacaccccggggaaaggattccttctttgtctaaactatcttccaaaattttttgtgttaaagaggatttaatccttccttatttcagctgggaaagaactgatcccgccaaaaattaatgataaaatttnttgaggccccccccccccccccgctttttttttggggggggggtttttcctttgggggtttttttgggg

SEQ ID NO: 81570 - DNA, 792 bp, Homo sapiens
  sig_peptide (44)...(179): this location contains the signal peptide sequence, MYYSLQLTIILVDVFWRVLFICLNLKEHLTMFMIETVLFLVQINI, Run with SignalP
  misc_feature (240)...(354): similar to gi4049765 in the genepept database release 114, Run with FASTXY 3.3t00, default parameters
ttttgaggcaattcattatagagatttgctttgttgatgggaaatgtactacagtttacagctcaccataatcttagttgacgtgttctggagagtgctttttatctgtctgaatttaaaagaacacttgactatgttcatgattgagacggttttattcctggttcaaataaatatcttgaagttaaaatatgcgccttttattccttaggtgagtatattttttaagaaaacatggtctgttatttatatgtcatccgcttgttatatgcataagttacttgaagaatagtgaatttctaatgaaaataacaattacattaatactttagattttaatgctgttttgtaaattttgaagcaaattcatatatctcatttaattctcacaacaacctcatgataccccagggcagatataattatctccatgttatagatgagatgagaaatgtaaggcatttgcctgaaattccccatttggtaaatgaaggagctggatcaagtcctcacatccctgactctgctggtcgtcttgccactctcccgaggacagctgcttatacctccttgatagtttaccccatggcttgcggatggacccctgccctcaaattgtttataacacccacttattgactgcttacaaactttcccacattttgaaatgagacttacccccattaattgccttcaacacgtctctgagtttgggaaccattcatatatcccctatttttgtgcggtgggaaaacctcaagggccatttaaattcggggatgtggaccttcc

SEQ ID NO: 81571 - DNA, 375 bp, Homo sapiens
  sig_peptide (125)...(260): this location contains the signal peptide sequence, MHQNFLSPRLWVFLMSFSSFEKIQIEFIPSVASKMNSPAIRLNQL, Run with SignalP
  misc_feature (219)...(342): similar to gi466233 in the genepept database release 114, Run with FASTXY 3.3t00, default parameters
gtctcttagtccatttttttaaagccagtccagtaaagggactggtgcaaactgaatcttactgcctattgttagttccagatggaattaaaacttccatttgtccttgtctttataaattctaatgcaccagaattttctgtctccaaggctttgggtttttcttatgtcattctcttcatttgaaaaaattcaaattgaattcattccctcggttgcttctaaaatgaattcacctgccattagacttaaccaacttaagttgctttgtaaataatatgtgttgttacacatgtgtagtttgaatggctagattccttttttcccttaatgagtataaaaatcatgaataagatactgctctaggtgttaccg

SEQ ID NO: 81572 - DNA, 354 bp, Homo sapiens
  misc_feature (1)...(354): n = a,t,c or g
  sig_peptide (41)...(176): this location contains the signal peptide sequence, MLRARTVGALVGASLTSGLCVLSADSCISSLLPPPLIEKEWPCAL, Run with SignalP
  misc_feature (347)...(89): similar to gi2302228 in the genepept database release 114, Run with FASTXY 3.3t00, default parameters
nanagtcggncactgaggacggngttccctnnttcttgacatgctccgagcgaggactgtgggtgccctcgtgggtgcctcgctcacctccggtctctgtgtcctcagcgctgacagctgcatttcgagtctgcttcctcctccacttattgagaaggagtggccatgtgctctagaaggggcttggttggtggagcccgttctctgctgtccttacatggccctgccatgtgtagtcacgcaccatctgtgtttgcagagccccagggttttgctggaaggacagcgtgcagtccgtggctggttcgaatggagcccaaaggctggggccctcttccgggccttttttaatgt

SEQ ID NO: 81573 - DNA, 751 bp, Homo sapiens
  sig_peptide (546)...(681): this location contains the signal peptide sequence, MKDPSEPLPVFLSPAVLTFLPFLMLRLHLVSGLSQLPSDHSACSA, Run with SignalP
  misc_feature (442)...(318): similar to gi5105456 in the genepept database release 114, Run with FASTXY 3.3t00, default parameters
acgaattcaagcgtccgacccggagatcgtggaggatagaaacagaatcctgtgaagccatttctctcaggtgagaaataaactgtattcttgtacgggaagagaaggggcatacctcagcctcctgacacttccgttttgggatatgtttgtgagtaggctatttaagtcatgagatggctccaagcctcttctccctcccatctgccatgggttgggtgaggtgatcaagtgagtaaccaagagaacaccagctattgatggacgcatctgagaagagctcagaagacgggctcagatattcctctggcccatgagcctgccctgggatcaccttttgctccacacagcgtaacaccaccatgctgggcaagctgggtacctggcctggggatctcctagcatccactggcctgtggcgggtggctgtgcctccgtaggcagggagcgtcggggctgcttttgagaccttgcagagtcaggctgacatctgattaagaagcctttcaaagaaatcacagtttttgcagaatccatctagaaagatgaaagacccttcagagccacttcctgtgtttctaagcccagcagtcctgacgtttttgcctttcctgatgctgagactccatttggtatctgggctctcacagcttccttcagatcactcagcttgtagcgcctggcggccaagaggggcaagtccagcgtctcacctcaaaggctgatctccgggtcggacgcttgaattcgt

SEQ ID NO: 81574 - DNA, 441 bp, Homo sapiens
  sig_peptide (134)...(269): this location contains the signal peptide sequence, MISVLHGRFCVFGVGLSHSSPALSFTCCHNLCQPPWPAFPSCLCS, Run with SignalP
  misc_feature (425)...(396): similar to gi166376 in the genepept database release 114, Run with FASTXY 3.3t00, default parameters
tgaccatgcttacggattcaatgtccgtacccgtacatccctgtgatccgtgaagaccctgtggttgcccccctttcatcccttgggtgccccggcctggattccggtctgcaccccctcttcacttggcctcatgatttcagttctccatggacggttttgtgtcttcggggttgggctctcccattccagtcctgctttgtcattcacctgttgtcataacctctgccagcctccttggccggctttcccgtcctgtctctgctccacggtaggcggaggcccctccgcatgtgcgccgagagccgcctccctgctgcctgtgttcctaccactctgcactcaactctttcatgaagcttcgtggaggaatgtgtgttgataggactttttcatataatccggatttttttctggttttctaaattccattaaaagcag

SEQ ID NO: 81575 - DNA, 480 bp, Homo sapiens
  sig_peptide (130)...(265): this location contains the signal peptide sequence, MFLHTRFSQAATLYVFITPFKYDRNSVVFLTNGAVYLNIKAFSRQ, Run with SignalP
  misc_feature (152)...(311): similar to gi5051954 in the genepept database release 114, Run with FASTXY 3.3t00, default parameters
tgagccacctctttcctaagaaagctgcggattctgcagcattttgcaaacaggacgccctagtctctctgccaaacaccgagtgtgctgcacgctgccttcctcattggcagcattgtgggttacagaatgtttctacacacacgcttctcccaggctgccaccctgtacgtattcatcacgccctttaaatatgaccgaaattctgtcgtcttcctgactaatggtgccgtgtatctaaacatcaaagcattttcaaggcaatcacataatgattcaaaattgactttggtgtctcctttgctgcttgcacacagcggatcaagaatctgctgaatcataatccaaggattgtgataatgtggtcccagaaaaggcccatttcatagtaaaaactggtttgtaaaaattattatcagaagcatcacctttttgcagcaagttaagcaatttaattaatgaaaaagcctccccagagaa

SEQ ID NO: 81576 - DNA, 432 bp, Homo sapiens
  sig_peptide (182)...(47): this location contains the signal peptide sequence, MVVPILVVVLVTLCIAEPQTHLILTKGSKSGDKDDAELKQRVFLK, Run with SignalP
  misc_feature (60)...(156): similar to gi3716604 in the genepept database release 114, Run with FASTXY 3.3t00, default parameters
aatacactgtctctgccctcagcatatatttgatggatatgtcaacattttagaaaaactctttgttttagctctgcatcatctttatcaccagacttgctgccctttgtcagaatgaggtgggtctgaggctcagcgatgcacaacgtgaccaacaccacaaccaggataggaaccaccatgcccaggtctcccctttacccacagtgtcccatggtggctggtgtgctgctggattcagctcaggactgactttggaaccacctgagaagcggccagaatctattgccacatagacagtgccctatgcacagctgtcaattcaacaaagagccacttagtttaagtatggcagatccaagatgaatggatggcatcctgtttggacagctgctgcattaaggcctgtaattctagctacttgggaggctg

SEQ ID NO: 81577 - DNA, 852 bp, Homo sapiens
  misc_feature (1)...(852): n = a,t,c or g
  sig_peptide (60)...(195): this location contains the signal peptide sequence, MERGAGAKLLPLLLLLRATGFTCAQADGRNGYTAVIEVTSGGPWG, Run with SignalP
  misc_feature (153)...(768): similar to gi4567054 in the genepept database release 114, Run with FASTXY 3.3t00, default parameters
atgagccnnttgacttgatcgcctgcttggactagggcctgattcacagacgctccaggatggagcggggcgcaggagccaagctgctgccgctgctgctgcttctgcgggcgactggtttcacatgtgcacaggcagatggccggaacggctacacggcggtcatcgaagtgaccagcgggggtccctggggcgactgggcctggcctgagatgtgtcccgatggattcttcgccagcgggttctcgctcaaggttggggctcaggcgtaggtcctggagagggcggagatgcgtgggaccatagagccaaggatgataattccgtgactcgcccttgcccctctcctcgatacccaggtggagcctccccaaggcattcctggcgacgacactgcactgaatgggatcaggctgcactgcgcgcgcgggaacgtcctaggcaatacgcacgtggtagagtcccagtctggaagctggggcgaatggagtgagccgctgtggtgtcgcggcggcgcctacctagtggctttctcgcttcgcgtggaggcacccacgaccctcggtgacaacacagcagcgaacaacgtgcgcttccgctgttcagacggcgaggaactgcaggggcctgggctgagctggggagactttggagactggagtgaccattgccccaagggcgcgtgcggcctgcagaccaagatccagggacctagaggcctcggcgatgacactgcgctgaacgacgcgcgcttattctgctgccgcaagttgtaaagcgccggcgccgccgctcatctccacgggccaggaggctagtcccacctcttgctattaaagcttctctgagttg

SEQ ID NO: 81578 - DNA, 407 bp, Homo sapiens
  sig_peptide (49)...(184): this location contains the signal peptide sequence, MTQVERVIVFLTLSTLSLAKTTQPIFMDSYEGQEVNITCSHNNIV, Run with SignalP
  misc_feature (49)...(378): similar to gi2358024 in the genepept database release 114, Run with FASTXY 3.3t00, default parameters
cacagtaaaagagctctagaacctgggtcctagtttgttcctataaatatgacgcaagtggagagagtgatcgtgttcctgaccctgagtactttgagccttgctaagaccacccagcccatcttcatggactcatatgaaggacaagaagtgaacataacctgtagccacaacaacattgttacaaatgattatatcacgtggtaccaacagtttcccagccaaggaccacgatttattattcagggataccagaaaaaagttaccaacgaagtggccttcctgtgtatccctgccgacagaaagtccatcactctgaacctgccccgggtttctctagaagacactggtgggaaataactgcttgtgggtgatagacacaatgattagttttgggagcccgaacc

SEQ ID NO: 81579 - DNA, 680 bp, Homo sapiens
  misc_feature (1)...(680): n = a,t,c or g
  sig_peptide (158)...(293): this location contains the signal peptide sequence, MAVAFVLSLGVAALYKFRVADQRKKAYADFYRNYDVMKDFEEMRK, Run with SignalP
  misc_feature (92)...(319): similar to gi1200057 in the genepept database release 114, Run with FASTXY 3.3t00, default parameters
ggcacgagggctacagcacggttcgtttttcctttagtcaggaaggacgttggtgttgaggttagcatacgtatcaaggacagtaactaccatggctcccgaagttttgccaaaacctcggatgcgtggccttctggccaggcgtctgcgaaatcatatggctgtagcattcgtgctatccctgggggttgcagctttgtataagtttcgtgtggctgatcaaagaaagaaggcatacgcagatttctacagaaactacgatgtcatgaaagattttgaggagatgaggaaggctggtatctttcagagtgtaaagtaatcttggaatataaagaatttcttcaggttgaattacctagaagtttgtcactgacttgtgttcctgaactatgacacatgaatatgtgggctaagaaatagttcctcttgataaataaacaattaacaaatacttttggacagtaagtctttctcagttcctaatgataatgcagggcacttactagcataagaattggtttgggatttaactgtttatgaagttacttganttccgtgttttgttaaatttcaatggtcctagacatccttaactgtganagttgtccgttcantgcagtacttggcctgggnatggattaaagtgtcccatggccngtaagacactgtncgggggccca

SEQ ID NO: 81580 - DNA, 404 bp, Homo sapiens
  sig_peptide (47)...(182): this location contains the signal peptide sequence, MTKLAQWLWGLAILGSTWVALTTGALGLELPLSCQEVLWPLPAYL, Run with SignalP
  misc_feature (170)...(313): similar to gi3924754 in the genepept database release 114, Run with FASTXY 3.3t00, default parameters
aacatccgggccgcgcggggaaggggagacgtggggtagagtgaccatgacgaaattagcgcagtggctttggggactagcgatcctgggctccacctgggtggccctgaccacgggagccttgggcctggagctgcccttgtcctgccaggaagtcctgtggccactgcccgcctacttgctggtgtccgccggctgctatgccctgggcactgtgggctatcgtgtggccacttttcatgactgcgaggacgccgcacgcgagctgcagagccagatacaggaggcccgagccgacttagcccgcagggggctgcgcttctgacagcctaaccccattcctgtgcggacagcccttcctcccatttcccattaaagagccagtttattttctaaaaaaaaaa

SEQ ID NO: 81581 - DNA, 1983 bp, Homo sapiens
  sig_peptide (469)...(604): this location contains the signal peptide sequence, MLFAFISLLVMLPTWWIVSSWLVWGVILFVYLVIRALRLWRTAKL, Run with SignalP
  misc_feature (1241)...(1841): similar to gi2196554 in the genepept database release 114, Run with FASTXY 3.3t00, default parameters
ggcacgagggcatggcggagaaggatgacaccggagtttgacgaagaggtggtttttgagaattctccactttaccaatacttacaggatctgggacacacagactttgaaatatgttcttctttgtcaccaaaaacagaaaaatgcacaacagagggacaacaaaagcctcctacaagagtcctaccaaaacaaggtatcctgttaaaagtggctgaaaccatcaaaagttggatttttttttctcagtgcaataagaaagatgacttacttcacaagttggatattggattccgactcgactcattacataccatcctgcaacaggaagtcctgttacaagaggatgtggagctgattgagctacttgatcccagtatcctgtctgcagggcaatctcaacaacaggaaaatggacaccttccaacactttgctccctggcaacccctaatatttgggatctctcaatgctatttgccttcattagcttgctcgttatgcttcccacttggtggattgtgtcttcctggctggtatggggagtgattctatttgtgtatctggtcataagagctttgagattatggaggacagccaaactacaagtgaccctaaaaaaatacagcgttcatttggaagatatggccacaaacagccgagcttttactaacctcgtgagaaaagctttacgtctcattcaagaaaccgaagtgatttccagaggatttacacttttgcttgacagggtcagtgctgcttgcccatttaataaagctggacagcatccaagtcagcatctcatcggacttcggaaagctgtctaccgaactctaagagccagcttccaagcagcaaggctagctaccctatatatgctgaaaaactaccccctgaactctgagagtgacaatgtgaccaactacatctgtgtggtgccttttaaagagctgggccttggacttagtgaagagcagatttcagaagaggaagcacataaactttacagatggcttcagcctgcctgcattgaaggttttgttccaactctgggtggcacagagttcagagttcttcagacggttagccctattactttctacagccaattcacctcctgggcccttacttactccagcacttctgcctcatcgtatcttatctgatgtgactcaaggtctacctcatgctcattctgcctgtttggaagagcttaagcgcagctatgagttctatcggtactttgaaactcagcaccagtcagtaccgcagtgtttatccaaaactcaacagaagtcaagagaactgaataatgttcacacagcagtgcgtagcttgcagctccatctgaaagcattactgaatgaggtaataattcttgaagatgaacttgaaaagcttgtttgtactaaagaaacacaagaactagtgtcagaggcttatcccatcctagaacagaaattaaagttgattcagccccacgttcaagcaagcaacaattgctgggaagaggccatttctcaggtcgacaaactgctacgaagaaatacagataaaaaaggcaagcctgaaatagcatgtgaaaacccacattgtacagtagtacctttgaagcagcctactctacacattgcagacaaagatccaatcccagaggagcaggaattagaagcttatgtagatgatatagatattgatagtgatttcagaaaggatgatttttattacttgtctcaagaagacaaagagagacagaagcgtgagcatgaagaatccaagagggtgctccaagaattaaaatctgtgctgggatttaaagcttcagaggcagaaaggcagaagtggaagcaacttctatttagtgatcatggtaagcactgactttaaagtaacaggttatttcaatgtaggggattctttctttcttgaaccatgaatgttattttagctgaagaattcttggggttttataagggtccaccagg

SEQ ID NO: 81582 - DNA, 1868 bp, Homo sapiens
  misc_feature (1)...(1868): n = a,t,c or g
  sig_peptide (301)...(436): this location contains the signal peptide sequence, MSVGLAGAVGRRCHLALAVLHDPLCHHGSLATICKQPEVCLFTIV, Run with SignalP
  misc_feature (287)...(679): similar to gi4884190 in the genepept database release 114, Run with FASTXY 3.3t00, default parameters
cataaggttgtagtagcaggagccctctatcttttgttcgggnncatggaaggggtcctcanagcnncngagactcagactgatcttgcttacttggcctttatccccttggctttcctagaccttggcctgcgcagctgggtgcagacaacatccccccaccacccaagagggagggtagctcttccgccaccaggggcaagcacatttgtatcggcatttcaccaacacgcttattttggcagtggcagcatccattgtgtttatcatctggacaaccatgaagttcagaatagtgacatgtcagtcggactggcgggagctgtgggtagacgatgccatctggcgcttgctgttctccatgatcctctttgtcatcatggttctctggcgaccatctgcaaacaaccagaggtttgccttttcaccattgtctgaggaagaggaggaggatgaacaaaaggagcctatgctgaaagaaagctttgaaggaatgaaaatgagaagtaccaaacaagaacccaatggaaatagtaaagttaacaaagcacaggaagatgatttgaagtgggtagaagagaatgttccttcttctgtgacagatgtagcacttccagcccttctggattcagatgaggaacgaatgatcacacactttgaaaggtccaaaatggagtaaggaatgggaagatttgcagttaaagatggctaccatcagggaagagatcagcatctgtgtcagtcttctgtacggctccatgggattaaaggaagcaatgacatcctgatctgttccttgatctttgggcattggagttggcgagaggtgtcagaacaaagagaacatcttactgaaaacaagttcataagatgagaaaaatctacgagcttcttatttacaacactgctgccccctttcctcccagactctgacatggatgttcatgcaacttaagtgtgttgttcctgaactttctgtaatgtttcattttttaaatctgacaaactaaaaagtttaacgtcttctaaaagattgtcatcaacaccataatatgtaatctccaggagcaactgcctgtaatttttatttatttagggagttacataggtgatgggggaaattgttaactacctttcattttcctgggaagtcaaggttacatcttgcagaggttgttttgagaaaaaagggcccttctgagttaaggagccatagttctatcaatgatcaaaagaaaaaaaaaaaaaagagaaactgttacagtatgattcagatcatttaaaaaagcaaaatcaagtgcaattttgtttacaaatggtgtatattaaagatttttctatttcagatgtactttaaagagaaatattagcttaactcttttgacatctgctattgtgacacatcccattgctggcaatgtggtgcacactccgaaacttttaactactgttttgtaagcctccaagggtggcattgcagggtccttaggcaatgttttgtttgcctttatgccagagaggtgctccaagtgctgtgattgagcaccgtgctagaggaactgtaatgcttcagaagttgtagcttatacaaaggaaacaggtcctgctggcttaatttaaacagttattgcatgaagtagcgtggaggccctggactgctgctcgttctttaggatggactggttctggtatctggtattgggtttagagactgttaataagggacatcacaaggtgatggggattcatttgaagcactctatttctgttttaatggttttatccaattttgccttcccaagatttttgttctacataaaaagttcatgccactttttaatataaaaaaatttaacaaaaaaaaaaaa

SEQ ID NO: 81583 - DNA, 355 bp, Homo sapiens
  sig_peptide (124)...(259): this location contains the signal peptide sequence, MQVWLLTLERLRVLPKPRSEFDFFPISHTHPRRHPNPRISHVRLP, Run with SignalP
  misc_feature (166)...(269): similar to gi156990 in the genepept database release 114, Run with FASTXY 3.3t00, default parameters
agcccacggtggctccttgccgggctggtcagactccgtggttgtcctgagacacccaccctctgctgccctgagggtggcccaggaaagtttgtgtgaccttccacacggatcccctgggacatgcaggtgtggctcttgacactggaaaggctgagggttctgcccaaacctaggagtgaattcgacttctttcccatctcacacacacacccgagacgtcacccgaatccacgtatttcccacgttcggctgccactgcctcccaggtgggctttgcaggacccaccatcgcatcccctctcactccacagaaaactcgtggggccgtgttccccctgccactgaccacgct

SEQ ID NO: 81584 - DNA, 1073 bp, Homo sapiens
  sig_peptide (165)...(300): this location contains the signal peptide sequence, MPFLLNQCGSLLYYLTLASTDLTLAVPICNSLAIIFTLIVGKALG, Run with SignalP
  misc_feature (21)...(380): similar to gi5869911 in the genepept database release 114, Run with FASTXY 3.3t00, default parameters
ctctggggcaggtgttggctctggtgctggtggccgctctgtggggtggcacgcagccgctgctgaagcgggcctccgccggcctgcagcgggttcatgagccgacctgggcccagcagttgctacaggagatgaagaccctcttcttgaatactgagtacctgatgccctttctcctcaaccagtgtggatcccttctctattacctcaccttggcatcgacagatctgaccctggctgtgcccatctgtaactctctggctatcatcttcacactgattgttgggaaggcccttggagaagatattggtggaaaacgagcagttgctggcatggtgctcaccgtgataggaatttcactctgcatcacaagctcagtgagtaagacccaggggcaacagtctaccctttgagtgggccgaacccacttccagctctgctgcctccaggaagcccctgggccatgaagtgctggcagtgagcggatggacctagcacttcccctctctggccttagcttcctcctctcttatggggataacagctacctcatggatcacaataagagaacaagagtgaaagagttttgtaaccttcaagtgctgttcagctgcggggatttagcacaggagactctacgctcaccctcagcaacctttctgccccagcagctctcttcctgctaacatctcaggctcccagcccagccaccattactgtggcctgatctggactatcatggtggcaggttcccatggactgcagaactccagctgcatggaaagggccagctgcagactttgagccagaaatgcaaacgggaggcctctgggactcagtcagagcgctttggctgaatgaggggtggaaccgagggaagaaggtgcgtcggagtggcagatgcaggaaatgagctgtctattagccttgcctgccccacccatgaggtaggcagaaatcctcactgccagcccctcttaaacaggtagagagctgtgagccccagccccacctgactccagcacacctggcgagtagtagctgtcaataaatctatggtaaacagacaaaaa

SEQ ID NO: 81585 - DNA, 346 bp, Homo sapiens
  sig_peptide (154)...(289): this location contains the signal peptide sequence, MRLSSPWGSLVSCLAILAAFISQILKDPSTEVGHGLCVGSLSAGC, Run with SignalP
  misc_feature (319)...(246): similar to gi886282 in the genepept database release 114, Run with FASTXY 3.3t00, default parameters
aactattcctgactctcctgagactgtcccgcctgctcactgggaggaaactcaacctctatctagggtgggggattgttacatgcatgcacctgtaatcactcatctgaacattccagaggacacctgcgtaaacctctagcttggatctggatgcggctctcctctccatggggctctcttgtatcctgccttgcaattctagctgcctttatttctcaaattctcaaagacccctcaactgaggtagggcatgggctctgtgtgggctccctctccgcaggctgtggcctctctccagcagtcacctcgggcaagcatcaggctcactgtgttcaacttcttg

SEQ ID NO: 81586 - DNA, 342 bp, Homo sapiens
  sig_peptide (157)...(292): this location contains the signal peptide sequence, MRWMVLYFQLVFLPMDECYFCQGFNINSIPCFSPYHINGEKHCLS, Run with SignalP
  misc_feature (118)...(46): similar to gi3452481 in the genepept database release 114, Run with FASTXY 3.3t00, default parameters
cgtaaaggtataggtaattttttaaatcttctagattgatttatcattacagtgatttttagaacaaatttgatcaaaacaacacaaacgtattgaacatttcaataaacaattattaaatatagaagttaatgtctattagaaatatatttcttaatgagatggatggttctttatttccaattagtttttttacctatggatgaatgttatttttgccaagggttcaatatcaattccattccttgttttagtccgtatcatataaatggtgagaaacattgcctatcaattatgtgatgggaacagagtttcattagagcatggtcatttccattttga

SEQ ID NO: 81587 - DNA, 525 bp, Homo sapiens
  sig_peptide (126)...(261): this location contains the signal peptide sequence, MGESARPGRVSSCECPALLWASLLCFFALGFLPTFLNLGHPWDSL, Run with SignalP
  misc_feature (231)...(108): similar to gi970089 in the genepept database release 114, Run with FASTXY 3.3t00, default parameters
ggcagtatgagcttttggggagtcaggatgctggcccatgggtattaagtcaggtaaatcattaaagctcccactaacccattcttcctagtaggggcttgttgggaagtgagtaggcatggcacatgggtgagagtgccaggccagggagggtcagctcatgtgagtgccctgcgctgctttgggcttctttgctttgcttttttgccttaggcttcctgcctacctttctgaatttgggtcacccttgggatagtttgaaagggacattcatgtccattaactccaagggtcctcacaactgccctgtgatacaagttacagtgacctcatggtccaataaaaaatgactttgccaagatcacacactgagcctcccaccccaagacatgctgccagcctttccaggatgacattagagggtggaaggaacccagagcaggaggggccttccagccatggcccagccctccatttgacaaatggggaaattgagtccagagaagggaagagatttgtccgaaa

SEQ ID NO: 81588 - DNA, 335 bp, Homo sapiens
  sig_peptide (74)...(209): this location contains the signal peptide sequence, MAFFEVLAPLLLDCVFSSMFSSTFYELVTFSTPQFKGMNVFYVLC, Run with SignalP
  misc_feature (283)...(230): similar to gi2766864 in the genepept database release 114, Run with FASTXY 3.3t00, default parameters
taaaattcagatgggtcagtgtcccaaacctgagcttctttgctaccaagctgtgacagaggtgtttgtagtgatggctttcttcgaagtattagcaccacttttactagattgtgtcttttcttctatgttttcaagtactttttatgaattagttactttttctacacctcagtttaagggtatgaatgtattttatgtactatgtggtagttcaaggcagtaggtgcagggggagtgagacccagggaccagttggggggcccccagctgcttctcccctctaatgcagtttcaagaggcgtgtgatgggtgcatggggagctcctggcatt

SEQ ID NO: 81589 - DNA, 657 bp, Homo sapiens
  sig_peptide (127)...(262): this location contains the signal peptide sequence, MPIHHILLAIEILPCFVTLLKSVIIKVVSKRDTSATSKMLSTRNH, Run with SignalP
  misc_feature (223)...(325): similar to gi294064 in the genepept database release 114, Run with FASTXY 3.3t00, default parameters
gagcttcaataccctgcatctgatgaacattgatacacttgggtgtcttcctctgcactggaaaaaaaataatttagatagaattctaaaagttagcatgtttcgtcaatagcttcactgttcctcatgcccattcatcacatcttgcttgctattgaaatcctcccttgctttgtaacattattaaagtcagtcattattaaagtcgtctcaaaaagagacacctctgcaacttctaagatgttgtcaaccaggaatcatattttcaatacttcaaattctattgcattttcaagctttggaaacaaatataatattcttgcatattttctaagatgaaatttcatgtagacaatgatgtgatagaaaggatgatgcttatctaatgattttggcattgccccttgataactatgacactgagaaaaccagcattggttttcctattatcagaacaaattacagggcatgttctggagtcctacatatcttacatttgagagagaaaaatcactgggaaaaaaaaggtaataggtatatttggatccatctaagttcactaacatatctttaagggacagattttttataataatcacatatggctgggcccggggggcgcatgcctgcaatcctaacactttgggaaagccagag

SEQ ID NO: 81590 - DNA, 442 bp, Homo sapiens
  sig_peptide (59)...(194): this location contains the signal peptide sequence, MWKFVNFVRISLCMVVKSCREKKIHRVISLEVTKEKEGYLAPKRL, Run with SignalP
  misc_feature (110)...(28): similar to gi349265 in the genepept database release 114, Run with FASTXY 3.3t00, default parameters
aactggagatatgctatttagtcttaacccaaacagatatgctgtttggccttaacccatgtggaaatttgtaaactttgtcaggatttccctgtgcatggtggtgaaatcatgtagggaaaaaaaaattcaccgtgtaatctctttagaagtcacaaaagaaaaagaaggttatcttgctcccaaaaggctgtaaaaagaataagtaaagtggccatagaggcctagtcttctcaggacagtgtccgggttgagagtctgtctcctgaagcgcactctggggaaaatcccttcctgccctcctgcaggtccttagggtcccagacccagacagtcactttctcaacagagtgccgtcaactcagcacacactcctctcttgagcacagagccccagagggagaagaacaaatgtgttgaaaagaatcttattaaaatgtag

SEQ ID NO: 81591 - DNA, 328 bp, Homo sapiens
  sig_peptide (12)...(147): this location contains the signal peptide sequence, MAVLVLGCVFSRRLLLHSFSSAGDLGGCILEDCEEPQLLPSSSDQ, Run with SignalP
  misc_feature (168)...(53): similar to gi4261780 in the genepept database release 114, Run with FASTXY 3.3t00, default parameters
ctctcgccttcatggctgtccttgtgttggggtgtgtgttctccaggcgcctccttctccactctttctccagtgctggagacctaggggggtgcatcctggaggattgtgaggaacctcagctgctcccctcgtcctctgaccaggcggtgggctcagggagctttggagtctcatgcggtcagcagcgcttaacatgttcagttggctttttccatatcaccagtgacatctttcttcttcctaatcatcgactcatggaatattagaattaccaagcctcttgcagttcctgggggctaagctcttcattttaaagatgaagacg

SEQ ID NO: 81592 - DNA, 380 bp, Homo sapiens
  sig_peptide (115)...(250): this location contains the signal peptide sequence, MVGILKIIWYLLRTALFIWKHFCSGGWAGFPEVPLYRVLRPMQLP, Run with SignalP
  misc_feature (103)...(207): similar to gi2622004 in the genepept database release 114, Run with FASTXY 3.3t00, default parameters
gcctaggtcagggtggacaaccctataccacctccagcaatccctagttcattccatttactttgtttagtaagatatggcacgtcccaaattcacaagtggtttctgtggaaaatggttggaattttaaagataatttggtacttgttaagaacagctttatttatctggaaacatttctgttctgggggatgggctggcttccctgaggtgccactctatagagtgctgaggcccatgcagctgcctgtggctttatactgcatctaacagtcttaggaataggatatattccatattcctatgagaatgaagggcttaatacacacccgtgcatgctggatgctggattgtacacgctggaggctgtaatgtggagg

SEQ ID NO: 81593 - DNA, 378 bp, Homo sapiens
  sig_peptide (110)...(245): this location contains the signal peptide sequence, MRLVFFPFTGVTWRSFCSPTYGSPVQFSHSYFPIGAHFPCWHEHF, Run with SignalP
  misc_feature (323)...(215): similar to gi42727 in the genepept database release 114, Run with FASTXY 3.3t00, default parameters
gtgactgtaatggctgtctagtattctgatgcaggggtttgggtaccctgctttaatttagcccgtcttcctgttagtggctgtgaaagttgtttcctggaacagataaatgcggcttgtcttttttccatttactggagtaacttggagatctttttgtagccccacatatggatctcctgtgcaatttagccactcctacttccccattggagcacattttccgtgctggcatgagcattttgcacatagaattttgcattcttgtgggaatgtagttgtattccttcttgaaagttagattctaagtcataggtatatttttaaatttttatagctaccaccaggactacactccaaacaggttgcagtaatttt

SEQ ID NO: 81594 - DNA, 373 bp, Homo sapiens
  sig_peptide (66)...(201): this location contains the signal peptide sequence, MIRVCAQCLPVSIFFLHTNVLVNPRLPPPGTESFDSNTLIKIYRD, Run with SignalP
  misc_feature (117)...(187): similar to gi984129 in the genepept database release 114, Run with FASTXY 3.3t00, default parameters
cggcacgagcttaaaagcttaatctgtttttagcaaaggtaaaaataatttgtagctatagtggaatgatcagagtttgtgcccagtgtttacctgtgagcattttctttttgcatacaaacgttttggtcaacccacggttgcctcctccaggaacagaatcttttgattcaaatacattgattaaaatttacagagactatggtctttccctgccatgggtttagtgtagagaaaatggtacaggatgaggatgatgattcctaagtctacttggacattacttgaatagctagacaatgaccctgttggcccagttattttagccatgcaaacagtgatttacaaagaatgcccacgtgatctgttaacg

SEQ ID NO: 81595 - DNA, 367 bp, Homo sapiens
  sig_peptide (89)...(224): this location contains the signal peptide sequence, MSRSGIRRPLILVLSALFEASSANHLMSLGLTRQSQQSPVHIFNF, Run with SignalP
  misc_feature (147)...(53): similar to gi1146358 in the genepept database release 114, Run with FASTXY 3.3t00, default parameters
cgcatagtagcaccttttcattgaaagtattttgatgtgataactatggtgtccaaccgtgagaaataatgtggaataatgagtggcaatgtcaaggtcgggaattagaagacctctaattcttgttttatctgccctatttgaagcaagttcagcaaatcacttaatgtctctgggtttgactagacaatctcaacagagtcctgttcacatttttaactttgtaatttccatcaactatttttcaaatggcacattagaaatatttgagactgttttgatgacatcttaggtataggctcagagaatgaaacaagttactctttaggtgcataagctgtattcagttgtagtaggatgtattagt

SEQ ID NO: 81596 - DNA, 324 bp, Homo sapiens
  sig_peptide (25)...(160): this location contains the signal peptide sequence, MYRRLIKGFILFMLIARENKFDSTLKIYRQFFFCVLWKKTSKKKF, Run with SignalP
  misc_feature (79)...(163): similar to gi4049728 in the genepept database release 114, Run with FASTXY 3.3t00, default parameters
aaataagatcactaagatcccgtaatgtatcgtagactgataaaagggttcattctattcatgttaattgcaagagagaataaatttgattctactttaaaaatatataggcaattttttttctgtgttctttggaagaaaacttccaaaaagaaatttaaaaaatagaattggatccagttgaccctgagaataaactgggagttaagaatgttaaggctctttcagaccacactgaaacccagatcatgggtatgaaattatacttagaattgcaagtattttaaaaggattacccgaggaatggaaaaggttaaaaggatg

SEQ ID NO: 81597 - DNA, 1407 bp, Homo sapiens
  sig_peptide (980)...(845): this location contains the signal peptide sequence, MLWRLIIILCEALQRKSRLLADCDHFSFPNRYERKLLLDFTVRIW, Run with SignalP
  misc_feature (1186)...(1406): similar to gi1710216 in the genepept database release 114, Run with FASTXY 3.3t00, default parameters
accaaataaccaaggaaaaggaagtgagttaaggacgtactcgtcttggtgagagcgtgagctgctgagatttgggagtctgcgctaggcccgcttggagttctgagccgatggaagagttcactcatgtttgcacccgcggtgatgcgtgcttttcgcaagaacaagactctcggctatggagtccccatgttgttgctgattgttggaggttcttttggtcttcgtgagttttctcaaatccgatatgatgctgtgaagagtaaaatggatcctgagcttgaaaaaaaactgaaagagaataaaatatctttagagtcggaatatgagaaaatcaaagactccaagtttgatgactggaagaatattcgaggacccaggccttgggaagatcctgacctcctccaaggaagaaatccagaaagccttaagactaagacaacttgactctgctgattcttttttccttttttttttttttaaaaaaaaatactattaactggacttcctaatatatacttctatcaaggggaaaggaaattccaggcccatggaaacttggatatgggtaatttgatgacaaaaaatcttcactaaaggtcatgtacaggtttttatacttcccagctattccatctgtggatgaaagtaacaatgttggccacgtatattttacacctcgaaataaaaaatgtgaatactgctccaaaaacagagtcacgtattccactctccaactacccacatattccttttgcaatagccattagggcatcattttgatatttcattctgatttctgattctctgatttctgattcctaatgaggacagtaggtctggatccaaattctcacagtaaaatcaagcagtaattttctctcatatctattagggaaagaaaaatgatcacagtctgctaagagtcttgattttctttgtaatgcctcacatagtatgataatcagtctccaaagcatcacatgataattacaatgataccattaacatgtcaaggaaattatattatttatggttgtcaaaaattatgaagtagtgtatgattataagcagatatggcaaatttgttcagtaaatccatagatgactacattttgagaaatactaagataatactaaaaattatgccttagcataatttgcatgcaaaattgccctctagtgtttttgttttgttttgagacatagtctcgctctgttcgcccaggctggagtgcaggggcacgatctctgctcactgcaagctctgcttcccgggttcacaccattctcctgcctcagcatcctgagtagctgggactacaggcacatgctgtcacacccggctaattttttgtatttagtagagatggggtttcaccacgttagccaggatggtctccatcg

SEQ ID NO: 81598 - DNA, 319 bp, Homo sapiens
  misc_feature (1)...(319): n = a,t,c or g
  sig_peptide (49)...(184): this location contains the signal peptide sequence, MRVFCVGLLLFSVTWAAPTFQPQTEKTKQSCVEEQRQEEKNKDNI, Run with SignalP
  misc_feature (40)...(176): similar to gi52726 in the genepept database release 114, Run with FASTXY 3.3t00, default parameters
caagaagccaggtattctgaaggtgaaagataccagagattctcaaagatgcgagttttctgtgtgggactactccttttcagtgtgacctgggcagcaccaacatttcaaccacagactgagaaaactaagcaaagctgtgtggaagagcagaggcaggaagaaaaaaacaaagacaatattggttttcaccatttgggcaagagaataaatcaagagctatcatctaaagaaaatattgtccaggaaagaaagaaagatttgtccctttctgaagccagtgagaataagggaagtagtaaatctcaaaattatttcn

SEQ ID NO: 81599 - DNA, 318 bp, Homo sapiens
  sig_peptide (11)...(146): this location contains the signal peptide sequence, MFTFLCLSKINTLFLIYAMRPSQNTTTTQTIPLPDNNHRYQTILF, Run with SignalP
  misc_feature (62)...(152): similar to gi433535 in the genepept database release 114, Run with FASTXY 3.3t00, default parameters
ctgaaatcctatgttcacttttctctgtctctctaaaatcaatacattattcctgatctatgctatgagaccttcccaaaatactacaaccacacagactatcccacttccagacaataaccatcgctaccaaaccatcttatttgtgtctcctcatttaaacaaagctcctaaaagccataatcatgtttcaaattttaatgtacacttcataaaggcagctttttcagttttttattgagtatattttccattctttccattccatggatatatataatgcaaataaaattattccctatcctatcaatttttcac

SEQ ID NO: 81600 - DNA, 826 bp, Homo sapiens
  sig_peptide (424)...(559): this location contains the signal peptide sequence, MRSTLLLLELGTYTGNAGALQDCYCTGMDLGQGQVKCHKAFLSLH, Run with SignalP
  misc_feature (560)...(448): similar to gi220753 in the genepept database release 114, Run with FASTXY 3.3t00, default parameters
aatttgtagatttatatcttccaccaaatttggggattggggggtcttctttccttaaatattcttcattcatttttctgtcttctctttgtggaactcccataatgcaatgataacccacttgatggtgtcccatgggtcctttaggctctgttcacctcacttcattcatttttctttctcctcctcagactggataatttttatggtcttatctctaagtttcctgatcctgtcttatgcttgcttatatctgcttttgaatacctctagtgaattttcatttttgttatacttttcagctccagaatttgtttggctcccttgaataatttgtctttattgattttctcagagatgagtgcctgtgtaagtccttcaggtagtattctgacaggttaggacagacatacacaattgtgtatgaggtccactctgctccttctggaactagggacttacactggcaacgcaggggctcttcaagactgctactgcactgggatggacctggggcaagggcaggtaaaatgccacaaagctttcctctctttgcactttcttgaccagtgttcacttggttgctgaacacctctgactgttttccagagttctggcaaattgagttgacagtttttgcttgttttctgatgtttctctggggtaagaagagttcagagctgcgtattttgctcacccaaaattttaaattttgaaaccaaattttagttggttgctatagatactaaagatttcacagatttacgcacgcgtgggtcgagccggtcttcacgccctctacgaggcttcagtggggccctcgcac

SEQ ID NO: 81601 - DNA, 350 bp, Homo sapiens
  misc_feature (1)...(350): n = a,t,c or g
  sig_peptide (122)...(257): this location contains the signal peptide sequence, MLLLQILAFAFFQIHSNLGFQPRWEREKEPISSSSSLKVAQLALF, Run with SignalP
  misc_feature (117)...(206): similar to gi3925241 in the genepept database release 114, Run with FASTXY 3.3t00, default parameters
ctgaacccacttgcttgggttctcccaggggctgccccgtgcaccccttgttcctagggtggggatggggttggatgcctggggttgcagaggggactagcagagggtgacccttttctctatgctattacttcagatcttggcttttgctttcttccaaatacacagcaatcttggcttccagcctaggtgggaaagggagaaagaaccgatttcctccagctcctctctgaaagtagcccaactggcactgtttaggaacaaggagttcctgagagtgttggcaccccacggtgttgatgtccggtagttccctgctgtgaaccctgtctctgccccacttcaatccn

SEQ ID NO: 81602 - DNA, 386 bp, Homo sapiens
  sig_peptide (99)...(234): this location contains the signal peptide sequence, MLPSFLPQSLGNLIHTLGFLLIIHKYMSAFKNRTDEFMNMGMQPY, Run with SignalP
  misc_feature (11)...(154): similar to gi492911 in the genepept database release 114, Run with FASTXY 3.3t00, default parameters
tttccctgttctgatgccccagccccgcgtcacagcccgttctcagtctcctctgccttctctagtagatattgttagccaggattccattatcctcaatgctcccttccttcctgccacagtccttgggaaatctcatccacacacttggatttttgctgataattcacaaatatatgtcagctttcaaaaaccgcacagatgagtttatgaatatgggtatgcagccgtatataaaatctccttaccgactatcaatgtctcagatcagcctgaaatttgacttgtctcaaactgatcttattttaccccacaaattctactctccttcctccttccctactgtcatgttattctattcattcggtaggttaagccataagcct

SEQ ID NO: 81603 - DNA, 330 bp, Homo sapiens
  sig_peptide (89)...(224): this location contains the signal peptide sequence, MESLSLHQYIELILILKIFAWLGFPPWVSSELQLPCANSCVLGLP, Run with SignalP
  misc_feature (94)...(259): similar to gi550565 in the genepept database release 114, Run with FASTXY 3.3t00, default parameters
ccctcttataagtagaggccttcaagagtcatcataccattgtgtagttgaagccaattgtattgtccttgacatgttcattaatttaatggaatctctttctcttcatcagtacatagaattaatattgattctgaagatctttgcctggcttggttttcccccatgggtgtcctcagagctccagctgccatgtgcaaactcatgtgtgctgggtctgcctgtggtacttcagtcactcaacataatggcccctgcctagccattcaaacacatcttcccttgtgaaaaatggatccactcactagacatattcattccttggctttt

SEQ ID NO: 81604 - DNA, 349 bp, Homo sapiens; identical to SEQ ID NO: 35536
  sig_peptide (103)...(238): this location contains the signal peptide sequence, MLLPVFLLYLSQDLADSRAPAHCSVNTDLHLKWGSLCVLSHFQVD, Run with SignalP
  misc_feature (26)...(129): similar to gi1827460 in the genepept database release 114, Run with FASTXY 3.3t00, default parameters

SEQ ID NO: 81605 - DNA, 366 bp, Homo sapiens
  sig_peptide (7)...(142): this location contains the signal peptide sequence, MEPLLQKVTEWFLASLIIYVVVLDVGRLTRFMLWSLTWLNVCPVL, Run with SignalP
  misc_feature (101)...(254): similar to gi11076 in the genepept database release 114, Run with FASTXY 3.3t00, default parameters
gttggtatggagcctttgctccagaaggtaactgaatggttcctagccagcctcattatttatgtggtagtgttggatgtgggtaggcttacaagatttatgctgtggtcccttacgtggcttaatgtgtgccctgtgctgcgggacatttgcttacgcatgcactggaacctgcagattgaggaagaaagcttgtgggaaactaccattcttcagcatgacatgcttacgtttagggatatcgacatgctacaccaagcagtgtacacagtgccactctctttctcctcacatccttgtctggtggaaggaataggaaatataataccataaacttgaataattcatacttctgtaattggggca

SEQ ID NO: 81606 - DNA, 349 bp, Homo sapiens
  sig_peptide (153)...(288): this location contains the signal peptide sequence, MLFPLCFTALSFSNFIDKKCISHQPYLRIGGKIINLDTNNKRPET, Run with SignalP
  misc_feature (69)...(20): similar to gi1764142 in the genepept database release 114, Run with FASTXY 3.3t00, default parameters
ataaaacagcagccactagtggagaggggtggtggtgagacaagaaggcacagagctctccggaggaagacaatcagaattggaataaattaggcttctaagacagctgctaagtagagagaagggatttgaatccatctcaattaaaagccatgttattccctttatgtttcactgcactgtccttctcaaattttatagacaagaaatgtatatcccaccagccctaccttagaatagggggaaaaataataaacttggatacaaacaacaagagaccagagacatcaagatagcaatcatggatagatctgacagtaggagtcggcaatctaattatggaaaactg

SEQ ID NO: 81607 - DNA, 422 bp, Homo sapiens; identical to SEQ ID NO: 37460
  sig_peptide (205)...(340): this location contains the signal peptide sequence, MMEWWTMGKGTLILRLVTLFNILKQRLFYLSWTRRQHNIAARSVG, Run with SignalP
  misc_feature (251)...(96): similar to gi338425 in the genepept database release 114, Run with FASTXY 3.3t00, default parameters

SEQ ID NO: 81608 - DNA, 2704 bp, Homo sapiens
  sig_peptide (544)...(679): this location contains the signal peptide sequence, MAGRGGSALLALCGALAACGWLLGAEAQEPGAPAAGMRRRRRLQQ, Run with SignalP
  misc_feature (544)...(1973): similar to gi29667 in the genepept database release 114, Run with FASTXY 3.3t00, default parameters
gaatattctctaattcttggtgtatcaagatggaaactggtaggcttggaatagatgtccctttaaaaggctccactaacaatacaagaatattttttccatacgcagtgacgtgggtgggtcatgggtgtctcaatgacagtaacgttcccgaaccccggaccttagctgtcatttcacctgcgtcgtcccggacgccatttggctgttgacgtggttccgagccagcaaataacgccagcagccctcccagatccacgccggcccgtctctccgccggccccctcctcgcagtggtttctcctgcagctcccctgggctccgcggccagtagtgcagcccgtggagccgcggctttgcccgtctcctctgggtggccccagtgcgcgggctgacactcattcagccggggaaggtgaggcgagtagaggctggtgcggaacttgccgcccccagcagcgccggcgggctaagcccagggccgggcagacaaaagaggccgcccgcgtaggaaggcacggccggcggcggcggagcgcagcgatggccgggcgagggggcagcgcgctgctggctctgtgcggggcactggctgcctgcgggtggctcctgggcgccgaagcccaggagcccggggcgcccgcggcgggcatgaggcggcgccggcggctgcagcaagaggacggcatctccttcgagtaccaccgctaccccgagctgcgcgaggcgctcgtgtccgtgtggctgcagtgcaccgccatcagcaggatttacacggtggggcgcagcttcgagggccgggagctcctggtcatcgagctgtccgacaaccctggcgtccatgagcctggtgagcctgaatttaaatacattgggaatatgcatgggaatgaggctgttggacgagaactgctcattttcttggcccagtacctatgcaacgaataccagaaggggaacgagacaattgtcaacctgatccacagtacccgcattcacatcatgccttccctgaacccagatggctttgagaaggcagcgtctcagcctggtgaactcaaggactggtttgtgggtcgaagcaatgcccagggaatagatctgaaccggaactttccagacctggataggatagtgtacgtgaatgagaaagaaggtggtccaaataatcatctgttgaaaaatatgaagaaaattgtggatcaaaacacaaagcttgctcctgagaccaaggctgtcattcattggattatggatattccttttgtgctttctgccaatctccatggaggagaccttgtggccaattatccatatgatgagacgcggagtggtagtgctcacgaatacagctcctccccagatgacgccattttccaaagcttggcccgggcatactcttctttcaacccggccatgtctgaccccaatcggccaccatgtcgcaagaatgatgatgacagcagctttgtagatggaaccaccaacggtggtgcttggtacagcgtacctggagggatgcaagacttcaattaccttagcagcaactgttttgagatcaccgtggagcttagctgtgagaagttcccacctgaagagactctgaagacctactgggaggataacaaaaactccctcattagctaccttgagcagatacaccgaggagttaaaggatttgtccgagaccttcaaggtaacccaattgcgaatgccaccatctccgtggaaggaatagaccacgatgttacatccgcaaaggatggtgattactggagattgcttatacctggaaactataaacttacagcctcagctccaggctatctggcaataacaaagaaagtggcagttccttacagccctgctgctggggttgattttgaactggagtcattttctgaaaggaaagaagaggagaaggaagaattgatggaatggtggaaaatgatgtcagaaactttaaatttttaaaaaggcttctagttagctgctttaaatctatctatataatgtagtatgatgtaatgtggtcttttttttagattttgtgcagttaatacttaacattgatttattttttaatcatttaaatattaatcaactttccttaaaataaatagcctcttaggtaaaaatataagaacttgatatatttcattctcttatatagtattcattttcctacctatattacacaaaaaagtatagaaaagatttaagtaattttgccatcctaggcttaaatgcaatattcctggtattatttacaatgcagaattttttgagtaattctagctttcaaaaattagtgaagttcttttactgtaattggtgacaatgtcacataatgaatgctattgaaaaggttaacagatacagctcggagttgtgagcactctactgcaagacttaaatagttcagtataaattgtcgtttttttcttgtgctgactaactataagcatgatcttgttaatgcatttttgatgggaagaaaaggtacatgtttacaaagaggttttatgaaaagaataaaaattgacttcttgcttgtacatataggagcaatactattatattatgtagtccgttaacactacttaaaagtttagggttttctcttggttgtagagtggcccagaattgcattctgaatgaataaaggttaaaaaaaaatccccagtgcatgttaaaaaaaaaa

SEQ ID NO: 81609 - DNA, 1704 bp, Homo sapiens
  sig_peptide (516)...(651): this location contains the signal peptide sequence, MHWVWMLSCCLSHLTLASPCPCHSWFLLMYIKGGGGRGFSGAIDK, Run with SignalP
  misc_feature (654)...(525): similar to gi152387 in the genepept database release 114, Run with FASTXY 3.3t00, default parameters
gcattcttagctgattgaaatgagacaaagggaataaatggctgtatttgtgctaagagcaaaggatgcatcttcccacagcctcctcgctttactctgccattggtagcttaaagactttctttttccttgtggtctcccttttttcaaaattgaagttgggttggctctttgtgaacctctcatccccacagcagaatcaccaacactctccgcttcccccagcacacacacatacaacacagatcatttcccagttagatccgcaggaagtaggttggtgggggtggatgtagctgcagaaagcatgcacaactttgtgaaagaggccctgccttgtgcatgtccatagtgaggctacagatggcttattgtatataattacaatgtaaatagctttttatttcctaagaaataatttaatgtttagtaaaaaagaaaacagaaaaaagaaagatgcgtgtgttggcttacgcactggccctcagagctgaccaacccgccaggcctgctcaatgcattgggtttggatgctctcctgttgtctgtcacacttaactcttgcatctccttgtccatgccatagctggtttctacttatgtatataaaggggggtggggggaggggcttctctggggcaattgataaaggaaggactctagtgacatcatagaacatggcagtcgtttttgttccaagaatgatatgaaaggtgaagaagaggcccactagaggcttcatactgagacccagatgggggaaaacagcttcctctctaaaaggaaaaacttgatatttatcagtctgagaaaatatttttttctaaagaaggcagtcagtggatcttaaaatgacaatctgtttttaaattggattctatgaaaatgcataatgcttatggtgaattctcaggctattctgagctcagaaaagtcccctgggcactaggtaaagcccagtgaatgtctcttggcatgggaggagttaaagaggttggaagggaagaggcatttgtggaattatgagttcatgcaaaactctccaggccaagtaggggtctagcctttaatgatattagtcaaaggcaattttagcaaagctgtgctatttgcttgtcagatgtacacaacttccttaaagtcaaatgtctgccttcagttcccttaaggtagttcttgcctctggggtgagtggctttcaaagccttttagcttttccagcacctcagccccttcacacatttacacataccaatttttttcaatagggtcacgttaagccatgctgtaagcattgtttttattttcaggcttagcctgagcacacttatttttgaaaatgatataatgtatatatatgggaggaaaggccacattttgtacctgttaatttttgtgggatgttgttcccattcttctttgtgagacagagagaatgtgatatagagaaatctggctggctacagtgtagatcagtattaggaatatttctaaagatcctgcttttttgtttcaagggttaaatggggcagacaattgcaatacttgtactaaacactggaatacaaatgcatgactcatatctatatatacagtatatgtacatatactgttcttggttttattgttccacttgaatatttctactgtaaaaaaaagacagtggttttgaaattgttgaaaataaatgtatttttgtacatc

SEQ ID NO: 81610 - DNA, 338 bp, Homo sapiens
  sig_peptide (184)...(319): this location contains the signal peptide sequence, MLIQFTFFFPISQRFWFCLLFFFPQTFKCMKFYSLIEVREGVCIH, Run with SignalP
  misc_feature (187)...(273): similar to gi14391 in the genepept database release 114, Run with FASTXY 3.3t00, default parameters
ttttttttaaagaaaatcccagtgtgggtaaaaatctaacaatgaaatattaaattgattacctgcatagcactgttctaattaataaacagtttctataaacatcaaggaacatcacctagagcattaatcaggtaccaaacaatttaaccattgacttcacacatatgcatatgtaggtggatgctcatacagtttaccttcttttttcccatttcccagagattttggttttgtttgttgttttttttcccccaaacctttaagtgtatgaaattctattctttgattgaagtcagggaaggcgtatgcattcaccagagaagtcaatttgttca

SEQ ID NO: 81611 - DNA, 401 bp, Homo sapiens
  sig_peptide (259)...(124): this location contains the signal peptide sequence, MPTLLQVMSWMLSFGTQTLQLESCTCALHIVGAWKVPYPLFSRVL, Run with SignalP
  misc_feature (103)...(168): similar to gi2104860 in the genepept database release 114, Run with FASTXY 3.3t00, default parameters
tttgagtctactaacagtagactattagttagggagaacttactgaatgctcactctgtgcgagactctgtcctgaatactttttcctgtgagatagatgtgcttagtattttcacttggcagatgaggaccctggagaacaaagggtatggaactttccaggcccccacaatgtgtaaagcacaagtgcaggattcaagctgcagagtctgagtcccaaaggaaagcatccaggacattacctggagcagagtgggcatggagtaagtgacagtggtgagttttggttattctgtctccacatttaaccaggcttcgctgtagcctaaacatcccaccttcttggtgatttcatacacacattcacctcttgttgaaaagaaagcgtgagaacctaagaa

SEQ ID NO: 81612 - DNA, 631 bp, Homo sapiens
  sig_peptide (460)...(595): this location contains the signal peptide sequence, MPACCYRPCLLQPISLLNILLLLMRKPSQEVINDTPKAGKWLSRY, Run with SignalP
  misc_feature (296)...(414): similar to gi1334275 in the genepept database release 114, Run with FASTXY 3.3t00, default parameters
aaatcagtgactatcctgggatactttattatgaagggaaagaaactaatattgccaggtcctaacttgttcggtcctggactaactatgtgggatgccacaggtcaggcagtctttgaagtaaccttatgaagtaggaattatatcgattttatataagagaaaactgaagccaacgaggtaaaataactcgtcccaagtaatgaagcttgcctaggtcccagccaggcttagtcaagccctggtccttctgatttcaaagcccttgctgcttctctgtattgcacactggttctctctgttgcacactgagcaacattgtctttttaaaatctattatgaaataaagttaaacagcttcataattatcattgtcattatttttctttttagctactattttttggtctgtcctgtggaaacagcttgcaatcctcacaagaacctcgtaatgtgaatatgccagcgtgttgctacagaccgtgcttacttcagccaatttctctgctgaatatcctccttttactgatgaggaaaccaagtcaagaagtcataaatgacacacccaaggctgggaagtggttgagcaggtatttagactcaggtctattttactcctgtgcctgtgggc

SEQ ID NO: 81613 - DNA, 895 bp, Homo sapiens
  sig_peptide (212)...(347): this location contains the signal peptide sequence, MIRIISFAQICVSSSLLHVALVGYFNWRLKILLYRWLIHMANKLL, Run with SignalP
  misc_feature (171)...(104): similar to gi790775 in the genepept database release 114, Run with FASTXY 3.3t00, default parameters
tttgaggagcaccccccaaccaaaaaaagaactcttgtggagcgttttattcgccggcgcgcggcagcttcaagggagggcatgtgacctgtaaattcatatttgagaatccgtgtagttaatgccacagaaactaatgagatcacttgaggggtgtgctttgagcaactatcactgtgtagcaaagtaccctaaaacctggtaccttaaaatgataagaatcatttcttttgctcaaatatgtgtaagctcatctctgcttcatgtggcattagtaggctatttcaactggaggctgaagattctactttacagatggctcatacacatggctaataagctgttgctgactattaggagctcagccagggctgtggtctaagggccttgattctcctttttatgggcttctcctcaggctgcttagtctaacaacaaggtgggggttttcaagaatgagcaaataaagagagcaaggcagaggcacatgacattttgtgaaacatagccattaatgatatatgaagtcatatatcatcaccttagcctcattctgttgggcaagacagttacaaaagcccaaccaggttcaggtagaggaagcagactccaccatcccacaggtacagtggtagggtgacatgataaggggagcttatgggaagcgagggactgttggactttgtgagtcttggagaaaggagggaaccttctttttcatgtggggagggattactgcagcgggagtctgcccccttgctaaaacaactcatatcacttccatgtggaaaaaaacacacctctcttcaagaatcctaaagccttatcccatcaagctttggattgagtcctgccccacaagtttataacatcattctacatttagttgcggggg

SEQ ID NO: 81614 - DNA, 337 bp, Homo sapiens
  sig_peptide (23)...(158): this location contains the signal peptide sequence, MWLFIASKCIFLLIVPNFIFVFWRKVFSHDRLNIAYSFELSSKHI, Run with SignalP
  misc_feature (291)...(230): similar to gi2351979 in the genepept database release 114, Run with FASTXY 3.3t00, default parameters
gacagaaacagtgcttgctttcatgtggcttttcattgcctcaaaatgtatcttcctcttaattgttcctaattttatctttgttttctggagaaaagttttttcacatgacaggctaaatattgcctattcgtttgaactttcctcaaagcacatctttattttattgatctaaagaatactgtacttaaagttcatacaagatgttcatcttacgtgcgcattctcatcgacagaatttgtacatccatgtcgcttcttattctgtgcaaattctttatatctccctgaacgcactctttggcctaatttagctacataagaccctccctactct

SEQ ID NO: 81615 - DNA, 567 bp, Homo sapiens
  sig_peptide (142)...(277): this location contains the signal peptide sequence, MQVKFILKYYISFLWKTVTANGETVNMSLLYIFTTMEMRKKSEVG, Run with SignalP
  misc_feature (184)...(271): similar to gi808680 in the genepept database release 114, Run with FASTXY 3.3t00, default parameters
gtcagtcaacaaatacctacccaagataaaagaggaattacttggatgtccaacatgcaatttaaaaaacaagataacccaaacatagctgttttggctgccgtcatcttagcacacaaaattttgaaaacattttaattcatgcaagtcaagttcattcttaaatattacatttcattcctctggaaaactgtaacagccaatggagaaacagtaaacatgtctcttctctacattttcactactatggaaatgagaaagaaaagtgaagtaggactgcacttacccatttccattctcaaacccttctttacaatagtgctagatgaaaagattgttacaggccaggtgtggggtggggagcttttcctgttgttttgcaaagattaattttcagaactaaaactgggttttcaattttgctaaactgaatgagcctttttaagaagctgtcctctgctctaaaacttaatttacaaggtatcatgacatattcatttctgagaaatgcagtaacacgcagcagaaggaaccagttaaatttcttctatcatgtcgacgcggccg

SEQ ID NO: 81616 - DNA, 315 bp, Homo sapiens; identical to SEQ ID NO: 40026
  sig_peptide (116)...(251): this location contains the signal peptide sequence, MLLGVRAVPLCSAWQGAVGLVSLTISICKHGLSFQQNLVPGKSNV, Run with SignalP
  misc_feature (258)...(219): similar to gi3377945 in the genepept database release 114, Run with FASTXY 3.3t00, default parameters

SEQ ID NO: 81617 - DNA, 459 bp, Homo sapiens
  misc_feature (1)...(459): n = a,t,c or g
  sig_peptide (34)...(169): this location contains the signal peptide sequence, MRIVRRMCMWSAGPAPATVCAVMVAAPKSPQSPPRWACVYSLIGC, Run with SignalP
  misc_feature (379)...(412): similar to gi3861441 in the genepept database release 114, Run with FASTXY 3.3t00, default parameters
cctgaattcctcgactttcccttttgggctcacatgagaattgttaggagaatgtgcatgtggagtgcgggcccagcacctgctaccgtctgcgctgtaatggtggctgctcctaagagtcctcagtctcctccccgttgggcttgtgtgtacagccttatcggttgtcattcttcggatccattctcagtttatttttctggtattagctggagggacatctccttaagcctgtactctatggctcaggagtctcaaaaccagtccattttgaagtgagagtatccctaataaaaaggtgagtgtccccactcctgtgccttgttttttttgtttgnnnnnnnnnnngaaacggagtctcgttttgtcgcccatgccggaagtgcggaaggcagtggtaaagggaggtggcggcagcggttagcggactcaagtctaaaccgggcgtcgacgcggccg

SEQ ID NO: 81618 - DNA, 818 bp, Homo sapiens
  sig_peptide (119)...(254): this location contains the signal peptide sequence, MWSWHVQLQVSAPLHHLLCLHFPPAHRIYMPFPSPKRAPAMLNKG, Run with SignalP
  misc_feature (82)...(240): similar to gi1314265 in the genepept database release 114, Run with FASTXY 3.3t00, default parameters
gcaacctggttggatttaaggtggaggtcttcctctctccaggtggctgccctcatctctacccccaccccaatcccatgcattctcctgccctcctgctttgggcaagacccgggcgatgtggagttggcatgtccagttgcaggtatcagcaccactgcaccatctcctctgccttcacttcccaccagcacacagaatttatatgcccttcccaagtccaaaaagggcccctgccatgctaaacaaaggtattcatatgcaaggcatgagctctgtctcatggaagggagaggccaagttctctttccaccatcagagagtagcgttcaacatcatttatacaagacaggcttttgcccttttagtcttgctgaactagaatgagggatttgtgtagtcgaaagtcaagctgatcattgtcaagtttcgtggaagtggaacctgaaggaaggttaggtggagactgcagagagggttagcgtcctgccttaccacaaggtaagtctagaagagggtggggaagggagttcagaattcttcattcatggagtgacctgccttggtcatccttttatcttccagtcagaggggtcatcagtcaagagctggccaggctgggtgtgggggctcatgtctgtaatcctagcactttgggagggcaaggcgggtggatcatctgaggtcaggagttcgagaccagcctgaccaatctggtgaaaccctgtctctattaaaaatacaaaaatcagctgggggtgatggcgggcacctgtaatcccagctacttgggatgctgagacaagagaattgctttg

SEQ ID NO: 81619 - DNA, 346 bp, Homo sapiens
  sig_peptide (198)...(333): this location contains the signal peptide sequence, MVTRTLVTLNILGTMRLGYLPPVTYWPCDSDVKRYLCLAFFGWRH, Run with SignalP
  misc_feature (251)...(142): similar to gi414440 in the genepept database release 114, Run with FASTXY 3.3t00, default parameters
tgtccttcaagtcgcccacttgggtctctttcaagcatgctttcatttctatcctgttctaaagccttttaaaataaacttccactcttgctctgaaacttgccttggtctctttttctgccttatgcccctcagtcaaattctttcttctgaggaggcaagaattgaggttgctgcagacccatacagattcaccaatggtaactcggacacttgttacccttaacatattaggtaccatgagactcggttatttgccaccggtaacatattggccatgtgactcagatgttaagagatatctatgccttgccttctttggttggaggcatctgacccccgtgtg

SEQ ID NO: 81620 - DNA, 640 bp, Homo sapiens
  sig_peptide (171)...(306): this location contains the signal peptide sequence, MSTIFTFLYQPPIILTVLSSTYFINPISTAVHVIPVTDRSVECEL, Run with SignalP
  misc_feature (579)...(512): similar to gi216410 in the genepept database release 114, Run with FASTXY 3.3t00, default parameters
catctggtagagtccaagtttgttttcacagttatttttccacagtctgtttaaggtattaggaggacttttataaaccgagtgtttttcaggttacttcagagaggagtctccttccacccaaaaaaactaaccaaattattttatcataaagaggtaatcccatttttatgtccacaatttttacatttttgtatcagccaccaataattttgactgttttgtcaagtacatatttcatcaatcctatttccacagccgtacatgtgatcccagtgactgatagatctgtagaatgtgaactcacatttaaagtttattttgggaaggcatatatgccttttgatgacacacacaccaaaatatataagagctgtgcatggtaaacccacagtagaagggaaaaagtaatgctttctggtatacttcagaggctccatttgaagatgtgcgttgatgtttccttgattattttgaatgaggagtaggcggtaatatttaacaggtagcatacgtatctaagcatatagtaaatattactagtacttgtgtgccatgaggcactaatacataggtgaaacaaaaatatttttagttctaaaaaattctctagatatttatggatggttaggcaataggg

SEQ ID NO: 81621 - DNA, 710 bp, Homo sapiens; identical to SEQ ID NO: 76609
  sig_peptide (313)...(448): this location contains the signal peptide sequence, MARSARTFLLSSTWHLTKFPMSAGYFSPCSWLAAVIRLIQRVLMF, Run with SignalP
  misc_feature (570)...(283): similar to gi2983472 in the genepept database release 114, Run with FASTXY 3.3t00, default parameters

SEQ ID NO: 81622 - DNA, 405 bp, Homo sapiens
  misc_feature (1)...(405): n = a,t,c or g
  sig_peptide (254)...(389): this location contains the signal peptide sequence, MWYRISFPTTVLAHSCLLNVSQGIKNGMCYTIIKKITVGTLEELT, Run with SignalP
  misc_feature (99)...(15): similar to gi499323 in the genepept database release 114, Run with FASTXY 3.3t00, default parameters
ggcacgagggagtgtgcttactccatttctttagaattcggagccatggtgggtttttaaataagtgttttgaggcttcctttcctattcctacagtcatattttataataattattaaaataccgtatgtgtaatgtttctcaaacgtgacttggttcaatttttgaaacatacttaatttttgctcacaagcaaaaatttttgattggaatgtttcaaactataagcaacatgtaggcagagacattgntgatgtggtatcgtatctcatttcctacaacagtcctggcacacagttgcttactgaatgttagccagggaattaaaaatggcatgtgttatacaataattaagaaaataacagttgggactcttgaagaactcacgactttggtacatatagg

SEQ ID NO: 81623 - DNA, 4175 bp, Homo sapiens
  sig_peptide (2743)...(2608): this location contains the signal peptide sequence, MIETWLWLLLLNVGGTGQWSGPTFRRENVLPAAHIGPKYGPLLPS, Run with SignalP
  misc_feature (3868)...(3960): similar to gi1345536 in the genepept database release 114, Run with FASTXY 3.3t00, default parameters
tttcgtgccgagcccagctgatgcaacctggctggactcgcgtgacagttcccggcacgcggcggcgacggtgacccaggaaggggctctggtgccgggctgagcgggggaagcaggggtagcggagccatgggggacgctcccagccctgaagagaaactgcaccttatcacccggaacctgcaggaggttctgggggaagagaagctgaaggagatactgaaggagcgggaacttaaaatttactggggaacggcaaccacgggcaaaccacatgtggcttactttgtgcccatgtcaaagattgcagacttcttaaaggcagggtgtgaggtaacaattctgtttgcggacctccacgcatacctggataacatgaaagccccatgggaacttctagaactccgagtcagttactatgagaatgtgatcaaagcaatgctggagagcattggtgtgcccttggagaagctcaagttcatcaaaggcactgattaccagctcagcaaagagtacacactagatgtgtacagactctcctccgtggtcacacagcacgattccaagaaggctggagctgaggtggtaaagcaggtggagcaccctttgctgagtggcctcttataccccggactgcaggctttggatgaagagtatttaaaagtagatgcccaatttggaggcattgatcagagaaagattttcacctttgcagagaagtacctccctgcacttggctattcaaaacgggtccatctgatgaatcctatggttccaggattaacaggcagcaaaatgagctcttcagaagaggagtccaagattgatctccttgatcggaaggaggatgtgaagaaaaaactgaagaaggccttctgtgagccaggaaatgtggagaacaatggggttctgtccttcatcaagcatgtcctttttccccttaagtccgagtttgtgatcctacgagatgagaaatggggtggaaacaaaacctacacagcttacgtggacctggaaaaggactttgctgctgaggttgtacatcctggagacctgaagaattctgttgaagtcgcactgaacaagttgctggatccaatccgggaaaagtttaatacccctgccctgaaaaaactggccagcgctgcctacccagatccctcaaagcagaagccaatggccaaaggccctgccaagaattcagaaccagaggaggtcatcccatcccggctggatatccgtgtggggaaaatcatcactgtggagaagcacccagatgcagacagcctgtatgtagagaagattgacgtgggggaagctgaaccacggactgtggtgagcggcctggtacagttcgtgcccaaggaggaactgcaggacaggctggtagtggtgctgtgcaacctgaaaccccagaagatgagaggagtcgagtcccaaggcatgcttctgtgtgcttctatagaagggataaaccgccaggttgaacctctggaccctccggcaggctctgctcctggtgagcacgtgtttgtgaagggctatgaaaagggccaaccagatgaggagctcaagcccaagaagaaagtcttcgagaagttgcaggctgacttcaaaatttctgaggagtgcatcgcacagtggaagcaaaccaacttcatgaccaagctgggctccatttcctgtaaatcgctgaaaggggggaacattagctagccagcccagcatcttccccccttcttccaccactgagtcatctgctgtctcttcagtctgctccatccatcacccatttacccatctctcaggacacggaagcagcgggtttggactctttattcggtgcagaactcggcaaggggcagcttaccctccccagaacccaggatcatcctgtctggctgcagtgagagaccaacccctaacaagggctgggccacagcagggagtccagccctaccttcttcccttggcagctggagaaatctggtttcaatataactcatttaaaaatttatgccacagtccttataattggaaaaatactggtgcccaggttttcttggagttatccaagcagctgcgcccctagctgggatctggtacctggactaggctaattacagcttctccccaacaggaaactgtgggatttgaaaaggaaagggaagggaaaacagagaacctagtggtctaccaagtggttggcaactttcccaatgtctgcttactctgaggcttggcactgggggccagggcctgccccagggctcctggaatttcccttgatccagctaggctgggacactccctaaatcagctgcgtgttgttagcatcaggcagaatgaatggcagagagtgattctgtcttcatagagggtggggtacttctccataaggcatctcagtcaaatccccatcactgtcataaattcaaataaaatgtctgaacaagggtgtctggatgtgagctggaccatctcaggagagaacacaagtgtgaggcagctgctggcccctcacctagtctggggttcctttaccctgtaatggggggtggggggtagaagatggacaagacaccttaacagtccctttggcagtactaggcagaagaggcccatacttgggtccaatgtgtgcagcaggcaaaacattttcccttctaaatgtgggcccagaccactgccctgtccccccaacattaagaagcagtagccacagccaagtttcaatcatttaattaacatctttaaatgaaacacagttttcttcatgtgtctcactcaggcttcagggcagagggaatggatttttagacatatcaaagactcaaaaatttaaagaaatatatatatgtatatatatacttctaacattttatggaaattaaaaatcagaggcttttggtctctccatttactctaggtcaagctcatttaccccagaggacaaagaagggctgcctcttctagaccctcccttctcctttgtcctctgtcccacccagcagggaaaccaagctcagaagatcctaacaggatagagttccagtaatgttggaggagggagagggaaagagaagtcaggttctctcccacctccagccattcccaggttgctgccagggcctggtttcatgcagctttgacccagtcctggatcctagggggtggggtagatcaggagctctgagcagaacagtgctcactgattatcctctttccccaactcagtgggcaggtgcagcgtacacccagcagcactctccactgcccacaggcaagggaagaatattgattgattagctacaaggagaagacagtagtgactagtggaaaacaccctggagagggccagaggaacctggctctcaccacatcccctctgttcccagccttggtgagggggcggggaggtcatgtcaacctctctccttggtggtgaagctaaaagcaaggttccttgccagactcaagcccaagtcactgttaaggaaagaggatcaagaaagaagcggtggccctggggggcagccacgctgctgtggacccacaggggccaatggggaagccagcttgcctagacaggtggcacaggctgaaaatagaaaggttaacattcccggagagtacagtaagagaggctgatacctaggggaccaccacccagcctgccctagaagcactgggtgcccctcattgactagagaagacttgagtaaaatgcacctgtggcttcccatccttgtcactcagcgttagctgcccccagtggaaccacctgtgctgaaaggcagctgcagaaaggacatgcaccgaaatgaggagagagaaaggtcagagaatgaagtgtggagggccaggcctgggcccactgctcaaggaagctccccccctccagatgctcccttccatccacctcctcagtgcttgctcagcccaaaggctcctgcctctgaagtgctgggggcccacccaccccagtgtggtcaaggaggcaaggggcaggtgcttgacactgccaagtgccccgagatgactctactgctcacccatttctttgggccctggcagtctcctacttgtccccagcatggagcacctggcagaactggaaggcaggagggtggttggtgagttgaggcacaggaaggccaatcccctctcgtgcc

SEQ ID NO: 81624 - DNA, 412 bp, Homo sapiens
  sig_peptide (145)...(280): this location contains the signal peptide sequence, MSLTIITMIYTLFNEISLLIMCLEVTAMANCYKISKYRFSIYEFI, Run with SignalP
  misc_feature (237)...(44): similar to gi2950471 in the genepept database release 114, Run with FASTXY 3.3t00, default parameters
ggcacgagggggcaaatactctggatcagtgcttctgaaactctccaattctttttttattttttccaaactgtcttggagcaatacttttggaaataactgaacttgaacagtaggtatcttgctgcatgtgcaaatcaccatatgagtttgacaataatcacaatgatctatactttgttcaatgagattagtcttctgatcatgtgcttggaagtcacagcaatggcaaattgctataaaatttctaaatatagattttcaatttatgaatttatctttccacaggctagtaaccaagtgttcaccagccaacatctgtctgtagactacactttgagtagacaggctaagtggccagtaaaatacatgtaacccaaagaatgggagataaactccaagataattgagg

SEQ ID NO: 81625 - DNA, 343 bp, Homo sapiens
  sig_peptide (151)...(286): this location contains the signal peptide sequence, MKACADSHTQNLSLFLSLSFFLSLSLKNWVGWSPMCLLMSFKVGQ, Run with SignalP
  misc_feature (232)...(168): similar to gi746442 in the genepept database release 114, Run with FASTXY 3.3t00, default parameters
ggcacgaggacacctctgaaacgcagaaccagctcctcactttgaggaacagcaattgcagtctctcaccacccctgagagttgtagcatcagtacaactgagttttacatattggaaaggatttttaaaattcaggcatttgtaagaaaatgaaggcatgtgcagactcacacacacaaaatctctctctctttctttctctgtctttctttctctctctgtctctaaaaaactgggtaggatggagcccaatgtgtctgttaatgagtttcaaagttggacaaatgccaacgggcagagaattttgaccaggagtgtgaaggaaacgagaaccacaccccg

SEQ ID NO: 81626 - DNA, 342 bp, Homo sapiens
  sig_peptide (168)...(303): this location contains the signal peptide sequence, MKSRQQIIYLFLIIVFPGVYVHQSIKKFVRKIYYLRDFMMSLKTL, Run with SignalP
  misc_feature (179)...(242): similar to gi1065522 in the genepept database release 114, Run with FASTXY 3.3t00, default parameters
ggcacgagaaacaagctatttttacaatcagcatcatgcacactaattaaagaatgaaaatattaatatgctgattaatgttaggttagaatcaatccttgacaataagactaggcatggaatataaaatgcaatgaaaatccaaagtacatgatgatttggtctgcatgaaatcccgtcaacagattatatatttattcttgattattgtatttcctggagtgtatgtgcatcagtctattaaaaaatttgtcaggaaaatatattatttgagggattttatgatgtcattgaaaaccttagaataataagaccagtaccagtgacttctgtatattttct

SEQ ID NO: 81627 - DNA, 1703 bp, Homo sapiens; identical to SEQ ID NO: 77348
  misc_feature (1)...(1703): n = a,t,c or g
  sig_peptide (1489)...(1624): this location contains the signal peptide sequence, MRFLLLWFILRGRQLVPLRPRRSPLPDTNAPLPGLGGGDGSTQTP, Run with SignalP
  misc_feature (1521)...(304): similar to gi3043694 in the genepept database release 114, Run with FASTXY 3.3t00, default parameters

SEQ ID NO: 81628 - DNA, 558 bp, Homo sapiens
  sig_peptide (209)...(344): this location contains the signal peptide sequence, MAAPQTPFQGVVCIVFPFLLLAAKWFLSPLLTPLSSQGYYGLLLL, Run with SignalP
  misc_feature (397)...(496): similar to gi1591302 in the genepept database release 114, Run with FASTXY 3.3t00, default parameters
tttgataacagcttagcagctacgccagcttggcacgagggcttctgacccccagaagtcctaccttttcccctgctcagtccttatctattttaggcatttagggaaaacaccctaatcagctgctggtggctgagatccaagagaaactcagcttcctctttagtgggtgcatcagggttggggctccttaggagccacctggcatatggcagccccccaaacaccttttcagggggtagtttgcatcgtcttccccttcttgcttctggctgcaaagtggttcctatcacctctcctcacacccttaagttctcaaggttactatgggctactcctgttgcggtttaggtttgggttgttgacttgggccagaggttgccagtttgtggatgtgtgtgtgggctgcccatggcctggaggctggcacccacccatgtttgggttgtgggcaagtgttctctggacttgattaagggcaaaaacggagcagggatttttcaaatttggccttaactgttcacaggggcctcagctgggttgtctgctcttttcctt

SEQ ID NO: 81629 - DNA, 670 bp, Homo sapiens
  sig_peptide (202)...(337): this location contains the signal peptide sequence, MSLACLCLMVRSGLLSKTKHPCPPHTKTYSRGVVRTKYIQDEGES, Run with SignalP
  misc_feature (175)...(96): similar to gi155471 in the genepept database release 114, Run with FASTXY 3.3t00, default parameters
ggcacgagctggaagagctaggacacctctggctgtctggtcagagtttcttttctaaaagatgctttaaaattgccccacaattataagctgaaagggcaaaaatgaagcatcactctggaaaaactggataatccagtacaattagaattctggtcctgataatgggtgcgttttgcttccgtgcttgcacctatttttatgagtctggcctgtctgtgcctaatggtcaggtcagggctactcagtaaaaccaaacatccctgccctccacacactaaaacatactctcggggagtggtaagaacaaaatatatccaagatgagggtgagtcttccataactcctcgagtgactagagcttctattttggcataagctacttatcttttaaatatgataaccatactaagcttttctaaaagcctatcactccaaggagcctcaaaaattctgtgttgcagatggggttatgggggaagaaacatggatacaactcactttacttaaacttatggaattggacttatatgttgggatcagcgttttataataatttcccttattcagccatgtatcctgcagaaatatataataatcatttctatacattaatccaaatactatagcccacaaaccattttccagaactaagctattaaaaaaaaaa

SEQ ID NO: 81630 - DNA, 340 bp, Homo sapiens
  sig_peptide (185)...(320): this location contains the signal peptide sequence, MPFLLFLSVFHRQLSGDMSLSMCITQHSASLASSVVHVAYSFLGK, Run with SignalP
  misc_feature (227)...(94): similar to gi4539602 in the genepept database release 114, Run with FASTXY 3.3t00, default parameters
ggcacgagggccccttcccagtagacagtctccttccaccaccagccttggagattagactttattgaggaaagccagcaacttttcatccaacgcctcctgaggactgtattgctctagatgctggagttagtgatgaatgagacagtccttgcccttcaggagcttctgatccagtgaggaaatgcccttccttctctttctttcggtctttcatagacaactttcaggagacatgtctctctctatgtgtattactcagcattcagcctcccttgcttcatccgtggtacatgttgcttattctttccttgggaagatgcatgctctcttccagacc

SEQ ID NO: 81631 - DNA, 323 bp, Homo sapiens
  sig_peptide (12)...(147): this location contains the signal peptide sequence, MFTVILMSQPKSYFLFFPLLEFYINQVSDTSSIMSGLTAFMAFTE, Run with SignalP
  misc_feature (263)...(195): similar to gi6010089 in the genepept database release 114, Run with FASTXY 3.3t00, default parameters
ggcacgagccaatgtttactgtcattctaatgtctcaacctaagagttattttttattctttcccctcctggaattttatatcaaccaagtatcagatacctcctctattatgtctggattgacagctttcatggcctttactgaattaatctaaataaattaattatttagcctcccagctggttttcttacctccctataagatggagaatgagaactacatcacatgtgagaaaaggaattaagtaaacatatttttgaatggttcgttttgggactgaatataaggtgagctagagagattccggactgtccagtctgg

SEQ ID NO: 81632 - DNA, 368 bp, Homo sapiens
  sig_peptide (141)...(276): this location contains the signal peptide sequence, MKRCGRLWHLVKISSHLWMLPCLTTAASHPGQAHLLHKYIPLTPQ, Run with SignalP
  misc_feature (183)...(284): similar to gi2447187 in the genepept database release 114, Run with FASTXY 3.3t00, default parameters
ggcacgagccaagttactttcatggtcttaccctctgcttttcccctttttgcaaaaaaccactggccaaatccgaaccattgcccttgtttcccccacgttctctctcagatctttgtctcgaagggaaaacatagtggatgaaaaggtgtggcaggctttggcaccttgttaaaatttctagtcatctgtggatgttaccttgcttgaccacagcagccagtcaccctggccaggcccacttactgcataaatatataccgctcaccccacagagccatatatatccagaccaaacgctgcaaggggagtttatccgagagcagaaatcacaatcacaggaggattcagagaaaaggtaacgcgag

SEQ ID NO: 81633 - DNA, 662 bp, Homo sapiens
  sig_peptide (55)...(190): this location contains the signal peptide sequence, MVTCSGKGALVTVAGCRALVFFLPALSSRPCALNPKEPILPLCLA, Run with SignalP
  misc_feature (186)...(79): similar to gi2599431 in the genepept database release 114, Run with FASTXY 3.3t00, default parameters
ggcacgagaggacagcttttgctggggattgagagcaccagatggtcaccagtgatggtcacctgcagcggcaagggtgcactggtcacagttgctggttgcagggccctggtcttcttcctgccagctctgtcctctcggccatgtgcactcaacccaaaagaacccattctgcctctgtgtctggccccagaatatgatgtctacacctcctgcctggtgtccctatacaacagattcttgactgtgggcactaaggcggctgctcatcaactctccgtcagccaaagaggggcttcaattcagtggattttaacccaaccatgccactcactttgctttttcagtcacagttgactgccatttctcacagaggtcacccatggtttgtagtgacactgggccccgcacccactgaagaccacatctgaggcactgagcaccatcctggctggcaaatctgcttcccctgtctgtggggggtgagggagacatcagcctcgtgttttgtgtctgtaatatcaccgccgtttactgagtgcctcctacgaaccaggcaccgggccgggtgctttacacgaaatgttctatgtaacacttgcagcagaactgggtagcccataacctaccaaagggccaaacgagctttagaaaaagggagt

SEQ ID NO: 81634 - DNA, 658 bp, Homo sapiens
  sig_peptide (127)...(262): this location contains the signal peptide sequence, MFCTFNLRLKALRSVGLFLILLGAPVPDTEQALKRCDTWSSYSLG, Run with SignalP
  misc_feature (328)...(255): similar to gi2854113 in the genepept database release 114, Run with FASTXY 3.3t00, default parameters
ggcacgagagtgttaattccttaagatattctgatgacaatgtcaacccctttaaggtgattttgctgttacctataaaattatcacttgtttgtgaattgattataatggcatattttcaggagtatgttttgtacttttaatttgagattaaaagccctaagaagtgtgggtctttttcttattcttcttggtgctcctgtgcctgacacagagcaggcccttaaaagatgtgatacctggagttcttattcacttggcctcagcagagttggccctttcctgggtgtaggaaactgctgaggactaggagctggggaggcagaaaaggcaatgatgttctgaatgtttctgccactggaaggaaatcaggccctctgagacagacaatgattggatgtgctgcacgacaggaggtctgagtactggcagcatccccattacctggcaccttgctggaaatgccgaatctcacaagggctccagattactgaatcctaccctggagtttatcaaaatccttacagaatttatttgcccttttacctgagaaattgccgatccttagggaaaaaaattgggaacttcctcaccttttcgaatccaaaggctggaatctcccaggccttagtaaaggggtgtgcatccatcatacgcc

SEQ ID NO: 81635 - DNA, 381 bp, Homo sapiens
  sig_peptide (64)...(199): this location contains the signal peptide sequence, MLMSATALAILHLMFYFTMSFIIKSPTCPCSYIMTHFRALLKTFL, Run with SignalP
  misc_feature (175)...(112): similar to gi49562 in the genepept database release 114, Run with FASTXY 3.3t00, default parameters
tcattatagccaataagtccctacaagccaaaacttctgcactagctgcttaaatgttattatatgctgatgagtgccactgcactagccattttacatctgatgttctactttacaatgtcttttataattaagtctcccacatgtccttgctcttacattatgacacattttcgagccctgctcaagacattcttacttattaggtatctactgcttccatatagcaagattctaattaatcaccactagttgtgtataccaaatacgcatcctttaagacaatacagctcttaatagaacaataattatagttattctaatatttatacccatcatataacgatttctcagaaccaaactcttacaagtagaattctt

SEQ ID NO: 81636 - DNA, 2027 bp, Homo sapiens
  sig_peptide (923)...(1058): this location contains the signal peptide sequence, MALIYVMLLLLGAFLGAWPALCGRYKRWRKHGVFVLLTTATSVAI, Run with SignalP
  misc_feature (290)...(1429): similar to gi3342218 in the genepept database release 114, Run with FASTXY 3.3t00, default parameters
tcccccacggagacgcgccaaggtagccccgcgcgtgtccgtaggcgcgctctctggaagacgcggtggggggtgcgcagggctgcaccctcacaccaattgccccggcgaaggccgagcccagaaagtgagtgcgcgtgagtgtgcgcgcgcccgcatgcgggggcgtggcagtcaacagcaacaacccacacgccggcagggccagaaactcccatctccctcaccagccggaaagtacgagtcggctcagcctggagggacccaaccagagcctggcctgggagccaggatggccatccacaaagccttggtgatgtgcctgggactgcctctcttcctgttcccaggggcctgggcccagggccatgtcccacccggctgcagccaaggcctcaaccccctgtactacaacctgtgtgaccgctctggggcgtggggcatcgtcctggaggccgtggctggggcgggcattgtcaccacgtttgtgctcaccatcatcctggtggccagcctcccctttgtgcaggacaccaagaaacggagcctgctggggacccaggtattcttccttctggggaccctgggcctcttctgcctcgtgtttgcctgtgtggagaagcccgacttctccacctgtgcctctcggcgcttcctctttggggttctgttcgccatctgcttctcttgtctggcggctcacgtctttgccctcaacttcctggcccggaagaaccacgggccccggggctgggtgatcttcactgtggctctgctgctgaccctggtagaggtcatcatcaatacagagtggctgatcatcaccctggttcggggcagtggcgagggcggccctcagggcaacagcagcgcaggctgggccgtggcctccccctgtgccatcgccaacatggactttgtcatggcactcatctacgtcatgctgctgctgctgggtgccttcctgggggcctggcccgccctgtgtggccgctacaagcgctggcgtaagcatggggtctttgtgctcctcaccacagccacctccgttgccatatgggtggtgtggatcgtcatgtatacttacggcaacaagcagcacaacagtcccacctgggatgaccccacgctggccatcgccctcgccgccaatgcctgggccttcgtcctcttctacgtcatccccgaggtctcccaggtgaccaagtccagcccagagcaaagctaccagggggacatgtaccccacccggggcgtgggctatgagaccatcctgaaagagcagaagggtcagagcatgttcgtggagaacaaggccttttccatggatgagccggttgcagctaagaggccggtgtcaccatacagcgggtacaatgggcagctgctgaccagtgtgtaccagcccactgagatggccctgatgcacaaagttccgtccgaaggagcttacgacatcatcctcccacgggccaccgccaacagccaggtgatgggcagtgccaactcgaccctgcgggctgaagacatgtactcggcccagagccaccaggcggccacaccgccgaaagacggcaagaactctcaggtctttagaaacccctacgtgtgggactgagtcagcggtggcgaggagaggcggtcggatttggggagggccctgaggacctggccccgggcaagggactctccaggctcctcctccccctggcaggcccagcaacatgtgccccagatgtggaagggcctccctctctgccagtgtttgggtgggtgtcatgggtgtccccacccactcctcagtgtttgtggagtcgaggagccaaccccagcctcctgccaggatcacctcggcggtcacactccagccaaatagtgttctcggggtggtggctgggcagcgcctatgtttctctggagattcctgcaacctcaagagacttcccaggcgctcaggcctggatcttgctcctctgtgaggaacaagggtgcctaataaatacatttctgctttattaaaaaaaaaa

SEQ ID NO: 81637 - DNA, 1433 bp, Homo sapiens
  misc_feature (1)...(1433): n = a,t,c or g
  sig_peptide (72)...(207): this location contains the signal peptide sequence, MASQSMCFLWLAPVTWCVMFSSRTCYSPCGNFSTAPGRVIFHSWD, Run with SignalP
  misc_feature (296)...(204): similar to gi547278 in the genepept database release 114, Run with FASTXY 3.3t00, default parameters
ggcacgagccctggcactcactcatcccctcctgtccctggggatgtgcctactgtggacattttacataaatggcatcacaaagtatgtgctttttgtggctggctcctgtgacgtggtgtgtgatgttttcgagccggacgtgttacagcccatgtgggaacttcagtactgctcctggcagagtaatattccacagctgggatagagcacagtttgtttattcattcctctctcgatggagacttgggttgttcccacctttggcctcggtgaatggtgatgctgtgatcatgggtgtgcctgtgtttgtctgaacacctgctttcagttgtttggggcgttacccaggagaggggttgctaggtcctgtggcacctctgtaacttgctggggaacttccccactgatgcttgaaagtcatttggtatcaccaggtctctggggtgtttcatttgtccccagaagctctgcctaagctgcactgggagtgggctgatctgtgtgaccctaacggcctgagtgctggctcaggggaactgctaatttatggaatcctaggtaggtgggggtagaattctctccctctgtcagggtggagcagttacgacaaatccacagtctcagggacataaagcaacatggtctttttccaatcatgccacatgtccactgcattgtggcttgacatgggcctcatgccaggacctgggatgaggggcgagccctctctgtgcacccaaggctgccgacactcccgagagcactgccggctcccacggcttctgccagaagtcaccggctgcgtcgctccccacagttcatcagcctggtggacctgtggccacacttaagttcaacgcagcccatgtggccctgaaggtggacagcttttgtatccgtactgaggcatgggataataaacgccacagtgattaaaaaaagaaatgttggcccagccccggtggctcatgcctgtaatcccaacactttgaagaggccacggtgggtggatcacgagggtcggagttcaagactagcctggggccatatgatgaaacctcatcttctactaanaaatacaaaaatttaaccgggcatggggggcacgtgtcctgtagtccccaactacttggtgaggcttgagggcaggataattacttggacatggtgcaaaacagggcttactatgcagccatgtgcagtcctatttctcctcgcgcctcggccagccactgagactccttgcatcagataacgaacgtggtcgcctgttcacagcatccttcgtctttccacaccgctgcgtcaattcactacttcctctctcagtgacgtcgctatgcttaatcgacggcggcgattatgctcacccctccngatgcagctatgaaccacgaacttctcaccaacgctacacacgatcgtcagcc

SEQ ID NO: 81638 - DNA, 877 bp, Homo sapiens
  sig_peptide (193)...(58): this location contains the signal peptide sequence, MLKLLLYVMYFHSFVVKKYEFRELDTREKGIISLHLLRNCWCPGP, Run with SignalP
  misc_feature (371)...(441): similar to gi3643925 in the genepept database release 114, Run with FASTXY 3.3t00, default parameters
ggcacgagttcctttcctgtttaattgcacacagtccccccaaatcacacccttcttgtggcccagggcaccagcaattccttagcaagtgaagggagatgattcctttctctctagtatccagttccctaaattcatacttcttcaccacaaaactgtggaaatacatgacatacaaaaggagttttaacatttctattttcttgacctttgcattttatcttggtatggttttctaatatatatccctgtgttgatggatttttaggcctttaggtacctaggagaaacagatttgatctattttaatttgttaaaaaagtactgactgcagttgaaaaacctgatttttttttctgtttttctactacctagccccaagatctttgataagtctcttaacccctccaagccacaatttcccccatcttctaaaaggggataatactttatatgaaataatatgaaatatataaactatattaatactttcaatgaagactacttaagaaaaagttgtttatagagttactttttcttttttctataaaatatctgatctgatttgttaaaggagtatgggaggtttcaaaactagagaattacgtttttatttgtttttcctgtctaatcagcccaggctcactctggatgagggcgtgtcctgttgtcacacagtgtgctcaattggggacagttggggaactttgcaacccctagcaaggggggggcccccttgggttaacattctggggtcaaagctcctgtttttatccggttacaaactcccccctgggcaggggggctccccccttctcctgaaaaaaacgaaggccacccgcctttccctttgtgcggaggtacaacacgctccacc

SEQ ID NO: 81639 - DNA, 374 bp, Homo sapiens
  sig_peptide (168)...(303): this location contains the signal peptide sequence, MGFLLIVSLVPTVGKMMCLPWPVAFPPAEVLAYHPVQRRDFHDIL, Run with SignalP
  misc_feature (51)...(155): similar to gi335121 in the genepept database release 114, Run with FASTXY 3.3t00, default parameters
ggcacgagaatgtttattaatctaaccattcccagagtccacagaagtttgaagctcagagatcaaaattagctccaaatagaaaagtaatcatctgttttctcttttttctgttgatttttagtagcatattaccatcaaaacacataatttttatttatgacaaaatgggttttctgctaattgtcagtctagttcctacagtaggaaaaatgatgtgcttgccatggccagtggccttccctcctgctgaggttcttgcctatcatcctgtacagcgtagagactttcatgatattctagctgcagtgatatcccctactgctttgcgtgccaccatgtggaaatatcatgatagaaattctccattcccg

SEQ ID NO: 81640 - DNA, 459 bp, Homo sapiens
  sig_peptide (14)...(149): this location contains the signal peptide sequence, MVKTDAHLKNPPFAPFRVYTLTLSLLLKLSHYSCLWVKKDFKDSS, Run with SignalP
  misc_feature (92)...(326): similar to gi521097 in the genepept database release 114, Run with FASTXY 3.3t00, default parameters
ggcacgagcttatatggttaaaacagacgcacacctaaaaaaccctccctttgctccctttagggtttatacattgaccctatcattgttattgaaattgtcacattactcttgtctttgggttaaaaaagactttaaagactcctcgttttacaatagcaataataatagcaatagcaatcattgtaaatctttattgagcactcactatatgccaggcgctgtaattagtaatttatgccttatctcatgtaaagtttccagcagccctattaagcagacacatggcatttccatgttacagatgaagagactgaaacacacattagctcgccttgccccagggacacatggtgggagccagaactaggagttgagcccaggcatactgatgcctggtgcacttggacgctgctgtacagccactccaggtgtggatgagcaggaaacacattgaag

SEQ ID NO: 81641 - DNA, 374 bp, Homo sapiens
  sig_peptide (108)...(243): this location contains the signal peptide sequence, MLTFAIYLTFLFINYILCQLDPTPGHPKRGINCIHCTPHYVTIRG, Run with SignalP
  misc_feature (129)...(218): similar to gi5478751 in the genepept database release 114, Run with FASTXY 3.3t00, default parameters
ggcacgagaattgcacttcctggaaaaaattaaaaagtagttagtttaagtattctgtaaattatttaattttgtcaagatgtaagtatttatattcacagcctcttatgttaacgtttgctatttatttaacatttttatttattaattatatactatgtcaactagaccccacaccagggcaccctaagaggggaataaactgtatccactgcacccctcactatgtcactataagaggggacacaagtgatctcgaagcagctcctactatttgactatattataggccacaaaaaatcttgaattaactcctagctctaattttgatgccaccatagtcattttttataaatcttgcgtctttcttcccg

SEQ ID NO: 81642 - DNA, 333 bp, Homo sapiens
  sig_peptide (137)...(272): this location contains the signal peptide sequence, MIVVRATFIFCLHCCCHLCTGLLASYPATYKLLCTQDPERPLQME, Run with SignalP
  misc_feature (231)...(138): similar to gi541682 in the genepept database release 114, Run with FASTXY 3.3t00, default parameters
ggcacgaggaaaaattcagttgccttctcatgtctttctttcctgctctacatccagcccatcagcaaattcagtttaccttttagttaccttcaatattgattcaggattaactattccttactctgtctcctctatgatcgtggttcgagccaccttcatcttctgtctgcattgctgctgtcacctctgcactggcctcctggcttcctaccctgctacttataaactgctttgcacacaggatccagagagacctcttcaaatggaagtcaggtcatgttccccttctgggcaggatcctcttgtagctgccagctcactcgaaaccaa

SEQ ID NO: 81643 - DNA, 1100 bp, Homo sapiens
  sig_peptide (562)...(697): this location contains the signal peptide sequence, MMTIKEFTLLLVSLQFSTFPSKKFLLETHFLKNSENWLGVVAHAC, Run with SignalP
  misc_feature (711)...(580): similar to gi1777459 in the genepept database release 114, Run with FASTXY 3.3t00, default parameters
ctatcacagctcttcgttgaattaatatttacattctgttttaaacagaacacaaatctttttgcttataaaatgattactcctgtgagagagagcagttcagcaccattagcattaaaacattaatcggtatttgaacgtgattttaagtaattatgtctaaatacagtttgttcagttatttgaggctacattttataattaatcccatctaaatttattttgtcactgtttgagactatgttttatagctaactcacccattagaatacagttttttttttaaattaaatattttataggaactaaaaatgaatttttaggaactaaaagtgattatttggtcgtatctacttttttttcaggctgaccttgttggtttcacattaaatgttgcaaaactttaacatttcaacttggagttattcttttgttaaaagagtataatactgtttttgagagaatatgatatgattccatgcaattcacatctgtgttgcagttagatttaattatttggactgggaagccccatattaaagcacatgctgggcttagaacatgatgacaatcaaggaatttaccctcttacttgtttcgctgcagttcagtacttttccttctaagaaatttttattggaaacacattttttaaaaaatagtgaaaactggctgggtgtggtggcgcatgcctgtagtctcagcactttggggtggccgaggcggaggactgcttgagcccgggagtttgagaccagcctgggcaacatggtgagacctcatctctacttaaaacaattttttaaaaaatttagccaggtgtggtggtatgtgcctgtagtcctagctatttgggaggctgaggtgggtggatctccttggggtcatgggttcaggaccagcctggccaacagggcaagactctgtctctacaaaaaataaaaaaaattagctgggtggccagtgcacatatgtagtcccagctgctcgggaggctggggttggaggatcgcttgggtccaagaggtggaggttgcagggagccatgatcacaccactgtactccagcctgagtgacagagtaagaccctgtctcaaaa

SEQ ID NO: 81644 - DNA, 416 bp, Homo sapiens
  misc_feature (1)...(416): n = a,t,c or g
  sig_peptide (236)...(371): this location contains the signal peptide sequence, MKLWLVQVLLCHSGSWVLWRIQQDLETWPSPLLGITWMCLGRFWR, Run with SignalP
  misc_feature (25)...(111): similar to gi425700 in the genepept database release 114, Run with FASTXY 3.3t00, default parameters
cccacgcgtccggtcccagctgacttcctctatcatctcgctccttgcccacagtctcacagagcctgccagaatcctgggtttccccagtccttggtctgggtaggccagggtgtgagtctgcagcagccccagatgggaaatccagaacctgagggcccagagccaaagtccagggtgcagcacacttagaaatctaagctcattagatttctcatacctgttggaggcgggcatgaaactgtggctggttcaggttctcctgtgccacagtggaagctgggtgctgtggagaatacagcaggacttagagacatggcccagccctctcttgggaatcacatggatgtgcctggggagattctggagaactctgcagaagtcctggagtggtatccagagggctgcaggagacn

SEQ ID NO: 81645 - DNA, 793 bp, Homo sapiens
  sig_peptide (79)...(214): this location contains the signal peptide sequence, MNNSPLALFSWEGWKKFLVLLPAFCITPSQSTSFSNIVPTTYQYC, Run with SignalP
  misc_feature (129)...(178): similar to gi144326 in the genepept database release 114, Run with FASTXY 3.3t00, default parameters
taaagagtaggaaaatctcttcagagttgtgactttcctactctttattaaaatagtaccttgaaagatagcaaaggaatgaacaactcacccttggctcttttttcttgggaaggctggaagaagttcctagtccttctccctgccttttgtatcacaccatctcaaagtacttctttctctaacattgtgcccactacctaccaatattgcacaccaggcagttgtcaggccgtgcattcaaacgcagtgggaggaaatacctggaaatgatgtgtagtgaggcccagtgtctctcatcctctcttagctaaacagctaccgtgggcctgctgaggattgctgcctttaaggtggtttactgagcttcctggagtactgttattgtgtctccaataggtgagagtcctgagatctactggggggtaaaatggaaatcatggcagtttattattccattcatcatatcatgcttggtagcatgctggtttatagccacatttctccacagtagaaccattttagtgtgcaaattctacatttttagggtaatttacacaatatatgatgtaaagataaacgagtctatgtttctcactaaccaacaggaattgtccccagtagataatgagtaatcaatcaagatgagacagaagtcctccccaatgaaaattaaatatcttatttgcaaagatgcgaaggaactaatgagccagtgctactaacaaacgctgagtttcattcagcttcctaagacatgtttaaagagtatggacaaatcctcatgctataa

SEQ ID NO: 81646 - DNA, 352 bp, Homo sapiens
  sig_peptide (105)...(240): this location contains the signal peptide sequence, MVMLVLCFPGSSVVSCRCDYAPMLHSWLTQTPGLVCIFMGCLSFL, Run with SignalP
  misc_feature (137)...(4): similar to gi553521 in the genepept database release 114, Run with FASTXY 3.3t00, default parameters
ggcacgagggatttgctgtttttctacttgtagttctggcagtttctgctggacctattttggggctctggtgccctccagagactgaactgggaaactcaggcatggtcatgcttgtcctttgtttcccagggagctctgtggtctcatgtcgttgcgactatgctcctatgctccattcttggcttacgcagacacctgggcttgtctgcatctttatgggttgtctttcgttcctggagctgtatctctgaggccttcatgtctctagtggtgattcatcatggacgcctggatcttgtgagtctcttcagatgctggcgtgaggcttttattagcgttcttaaaaacg

SEQ ID NO: 81647 - DNA, 1902 bp, Homo sapiens; identical to SEQ ID NO: 58739
  sig_peptide (103)...(238): this location contains the signal peptide sequence, MGTKAQVERKLLCLFILAILLCSLALGSVTVHSSEPEVRIPENNP, Run with SignalP
  misc_feature (103)...(1000): similar to gi5326797 in the genepept database release 114, Run with FASTXY 3.3t00, default parameters

SEQ ID NO: 81648 - DNA, 351 bp, Homo sapiens
  sig_peptide (145)...(280): this location contains the signal peptide sequence, MGSRAPCSSWSLLLTISLFCVVDLYVLLFHHLFLTSFAYPVVSPL, Run with SignalP
  misc_feature (151)...(316): similar to gi1542803 in the genepept database release 114, Run with FASTXY 3.3t00, default parameters
ggcacgaggaaaggacaagaaagcagactgaattcttgtgcttatcaaaggatgaacaggtgaataaggagttgtcctggatctgagaccattagtggggttacctgagatgacctgtgatgtgtgtggcactgtgttatttttatgggatctagagctccatgttcatcatggtctctcttgttaacaatttctctgttttgtgttgtagatttatacgttttactttttcatcacctttttctaacttctttcgcgtatcctgtggtcagtcccttgtcctgcttgttatctgtgtcactgttctttttctggccattgcttttcatatgttttacttcttttcatctg

SEQ ID NO: 81649 - DNA, 1263 bp, Homo sapiens
  sig_peptide (970)...(1105): this location contains the signal peptide sequence, MPSSFFLLLRFFLRIDGVLIRMNDTRLYHEADKTYMLREYTSRES, Run with SignalP
  misc_feature (448)...(1264): similar to gi4165247 in the genepept database release 114, Run with FASTXY 3.3t00, default parameters
atgggactgcagaggccagctgcctctatgctgccctattcgacttccaatcagccagctgcctctacactgccctattcgacttccaatcagccagctgcgtctacactgccctattcgacttccaatcagccagctgcctctacactgccctattcgtcttccaatcagccagctgcgtctacactgccctattcgacttccaatcagccagctgcctctacactgccctattcgacttccaatcagccagctgcgtctacactgccctattcgacttccaatcagccagctgcctctacactgccctattcgacttccaatcagccagctgcgtctacactgccctattcgacttccaatcagccagctgcgtctacactgccctgttcaacttccagtcaccacagcttattccttgtggcctctgcgggtcctgcctcagccatgatgatccacggcttccagagcagccaccgggatttctgcttcgggccctggaagctgacggcgtccaagacccacatcatgaagtcggcggatgtggagaaattagccgatgaattacatatgccatctctccctgaaatgatgtttggagacaacgttttaagaatccagcatgggtctggctttggaattgagttcaatgctacagatgcgttaagatgtgtaaacaactaccaaggaatgcttaaagtggcctgtgctgaagagtggcaagaaagcaggacggagggtgaacactccaaagaggttattaaaccatatgattggacctatacaacagattataagggaaccttacttggagaatctcttaagttaaaggttgtacctacaacagatcatatagatacagaaaaattgaaagccagagaacagattaagttttttgaagaagttctcctttttgaggatgaacttcatgatcatggagtttcaagcctgagtgtgaagattagagtaatgccttctagctttttcctgctgttgcggtttttcttgagaattgatggggtgcttatcagaatgaatgacacgagactttaccatgaggctgacaagacctacatgttacgagaatatacgtcacgagaaagcaaaatttctagtttgatgcatgttccaccttccctcttcacggaacctaatgaaatatcccagtatttaccaataaaggaagcagtttgtgagaagctaatatttccagaaagaattgatcctaacccagcagactcacaaaaaagtacacaagtggaa

SEQ ID NO: 81650 - DNA, 314 bp, Homo sapiens
  sig_peptide (161)...(296): this location contains the signal peptide sequence, MYFIHQQLMKLGWWHFLAIVGNAALDVSAQVFIVDMGFHFFWANA, Run with SignalP
  misc_feature (50)...(127): similar to gi416244 in the genepept database release 114, Run with FASTXY 3.3t00, default parameters
gcacccactgttcagatttctacatgcattttgcctgttgctgaactggaacctcacagccttttacgtctggcttctttcacttaacataatgtttttaagtcatccatgtagttcattcttttttttgttgcagagcaatattccattgtgtgaatggatgtactttatccatcaacagttgatgaagttgggttggtggcactttttggctatcgtgggtaatgctgctctggatgtttctgcacaagtctttattgtggacatgggtttccatttcttctgggcaaatgcccaggaacagaattgctgat

SEQ ID NO: 81651 - DNA, 538 bp, Homo sapiens; identical to SEQ ID NO: 81459
  sig_peptide (304)...(169): this location contains the signal peptide sequence, MLRLDIINSLVTTVFMLIVSVLALIPETTTLTVGGGVFALVTAVC, Run with SignalP
  misc_feature (172)...(257): similar to gi5706504 in the genepept database release 114, Run with FASTXY 3.3t00, default parameters

SEQ ID NO: 81652 - DNA, 359 bp, Homo sapiens
  sig_peptide (170)...(305): this location contains the signal peptide sequence, MAIVTSSWYAGRLLLLVNYEIHCSHWVPNRTFCFLWDLVKTIKLV, Run with SignalP
  misc_feature (214)...(104): similar to gi2621730 in the genepept database release 114, Run with FASTXY 3.3t00, default parameters
tttaaaagttaaaagatcaaaaatttgcttttatcccagtttttaaccacaaaaaaagcgtagggattatccatgaggacttcatgccaagcaagaacctcaaacaaactagacaaactttttttttgacagtgaatgactttttgtaggacctgtgcgtacgaaacccatggcaattgtcacatcctcttggtatgctggcagattgcttctcttggtgaattatgaaatccactgttcacattgggtgcctaacagaacattttgcttcttgtgggatttagtgaaaactattaaacttgttaagttgattctatacaaaacgataaataaaaagctctaagaagaaaatgtataat

SEQ ID NO: 81653 - DNA, 358 bp, Homo sapiens
  sig_peptide (41)...(176): this location contains the signal peptide sequence, MVLVLVFKAGSQFLHLFIDVIQVSKIRHRIQYQSGPRRGYKDNKH, Run with SignalP
  misc_feature (172)...(266): similar to gi193369 in the genepept database release 114, Run with FASTXY 3.3t00, default parameters
aaatgtgcactgtcttgaagtttgctttatccacaggaaaatggtactagtgttggtatttaaagctgggagtcaattcctccacttgtttatagatgtgattcaagtgagtaaaattagacaccgtatacaataccagtcaggccctcggaggggatacaaagacaataagcatgcagttcttattcgtcagttattctgggtgcaaacaagtggacatttatgagagagactatattaggggaggcttcatggaggaggtggcatttaaattagtacttaagaagtagattttgttagagacaacttaagggagataagagggctgaagaaaagtcgacgcggccgcgaattccag

SEQ ID NO: 81654 - DNA, 463 bp, Homo sapiens
  misc_feature (1)...(463): n = a,t,c or g
  sig_peptide (226)...(361): this location contains the signal peptide sequence, MALAIFLSSASSSLSFLLFHLFLLLSLCPRSPGPCQFACLVCFRP, Run with SignalP
  misc_feature (234)...(340): similar to gi1620171 in the genepept database release 114, Run with FASTXY 3.3t00, default parameters
gccctgtgcaattgtgattaaaatcctgctgtgtgggaaccgtggaggtttggcttaaagcaggaacacgaggctcccgtttggggaacaaggagcctcaggaggccctttcagcactagacaggccagagatgctgaaaagattgcttttgtttttgaggcgggtttgggattagggttgcctttttctttagactagggctttgtctttgctgccttctcctcatggcactagcgatctttctgtcctctgcctcctcgtccctctcatttctccttttccacctgtttctcctgctatcgctctgtccccgctctcccgggccttgccagtttgcctgtctcgtgtgtttcaggcctcatggcctcttttctgcagcctggcaggctgagggcaggcggaggacagagcagggccaggtcaggtgctaaggactcattcttntcagggggcaggtcactt

SEQ ID NO: 81655 - DNA, 3200 bp, Homo sapiens
  sig_peptide (1218)...(1083): this location contains the signal peptide sequence, MYTRELLAWIQGLYTWELLAWIQHLNTWELLPWIRRLNSWILLVC, Run with SignalP
  misc_feature (1473)...(1096): similar to gi3168986 in the genepept database release 114, Run with FASTXY 3.3t00, default parameters
tttcgtgtggcggtggctgaggcggttgggcctagggtgcagcgggcgcgtctgcggctggtgttggcgcatctctagatcctttcccggagttcagttatgggtgtgagaggtttgcaaggatttgtgggaagtacctgcccacatatatgtacagtagtaaatttcaaagaactggcagagcaccaccgaagcaagtatcctggatgtacccctaccattgtggttgatgccatgtgttgtctcagatattggtatactccagaatcttggatctgcggtggccagtggcgagaatacttttctgctttgcgagattttgttaaaacttttacggcagctgggatcaagttgatattcttctttgatggcatggtggagcaggataagagagatgaatgggtgaaacgaaggctcaagaacaacagggagatatccaggatttttcattacatcaagtcacacaaggagcagccaggcagaaatatgttcttcatcccctcagggctagctgtgtttacacgatttgctctaaagacactgggccaggaaactttgtgttccttgcaggaagcagattatgaggtagcttcctatggcctccagcataactgtcttgggattctgggggaagacactgattacctaatctatgacacttgtccctacttttcaattagcgagctctgcctagagagcctggacaccgtcatgctctgcagagagaagctctgtgagagtctgggcctctgtgtggccgaccttcctcttctggcctgcctccttggcaacgacataatcccagagggcatgtttgaaagctttaggtacaaatgcttatcgtcctacacctctgtaaaagagaactttgacaaaaaaggtaacatcatattagctgtgtcagaccatatatcgaaagttctttacttgtatcaaggtgagaaaaaattagaagagatattacctctgggaccaaacaaagctcttttttataaaggaatggcatcatatcttttaccaggacaaaaatctccatggtttttccaaaaacccaaaggtgtaataactttggacaaacaagtaatatccacgagttcagacgccgaatccagggaagaagttcccatgtgttcagatgctgaatccaggcaagaagttcccatgtgtacaggccctgaatccaggcgagaagttcccgtgtatacatattctgaacccaggcaagaagttcccacgtgttcagaccctgaacccaggcaagaagttcccacgtgtacaggccctgaatccaggcgagaagttcccatgtgttcagaccctgaacccaggcaagaagttcccatgtgtacaggccctgaacccaggcaagaagttcccatgtgtacaggccctgaagccaggcaagaagttcccatgtgtacagactctgaacccaggcaagaagttcccatgtgtacagactctgaacccaggcaagaagttcccatgtatacaggctctgaacccaggcaagaagttcccatgtatacaggccctgaatccaggcaagaagttcccatgtatacaggccctgaatccaggcaagaagttttaatacggacagaccctgaatctaggcaagaaattatgtgtacaggccatgaatccaaacaggaagttcccatatgtacagatcctatatccaagcaagaagactccatgtgtacacacgctgaaatcaatcaaaaattacctgtagcaacagattttgaatttaagctagaagctctcatgtgtacaaaccctgaaattaaacaagaagaccccacaaatgtggggcctgaagtaaagcaacaagtaaccatggtttcagacactgaaatcttaaaggttgctagaacacatcacgtccaagcagaaagctacctggtgtacaacatcatgagcagtggagagattgaatgcagcaacaccctagaagatgagcttgaccaggccttacccagccaggccttcatttaccgtcccattcgacagcgggtctactcactcttactggaggactgtcaagatgtcaccagcacctgcctagctgtcaaggagtggtttgtgtatcctgggaacccactgaggcacccggacctcgtcaggccgctgcagatgaccattccagggggaacgcctagtttgaaaatattatggctgaaccaagagccagaaatacaggttcggcgcttggacacactcctagcctgtttcaatctttcctcctcaagagaagagctgcaggctgtcgaaagcccatttcaagctttgtgctgcctcttgatctacctctttgtccaggtggacacgctttgcctggaggatttgcatgcgtttattgcgcaggccttgtgcctccaaggaaaatccacctcgcagcttgtaaatctacagcctgattacatcaaccccagagccgtgcagctgggctcccttctcgtccgcggcctcaccactctggttttagtcaacagcgcatgtggcttcccctggaagacgagtgatttcatgccctggaatgtatttgacgggaagctttttcatcagaagtacttgcaatctgaaaagggttatgctgtggaggttcttttagaacaaaatagatctcggctcaccaaattccacaacctgaaggcagtcgtctgcaaggcctgcatgaaggagaacagacgcatcactggccgagcccactggggctcacaccacgcagggaggtggggaagacagggctccagctaccacaggacgggctctgggtatagccgttccagtcagggacagccgtggagagaccagggaccaggaagcagacagtatgagcatgaccagtggagaaggtactagtcaacctccagaaagagtatggagagaaaaagaggcacacctggacgcagagccctgccagcgccctcctctgctgttgcagctgcaaggagaccatgcctgtgggagccaggcctcgcttgcatgaagaaggaacgatgcctttttcaatggtgtctccctcccattgtgcagaagagcttttgttggcttctctcccgagcttgtgcctgattctgtggcccaaaacaatcattgttaacatcttcatgtgtttcattctgatctttcattcatatatatgatgcctagctaatttcattttaaaataaatgggaatctgttgtaaaaaa

SEQ ID NO: 81656 - DNA, 452 bp, Homo sapiens
  sig_peptide (114)...(249): this location contains the signal peptide sequence, MLTRLVLSAHLSSTTFPPWTHAAISWELDNVLMPSPRIWPQVTPT, Run with SignalP
  misc_feature (138)...(43): similar to gi264079 in the genepept database release 114, Run with FASTXY 3.3t00, default parameters
gtgctatatctgcaaaatggggataacagtactcaccaaatttagctgctgcgaagatgaaatgaaaggtctggggggtgcagagtcggcggttttgctgggaagccggggtgatgttgacgcggctggtcctcagtgcacacctgagtagcacgacctttccgccctggacgcacgctgccatcagctgggagctggacaacgtgctgatgcctagtcccagaatctggccccaggtgactccaacagctgggcaggatgtgcatgccatagtaaccagaacctgtgagtctgtgctgagctctgtcgtctacacccacggctgtggctgtgtgaggtgttaattgggagctggcgtggatttgacaggaatgctaacacagctctgagataaggagctgggactgacttctgacagccatgctactcatagtaggaatgtgtttactgag

SEQ ID NO: 81657 - DNA, 1756 bp, Homo sapiens
  misc_feature (1)...(1756): n = a,t,c or g
  sig_peptide (43)...(178): this location contains the signal peptide sequence, MFSHLPFDCVLLLLLLLLTRSSEVEYRAEVGQNAYLPCFYTPAAP, Run with SignalP
  misc_feature (70)...(506): similar to gi2827454 in the genepept database release 114, Run with FASTXY 3.3t00, default parameters
tgcctaacagaggtgtcctctgacttttcttctgcaagctccatgttttcacatcttccctttgactgtgtcctgctgctgctgctgctactacttacaaggtcctcagaagtggaatacagagcggaggtcggtcagaatgcctatctgccctgcttctacaccccagccgccccagggaacctcgtgcccgtctgctggggcaaaggagcctgtcctgtgtttgaatgtggcaacgtggtgctcaggactgatgaaagggatgtgaattattggacatccagatactggctaaatggggatttccgcaaaggagatgtgtccctgaccatagagaatgtgactctagcagacagtgggatctactgctgccggatccaaatcccaggcataatgaatgatgaaaaatttaacctgaagttggtcatcaaaccagccaaggtcacccctgcaccgactctgcagagagacttcactgcagcctttccaaggatgcttaccaccaggggacatggcccagcagagacacagacactggggagcctccctgatataaatctaacacaaatatccacattggccaatgagttacgggactctagattggccaatgacttacgggactctggagcaaccatcagaataggcatctacatcggagcagggatctgtgctgggctggctctggctcttatcttcggcgctttaattttcaaatggtattctcatagcaaagagaagatacagaatttaagcctcatctctttggccaacctccctccctcaggattggcaaatgcagtagcagagggaattcgctcagaagaaaacatctataccattgaagagaacgtatatgaagtggaggagcccaatgagtattattgctatgtcagcagcaggcagcaaccctcacaacctttgggttgtcgctttgcaatgccatagatccaaccaccttatttttgagcttggtgttttgtctttttcagaaactatgagctgtgtcacctgactggttttggaggttctgtccactgctatggagcagagttttcccattttcagaagataatgactcacatgggaattgaactgggacctgcactgaacttaaacaggcatgtcattgcctctgtatttaagccatcagagttacccaacccagagactgttaatcatggatgttagagctcaaacgggcttttatatacactaggaattcttgacgtggggtctctggagctccaggaaattcgggcacatcatatgtccatgaaacttcagataaactagggaaaactgggtgctgaggtgaaagcataacttttttggcacagaaagtctaaaggggccactgattttcaaagagatctgtgatccctttttgttttttgtttttgagatggagtcttgctctgttgcccaggctggagtgcaatggcacaatctcggctcactgcaagctccgcctcctgggttcaagcgattctcctgcctcagcctcctgagtagctgggattacaggcatgcaccaccatgcccagctaatttgttgtatttttggtagagacagggtttcaccatgttggccaggctggtctcaaactcctgacctcatgatttgcctgcctcggcctcccaaagcactgggattacaggcgtgagccatcatgcccagcccataatacctcatttataatccactaaatggatgtctctactctcgcctncnnnnatcgtcgacccgggaatt

SEQ ID NO: 81658 - DNA, 1562 bp, Homo sapiens
  sig_peptide (239)...(374): this location contains the signal peptide sequence, MEKIPEIGKFGEKAPPAPSHVWRPAALFLTLLCLLLLIGLGVLAS, Run with SignalP
  misc_feature (188)...(949): similar to gi1354760 in the genepept database release 114, Run with FASTXY 3.3t00, default parameters
tgcatgcgccgcgacccacgcggccggttacagtaggtttattttttgaagtttaaacttgtaagcttaagcttccgtttataaacagaagtttaaaattataggtcctgtttaacattcagctctgttaactcactcatctttttgtgtttttacactttgtcaagatttctttacatattcatcaatgtctgaagaagttacttatgcagatcttcaattccagaactccagtgagatggaaaaaatcccagaaattggcaaatttggggaaaaagcacctccagctccctctcatgtatggcgtccagcagccttgtttctgactcttctgtgccttctgttgctcattggattgggagtcttggcaagcatgtttcatgtaactttgaagatagaaatgaaaaaaatgaacaaactacaaaacatcagtgaagagctccagagaaatatttctctacaactgatgagtaacatgaatatctccaacaagatcaggaacctctccaccacactgcaaacaatagccaccaaattatgtcgtgagctatatagcaaagaacaagagcacaaatgtaagccttgtccaaggagatggatttggcataaggacagctgttatttcctaagtgatgatgtccaaacatggcaggagagtaaaatggcctgtgctgctcagaatgccagcctgttgaagataaacaacaaaaatgcattggaatttataaaatcccagagtagatcatatgactattggctgggattatctcctgaagaagattccactcgtggtatgagagtggataatataatcaactcctctgcctgggttataagaaacgcacctgacttaaataacatgtattgtggatatataaatagactatatgttcaatattatcactgcacttataaacaaagaatgatatgtgagaagatggccaatccagtgcagcttggttctacatattttagggaggcatgaggcatcaatcaaatacattgaaggagtgtagggggtgggggttctaggctataggtaaatttaaatattttctggttgacaattagttgagtttgtctgaagacctgggattttatcatgcagatgaaacatccaggtagcaagcttcagagagaatagactgtgaatgttaatgccagagaggtataatgaagcatgtcccacctcccactttccatcatggcctgaaccctggaggaagaggaagtccattcagatagttgtggggggccttcgaattttcattttcatttacgttcttccccttctggccaagatttgccagaggcaacatcaaaaaccagcaaattttaattttgtcccacagcgttgctagggtggcatggctccccatctcgggtccatcctatacttccatgggactccctatggctgaaggccttatgagtcaaaggacttatagccaattgattgttctaggccaggtaagaatggatatggacatgcatttattacctcttaaaattattattttaagtaaaagccaataaacaaaaacgaaaaggcaaaaaaaaaa

SEQ ID NO: 81659 - DNA, 3012 bp, Homo sapiens
  sig_peptide (1360)...(1225): this location contains the signal peptide sequence, MGLKNVFLPVFLPFLLYSEFLSLPPSLSSSLLPFLPFSLPGHFSN, Run with SignalP
  misc_feature (1243)...(1321): similar to gi1280134 in the genepept database release 114, Run with FASTXY 3.3t00, default parameters
ccttctgattagggggtcacatgcagaagctccccaagacagcaagaaaaaggaaaatggcatcttgatactactaaagctcatgctttaaatccattcctcaccggttcagtgaggaagccaagttttcacacatagcaataaagatcaagaagagttcactcttctgctcactgacagactgactagctgctagttgggtcaaattccacaggatccaaggccagtgtatgaagaatgaaaagcttcattcccaaagaatcaggctccccggggtacaaagaggtcctgagcatgcttcttatgtaaattacagcgcaacttaggtttttccaagaatatgtaaaatgagacttggagtttaattaaaaacagaacagggatacattaaacaaacaaacaaaaattacttttctgattatcaattttttttgagactcaaagcatccccaaaacattggagatccagcttattcctgagacatcaaccatcacaaaaggttttcactctgaactattcacatttttgtggcagaaaacagaacaaagttctgcagacatccttcctctctttctaaaatatattcacaaacagggtcttttcatagttcaaaagaaaaacaaacaggtttctttcttggccaaatggcctgttactctcaccctgggatctgatttcttaataaaaaagttcagggcaccaaatccaaccagaaattcccaggacaccagtggctacttaactatgaggggatggatgcttttgtctttctatgaggggaatcattctcccgggattattatgctgctcaacagccccaggacaggtaggtgggaaggagggtgaatgcaaaagcgaaagggtcacagaaaagaatgaggctttcttgaacaacccatagcaaggcagaatggtccagttttacaaaccacccactacaaactccaaacatgcacacccaaaactagaggggaaaggaaagagctcctgggggactaggggagacaaaagatggtgacatagaacagcagacttgcctatgaacgtttcctcaacttcctaacactggaagatgtttaattaaaaagttgctgttcaaaattgtactgaaaacatatctaaaaataggtctgtagtcatcttaaaaataaaaggtcacttctcagataagaggagtgacagatattctcagataccaacacttcaggtatctttgatgtaaatttgaaaaatggcctggtagagaaaaaggaaggaaaggaaggagagaggaagaaagtgagggaggtagggagagaaattcagagtacaacaggaaaggcaagaaaactgggaggaacacattttttaagcccatgcttatctatcccagcagccaaacaaagcagatccacaaaggaaaaaaatgcagttcttttctaagaacattctgaaaatcaacttcaaactcaaaacataagaaactgcaatctaagaacaactaccacaatgctcactggacttaaaaatgacgactgagaccgggtactcaaatgggtcaacgttcttcagcggtcattcttaggcattatctgacagaatactatgatcaggccttacccaccaagtggaagctaaagtgcctctattacttggtatggacctgctctaggagcagacaaaatcactttgctttcttgaagtacaagaggactctgccagcaacgagatgcaagcagggaggagtggcagaagaagagcaaaactggttaccaagggctctcttctgatgtacagagttaaaaatatctgcacaaatgcactaagtaaaagaatgggaagatgaactataataccaaagacagaagacattcctcccagaggaaagaaaggaagtggacctcaaaacagtgtcacagggtaacgctaccagagttgcacaagctgtgctctgtcccgagggacgaatacctcaaggtaaaagggaaagcagctctctttttatcatttccccctgctggttttaaagaccccaagcccagactcttgcaacactgaaccataggtgggatacagggaggagagacagagggtaaggaatatgaatggtgttaggcccaccaagctctgtatcccttccccagacttcccagccaggcagttgttggtaggttgatatttgatttgggacaaaattacagggtatgagggtggctctcaataaaaaaacaactaggaaagtcagagttgaactgttttcctctaagggctgcttagctctacagaaatacagcaagggccttcaatctaacctgtttaactgggaaggggaacaggagacagggagaagaaatggtcagatgaagctcatcttcccatcatttggcacccagaggaagacggggaggtggagactgtaatggggactgctggtattgcctcttctgtcttttcactgttgatcctattggccaaatcaggtgcacacaagtatcagtgttgctgcttttcttctaatccttgcaggagagtcagatgtccatctcgaactgagcatcatccccaactgcatgtttcctgtcgtgattgttcaagttgttcaaattgtttacttctactttggagtcttcaattaaggtgccagggctagtgactcctgggatattgggcagatggcagggtggggtctgagccatgggagaattgcgacgatccaacagaaactttctgtcataaatgattcgagttcctcccggtgtggtggagaagagcgtccccccgggcgtggtgcaatagtcatgaggtagctgcgcggcgtcgctgatggccacggtgcgggtggggatggcgcggctctggctgggctggtggccgctgccggctgacgaggacatggctgtgggcgcgggctctcggctttgtccggcgggcaggcggcggcggcggggccggggctgcttcggctcctcaggcggacggaaaagcgcgctctgcgcgctcctcgctcgcttcctcccgttccctcgtaccgc

SEQ ID NO: 81660 - DNA, 416 bp, Homo sapiens
  sig_peptide (3)...(138): this location contains the signal peptide sequence, MLDKLFLESVSTTISLVFAFVLCYLWKNNIGLITDSVHNFLDEKK, Run with SignalP
  misc_feature (99)...(212): similar to gi1262741 in the genepept database release 114, Run with FASTXY 3.3t00, default parameters
aaatgctggataagctgttcttagaatctgtttcaactaccatttctttggtttttgcctttgtactctgctatctgtggaaaaataacataggcttaataacagactctgtacataactttttagatgagaagaagcaaaaacatttccacatattctggtatagctatagaaattgtttttgttttttttcttcctttccagttagagtctgagcaatgagtggactgacttaatttagttgctagaaccaaattgcttcttggtcttgtagttagtctatagctgtgtaccatcttcatgaaatctgattatgactaatgtagacttttataggtcatcaagcagaattagtctgtttttcttcaaacagaactttaaaaattactggttatcattctgtactgataattggc

SEQ ID NO: 81661 - DNA, 468 bp, Homo sapiens
  misc_feature (1)...(468): n = a,t,c or g
  sig_peptide (298)...(433): this location contains the signal peptide sequence, MLLFLFFFPKNLYCSKNLLYGQTIPSYQLFKNSFQWIYQNHKYRT, Run with SignalP
  misc_feature (350)...(242): similar to gi11833 in the genepept database release 114, Run with FASTXY 3.3t00, default parameters
cgagggttaccaagctctagtagagaccctaanttngggnagacccacccgcccgtnanttttgctgatgactattgattttctagccttattagagtcttggatactatttttgggtgcaaaagggtacagaaaagaatttgctgctgagcaactaaagcaaagattttaagtcagttgtaacccatgcatgcccctttctcaaacattgctctgtgtgtttaatttatttaaaataataccagaaaggtaatttctttgatggatttaaagaaacgatatgttgaaaaggcagcaatgttattgtttttattcttcttccccaaaaatttgtattgcagcaaaaatttattgtatggacaaacaataccttcatatcagctatttaaaaatagctttcaatggatttatcaaaatcacaagtacagaacaaaacagataatttatcgtgtgtgtgtgagtgtattg

SEQ ID NO: 81662 - DNA, 614 bp, Homo sapiens
  sig_peptide (20)...(155): this location contains the signal peptide sequence, MMFTPALWMIYVGTARPTCQNIYLPENHRKICKFISLTLWRKPVS, Run with SignalP
  misc_feature (300)...(389): similar to gi1228911 in the genepept database release 114, Run with FASTXY 3.3t00, default parameters
atttgataggtggtgtagaatgatgtttacacctgccttatggatgatttatgttggaactgctaggcctacgtgtcagaatatctacttaccagaaaatcatagaaaaatatgcaagtttatatcactcacactgtggagaaaaccagtcagtaacaaactgttaagtcttaacagtgattataatattgaaaagaacaatatcaacagtagaacaaccatatcaagacagtggatcatgaagcaatgactataggattccctcctaaatttcgttcattgtaacacccacactgtgttctgtctctgtgcacagcacaacaaactcacttcaaagccaaatgaggacttggcatactcaggaaattctagtaatgagatgctcttagttttactgttacagtatgtagcacttcatcttaggcaaatatgacagtctgcggaatcctgtgtcattcatttgaaagaactgacaaaagaacatgtttttagatcaacttgcatttgcaggaacacacatgggttgcccaaaatatcccattttagagtgtccaaaagagccacccgtcctggattgcgcctcgctgacccaataatcgcctggtgcgacacgc

SEQ ID NO: 81663 - DNA, 2782 bp, Homo sapiens
  sig_peptide (2337)...(2472): this location contains the signal peptide sequence, MHHAWFFFVFFFLRRSLALSPRLECSGGISAHCKLRLPGSRHSPA, Run with SignalP
  misc_feature (1294)...(1251): similar to gi11707 in the genepept database release 114, Run with FASTXY 3.3t00, default parameters
ttttttttttttgagacggagtctcgctctgtcgctctgtcgcccaggctggagtgcagtggcgcgatctcggctcactgcaagctccgcctcccaggttcacgccattctcctgcctcagcctcccaagtagctgggactacaggcgcccgctaccacgcccggctaattttttgtatttttagtagagacggggtttcaccgtgttagccaggatggtctcgatctcctgacctcgtgatccacccgccttggcctcccaaagtgctgggattacaggcgtgagccaccgcgcccggcagggaccacacaatttattaaccaaccaggttaataaattcttttttttttttttggagacagagtctcgctctgtcgcccaggctggagtgcagtggcgcgatctcggctcattgcaagctccacctcctgggttcacgccattctcctgcctcagcctcctgagtagctgggactacaggcgcccgccaccatgcccagctaatttttttgtatttttagtagagacggggtttcaccgtgttagccaggatggtctccatctcctgaccttgtgatccgcccgcctcggcctcccaaagtgctgggattacaggcatgagccaccgcgcccggccccaaccagaacacttctgagcgtggaagaggatgctgttaattactcaagaccaaaaggcataaaaggagacatatgtccacccaagtgataaggcagtttgggaaactacatttcccagtatgccctgccccttgaaagttaaaaatcttaactggcacagagcaccctgggacacctgtggttagcaccatttaagaagtaaaaggtatagggttgggttctgacgtgaaggctttccccttccatgggacacttaaccagacacaggacacaacacctgaggtgaaatttcaatgggtattaagtctggggtagagcttctctctccccaaatctagcttccaaagatgtggagctggtggagctgtccattggtccactgccctgtttctcctgggtgctgcctctgcctcctcatatcaccagcgtccccactgccactagtctgtagggggattccgggctaggtgctcttcccactcgacttcaaccaacttatatagctccatggtggcctgggcatcttccacagaggaatgtccgctcttcccaacctggatatcccggtttagcagcttcttggtgagatgcttcagagacatggtggcattctccgggcagtcagccttccggttgaggggggggatatgggaggtgtcacgggtgagggacttggggtgaaagtactgaagggctttgaagtcgttgtggatggcatgccccaccactatcttccctgtgagtatcttcaagatctctccatccttgaaatgctcactcccacaagttttctttcttctggaatccaccttcctcttccacaggtgatttccatggtataccctgtttggactcatactgccagtggctccttaccttcttattgatctccaccccatgacattaatttgccttcagtcctaaatgacactcatgtttgagatgtccatgtatttagttcagttctggcttgctacatgaagtcctttaactattaccattatgttggccttagacacatggctgggacccgggctccagggaggctaacaaaagcccaaaattacatgcaattagatgtgtatgggtactagaggaagagaatctgtggctttcatcaaattctcagagtctacaaaccgtaaaaaattaagaatcacatataaactaaagttgcagaagcaaccttattcacactagttttggaaccaagtaaaataaaaataacttctcaatatttcaggaaactgttttttttttttgagatggagtctcactctgtcgcccaggctggagtgcagtggcgtgatctcggctcactgcaagctctgccttccgggttcatgccattctcctgcctcagcctcccgagtagctgggactacaggtatgcaccaccatacccggctcatttttttgtatttttagtagagatggggtttcaccgtgttagccaggatggtctcaatctcctgacctcgtgatctgcccgtctcggcctcccaaagtgctgggattataggcgtaagccacctgtgtctggccaaattcattttttaagagatggggtcttactatgttgcccaggctggaaagcagtggcataatcatagctcacgacagcctcaaatgcctgagctcaaaccatcctcccacctcagcctcgccatgcctggccagaggccatgggctgctgatgcaccatgcatggtttttttttgtttttttttttttgagacggagtctcgctctgtcgcccaggctggagtgcagtggcgggatctcggctcactgcaagctccgcctcccgggttcacgccattctcctgcctcagcctcccaagtagctgggactacaggcgcccgccactacgcccggctaattttttgtatttttagtagagacggggtttcaccgttttagccaggatggtctcgatctcctgacctcgtgatccgcccgcctcggcctcccaaagtgctgggattacaggcgtgagccaccgcgcccggctgatagtttcgatatcttaaaaccttggggatctaaatgtgttttttcttaacaaatcagttttttctgctctcattcatgatgtatcattttcctttttatcttttacatttttaaggaaagtcctg

SEQ ID NO: 81664 - DNA, 770 bp, Homo sapiens
  sig_peptide (98)...(233): this location contains the signal peptide sequence, MLIYLLKIICVQRRCFCMNIMYIYNAFDALLIELLKALHKALHKD, Run with SignalP
  misc_feature (417)...(280): similar to gi951007 in the genepept database release 114, Run with FASTXY 3.3t00, default parameters
aatactttcatttctaaatatgagttaataactttcctaagatcttttctaaatttggggacttctcctactcaagagtcctttttgagaatactttatgttgatttaccttctgaaaataatctgtgtccaacgtaggtgtttttgcatgaatattatgtatatatacaatgcttttgatgctcttctaattgaactattgaaagctttgcacaaagctttgcacaaagatgcagatagtatttttaaatactattccattagggtgaaattctcagaggcctgtactttgccatgaccaatcttgttaaatcttcatccacgtagcaagttttaatttcagaagcatggcttccccagacgccagagccaggctcatgtgcactatgaaaaggatgtatgaaccctgccatactcagaaaatagccaacatccatgtgcatcttgctgtctctgaaaattgatttcttaagttagtaggtcccctgtatgcctatcaagtgattccacaacgagatttccaatataccgcttaattctagggatgtcagaacgcttcccttctcagattcatataatttacacttgggtttcatatgtgtatttgccatacagtactatggttgaaattatgcctccataccggtctggtgacccctaacgtgccttccagtatgccgcttaagactctgagtcttgaacgctcgcttctctctattacctatacctaaaggggtcggtatggtaattcccatacccactctgggggt

SEQ ID NO: 81665 - DNA, 798 bp, Homo sapiens
  sig_peptide (103)...(238): this location contains the signal peptide sequence, MWRKHLSLLVLRDFLLAPRRRDSLTLTHMATLAQKPCGIEKQICF, Run with SignalP
  misc_feature (63)...(201): similar to gi1934778 in the genepept database release 114, Run with FASTXY 3.3t00, default parameters
ttttttttttaaaagctatgttgttagcacacagaacacttcattgttgtttttgggggaaggggcatatgtcactaatagaatgtctccaaagctggattgatgtggagaaaacacctttcccttctagttttgagagacttcctcttggctcccaggaggagggattccctgactttgacacacatggccaccttggcacaaaagccttgtggtatagaaaaacaaatttgtttttatgtcctcttctccctttccatctttcagcatagacttaactcccttaagcccagacatctgttgagacctgacccctagtcattggttaccagtgtgtcaggcaatctggactttccagtgatgccactgagatggcacctgtcaaaagagcagtggttccatttctagattgtggatcttcagataaattctgccattttcatttcacttcctgaaagtcagggtcggcttgtgaaaagttgttaaacaacatgctaaatgtgaaatgtcaaccctcactctaaactttccctgttcagagcatcagatgaagacttcattgggttttatagtggctttctgatttttggtagtccattgaagaagggagtttgaaagttgttgtatactgttaacgattgtctgcccatgtcctgcctgaaataccatgattgtttatggaaagtatctttaataaagctggatacagtttgaaaaaaaaacgcggccgcgtcgactttggtttttggagatggttttctcgatgggggctgggagggtataatgtcgacgcggccg

SEQ ID NO: 81666 - DNA, 3195 bp, Homo sapiens
  sig_peptide (2361)...(2226): this location contains the signal peptide sequence, MGGVAFLLWLTVFSAWTRLSIFSRLSDLPSFCLPLAGTVSSSLPE, Run with SignalP
  misc_feature (84)...(2907): similar to gi2887411 in the genepept database release 114, Run with FASTXY 3.3t00, default parameters
tttcgtggaaatcagtgtggctgtccagctgggctgagtcgcccaagaaggacgtgacaggtgccgacgccaccgccgagcccatgatcctggaacagtacgtggtggtgtccaactataagaagcaggagaactcggagctgagcctccaggccggggaggtggtggatgtcatcgagaagaacgagagcggctggtggttcgtgagcacttctgaggagcagggctgggtccctgccacctacctggaggcccagaatggtactcgggatgactccgacatcaacacctctaagactggagaagaggagaagtatgtcaccgtgcagccttacaccagccaaagcaaggacgagattggctttgagaagggcgtcacagtggaggtgatccggaagaatctggaaggctggtggtatatcagatacctgggcaaagagggctgggcgccagcatcctacctgaagaaggccaaggatgacctgccaacccggaagaagaacctggccggcccagtggagatcattgggaacatcatggagatcagcaacctgctgaacaagaaggcgtctggggacaaggaaactccaccagccgaaggcgagggccatgaggcccccattgccaagaaggagatcagcctgcccatcctctgcaatgcctccaatggcagtgccgtgggcgttcctgacaggactgtctccaggctggcccagggctctccagctgtggccaggattgcccctcagcgggcccagatcagctccccgaacctacggacaagacctccaccacgcagagaatccagcctggggttccaactgccaaagccaccagagcccccttctgttgaggtggagtactacaccattgccgaattccagtcgtgcatttccgatggcatcagctttcggggtggacagaaggcagaggtcattgataagaactcaggtggctggtggtacgtgcagatcggtgagaaggagggctgggcccccgcatcatacatcgataagcgcaagaagcccaacctgagccgccgcacaagcacgctgacccggcccaaggtgcccccgccagcaccccccagcaagcccaaggaggccgaggagggccctacgggggccagtgagagccaggactccccgcggaagctcaagtatgaggagcctgagtatgacatccctgcattcggctttgactcagagcctgagctgagcgaggagcccgtggaggacagagcctcaggggagaggcggcctgcccagccccaccggccctcgccggcctcttctctgcagcgggcccgcttcaaggtgggtgagtcttcagaggatgtggccctggaagaggagaccatctatgagaatgagggcttccggccatatgcagaggacaccctgtcagccagaggctcctccggggacagcgactccccaggcagctcctcgctgtccctgaccaggaaaaactcccccaaatcaggctcccccaagtcatcatcactcctaaagctcaaggcagagaagaatgcccaggcagaaatggggaagaaccactcctcagcctccttttcctcatccatcaccatcaacaccacttgctgctcctcctcttcctcctcctcctcttccttgtccaaaaccagtggcgacctgaagccccgctctgcttcggacgcaggcatccgcggcactcccaaggtcagggcaaagaaggatgctgatgcgaacgctgggctgacctcctgtccccgggccaagccatcggtccggcccaagccattcctaaaccgagcagagtcgcagagccaagagaagatggacatcagcactttacggcgccagctgagacccacaggccagctccgtggagggctcaagggctccaagagtgaggattcggagctgcccccgcagacggcctccgaggctcccagtgaggggtctaggagaagctcatccgacctcatcaccctcccagccaccactcccccatgtcccaccaagaaggaatgggaagggccagccacctcgtacatgacatgcagcgcctaccagaaggtccaggactcggagatcagcttccccgcgggcgtggaggtgcaggtgctggagaagcaggagagcgggtggtggtatgtgaggtttggggagctggagggctgggccccttcccactatttggtgctggatgagaacgagcaacctgacccctctggcaaagagctggacacagtgcccgccaagggcaggcagaacgaaggcaagtcagacagcctggagaagatcgagaggcgcgtccaagcactgaacaccgtcaaccagagcaagaaggccacgccccccatcccctccaaacctcccgggggctttggcaagacctcaggcactccagcggtgaagatgaggaacggagtgcggcaggtggcggtcaggccccagtcggtgtttgtgtccccgccacccaaggacaacaacctgtcctgcgccctgcggaggaatgagtcactcacggccactgatggcctccgaggcgtccgacggaactcctcctttagcactgctcgctccgctgccgccgaggccaagggccgcctggccgaacgggctgccagccagggttcagactcacccctactgcccgcccagcgcaacagcatccccgtgtcccctgtgcgccccaagcccatcgagaagtctcagttcatccacaataacctcaaagatgtgtacgtctctatcgcagactacgagggggatgaggagacagcaggcttccaggagggggtgtccatggaggttctggagaggaaccctaatggctggtggtactgccagatcctggatggtgtgaagcccttcaaaggctgggtgccttccaactaccttgagaaaaagaactagcagagggcctgggctcttccagcctcagtgtgcctctctggccgcccactggatgagcggtgagacgaacaaaagggaaaggaaaaaatgggggtggggggtggggggtggacaacattcaacactgcagaatgggtgacctcaaagatgccccctgtccaagccatcccacagctggaaggtaggggatgggggtgcccacactgagtgaggaagggaatggaccagggagtaccaaacctgggacccagagccaagtaagctgtattgcggccgctctggaggattc

SEQ ID NO: 81667 - DNA, 424 bp, Homo sapiens
  sig_peptide (244)...(379): this location contains the signal peptide sequence, MKLLKLKGLGGRSPTSLILLPFLPRGIYVCLPAPISTYPAMTTLF, Run with SignalP
  misc_feature (255)...(364): similar to gi1498915 in the genepept database release 114, Run with FASTXY 3.3t00, default parameters
agaaatgcgggagaaagctgcctcctaatacatttcattggcccttcatctccgtctgctgactcacatttgaatttagagacaatttgctaaactttctagatttttatttacttaacattgccttagcctttttgatatattcaactatagtattctccaggtttaaatattgtacgttttttttcacaactttaacaaattagtgctcagttctcctggcttgaaattcccatatctttcatgaagctgttgaaactaaaaggcttaggaggaaggtcacccacctccctcattctccttcccttcttgcccagaggaatttatgtctgtcttcctgccccaatatctacatatccagccatgactacattgtttggtttaagtaactgcctctcattacagaactagattcatttattca

SEQ ID NO: 81668 - DNA, 930 bp, Homo sapiens
  sig_peptide (369)...(504): this location contains the signal peptide sequence, MCHWQNSFLCQSFLTFGSILALLAGKACYPESESIRELFMWALEL, Run with SignalP
  misc_feature (339)...(504): similar to gi833749 in the genepept database release 114, Run with FASTXY 3.3t00, default parameters
aacaaattagatatgatttgttttttaagttgaggcttagccagaagggtttgtatggacctcttaaattaaggtttgtttcacagtggggataatgtttgctatgtcaataaacaggtacttttctttcatcattctccaaatttggttcttaatgagatctgacatcccctcttccattagaaggtattgaaatccagtggaccagtttctccaagatgtctcttgaaagtaaaactctgcttaaaatctgttttttccagggctctaatcactactctgttaaattcctcaaacttgtaatgccccaaggcttgattttttccagataatggctctatcgttgcacataccctgattctgtcagtatgtgtcattggcaaaatagctttctctgccaaagctttctgacctttggctccatcttagctttgttagcaggaaaggcctgctacccagagtcagagtcaatcagagaattgttcatgtgggccttagaactttactccttacccttttatcttttctttaaactttcgcctctaaatctgccagggaaattgggacttatagaaaccttgtcaacttgttgggggcaaaaattagatcctgtgttagaaactctgcaaagagtgagatccatggcatcattgatcgccaacttctttgttcctttcatccagaagaaaggtcagctcattacgtaagaaacttttcatcaggaaaagcagacaaccgataaaaaacagaaactaagtattctgcaaggaaacctggtttaaggagaatgtattgaaactggatatgcctgttcctttgtactcctccctttggcattgtcctttttttttctgtaagataatcataagaatttaggtaatggagggactacaaagatcacatggctttatgggttcgcctattatgctg

SEQ ID NO: 81669 - DNA, 411 bp, Homo sapiens
  sig_peptide (120)...(255): this location contains the signal peptide sequence, MKTKYTFLIILQYHTLCCKWEWSSCVCHALLSSSFNSPLSQSRKH, Run with SignalP
  misc_feature (193)...(241): similar to gi463190 in the genepept database release 114, Run with FASTXY 3.3t00, default parameters
agagtcttataaactcttgtgtcaggaaccgagagctaaaaccaaatattacgacaaaagatactcctatcactgaagaagctgcaagggtttggggagctctctgtcagaaactgaggatgaagaccaaatacacatttctgattatactacaatatcataccttgtgctgcaaatgggaatggagctcatgtgtgtgtcatgctctgttgtccagttcctttaattcccctctctcacagtctaggaagcatattccaggacaagtgagagagatgttaatatgaagataactttgaatcaactctaatgtattctaaagacagtcttctacaaatttttgtactttgtctaccatcagtaattaatgacttatgacacttacagttgattgtaacatatgtattgata

SEQ ID NO: 81670 - DNA, 416 bp, Homo sapiens
  sig_peptide (17)...(152): this location contains the signal peptide sequence, MQAKLLNCLLSTRMLLFLPSNIEYQHFYQSSTSLIVNCQLLSSGV, Run with SignalP
  misc_feature (367)...(236): similar to gi600040 in the genepept database release 114, Run with FASTXY 3.3t00, default parameters
cccacgcgtccggtacatgcaagctaagctccttaattgtctgttatctacaagaatgcttctctttttgcccagcaatatagagtatcagcatttctatcagtcatcaacaagcttgatagtgaactgtcagctgctcagctcaggggtagaagagctgagtagttatgaaagaggcagccaagggacacactgctgagtccatccactagatcagccagtcctgacatgtatgccataacagccataacatattaactccacagtcagtgaagaaaaacgcatcatatgtaagtgtgacaagtattggtttaaatatgtataaatcaaagccatatattttgtttttcatcaagaataaataaaagaaacaatcctaacaagaaattttacatttaaacgatgttaaaaatgct

SEQ ID NO: 81671 - DNA, 1882 bp, Homo sapiens
  sig_peptide (56)...(191): this location contains the signal peptide sequence, MLLLLLLPLLWGRERVEGQKSNRKDYSLTMQSSVTVQEGMCVHVR, Run with SignalP
  misc_feature (56)...(1458): similar to gi5295850 in the genepept database release 114, Run with FASTXY 3.3t00, default parameters
aagaaccctgaggaacagacgttccctcgcggccctggcacctccaaccccagatatgctgctgctgctgctgctgcccctgctctgggggagggagagggtggaaggacagaagagtaaccggaaggattactcgctgacgatgcagagttccgtgaccgtgcaagagggcatgtgtgtccatgtgcgctgctccttctcctacccagtggacagccagactgactctgacccagttcatggctactggttccgggcagggaatgatataagctggaaggctccagtggccacaaacaacccagcttgggcagtgcaggaggaaactcgggaccgattccacctccttggggacccacagaccaaaaattgcaccctgagcatcagagatgccagaatgagtgatgcggggagatacttctttcgtatggagaaaggaaatataaaatggaattataaatatgaccagctctctgtgaacgtgacagccttgacccacaggcccaacatccttatccccggtaccctggagtctggctgcttccagaatctgacctgctctgtgccctgggcctgtgagcaggggacgccccctatgatctcctggatggggacctctgtgtcccccctgcacccctccaccacccgctcctcagtgctcaccctcatcccacagccccagcaccacggcaccagcctcacctgtcaggtgaccttgcctggggccggcgtgaccacgaacaggaccatccaactcaatgtgtcctaccctcctcagaacttgactgtgactgtcttccaaggagaaggcacagcatccacagctctggggaacagctcatctctttcagtcctagagggccagtctctgcgcttggtctgtgctgttgacagcaatccccctgccaggctgagctggacctggaggagtctgaccctgtacccctcacagccctcaaaccctctggtactggagctgcaagtgcacctgggggatgaaggggaattcacctgtcgagctcagaactctctgggttcccagcacgtttccctgaacctctccctgcaacaggagtacacaggcaaaatgaggcctgtatcaggagtgttgctgggggcggtcgggggagctggagccacagccctggtcttcctctccttctgtgtcatcttcattgtagtgaggtcctgcaggaagaaatcggcaaggccagcagcggacgtgggagacataggcatgaaggatgcaaacaccatcaggggctcagcctctcagggtaacctgactgagtcctgggcagatgataacccccgacaccatggcctggctgcccactcctcaggggaggaaagagagatccagtatgcacccctcagctttcataagggggagcctcaggacctatcaggtcaagaagccaccaacaatgagtactcagagatcaagatccccaagtaagaaaatgcagaggctcgggcttgtttgagggttcacgacccctccagcaaaggagtctgaggctgattccagtagaattagcagccctcaatgctgtgcaacaagacatcagaacttattcctcttgtctaactgaaaatgcatgcctgatgaccaaactctccctttccccatccaatcggtccacactccccgccctggcctctggtacccaccattctcctctgtacttctctaaggatgactactttagattccgaatatagtgagattgtaacgtgtttgtctctctgtgcctggcttatttcactcaacataacatcctctaagttcatctgtgttgtttccaatgacagagtaatgtactgaataattcaaaatagctaaaagagaggagtttaaatgttgtcaccaaaaaaaaaa

SEQ ID NO: 81672 - DNA, 869 bp, Homo sapiens
  sig_peptide (848)...(713): this location contains the signal peptide sequence, MAWIPLFLGVLAYCTGSVASYELTQPPSVSVSPGQTASITCSGDN, Run with SignalP
  misc_feature (838)...(470): similar to gi31455 in the genepept database release 114, Run with FASTXY 3.3t00, default parameters
ttttttttttttgattgacaatgagaatatttattgagggtttattgagtgcagggagaagggcttgatgccttggggtgggaggagagacccctcccctgggatcctgcagctctagtctcccgtggtgggggtgagggttgagaacctatgaacattctgtaggggccactgtcttctccacggtgctcccttcatgcgtgacctggcagctgtagcttctgtgggacttccactgctcaggcgtcaggctcaggtagctgctggccgcgtacttgttgttgctttgtttggagggtgtggtggtctccactcccgccttgacggggctgctatctgccttccaggccactgtcacggctcccgggtagaagtcacttatgagacacaccagtgtggccttgttggcttgaagctcctcagaggagggcgggaacagagtgaccgagggggcagccttgggctgacctaggacggtcagcttggtccctccgccgaacatcacagcagtgctgctgtcccacgcctgacagtaataatcagcctcatccatagcctgggtcccgctgatggtcagagtggctgtgttcccagagttggagccagagaatcgctcagggatctctgagggccgcttgtcatcttgataaatgaccaacacaggggactggcctgccttctgttgataccaggcaacatatttattgcccaggttatctccagagcaggtgatgctggctgtctgtcctggggacacggacactgagggtggctgagtcaactcataggaggccacggatcctgtgcagtaagcaaggacgccgaggaagagagggatccatgccatggctgagcgacctccgatgctg

SEQ ID NO: 81673 - DNA, 798 bp, Homo sapiens
  sig_peptide (643)...(508): this location contains the signal peptide sequence, MLFSTDTDLSTLLFKDFGGWLLFFCCCCFCFVLFLLLIIGKVWIY, Run with SignalP
  misc_feature (576)...(534): similar to gi58935 in the genepept database release 114, Run with FASTXY 3.3t00, default parameters
cgaccggcctgtcactaaataaaggttaactggctgtgagaatcttgaaacacggcccctagcatccagaacccctactaggttctagagcccgaatgtgcagctactgcttggaaaatcagctttaaatggacttgagctgatcaaatgaacccacaatgtagaggcaggcaggggctaatttcctacttgaaagtaggaaggacacaaggaaataattttcaaaatcaaataaaaagagaatctgacccaacaccttcattctgacccatttgtagtgggttgtctatgatctcggggtggattctggaaatgggcacagtgaaatgcctggcaaccatctacgcatgtgaccaacttcactatctcccctcccacatcaatgccaatttaaaaatgcaaattctcatgtggcctagattcctttcgatgtggtgagacattttacttcattctggctacagttaattgtataaaatgagccagaaattctaaaataatttccagtaaatccaaaccttgccaatgattaaaagcaggaacaaaacaaaacaaaaacaacaacaacaaaaaaacaaaagccaacccccaaagtctttgaacagcaatgtgctgagatctgtgtctgtggagaagagcatttgctgccacaccacgttctctctatagccccaccctggcaagcgtgagtgcagctctacttggaaaccaacagaaaccgaaccagtgtgagagggaatcacagccaaaaggagctgatcagggacacgctctgcttttaaagtactcatctaacag

SEQ ID NO: 81674 - DNA, 725 bp, Homo sapiens
  sig_peptide (83)...(218): this location contains the signal peptide sequence, MIRCLAQPAAVLSSLGLAQVLGDSGRDEQVLLRRSFRAEGCVLCL, Run with SignalP
  misc_feature (360)...(208): similar to gi3252930 in the genepept database release 114, Run with FASTXY 3.3t00, default parameters
tttctctagggtttttgcaccaaaatgcgcctcctgtgcccgtcctatcctccctgcacaggtaggagccactcacccagagatgatcaggtgcctggcccagccggctgctgtcctgtctagcctgggtctagcccaggtcttgggcgacagtgggagggatgagcaggtgcttctccgcagatctttcagggctgagggatgtgtgttgtgcttgtgtacgtggggtacagctgtcccctggcacaaggtcgagggaagtggtggcccctgccgctcagctgccccactgccagcctctgctccattctccattgatggaagggccgttccctgggtcttctcagctctgcaggctgaggtgggggtgctgggggagcagatgagagatggacgtggtctgtgcgggagccacccatgggtgctacagctctcctggcctggggtcttcccacagtgctggctctgtcccaggctggtgtgcctggcaaagcagaactggcagtgcccttttgagactccaaggaagtgaaaacaggccgggcacaggggcccacgcctgtagtcccagcactttgggaggccggggtgggatgattgcttgaagccaggagtttgagaccagcctgggccgcctagtgagaccccatttctacaaaaaaaaaaaaaagaaaaaaaaaaggggggggccttttaaagctatggttaaactcccccttgacaaa

SEQ ID NO: 81675 - DNA, 629 bp, Homo sapiens
  sig_peptide (432)...(567): this location contains the signal peptide sequence, MNIKQSSSGLCTLVWLTLKTPLGPLLEGVQTPGPAGCTTTLTPYL, Run with SignalP
  misc_feature (590)...(531): similar to gi2650710 in the genepept database release 114, Run with FASTXY 3.3t00, default parameters
ccagctccactgaatcagaacctgcattttaacaggattcccccagctgattgggctgcacattaaagtttgacaagcactgatttaaagtatacccatagcatttgacagcaatctagtatttttcgttaggatgagggagaggaagggagatgattaagaacctcctatgcatcaggtaagatgctaggctgttcaggggccttgtctgcttcccagtccattactctatcttacaagtaaggaaatgggaagacttgtatgttacaactaatgagggagtcaaactttttcttgacggttggataccctttagtacttcttggtgttcttgaatctggtagaaagtggtacatgatttgagaagtaaagtgtgtgtgagtgtgtgtgtgtgtgtgtgtgtgtgtatttagtctgtggaagcttagtatatgaatattaagcagagctcttctgggctctgtacccttgtgtggctcacactaaagacacccctcgggcccctcctggagggagttcagactcctggccctgcaggctgtaccaccaccttaaccccttacctccctgcttccactgaggcaagcaaatgccctgaagtcccctcattctcttaccagggccctggg

SEQ ID NO: 81676 - DNA, 624 bp, Homo sapiens
  misc_feature (1)...(624): n = a,t,c or g
  sig_peptide (14)...(149): this location contains the signal peptide sequence, MHGCHRLFQTLLPVLKSSWLSVPGLAVPLVMAVFLISSSYFLLCV, Run with SignalP
  misc_feature (50)...(143): similar to gi11688 in the genepept database release 114, Run with FASTXY 3.3t00, default parameters
ctccacctgccacatgcatgggtgccatcgcctatttcaaactctcctcccagtactgaagtcttcctggctctctgtgccaggcttagctgtgcccttggttatggcagttttcttaatttcttcaagttattttcttctgtgtgtctttaccattagatccctgagggcatgggtcttgccgtttacctctgtccctagagctcaaggcggttcttgctgtcggtctcagtggttatataagaccctccctccttgtttggtctgtaaacctgtgtaggacagacgtctgcatctaatggtggcattgggttcacaggagacaggcccatctgagggatgtggatggcataggctgtactttgtggcccaaggttgtccccaaccaagtcaaccaaggtggattctctggtgcagatttgcgggcaggggnttgtcatttctttcctgtctctgtgactcactccttgttttgtagagctgttctttaaaatcccttgagtgtattaatactttccatttcattgttcatttggcgaaaatcattcttaataagtacattctcaagtgcagggcccagtgtttgtttttcttgcacattcttagagcctaattttgcagctc

SEQ ID NO: 81677 - DNA, 2912 bp, Homo sapiens
  sig_peptide (1726)...(1861): this location contains the signal peptide sequence, MGAGCTPVVLGAALWLWRWFSRWGLGGLCWRPCTCTPCHSASPGA, Run with SignalP
  misc_feature (2847)...(2518): similar to gi33616 in the genepept database release 114, Run with FASTXY 3.3t00, default parameters
tttcgtggtccgccaggctccaggcaaggggctggagtgggtggctctcatatcacctgctggcagccatcaacagtacgcagactccgtgaagggccgattcaccgtttccagagacgattcccagaacatgctttttctgcaaatggacagactgagacctggagacacggctgtctattactgtgcgagagaaaaggaatcttcctttgactgttggggccagggatctctcgtcaccgtctcctcagcctccaccaagggcccatcggtcttccccctggcgccctgctccaggagcacctccgagagcacagcggccctgggctgcctggtcaaggactacttccccgaaccggtgacggtgtcgtggaactcaggcgccctgaccagcggcgtgcacaccttcccggctgtcctacagtcctcaggactctactccctcagcagcgtggtgaccgtgccctccagcagcttgggcacgaagacctacacctgcaatgtagatcacaagcccagcaacaccaaggtggacaagagagttgagtccaaatatggtcccccatgcccatcatgcccagcacctgagttcctggggggaccatcagtcttcctgttccccccaaaacccaaggacactctcatgatctcccggacccctgaggtcacgtgcgtggtggtggacgtgagccaggaagaccccgaggtccagttcaactggtacgtggatggcgtggaggtgcataatgccaagacaaagccgcgggaggagcagttcaacagcacgtaccgtgtggtcagcgtcctcaccgtcctgcaccaggactggctgaacggcaaggagtacaagtgcaaggtctccaacaaaggcctcccgtcctccatcgagaaaaccatctccaaagccaaagggcagccccgagagccacaggtgtacaccctgcccccatcccaggaggagatgaccaagaaccaggtcagcctgacctgcctggtcaaaggcttctaccccagcgacatcgccgtggagtgggagagcaatgggcagccggagaacaactacaagaccacgcctcccgtgctggactccgacggctccttcttcctctacagcaggctaaccgtggacaagagcaggtggcaggaggggaatgtcttctcatgctccgtgatgcatgaggctctgcacaaccactacacacagaagagcctctccctgtctctgggtaaatgagtgccagggccggcaagcccccgctccccgggctctcggggtcgcgcgaggatgcttggcacgtaccccgtgtacatacttcccgggcgcccagcatggaaataaagcacccagcgctgccctgggaagtatgtagacggggtacgtgccaagcatcctcgtgcgaccgcgagagcccggggagcgggggcttgccggccgtcgcactcatttacccggggacagggagaggctcttctgcgtgtagtggttgtgcagagcctcatgcatcacggagcatgagaagacgttcccctgctgccacctgctcttgtccacggtgagcttgctatagaggaagaaggagccgtcggagtccagcacgggaggcgtggtcttgtagttgttctccggctgcccattgctctcccactccacggcgatgtcgctgggatagaagcctttgaccaggcaggtcaggctgacctggttcttggtcatctcctcccgggatgggggcagggtgtacacctgtggttctcggggctgccctttggctttggagatggttttctcgatgggggctgggagggctttgttggagaccttgcacttgtactccttgccattcagccagtcctggtgcaggacggtgaggacgctgaccacacggtacgtgctgttgtactgctcctcccgcggctttgtcttggcattatgcacctccacgccgtccacgtaccagttgaacttgacctcagggtcttcgtggctcacgtccaccaccacgcatgtgacctcaggggtccgggagatcatgagggtgtccttgggttttggggggaagaggaagactgacggtccccccaggagttcaggtgctgggcacggtgggcatgtgtgagttttgtcacaagatttgggctcaactttcttgtccaccttggtgttgctgggcttgtgattcacgttgcagatgtaggtctgggtgcccaagctgctggagggcacggtcaccacgctgctgagggagtagagtcctgaggactgtaggacagccgggaaggtgtgcacgccgctggtcagggcgcctgagttccacgacaccgtcaccggttcggggaagtagtccttgaccaggcagcccagggccgctgtgcccccagaggtgctcttggaggagggtgccagggggaagaccgatgggcccttggtggaggctgaggagacggtgaccgtggtccctttgccccagacatccatgtagtagtagtagtagtcccgagggaccactactgtccgctgttttcgcacagtaatatacggccgtgtcctcggctctcaggctgctcaggtacatataggctgtgctcgtggattcgtccgcggtaatcgtgactctgccctggaagttctgtgcgtagtttgttgcgccagatacagggatgatctctcccatccactcaagccctcgtccaggggccagtcgcacccagttgatcgcaaagctcctgaaactgcctccagaagccttgcaggagaccttcaccgaggacccaggcttcttcacctcagccccagattgcaccagctgcacctgggactggacacctgtagctgctgccaccacaaagaggaacctccaggtccagtccatggtgatgagctgtgctcccaggacgaaatcgtcgaaccggga

SEQ ID NO: 81678 - DNA, 431 bp, Homo sapiens
  sig_peptide (167)...(302): this location contains the signal peptide sequence, MLGICLCSICVLRLCLEKSKIFPPPRTSDHSLEGSVTPVENAARS, Run with SignalP
  misc_feature (176)...(217): similar to gi2769725 in the genepept database release 114, Run with FASTXY 3.3t00, default parameters
accaggaatacaaagatgagtttgagcatcatcctttcgggaaatgtaaatacctaaagcaaaggattctagggcaactgtttttcttccccattatcaactccataaagagtcttttctgacttctttttcaattgtcccctcctggccttttaataacatagatatgctgggtatctgtttatgttctatatgtgtacttagactttgtttagaaaagagtaagatttttccacctccaagaaccagtgatcactcccttgagggctctgtcacccctgtggagaatgcagcacggtcaggcatgtaaaagggtctcttaccgggtcctctttcaggtgggggacttagattagtagataatccttcctgggccacgggcctcatgactggtcagtagtgttgccagatttcacaaactgtatatatag

SEQ ID NO: 81679 - DNA, 1306 bp, Homo sapiens
  sig_peptide (264)...(399): this location contains the signal peptide sequence, MYVFLLCPACGRLMGSTYMRLLPQSEPALHNRILRQTEPLLYFKR, Run with SignalP
  misc_feature (325)...(183): similar to gi165924 in the genepept database release 114, Run with FASTXY 3.3t00, default parameters
gtgcttgtgcatggctccttgtacaagaaagtagctttatttgaacatctgattgctagtcagctatctccaggaaaagatgatgaaggcttgtctttgaggtgtggctcacacgtgtctctctagcaactatgctgctagtgacagagacgtatgacatttgcatttggttgttagcgcaggcagtttggcacacacttgatacaaccaggctgtgatgattggcgcaggggtacggacctcagctgagtcatgggagctgaatgtatgtgtttctcctttgtcctgcatgtggcaggctgatggggagcacttacatgagactgttgcctcaatctgagcctgcacttcataacagaattctaagacagactgaacccctgctgtactttaagagagggaaacagcagggtctgttctatgcctcttttccagctgtgcacaggatggattccctccttagaaggacagtggtgatcctctacaagaggacaaatacagttggagtatcccttttccaaaatgcttaagaccagaagtgtatggggttttagattttggagcatttttggattaggaatattcaacctgtaccagcaaatcttgacattggcagcatatcagatttacctgtgaaaactgcagtgtagattcgtttggggagtttaagcacctgcggtgattctcatgtacacacagggctgggagctagtagagcccacagatgtgtgtctttgggagcttacagtatagttaagaaaagggcatttagtctctgatttcagagagaagacagctatagtggctgattgccttcgttttctaatagcattcataatctttttcctttcttgagcaggaaaatgttggggctcttcaggaagcataataagattcctagaagggagttgctgaatgaccttatggacaggggcaaagtgtctaacaagcccttccccggccattggaagtaatagagctggccagtgcccttagccttacctatgtgtgaggccctcacccagagcagtatggtgtgaatttggtatcaccccgcgacacaaaggagccctacgctaactaatcgctggtaccactgacagtggaccttcgctccataatgtacccgtacggtgccccacggaaggcaatggcgccggcgattccgagcaaccaaggctgcaccataatgtgtgaacctcacctggaccgaataatgcctacttaccttctccaacacagagcagagtcgcgccgttctgagaaccaatacatcgcacgctgtagcgcagtcgactctatttcc

SEQ ID NO: 81680 - DNA, 971 bp, Homo sapiens
  sig_peptide (335)...(470): this location contains the signal peptide sequence, MSITRLFPALLECFVIVLCGYIAGRANVITSTQAKGLGNFVSRFA, Run with SignalP
  misc_feature (341)...(583): similar to gi1799784 in the genepept database release 114, Run with FASTXY 3.3t00, default parameters
tttcgtgctgacagggccgcatcggcttaccccaccttactttatctgtacgcgcctaagctgctgcagctggcacccggttgcgctcggcgaagagggctgggggcgggagatgacggtggtcttttccctgcttggcaccctgcgagcaccatctccctttttctcgccactccaaggttgcagacgaagcatagatctggttggagttggagggtgagagaaaatgaattctaatttacctgcagagaacttatccattgcagtcaatatgaccaagactttgcctacagcagtaacgcatggatttaattccactaatgacccaccttcaatgtcaattacaaggctttttccagccttactggaatgctttgtcattgtcctttgtggctacatagcaggaagggccaatgtcataacatcaacccaggccaaaggactaggaaattttgtctccagatttgcacttccagctttattattcaaaaacatggttgtacttaatttttccaatgtggactgggccttcctatatagtatcttaattgccaaagcttctgtatttttcattgtatgtgtattaaccttattggttgccagtcctgatagtcgatttagcaaagctggactattccctatttttgctacacaaagtaatgactttgcattgggataccctataggtaagttaatttttatttttcaagtgtttaaaaaattcaattttaatttatttaggcatttgttagtaacagattcttactctcatatctaagaagtttttcatttttttctcaaatatgtcttaggatgaatcatagtttttcctaaacttcagagtttgaggatcctttaaacatctacctaaaataaacgggcatattctaataaccccctgtgaacaggcccaaattggaatttttttcttcccgggaagcacatatgaaaagaagcttatattttttaga

SEQ ID NO: 81681 - DNA, 1305 bp, Homo sapiens
  sig_peptide (533)...(668): this location contains the signal peptide sequence, MMTWASLALGLTRALGGMGSFLLRILGWSWAMGSRSRARWPRGRL, Run with SignalP
  misc_feature (1020)...(1128): similar to gi2297454 in the genepept database release 114, Run with FASTXY 3.3t00, default parameters
gccgcatgacagagggcggagggacctggggggaaggccggccagcgccacaaatcggcagcagtgtggatctgtctctttgatcgggggctggagcttccctcctaatcagctccccctcctcctgcccctgagcccccaaaagaggagtttttttaaaaaacggaaaaagcagtgtttcagggaatctgttacaagtgagcgactgaaactgagaaaaaggagaggcaaggagaccagaggtcaccctgagggcgcacgtggggtctgtctgtcctgcttagatctcccctctccctgaaaggaagcaggtgccgagagccggggaggccttcccgggggcatcagcacagtgagatccgcccgctggagagggtagaatggttgtatcttgctgaatgactgaagagtgagtctgagttttgttttcagcggtattattatttgtgagtctaacctagcgggtggtcctggctgtcaccggtgcttgggcgggatcaccaccagcggctgcccgtacttgggccgccacatgatgacctgggcatcgttggcattgggcttgaccagggcgctgggcgggatgggctcattcttgctcaggattttgggctggtcctgggcgatgggctcccgcagccgggcgcgctggcccaggggccggttggggttcacctcgatgctgagctgcatgcgccagtgcagcgtctgcaggatgatcatgtcgttggtggaggtgttggtggccaccagccaggtggtgaagctctggtcccggtagatgttggtgagcttggccacgttgctcttcgcttacaggcgcggcccatgtgacgctggggtaaaagttgtcattcatgctgatgatgaacttggagtccctcttggtggggcccacgatggtgcaggtctctgtggtgttgccgtaccaggggtagttcaccccgtccgagtcgctgatggcttggatcttgccctcctggaggtcggggagctcccagctggacatgcctcaactgtcctcccacaaacaacaggtgaagacgcttccttcccccaaacactgggcacgactgatctttttcaatgcacccaactccaatcagcaaaacaaaggatatcagtatgtaacttgtcatttccctgattactacggctgttgagtgacgcctcacttggtctccaatgtttgtttccagtgcttggaaggtggatgagggctgcagcaatcccttggccagggctggtcctgggggagctctctttaggctgggtcatcccccctacttcctcccaccccaaagc

SEQ ID NO: 81682 - DNA, 678 bp, Homo sapiens
  misc_feature (1)...(678): n = a,t,c or g
  sig_peptide (71)...(206): this location contains the signal peptide sequence, MGQVYSWSAFIVALRVSPGLHSNAHGPDYTYMLAWLFFIYVNSSI, Run with SignalP
  misc_feature (131)...(218): similar to gi2688795 in the genepept database release 114, Run with FASTXY 3.3t00, default parameters
cggaaccccgcggcgacccacgcgtccggtcaaggcaacttttcttgtagcccggtaggggtgggagaagatgggacaagtctacagctggagtgcctttattgtagctcttagggtaagccctgggcttcatagcaatgcccatggcccagattacacctatatgttggcctggttattctttatatatgtcaattcctccatacttttaatcatttttgcatttattcattatttgtagtagtttcaattgactgatcctaataaccagttttccatcttaccagaaacaggacttcaaataatttagaatgctacatttcttctaattaacattccaaatatggggctaacactggttttgactcaaattctttaatgtgttcaaaaataatctaatgaaagttacacacacaacattatgagttgggaagagcttagaaaccaacacctctttacagtgaccctnnnaaaaaaaaaaagaagaaaagcaaccccnaaagcgggggctatgtaaatgtccttttgggggcaccaataattagcccggctcaagaaaaaaaaccatttttttttttaggggcgggggtttaaaaaccccgcctgtgggtttttttggggaaaaaccacttttttttttgggggggggggaaaaaaggcggggaatatttctttatt

SEQ ID NO: 81683 - DNA, 3817 bp, Homo sapiens; identical to SEQ ID NO: 59612
  sig_peptide (1684)...(1819): this location contains the signal peptide sequence, MILFPLCPSILSLKPKKKEALPSLSVMGTVFLLVSCSLPSPAACG, Run with SignalP
  misc_feature (41)...(1236): similar to gi2052058 in the genepept database release 114, Run with FASTXY 3.3t00, default parameters

SEQ ID NO: 81684 - DNA, 447 bp, Homo sapiens
  sig_peptide (102)...(237): this location contains the signal peptide sequence, MWLGQAFWAWLSFMNRWHSKFLMVRSRGECGAQRQLLCVFVFRDS, Run with SignalP
  misc_feature (312)...(183): similar to gi2804168 in the genepept database release 114, Run with FASTXY 3.3t00, default parameters
ctgccttgcagcctgtgtgggcccaggttcttgcttcatcccagccatagtgggagccaccagcttgggggagcttctgttccatctgcttggctcttagcatgtggttgggacaagctttctgggcctggctaagttttatgaacagatggcacagcaaattcctgatggttaggtcaagaggagaatgtggtgcccagcgccaacttctgtgtgtgtttgttttcagagactccctacgggaggggatgccccgcaggaacatggtaagtagtgaggcgcatggttgcctcttgagaacggctgtcttttatgctacctacccctgtacaagttatgcgaaggaaaccaagccatctgcatgtttatttcctctgctcataataggaaaatggatgttatggagcttcaagaattgagctacccaccgaaccctaatgggtaagc

SEQ ID NO: 81685 - DNA, 641 bp, Homo sapiens
  sig_peptide (265)...(400): this location contains the signal peptide sequence, MHLISSCLWCLTCHVQSEGQQPKTAARKLPANDLRVLEWTFSQGG, Run with SignalP
  misc_feature (453)...(503): similar to gi11720 in the genepept database release 114, Run with FASTXY 3.3t00, default parameters
gaacagccatttacactctaaaccttcactggggcagccacttggtttccaaaaagcatttcttgcatagtgtttgaattaaatctccccttcgaagttgggagacatgagttaaaagccctctcagcagcagataaatatagctatgtttggtccaggttacagttgctgagggaactataactttgatttgctctcctggtataaatgtaaatccttaagtgaaatgagttaagtgagggaggaggcgccctgtttttaaggatgcatttgatcagcagctgtctgtggtgcctcacctgccatgtacaatctgaggggcagcagccaaagactgcagcaaggaagcttccagcaaatgatctaagagttctagaatggacattttctcagggagggtttcagatcagttttgtcttagagataaacacaattggtttaacagtctgggttggaaaataaagtttaatttcagcacagtttttgcaagcaacctagcatgctaaagtcatctttgccctctatttattaccttgcctttggcctgcaaattaaaacctcagcttaattttttcttttccaaaccacatttttcaaactgtttttttgccggcgggttaaattttttttcccccaccccg

SEQ ID NO: 81686 - DNA, 627 bp, Homo sapiens
  sig_peptide (168)...(303): this location contains the signal peptide sequence, MVQAPSYHIISHVSSWVLALWLGSSFASELSFPCGLPHSHFGVRI, Run with SignalP
  misc_feature (327)...(225): similar to gi473910 in the genepept database release 114, Run with FASTXY 3.3t00, default parameters
ctcttttaggaattctctccactcatgcctcctcaccattttacaatgagccctgccaaattttactttccttttatgctgcagattgttctgttccaagtgggtaaatggaaactgtgttcctaagatgcagccagttaccttggaattcctgttctccattccgtatggttcaggcaccctcttatcacatcatcagtcatgtttctagctgggttctggccttatggttagggagcagctttgcttcagagctttccttcccctgcgggctcccccactcccactttggtgtgagaatcatggggaaccaggggtgacaccatttattttaaaacaagccagcacacatgtttgtaggctttttaaagccatagactgtaagtggacacttccggtgttcctcaggccccagctggagaagtggcccttggttccatgggtcctcgtgggatggggatccaaggtgattaaaaagcaccagctttgcggcactcagacctgttgccactcctgcctccaagcacggagttttcttgtaaaaactgggattcaagttttcatctctcatgagcggggaggaagatgggcataaacaattaggagtataagcaccttcccatcttc

SEQ ID NO: 81687 - DNA, 650 bp, Homo sapiens
  sig_peptide (145)...(280): this location contains the signal peptide sequence, MILVSLLILIVEPLFASLTPLSLCFECVVFLNVGQHLTDQTFSLN, Run with SignalP
  misc_feature (321)...(256): similar to gi414762 in the genepept database release 114, Run with FASTXY 3.3t00, default parameters
cttatttaccctgtgcctatcatgtagcaagcacttcataaatgttagctattattactgccaaataattttaactttacttgggtcaacttcttcacagaatgatataaaggagtatctaacattctccatccagttcaaaccatgattcttgttagccttttgatcttgatagtagagcccctgtttgcctctctgactcctctgagtctctgttttgagtgtgttgtatttctaaatgtaggccaacatcttactgaccaaactttctctttaaatgggctgttgtttttaagcaatagttgattgggagggtggggtgtgagttgtggaatacttaaaagccagggctctggacttgagaaaggcctgagtttgaaaacttgacttgcttttcactatttgatcaaaggcaagttattctctctccagtgttttcctctgaaaaatgggaatagtaatatcttcatagggttgctgtcagaattaagtgaagtaatgcatgtgaaatgtttgacatgatactgacacttcacaagggttaaatagatattagctgctgttggtttataacattaatatccatggtggctgagactgtggcaatgttattcattgtgtatttctagtgtagagcaagtgatcagtaa

SEQ ID NO: 81688 - DNA, 432 bp, Homo sapiens
  sig_peptide (8)...(143): this location contains the signal peptide sequence, MCFSCLPLQCLAMGHKHYPAVGRLAKRSQLASPASSREWNHGSNT, Run with SignalP
  misc_feature (126)...(234): similar to gi538465 in the genepept database release 114, Run with FASTXY 3.3t00, default parameters
tgtggatatgtgcttttcctgtctccctcttcagtgtctggccatggggcataaacactacccagcagtaggtaggctggccaagagaagccagcttgcatcaccagcatcatctagggaatggaatcatggcagtaatacgttgcttaggaaacaaaagctctatggacacatcttccaccttctcagtcccagaaaccatatgtactgtgaccccgctcactaggcccagccctcgggaagagtgtgggcccttgaaaagggaagactgagtgagaaaatgatgagaaaactacaaaatgggcagaggtcagtctgacacattcattctctgtcaagctcaggaagtactggtccctgatcttggagatgctgtgtgagtggcagggggactcctgctgggtaaatattctatatgtggatgcctggacg

SEQ ID NO: 81689 - DNA, 655 bp, Homo sapiens
  sig_peptide (165)...(300): this location contains the signal peptide sequence, MSFCLISRLAFECCWCFLLSSLECHKKADQREPSIRICFLPPFLA, Run with SignalP
  misc_feature (282)...(155): similar to gi4186090 in the genepept database release 114, Run with FASTXY 3.3t00, default parameters
aaaggaaaaaagagccataaatacaaatgaattccttttatacgagttgaaaaaccacaggacatgctccattttttaacactccaggtgtgatcggagattacgtatccaccacaggagagtggagagttaattaaaatttttgctcctactcagagaaagaaatgtctttttgtttgataagcaggctggcttttgagtgttgttggtgctttcttctctcctcactggagtgtcacaaaaaagcagatcaaagagagccttccatccggatatgtttcctaccacctttcttagctaatggacttaaaagtgtctttcactgacaggctcatcttgtattttagaaatgccatctctttactatattgataaatatgcaaacgggctgtgatagatgcttacggaaaatcacatttaacattaattaagccaagaccattccaaatagtcggagtgggagagtctggcagagtgcaacatctcacccctaccatttgtatttcattttgtcactctcttaaagaaaaaatcagcaggatttctcccaaacattttttccccctcagggctaggagatgtcagccagagggtacagaatcataaaggccaaaagcaaaagggaaaacacaacaaaacaaccctgcttgagaga

SEQ ID NO: 81690 - DNA, 446 bp, Homo sapiens
  sig_peptide (31)...(166): this location contains the signal peptide sequence, MVLFWYQTAASVWSWPSYYFQKSSQWVGVDQKLRKSMHQFWCNIP, Run with SignalP
  misc_feature (176)...(63): similar to gi2947234 in the genepept database release 114, Run with FASTXY 3.3t00, default parameters
ctgggatggtcttgggcaaactaggacaagatggttttattctggtaccaaactgcagcctctgtttggagttggccaagttactactttcaaaaaagttcccagtgggtaggggttgaccagaagcttagaaaatctatgcatcagttttggtgcaatatcccgaaggtgtttgctccattcaggtgccacatacaggcctgttgcctgtctcttctcctttattgctcaggattatggatgcttactctggataaggccccagcaggcattgtgtgttatccttttgagtcctctaacctacttgcagatggggaagtgggcccagagaggctgagtgcctggtccaagggtgcacagcttcatagtagcaaagctgggactcacccactgtgcctcggttctgtgaatttttcagcgagtcctcaagaatgtcgacgcggccg

SEQ ID NO: 81691 - DNA, 410 bp, Homo sapiens
  misc_feature (1)...(410): n = a,t,c or g
  sig_peptide (242)...(377): this location contains the signal peptide sequence, MVFLLHLSFQLFFSCAPARQYVGGVLRYTSCFLATVSFLIPISSI, Run with SignalP
  misc_feature (250)...(300): similar to gi12997 in the genepept database release 114, Run with FASTXY 3.3t00, default parameters
aaactactgggattctaggcataaaccactgtgtccgacctagctgtatattttaaacttcattcttcaaagcacccaggactcgggggggtgaaaaagagggaccccctagactccttctcttgcttcacctagaacatttatattttcatctatttatggacaaacttttattttaaatttgaaagtcgtgggctctcagattgaagaatacactctacctgggactgaaagatactccatggtctttttactccatctttctttccaactcttcttttcatgtgctccagccagacagtatgttggtggagtcttgaggtatacctcatgctttcttgccactgtatcttttcttataccaatctcctccatctgaaatgcccctttcccatctgtttaaattttan

SEQ ID NO: 81692 - DNA, 638 bp, Homo sapiens
  misc_feature (1)...(638): n = a,t,c or g
  sig_peptide (205)...(340): this location contains the signal peptide sequence, MRSMPGNCLPLWPHLLARPPRELWPDVMGLPMVASVLCFSGFWAF, Run with SignalP
  misc_feature (46)...(222): similar to gi2465334 in the genepept database release 114, Run with FASTXY 3.3t00, default parameters
gtgactggtggctcctgcctgtacacactctcttgactcagtgtgctctctcccctgcctgggccacagctgcagcatcctcaagagtctccccgtaccagccactccctgctgatttgtcctgcctcctgcagtcctaaaggcagatctgaccctaccaccaccctgtttctagcccttgcctggctccctactgctcacaggatgaggtccatgcctgggaactgcctccctctgtggcctcatctcctagcccgccctccccgtgagctgtggcctgatgtcatgggtctgcctatggttgcaagtgtgctgtgcttttctggcttctgggcctttgctcacgccattctgcctgccaggagtgctctcctttcctcacctcccacctctgtacccctcacatccctgttgaggtagaagtccatcctggaagctttcctagagcccccaagctggccttgatggttctgctgccacccaccctgggtctcctttacagcacccacctgctgccccgtcactgtttgtaggggaataaaaaccgncacaaccagaggccaagccccagggcatcccaaagggccctccccgggaaaggccggcccctaaaccttaagggggcctggaggcccaat

SEQ ID NO: 81693 - DNA, 472 bp, Homo sapiens
  sig_peptide (274)...(409): this location contains the signal peptide sequence, MVRVLTVAWPSHWCGAQRRNIPDLQDREIGRGSRRAQVPNDVLSG, Run with SignalP
  misc_feature (383)...(331): similar to gi4105810 in the genepept database release 114, Run with FASTXY 3.3t00, default parameters
gcactcggcatagtaggctgacagttctggatgctaatcccagggctggcactcaaccaagagacctggggcgtcacgtgccctctccaagcctgttaacccatccgaaaatgagccagaattcctgtcgtgcatttctggaaaggtgtgtgactttccggaaaggtgtgtgactggctcccactggtgagccagcccctatggggcttcaggccaggcaggccactctgaccaaggagtgtcatctgccaggctcagaagtggtgaagtgagatggtgcgagtgctgacagtagcctggcccagccactggtgtggggcacagagaaggaacataccagacctccaagacagggagataggcaggggcagccgcagggctcaggtgccaaatgacgtgctctcaggtgaccttatccccactcctcttccactctcctctccccatccccgcaggacattgctgagtcccc

SEQ ID NO: 81694 - DNA, 953 bp, Homo sapiens
  sig_peptide (44)...(179): this location contains the signal peptide sequence, MGSTAILALLLAVLQGVCAEVQLVQSGAEVKKPGESLKISCKGSG, Run with SignalP
  misc_feature (44)...(430): similar to gi33616 in the genepept database release 114, Run with FASTXY 3.3t00, default parameters
cccacgcgtccgctcagggcttcattttctgtcctccaccatcatggggtcaaccgccatcctcgccctcctcctggctgttctccaaggagtctgtgccgaggtgcagctggtgcagtctggagcagaggtgaaaaagcccggggagtctctgaagatctcctgtaagggttctggatacagctttaccagctactggatcggctgggtgcgccagatgcccgggaaaggcctggagtggatggggatcatctatcctggtgactctgataccagatacagcccgtccttccaaggccaggtcaccatctcagccgacaagtccatcagcaccgcctacctgcagtggagcagcctgaaggcctcggacaccgccatgtattactgtgcgagacacacagtgagagaaaccagccccgagcccgtctaaaaccctccacaccgcaggtgcagaatgagctgctagagactcactccccaggggcctctctattcatccggggaggaaacactggctgtttgtgtcctcaggagcaagaaccagagaacaatgtgggagggttcccagcccctaaggcaactgtataggggacctgaccatgggaggtggattctctgacggggctcttgtgtgttctacaaggttgttcatggtgtatattagatggttaacatcaaaaggctgcctaacaggcacctctccaatatgatagtattttaattagtgaaaattttacacagttcatcattgcttgcttgccttcctccctcctgtccgctctcactcactccttcttttattttctacttaattttacaaaatcatttaacccctttttgaactattaataggttatctttgtttggtgattgtttttcttttaataatatgtactgaataattcatctttgtaccaattcataagtattctggtgtaataaagacttctttc

SEQ ID NO: 81695 - DNA, 713 bp, Homo sapiens
  sig_peptide (27)...(162): this location contains the signal peptide sequence, MSSWFLRAGHGLIWVLFFRIGQAAVGVSAGPGGSPKAHLGRVASQ, Run with SignalP
  misc_feature (96)...(368): similar to gi5104724 in the genepept database release 114, Run with FASTXY 3.3t00, default parameters
ggcacgagcgggaaccacgcacggttatgagctcatggtttctgagggccgggcatggcctcatctgggtcctcttcttcaggattggtcaggctgcagtcggagtgtcagctgggcctggggggtcacccaaggcccacctggggagagtggcttcccagcaccctcatggggcagagagcagggcctgcctccttgcacgtggcttgcctaaggccctgagctccatgctggctgttgactgcaggccacgctcagggcctctccatcgggcggctcacatcatggcagcaagcctcatcagcaagccagtgagagggtgcctatccgaggatgatattccatcacctctgtcagattctgcttactagtcagtccccaggcccaggccactcgcaaggggaggacattacaggaggcgtgagtataggtggtgtgatctgtggggaccggcgcataggctgcccaccacatggggttaaaacctataaaacttcgaagctgaatttaattattttcgaacactaggaaataaataaggatcgctgtttctggccttcccagaacactatagggtgggattggatactatattcccccttaattttgtaaaaggggaaagcatgccctttcgatgccaacaattcacggggccttacagggaaaccttccaaccccccacgggagggcttttacttcccatccggtgcgcg

SEQ ID NO: 81696 - DNA, 703 bp, Homo sapiens
  sig_peptide (428)...(563): this location contains the signal peptide sequence, MGWDSKLLFLFTCLSCVTTCSVSTCFQAPLGSSSFAPSGIHGTLE, Run with SignalP
  misc_feature (446)...(534): similar to gi3258364 in the genepept database release 114, Run with FASTXY 3.3t00, default parameters
ctctggcagacgagcataagaatccacattttaaacaagcattccaggtgattctgatgcaaggtgatttggggtcttgaagcctcacacttacagaaactgctctcttttgcatttatgaacctggctgttgaaggcttcagatcacatgcttggggatggtagatactagtggggatcatctgactccagactgggaatcttctcgttacaggatgaccccaatcacttaggtttacttctggatcttgataattccttgatagtcctcttttactgatgtctcttacggcccttaagaaggcagagaaggggttaactgaggccacagaatagagagagtgaaggaactgaagggtcattttacagagtgactggggtgtggcccagtcctccagtaggtgcccagagccagtccaaaattagaatggggtgggattcaaaactgcttttcctattcacttgcctttcatgtgtaaccacatgcagtgtgtcaacatgctttcaggcgccattaggcagcagcagttttgctccctctgggatccatgggaccttggaatttcctgtggtgcgaggcgcccacaaaaactttttgcctatggggcctatgtacctctttccaatcaccgctggtcaaccccttaccctctttgtaaaaacacaaagcgcggggcggaattaacccgggggaaaccccccc

SEQ ID NO: 81697 - DNA, 753 bp, Homo sapiens
  misc_feature (1)...(753): n = a,t,c or g
  sig_peptide (247)...(382): this location contains the signal peptide sequence, MSFFVYVVHSTTTALLTLLTSIPQNIVHSYLYFSRYCKGFESESL, Run with SignalP
  misc_feature (440)...(359): similar to gi1549367 in the genepept database release 114, Run with FASTXY 3.3t00, default parameters
tgtcgttttgccgggtcgacccacgcgtccgcattaggagctcagtttttttaaaaaagtggagggatatttcagcaggactgcataccttcttttttttcattgggtgaaaaaggcataatattttgaataattgctggtgtaattacatacagtgctaaatgtttctttgaagatatgatttgtatgtgcttttgaggaataaacttacattcaataattcacaaattatgaatattactacatatgagcttctttgtatatgtagtgcatagtacaactacagcactgcttaccttgttaacaagcatcccacaaaacattgtgcattcttacctgtactttagcaggtactgtaaagggtttgaatctgagagtctaatgatagatctatacaaatgctgataggttgacctctggcaggtggaattccacttgaatttatcacttgattgttaccttttaattattttactcatgtttatttttattgatactcatatttaaaaactttcattgggagtctgttagcttcttttccaaaacactcactcctaagattcatgattgngactttggcctggccttattttgggtctgtacttactggtgcttcattcatacatgcagaagctttggaatgcctcttccaaatgtgtctttactacttgttcaggacagtcgtttttcttggatgtctgaactctttgagttgactagatttgcctcaacttgtcatagggattcaagatt

SEQ ID NO: 81698 - DNA, 580 bp, Homo sapiens
  sig_peptide (329)...(464): this location contains the signal peptide sequence, MAGHHSNERKKEVAQVTFCIIMVLWHPLIICLMYFMPDALRHMSV, Run with SignalP
  misc_feature (225)...(346): similar to gi311928 in the genepept database release 114, Run with FASTXY 3.3t00, default parameters
ataaccatttaatatatagtttttaaattttaatgattttattaagagccaatcttaatgtttagaaatcttttcaggtatctctctattttgaatttatctcaggtttggataagagatccccttgagccatgtttctaaatttttcttcttaaatagttcatacgttatttttaaaaacaacccagaatctattattttactctcattatttgggaaggataatttgcatttatgtggctctttttgaattcctggttgagggacacaaaccctgtcatgatataatcatggattccagaaaagcaccaaagtacttttctttggcatggccggtcatcattccaatgaaagaaaaaaggaagtagctcaagtcaccttctgcattatcatggttctttggcatccattaataatttgtttaatgtattttatgcctgatgccctcagacacatgtctgtgaaacacagacatatttattatttacttggaaatatgaggttatgttaatagatttactaaacagattattattgttattagtctcctggcacactgacattcatctgcatgtttttg

SEQ ID NO: 81699 - DNA, 397 bp, Homo sapiens
  sig_peptide (125)...(260): this location contains the signal peptide sequence, MPWLHGMLKAFIGFVLVLSPPHYPHTFTLNSVKGRLIFIVEALAP, Run with SignalP
  misc_feature (155)...(309): similar to gi2635196 in the genepept database release 114, Run with FASTXY 3.3t00, default parameters
cttttgcctataatcatggtcatttttatacataatcacagcacaaaaatcaattcacactagcattttacattcttcccaaatccttttataaagacgtccctgagtttcttacactaagcagatgccctggttacatggtatgctcaaggcatttattggatttgttttggttctctcccctccacactatccccacactttcacacttaattctgtgaaaggaagattaattttcattgttgaagccctggctcccagcctaaaacttcacatatggaaggtagatgaacatttgctgaataaggaacatgcatcaatcttcaaaacaaaattaggaattattttacataatctatccctaaataagtttgttcaaccctggaataagaataat

SEQ ID NO: 81700 - DNA, 657 bp, Homo sapiens
  sig_peptide (385)...(520): this location contains the signal peptide sequence, MFFLSPLSAHSSQRRLFLTYFFIALPQAASWSLSSSSLHHCGTCS, Run with SignalP
  misc_feature (383)...(230): similar to gi4261930 in the genepept database release 114, Run with FASTXY 3.3t00, default parameters
gctgaggagcacagggcaccagagtggagcaaacaacaaacatatggctccctgggttcggcagccgcctcgccccacctgaggtgtttgtgctgcaaaagttgtcctgtgctggtcagatggtgtagctgagcctcataaagataacaagacattgctcccagcacagaacccgcgtggagcaaacatttaggccagtcttcctccacacccatcccttgataaaaggggcagggccgccacctgccatagggtatcttgtgcaaattaggaaaaggcacccccctttctctggccagtgaaaccccacaggctgccctccccgctcctttgccaagcaccgtcttgcacacacttgtatgctccctgatttcccagctgataatgttttttctttctccactttcggctcattcctctcaacgaaggctgtttctaacctacttcttcatagcactacctcaagctgcttcatggagcctatcttcttcctcattacatcactgtgggacatgcagtcaacaatcaaatgaggcccaaagggaaactgaggcacagagcacctaagtgatacctggggtccccaaacctccccggcaaacctgagatttcgcatcccagtttttagagccctcaaaagttgcgtgtgtcagaccc

SEQ ID NO: 81701 - DNA, 557 bp, Homo sapiens
  sig_peptide (96)...(231): this location contains the signal peptide sequence, MFLHSRFIGASLDVKCLAFVPSLIAFVWFGFFIWFFGRFLKNEPR, Run with SignalP
  misc_feature (231)...(362): similar to gi2822285 in the genepept database release 114, Run with FASTXY 3.3t00, default parameters
aaagtttaaaagatttgaacagaaccaagctatcctgggaatggaggtccaatcacactaaccctcggactaataaaacatatgttgagggagacatgttcttacacagcaggttcataggagccagtcttgatgtcaagtgtctggcctttgttccaagcctgatagcctttgtgtggtttggattctttatttggttctttggacgatttttgaaaaatgagccacgcatggagaatcaagacaaaacttacactcgcatgaaaagaaaatctccatcagaacatagcaaagacatgggaatcactcgagaaaacacccaggcttcagtagaagaccccttgaatgacccttctttggtttgcatcaggtctgacttcaatgagatcgtctacaagtcttcccacctaacctcggaaaacttgagctcacagttgaacgaatctactagtgcaacagaagctgatcaagacccaacgacttctaaaagtacacctacgaactagactcggagatagacttggagataacacaaaaagcaaccttgagtgtaactt

SEQ ID NO: 81702 - DNA, 419 bp, Homo sapiens
  sig_peptide (100)...(235): this location contains the signal peptide sequence, MLLIIPFSSNLHNWTWPNASYDAGSPELSASPFLLCLFFFLPCIY, Run with SignalP
  misc_feature (225)...(160): similar to gi829412 in the genepept database release 114, Run with FASTXY 3.3t00, default parameters
ctttgcagggtctgaatccctgttcagccattgtttggaatctgtgtttcattgggggacttaaggattaaattggattgtgtatttgctgttacagtaatgttattaataattcccttctccagtaacttgcacaattggacatggcccaatgcttcctatgatgctggttcccctgaactgtctgcctctccattccttctctgccttttcttcttcctgccttgcatatattttaaggaaatctctggcttttcttctttctctcaaatctcctttgccaactttattacagtctctggccttatttctcacgtgtaagtagataactcttaacattttcatcttcaaacctgtgtacctcaattcgtactgcatagatccagattatatatctccattggatatcctgaactcag

SEQ ID NO: 81703 - DNA, 447 bp, Homo sapiens
  sig_peptide (25)...(160): this location contains the signal peptide sequence, MVFLKFGRLLPLVLLYIYFLPPLLLFHHFLFFWDSSYTYVRLFGI, Run with SignalP
  misc_feature (25)...(265): similar to gi536071 in the genepept database release 114, Run with FASTXY 3.3t00, default parameters
cccacgcgtccgatctgtacatttatggtattccttaaatttggaagattgttgccattggttcttctatatatatattttttaccacctttactcctctttcatcatttcctctttttctgggactccagttacacatatgttagactgtttggtattatccacaggtcattaacatcatattcattatttttcagtctttttatttccctgtgcttcagtttgctttgtcttctattttactgttttttctcctcccttgttaaataatttcagatatttcgctttatatttcaagaaattccatttgattcattttattcatgtatttttttgaattcttgagcatatttgtaatagctgtttgaaaatcaggttacttattgatttcttgaattttttcactctgaatttgttggttgggtttttctcttggccatgggttgg

SEQ ID NO: 81704 - DNA, 1005 bp, Homo sapiens
  sig_peptide (236)...(371): this location contains the signal peptide sequence, MWGRCRSLIHCCLYSSSLPLSDWCLYLAVSLSVIFRLFVLAVSIT, Run with SignalP
  misc_feature (209)...(128): similar to gi2738442 in the genepept database release 114, Run with FASTXY 3.3t00, default parameters
gaaaacgcgtccgagaagatggggtcatcctttttcttccctttaaggagctcagcatattggagagagattcttagtcacgacctcagaaacttgcatacagctttccacacacccgtcttgtctctcttgggtgcttgatctgcttttgtgagggcaaggacagtaatcaacaaacagcaacctagaaggggtttgtgcagaaggggactgtgtgactgttgcgtgggggttgatgtggggcaggtgtaggagtttaatacattgctgcctatacagcagttcattgcccttaagcgattggtgtctataccttgccgtctctctttcagtcatcttcagattgtttgtcttggctgtaagtataactattgctatagatgaatgtaaaaagagtgtttaaaaagttcgttgctttaattgcactggaggtgaagctagttacatactttccttaacttcccttctgcttttgctgttgaagaggccaaatactttcttggcatgaaaaagtattataaggcccctaatccttaggagttattagtaagagctgtctttaaagcactggcagcttttaaggtttttttttcttttgtcctacatagagcaccagaataatttcacatattactatatttttgtgtctgaaatgtcagtagaaccttctgtccaccaaagaggaacatcttgaaggagttgggctgctttatttactctgtggagggatctgttctctctggctttactttgtctaatcactacccctttgctgtcgagccccgatatttaatgagtaaacaaactcatataaaaccagtttggccgggctggtgactggttttaagaaagtcagtgatgatttcacggtgtttggggagcggtacccacaaacctttagagccttttacaaagactgaagagttttaagtagagttcaacctgtgggacaagctggtatagaactgtttgaaacaggtgaaacatgatgcttctgcttccttt

SEQ ID NO: 81705 - DNA, 443 bp, Homo sapiens
  sig_peptide (220)...(355): this location contains the signal peptide sequence, MCMPFRTWGFVVAFRLKILEDSLRELQTSADPLVLLFSLGPPENT, Run with SignalP
  misc_feature (202)...(279): similar to gi4545210 in the genepept database release 114, Run with FASTXY 3.3t00, default parameters
cccacgcgtccgaagaagtatgcttgcttaaacagatggagctagatcagacattaaaaaacaaaacagtataattattaatatatctttttatccagagcgcattggagaggatttctggcagcagaatttggtatagcatcatatttatcacctgtctggtattgacctcatgttttaagcattagaaaatgacctggctggttgtttgggcacagtatgtgcatgcccttcaggacatggggttttgtggttgccttcaggctcaagattctggaagactccttgcgtgagctccagacctctgctgaccccttagtcctcctgttttctctgggtccacctgaaaatacaaaggacttctctgcaacccgccagagtctttggggcttctctaatataactcccttctgcaattaccacatctactcctaggccttgag

SEQ ID NO: 81706 - DNA, 434 bp, Homo sapiens
  misc_feature (1)...(434): n = a,t,c or g
  sig_peptide (268)...(403): this location contains the signal peptide sequence, MKVVTALILIYLGNCKCFVAHLNTSPSAWHLQGSQTSFELCRVTS, Run with SignalP
  misc_feature (47)...(73): similar to gi3882632 in the genepept database release 114, Run with FASTXY 3.3t00, default parameters
ggatgcaaccatttttctctcagcttgaggtggtttctaatagtagatgccccaagaaacttcagctccaatcaacattaactttgtcatgatggcttcaatgttatcagttgaggaatgaaatttaataaccttgggaaccatcctaaagaagcagaaatgaacccgctctaattggagaaagaaagggcttggaaatgaatagtcttcaaatatccatttataaacccacagccaaatgtttctgaaaaattaacagtgagagggatgaaagtagtaacagctttaattttaatatatctggggaactgcaaatgctttgtagctcatttaaatacctcacccagtgcttggcacttacaaggctctcaaacaagctttgaactttgcagagtcacgtctcttgaaaaactctagggacctttcacctgtgn

SEQ ID NO: 81707 - DNA, 554 bp, Homo sapiens
  sig_peptide (292)...(157): this location contains the signal peptide sequence, MCHVHCCWKFIVELLQCVIQGIRCLYFGNICNGTCFLESCFFGMS, Run with SignalP
  misc_feature (84)...(368): similar to gi434845 in the genepept database release 114, Run with FASTXY 3.3t00, default parameters
attcagcctccagagcaccagcactggcactggcactggcacacgctatggcaaatgaagtgcaagacctgctctcccctcggaaagggggacatcctcctgcagtaaaagctggaggaatgagaatttccaaaaaacaagaaattggcaccttggaaagacataccaaaaaaacaggattcgagaaaacaagtgccattgcaaatgttgccaaaatacagacaccggatgccctgaatgacgcactggagaagctcaactataaatttccagcaacagtgcacatggcacatcaaaaacccacacctgctctggaaaaggttgttccactgaaaaggatctacattattcagcagcctcgaaaatgttaagcctggatttaaaacacagccgtctggccagctgcctcgaatatctgacagcttagcaaaaagggccaaagctttccataggcgtgctgcacttgcttggtaaattaaacagcttttgtatcttcccctttgactttaggtaataaagcatccaaacttgtaaaaaaaaaaaaaaagtcgacg

SEQ ID NO: 81708 - DNA, 420 bp, Homo sapiens
  sig_peptide (8)...(143): this location contains the signal peptide sequence, MRSFSVYQGLLGTLLMGILRDPAASQMMKEHITYFHSNLANRNLK, Run with SignalP
  misc_feature (345)...(402): similar to gi11835 in the genepept database release 114, Run with FASTXY 3.3t00, default parameters
cccacgcatgcgaagcttttctgtctaccagggactactgggaaccctgctaatgggcatattgagggaccctgcagcttcacagatgatgaaagagcatattacttatttccacagcaacctagctaacagaaatttgaaaggagccaggtattttacctggggaatctctcccaggtgatggggctatggaaccatggaatttaaatatgggggcccgcctattttctaaaatgtttttatggggagccataatatcactcccaagcagaaatcaaatcaaataagagactattgctttcatttgcatttatttagtcaactatgcctaaaatacggaaaagatattatcatgctcattcagaggggattttattcgttgtttactagactggactgacatgatatgatttgtgcttt

SEQ ID NO: 81709 - DNA, 766 bp, Homo sapiens
  sig_peptide (74)...(209): this location contains the signal peptide sequence, MGFKAGMQTFCWKCVCSLLNGGEIPWLAVLTRSDSKSMGRFEGAS, Run with SignalP
  misc_feature (275)...(202): similar to gi924981 in the genepept database release 114, Run with FASTXY 3.3t00, default parameters
aaagaggattctaatgactactctgggtctgaaggtgactacctaaagaggaaactaacttggaaagggaaggatgggctttaaggctgggatgcaaactttttgttggaaatgtgtttgtagtctactgaatggaggagaaatcccctggcttgcagtgttgaccagaagtgattcaaagtcaatgggccgttttgaaggtgcttcgaaatctattttgaaggtaataatgcttaaagaatttggacttcactgagtagttgaggtaatgataggggaggatagtatcacagtctttatatcagaagttgcttatttccctttgttttcagagaagttcaagttagtaaggcagagagctttgtttttctttcctcgcttttaccatacccctgctcctcctacttcttcttctgctgaattctctgctccacatgttaaaaataatcgagtagagatatctaaaaatataagaagtacattaagtatcgattcaaacactaaagtttaattttgaataccaaagtgaagaaaatacccatttaaagccactctatgcttctggtaattattcctctttggtttccccattatacctatttctggctctcttcattgcattcagcaatgctacctcccccttgttttgggttattgacactttaacaagctattgctgccttcgctccctgccgcccgctttgccccccggcaccgtcatcttataatattcccttttcgccccccccccccccccccagacaac

SEQ ID NO: 81710 - DNA, 395 bp, Homo sapiens
  sig_peptide (234)...(369): this location contains the signal peptide sequence, MIQFISILALLVAVLASGTALFESGKLRQNDQFDSLYAHCLGKMF, Run with SignalP
  misc_feature (203)...(295): similar to gi38952 in the genepept database release 114, Run with FASTXY 3.3t00, default parameters
tacaatatcaaatgaacaaatacatttacccttgtttgctgttaatagtcttaggaaccatatttcaattcaattaataactatgttatttttcttttcttcttttttaaaaaaaatctctttagttaattctaggcaactatgagaatatttttaagatttgtaggactcctgcctttagataacttgaattctctttgattacttacgggacccatataaaactatcaaatatgatacagttcatttcaatccttgccttactagtagcagttctggcatcagggactgctttattcgaaagcggtaagttaagacagaacgatcagtttgacagcttgtacgctcattgtcttggtaaaatgttccacgtgattggcttaggaatttttctg

SEQ ID NO: 81711 - DNA, 1223 bp, Homo sapiens
  sig_peptide (721)...(856): this location contains the signal peptide sequence, MPVLFFLRTLLDPFVLWSKYSSCSFAHSGQCGDQKESFPHMGYTE, Run with SignalP
  misc_feature (423)...(500): similar to gi2995260 in the genepept database release 114, Run with FASTXY 3.3t00, default parameters
ggaattcccgggtcgacgatttcgtcgggatgttttgggaaggaaagctagatagggagccagatgcctaattatgaagaacctttgattcagggaaaactggtttatgtttcatcccgaagactgtgtaagacagctggttgagagatcattaccagtggagggactgatgctatttgtatatagaatgatcacttgcaggaaggtggatggagaataatttgtcaagagggcagggctggaggcaggaagcccagttaggaggctggtgcagtaatccatgtgagacgtgttgaggccctaaatttacagtcccgacagtgagggtggagataagtagatagatttgagaggtgtcaaggtggaattgaaggaatttggccactgtttggattattagagtgagggatgaatgagaaggaaatgttatgatgcctcccaggtctctagcttgggtggacagtagtatttactatgactgggaagaggggaggaggaggagcaggtattggagaaacggtagtgagtttaatgtcaagtttaagcagttggattggttggagtatagaagatagactctgggctgcagactggggactcattaccctgtcactggtaatggaagatatacaagtcaaagaaattgccgggaggagtatgcagaatgagaagagagttgagaacaaaacccagagatgagagcttatgagacagccccatatgccagtccttttcttcctgagaacacttttggacccatttgtgctgtggagtaagtattcatcatgtagctttgcccatagtgggcaatgtggagaccaaaaggaaagctttcctcacatggggtatacagagagacagaaacacgggcaaattacttgctgaaagaatgccaagggtcggagcagttggagctctatatgatggtgccagctgtgggcagcatggtgactaggttggaagtggcatgtggagttgccaggcaccacctgccatttaacttctcatttttctaggttgaaaaaggtatgagcttcgttcttctttcagaaccctgagacaatagaaccccttccccagctggagacccagcgggagttcttggctgagtttgcccacaacccctataggtctctccattgctcgttttcatcccttgcccccccactcggaaccaacttcgaccgcgctcacgcacttcggcctcccgcgtctacctactc

SEQ ID NO: 81712 - DNA, 877 bp, Homo sapiens
  sig_peptide (109)...(244): this location contains the signal peptide sequence, MGYVPSTFCFAYFPCLFFLQYLKLMVHTNYRFEGMYFGEGMKGPS, Run with SignalP
  misc_feature (223)...(362): similar to gi1247481 in the genepept database release 114, Run with FASTXY 3.3t00, default parameters
atctgtttgactcagaggaccgcgggaaggcccagttattctgaacacgcattttcctaactacgggttggtaaagacttcttcagtgtacacaccctgcgagatgctatgggttatgtgccatccacgttttgttttgcgtattttccctgcttatttttcctacaatatctgaaattaatggttcacacaaattacagatttgaggggatgtatttcggggaagggatgaagggaccttctcagaggagtataacctggggtggggtgacgtcggggtcctctcagtcaggggcagcaggcaaggctgacctcggaggcaggggtagggtgcaggttgggggaagagcagcaaagagtaaattccacagcccacatcactcacaaaatcagagaaacagtgaactattcttctgctaggttttcctactactgtaatatttaacaaaagaggatcctactgtgaaaatatagctccagcatcaatggagtagatccgatacacttatatatgctcatggaatttgcttgttctctccccttgtgttgaattttatagcataataaataccgagcctcagcagctttcatgtgccttgcaggagacagtggcagcaggggcaaatgattcttcctggatggtgactttaacaaagacttcttctggggggcaccgatctccacctggccatgtcttcaagcccaaggagaagtcccaggatgggtctgagctaatcacggtgatcacaatacaaatgactgcgctaagcatggcacagctggcctcaatcctggcaatgccacggaaatcattgcggcgggatctgggggagttttctcctgcactacagcaagcaaccaaatacttttttgttgc

SEQ ID NO: 81713 - DNA, 1721 bp, Homo sapiens
  misc_feature (1)...(1721): n = a,t,c or g
  sig_peptide (1574)...(1709): this location contains the signal peptide sequence, MCLWFSIGVVFLTFPLPLFGSPNQLRGPKESLGIDTRILCGGGTT, Run with SignalP
  misc_feature (1255)...(1320): similar to gi1276740 in the genepept database release 114, Run with FASTXY 3.3t00, default parameters
gggctgtgctgatgtaccattaataatttaagccagtggttcttggcaggtgatcccaagacctgcagcttcagcatcacttgagaagttgttaggaatgcatactagtgggccccgcccccagacatagtgaatcagaaaccaacagggaggcgcctagcattgtttttttaacaagtgctgggttattctgatgcacagtctagtttaagaaccactactttgggtaaacgttttgactgtttaaagtttatggcggtgaagtgggcgtcttcaaagactagtacttacacagtttagaagatttcaaggtactgctgacagtagtttattatgtcagtatacatacatgtgtagagatcataatttagttcccttcttaatgttacaatttcttagtttacttttcctaaagggccatagcataattcttgattcctggtggaaatcttttctgaggtgtgggggtgggcaaggtgtggattgctgtttacgatagtgccttcattagttttagttctgtctgttttcattcattattgactcaaaggtattagaacaggcccttatctttttcctattagatttatttttgttttttactttatgtaagttcagaatccttttttaagtgatgactactgatgaaataatgttactagtagctgaattttagacttgatgctatgttgattaatatttaaatggtgaaagtaattaggcaaaataagcaattctgcttttcctgttgctttcagaatttttaggctgtaaaattgtctcagggcaggaagtcagtctatatctctctcaagttcttattgtaggtcatttttttttcagcacaactttaatttttaaatatttggtataacaggcttctgggcatgtgacctacctaatgttgaaaattaactgatgacaacccttgtagatctgctaaacttctctataaattgctagaaatatacagagcaatgagatatagaaaacaccttagcttgttggttattaatagagctctaattttaactgtgaaatcatggagtttctttaaatgttttcctagagtgtttgttatcatgaacattagaaatagcattattccttttcttctaccacatgtcttgaacattcacatgggttaaagaagatggaaactgatactactgacaatcaagctgctttctgactttcataattttctttatattgtggatagcattttgaaggtgaccgtgattctgtaggaagagctgtaatcaatatttttcaaactctaagagtacagaggttagtaagatttcttttttttttactttttgttacgtcaagtagcttattaagaaaaagattcatgacttaaattcttaattctcagttgatacaaaggcttataatcatgtgttttaaaattttgatttcattttcgttccttgnacaggggnggttaaagaatggaaactggggataaaaattaatacactgcagctttgccaaggtctgtgatatggttgtaaccttttaaagactactaaagtcataatttgaaatttttactaaaataaaacatatgtgtctatggttttcaattggagtagtctttcttactttcccccttcccctctttggttctcctaaccagcttagaggacccaaagagagcttagggatagacaccagaatactctgtggaggtggaacaacttaacctcactgtt

SEQ ID NO: 81714 - DNA, 4326 bp, Homo sapiens
  sig_peptide (334)...(469): this location contains the signal peptide sequence, MALASAAPGSIFCKQLLFSLLVLTLLCDACQKVYLRVPSHLQAET, Run with SignalP
  misc_feature (334)...(2854): similar to gi457463 in the genepept database release 114, Run with FASTXY 3.3t00, default parameters
gaaattttgaaagctgctgtgaggaggagctactgactgggttttggggtgttttgtaccccaccctcctcacttgtaggaaagcctctttgcatttagacgtaattgaactggaaggaaggagactggccagggaatagggggaaagaaattctcccgttgctcctcctactgtttatcacttgcctccggactgtcttccaaaccaagctcagctgcatcaaggtggcagcagaataccctgtgcaagtgccagcgtcttcttagccgctctgtgcatcccaggctgccctgttatctggccaccgtccctggccattgggactgcttctgatggctctggcctctgctgccccagggagcatcttctgtaagcagctccttttctctctcctggttttaacattactttgcgatgcttgtcagaaagtttatcttcgagttccttctcatcttcaggctgaaacacttgtaggcaaagtgaatctggaggagtgtctcaagtcggccagcctaatccggtccagtgaccctgccttcagaattctagaagatggctcaatttacacaacacatgacctcattttgtcttctgaaaggaaaagtttttccattttcctttcagatggtcagagacgggaacaacaagagataaaagttgtactgtcagcaagagaaaacaagtctcctaagaagagacataccaaagacacagccctcaagcgcagcaagagacgatgggctcctattccagcttcattgatggagaactcgttgggtccatttccacaacacgttcagcagatccaatctgatgctgcacagaattacaccatcttttattccataagtgggccaggcgtggacaaagaacccttcaatttgttttacatagagaaagacactggggatatcttttgtacaaggagcattgaccgtgagaaatacgaacagtttgcgttatatggctatgcaacaactgcagatggctatgcaccagaatatccactccctttgatcatcaaaattgaagatgataatgataacgccccatattttgaacacagagtgactatctttactgtgcctgaaaattgccgatccggaacttcagtgggaaaagtgaccgccacagaccttgacgaacctgacactctccatactcgtctgaaatataaaatcttacaacaaatcccagatcatccaaagcatttctccatacacccagataccggtgtcatcaccacaactacaccttttctggatagagaaaaatgtgatacttaccagttaataatggaagtgcgagacatgggtggtcagcctttcggtttatttaatacaggaacaattactatttcacttgaggatgaaaatgacaatccaccatctttcacagaaacttcttatgttacagaagtagaagaaaacagaattgacgtggagattttgcgaatgaaggtacaggatcaggatttgccaaacactcctcactcaaaggctgtatacaaaatcttacaaggaaatgaaaatggaaacttcataattagcacagatccaaatacaaatgaaggagtgctgtgtgttgtcaagccattgaactatgaagtcaatcgccaagttattttgcaagttggtgtcattaacgaggcacaattctctaaagcagcgagctcacaaactcctacaatgtgcactacaactgtcaccgttaaaattatagacagtgatgagggccctgaatgccaccctccagtgaaagttattcagagtcaagatggcttcccagctggccaagaactccttggatacaaagcactggacccggaaatatccagtggtgaaggcttaaggtatcagaagttaggggatgaagataactggtttgaaattaatcaacacactggcgacttgagaactctaaaagtactagatagagaatccaaatttgtaaaaaacaaccaatacaatatttcagttgttgcaggggatgcagttggccgatcttgcactggaacattagtagttcatttggatgattacaacgatcacgcacctcaaattgacaaagaagtgaccatttgtcaaaataatgaggattttgttgttctgaaacctgtagatccagatggacctgaaaatggaccaccttttcaattctttctggataattctgccagtaaaaactggaacataaaaaaaaaggatggtaaaactgccattcttcgtcaacggcaaaatcttgattataactattattctgtgcctattcaaataaaagacaggcatggtttagttgcaacacatatgttaacagtgagagtatgtgactgttcaactccatctgagtgtacaatgaaggataaaagtacaagagacgttagaccaaatgtaatacttggaagatgggctattcttgctatggtgttgggttctgtattgctattatgtattctgtttacatgtttctgtgtcactgctaagagaacagtcaagaaatgttttccagaagacatagcccagcaaaatttaattgtatcaaatactgaaggacctggagaagaagtaacggaagcaaatattagactccccatgcagacatccaacatttgtgacacaagcatgtctgttggtactgttggtggccagggaatcaaaacacagcaaagttttgagatggtcaaaggaggctacactttggattccaacaaaggaggtggacatcagaccttggagtccgtcaagggagtggggcagggagatactggcagatatgcgtacacggactggcagagtttcacccaacctcggcttggcgaagaatccattagaggacacactctgattaaaaattaaacagtaaaagaaggtgtatttgtgtggacaagatgaggagcataaacattgtgaagactacgtttgttcgtataactatgaaggcaaaggttctctggccggctcagtaggttgctgcagcgatcggcaggaagaagagggactggagtttctagatcacctggaacccaaatttaggacattagcaaagacatgcatcaagaaataaatgtgccttttaatagtgtaatatccacagatgcataagtaggaatttattacttgcagaatgttagcagcatctgctaatgtttttgtttatggaggtaaactttgtcatgtataggtaagggtactataaatatgagattcccctacattctccttgtctggtataacttccatgttctctagaaatcaaggttttgtttgttaattctcttttatatgcatgtatatattgcccttttcacgactgtactgtacaccttcttgcaccttttatttgcaaactgatgttactttttgtgctgtggaagagcatttgggaaagctgggtattatagaggccaatgaaagatgaatttgcattgtagatgtacgaattaaatatgttcttcaaaatcttggggagaattatgttcttagaacatagttggtgccagataattgcattctctccacctgagtggtttaaaaaggacttttaagtattcttcagtgcaatcttcagttttgtgattaagttcatttctcttttacacttttgtactcctcagagcagtgctcccagcattgttttctttcaggatccttcagagctcagtccctggacctctgcccatgtggatttgttgttaggtcactccaacttctaaggttcttggaaagataaggaccagaacaagctcatagcaaattgaggggcagagattttatgaagattacatgagaagatttccatgaaagaattgcagccctgaggtccatgggttgacttatgctcacaaatatgtttcgtttgctcaacatggtttactactaacattttaaaaatataaatactttagcaaaaacattcactcttgagtttgacataggcctgccttatctgtggttgccacctgccatctccaagcatttggacaactagccctgatgcattaggctgcaactctgatatacagagactagcaccttgaatatgccagaaattgaattaccatctgtattagaacttaagactcagcctaaatttacagttactttaagaaaatgggcagtcagaattagggactagaatgtatatgagaaacccccactctactaaaaatataagaaattagccggacatggtggcgaatgactgtaatcccagctactcaggaggctgaggcaggagaatcgcttgaatccaggaggcggaggttgcagtgagccgagattgccactgcactccagcctgggcaacaagagcgaaactccgtctca

SEQ ID NO: 81715 - DNA, 799 bp, Homo sapiens
  sig_peptide (431)...(566): this location contains the signal peptide sequence, MDSPSISISSSLSWNLNFVVVVVVVVVAHRLNLQLLCTKRGKGES, Run with SignalP
  misc_feature (290)...(133): similar to gi1131439 in the genepept database release 114, Run with FASTXY 3.3t00, default parameters
atggcattttactccctgtggtggaattcatcagaagcagagaagtcagaggctattgcaatattccactggaaaaagataaaggcttaagctagggagctgcagtatggaggaagatgaagaggcagaatagaatagagaaaaatgtctggaggttaaaaatttcatgatgtggtgattgattggatgtggccaatggggagtgaggaagaataggactatagacaatacccacactcccagcctgggtgcctgaatgcatcatggaggaaataccaaagattgagattgtgaagtgaggggaacaggtttgggaaagaaaacgagcttttcttttcagatatgtcaagtttgaagagcttgagagacagtcaagcgattctactaggtggaaaaaatggagctagtgacaaccatttcttactaagaaatggactcccccagcatctctatttcttcttcgctttcttggaatctgaactttgttgttgttgttgttgttgttgttgttgctcacaggcttaatcttcagcttctatgcaccaagcgtggaaaaggagaaagtcctgcagaatcaatcccgacttccctacctgctgctggactgtaccagacgtctggcccagtaaagtgatgtcccgctgacctgccataatttgatggaatcaaaaagaaccccggggctttcctggtctctcacatttaaaaaattccattactccatttacaggaccgtttctaagaaaaagaaattttaagaagaaaattttgcgaccagttaaatctgaccgccccaagg

SEQ ID NO: 81716 - DNA, 394 bp, Homo sapiens
  misc_feature (1)...(394): n = a,t,c or g
  sig_peptide (159)...(294): this location contains the signal peptide sequence, MALICVGLLLVIVSVAWSHPSHFCLTLLSVLFSLIYCSPALLSHT, Run with SignalP
  misc_feature (185)...(369): similar to gi1926329 in the genepept database release 114, Run with FASTXY 3.3t00, default parameters
gccgagggaagaacaccctcggctcagagagagcacaggctatggccttggtggctgtagtatttggcccgtgtcccagtccctgagaacacgctggcccaacaacgggttccaagggcatannctgttnttcccttggctcatatatagcacacgctatggccttgatatgcgtcggactgctattagtcatagtgagtgttgcttggtcacacccttctcatttctgtcttacgcttttgtccgtgcttttctccttgatttactgctcccctgcgctgttgtctcatacctttggtactggacgatcattgaatggactgtcttttctctacgggcggttttcttgattgttatcctaagccatactgtgtgtataaagtggtgcccacgg

SEQ ID NO: 81717 - DNA, 2815 bp, Homo sapiens; identical to SEQ ID NO: 60197
  sig_peptide (168)...(303): this location contains the signal peptide sequence, MELLQVTILFLLPSICSSNSTGVLEAANNSLVVTTTKPSITTPNT, Run with SignalP
  misc_feature (168)...(955): similar to gi4159993 in the genepept database release 114, Run with FASTXY 3.3t00, default parameters

SEQ ID NO: 81718 - DNA, 358 bp, Homo sapiens
  sig_peptide (40)...(175): this location contains the signal peptide sequence, MVVLSFCCFYCGLERDVLTVHLRIMCVLENFTQFMCYKVSLETLQ, Run with SignalP
  misc_feature (220)...(171): similar to gi3483114 in the genepept database release 114, Run with FASTXY 3.3t00, default parameters
actatttttaatttcactagtctattacagccaactgaaatggtagtcttaagtttttgttgtttttactgtgggctagagagagatgtcttaactgtacatttaaggatcatgtgtgtattagaaaattttacacaatttatgtgctacaaagtttcattagagactttacagtttttctgatgatctagtacttctctatggacttctttttctgttgatgcttccctaccccctccctaccttaaggtatttttctagaattagtttgcaataatcattaccagcttccctacttgagcgtacgtcttctgaaaaccaccctgcttttccctttgtggtagaatggcagctcagt

SEQ ID NO: 81719 - DNA, 379 bp, Homo sapiens
  sig_peptide (135)...(270): this location contains the signal peptide sequence, MNLWTFSPCTATILVNSTISVDLVNPTISVDLFHSNCLYFHCCSS, Run with SignalP
  misc_feature (166)...(326): similar to gi169734 in the genepept database release 114, Run with FASTXY 3.3t00, default parameters
ccatgatttatccatttttgctgaagccaaaaatggaacagaatcattcttgattctctccctttacctcgtttctcctcactgagtcatcaagagatattgttggccccacgactaacatttatcttgcagctatgaatctgtggactttctccccctgcactgccaccatcctggttaattccaccatcagtgttgacctggttaatcccaccatcagtgttgacctgtttcacagcaattgcctctacttccactgctgttcttctacagtcattctccacagagagtaaacttccagagttcaaaagagatttttttttaatgactttctattgatcctgaaataaagtctaattttttttaagttatcttcaag

SEQ ID NO: 81720 - DNA, 385 bp, Homo sapiens
  misc_feature (1)...(385): n = a,t,c or g
  sig_peptide (38)...(173): this location contains the signal peptide sequence, MLLWVFLQLNYKIQAIPTYETVMTFFKSFPENCCFLDRDIGQSLR, Run with SignalP
  misc_feature (32)...(222): similar to gi5360872 in the genepept database release 114, Run with FASTXY 3.3t00, default parameters
gttatttacctttagtgaattccatcttctgaaaacaatgcttttgtgggtcttcttgcaactgaactacaagattcaggcaattccgacttatgaaaccgtgatgacattttttaagagctttcctgagaactgttgctttctggaccgggacataggacagagcttgaggccgctcttcctctgcttgcgtctgcacggcatcaccaaaggcaaggatnctgaggtgctgcggcaccttaacttcttcccagagtcatggctcgaccaggttacagtcaaccattaccacgcactggagaatgggggcgacatggtccacctgaaagatcttaacacccaggctgtgagatttgggctgctctttaaccaggagaatacaact

SEQ ID NO: 81721 - DNA, 1375 bp, Homo sapiens
  sig_peptide (508)...(643): this location contains the signal peptide sequence, MLAMGALAGFWILCLLTYGYLSWGQALEEEEEGALLAQAGEKLEP, Run with SignalP
  misc_feature (652)...(845): similar to gi236698 in the genepept database release 114, Run with FASTXY 3.3t00, default parameters
atgttgtattgggtggttatacatttcggcgcaagggggcccggagggcgccgaaaacggcgaacgacaaacggggagggccggaatgcggcaaggcacgccgggaaagagggaaacccgcgaaagcccacgggcaacgcccaaacccccatggacccaaggaaacgtaaaaagggaagtctgaccccgggaccaaatagacgccaacaggaaagcgagggcgcaaggagacaatcgcgacggggagagaacgggagcgaagcagcccagagccccagccggggaacggaacggaaggcaaccaagagggtgaaaagaaagcaagacgtcaccgggaatgacccacatagcccttctttgtcttcgggaggtcccatccataaagccaacacttccggaagattaaaggtgtcggacagggggacagctgagaggagaggaggatttcttgccaggtggagagtcttcaccgtctgttgggtgcaggcctgtgtctgtcctggaaagatgctagcaatgggggcgctggcaggattctggatcctctgcctcctcacttatggttacctgtcctggggccaggccttagaagaggaggaagaaggggccttactagctcaagctggagagaaactagagcccagcacaacttccacctcccagccccatctcattttcatcctagcggatgatcagggatttagagatgtgggttaccacggatctgagattaaaacacctactcttgacaagctcgctgccgaaggagttaaactggagaactactatgtccagcctatttgcacaccatccaggagtcagtttattactggaaagtatcagatacacaccggacttcaacattctatcataagacctacccaacccaactgtttacctctggacaatgccaccctacctcagaaactgaaggaggttggatattcaacgcatatggtcggaaaatggcacttgggtttttacagaaaagaatgcatgcccaccagaagaggatttgataccttttttggttcccttttgggaagtggggattactatacacactacaaatgtgacagtcctgggatgtgtggctatgacttgtatgaaaacgacaatgctgcctgggactatgacaatggcatatactccacacagatgtacactcagagagtacagcaaatcttagcttcccataaccccacaaagcctatatttttatatattgcctatcaagctgttcattcaccactgcaagctcctggcaggtatttcgaacactaccgatccattatcaacataaacaggaggagatatgctgccatgctttcctgcttagatgaagcaatcaacaacgtgacattggctctaaaag

SEQ ID NO: 81722 - DNA, 363 bp, Homo sapiens
  sig_peptide (79)...(214): this location contains the signal peptide sequence, MLLNLKILVFLYRSPFKFTGSASVHFITYQGLHDLTAVHCFWGPG, Run with SignalP
  misc_feature (124)...(307): similar to gi2340932 in the genepept database release 114, Run with FASTXY 3.3t00, default parameters
ggcacgaggaagctctgtgacaaaaaaaataatttctgaaaaggctgcattttttctcttaggggcatcttctctcccatgctcttaaatctaaaaattctggttttcctttaccgatctcccttcaagtttacagggagtgccagcgtccactttatcacttaccaagggctacatgatctgactgctgttcattgcttttggggacctgggaacatttgtattattgaagagctctatgttaaagtttttctttttttcaaaaattggctttgcatcatgtctaaaatgtgtacggtgactactggatatattgggatttgggtcagagatcccaggaacaccaaacacaaatgttgcaag

SEQ ID NO: 81723 - DNA, 381 bp, Homo sapiens
  sig_peptide (155)...(290): this location contains the signal peptide sequence, MVCLWVFLQFLAQVICLFLTPLIDSRSEATYQFIGCFGAVTNGNK, Run with SignalP
  misc_feature (307)...(358): similar to gi167556 in the genepept database release 114, Run with FASTXY 3.3t00, default parameters
ggcacgaggctctatgtctcagattgactggatttatccagggaaggtgatagagacttcaaactcagtttaaaatttatttttttcctcatggaagtatgaaagtttacatccttctccccaccaaccacagtatccaagatgagggtttttaatggtgtgtttgtgggtttttttgcagtttctagcacaagtcatttgtttattcctgaccccactcattgattcacgctcagaggcaacctaccagttcattgggtgcttcggagcagtgacaaatgggaacaagcaaggaaggagggggagcctgaggttgcttctcccccacaccccactacccacttcttttcccagccacatatgtttctcagacataccact

SEQ ID NO: 81724 - DNA, 735 bp, Homo sapiens
  sig_peptide (198)...(333): this location contains the signal peptide sequence, MSYTAFLSVCCLPLLPLCDFALYVLLDKFKGGFRQQNSPQSIYQH, Run with SignalP
  misc_feature (39)...(138): similar to gi488336 in the genepept database release 114, Run with FASTXY 3.3t00, default parameters
ggcacgagcggcacgagtcttgacaggggttggggagacagcagattgaacaaggaaagaattggctcctgagttctttgatcatgttaacttttatttactgttgtataatcacattttctagactgctaaaattggtgaaatcaggacaggaaataactgtttttacgtgtataagtatacaaaagttattcgagatgagttacactgcatttctttcagtgtgctgcctgccactgctgcctttgtgtgattttgctctatatgttctgctagacaaatttaagggaggtttcagacagcaaaactccccccaaagcatctaccagcataatccctatcaaaatcccaacaacgttttaatttttttgcagaagtggaaaaaccgatgttaaaattcatatggaattgcccgggtgcggtggctcacgcctgtaatcccggcattttgggagactgaatcaggcagatcacttgaggtcaggaggtccagaacagcccgacccacatggtgaaaccccttggcttactaaaatatcaaaatttagccccgattgtggcggctttgtccctcgtaactccccctaacttttattgcttcaaagccggaccacttcccctggaacccttcgccactcggcccggttccccacgtcttccctgaatgccctccctctttcaattttcacactctgtgcttgattacccctttcccacttgtccatcccccacatc

SEQ ID NO: 81725 - DNA, 1806 bp, Homo sapiens
  misc_feature (1)...(1806): n = a,t,c or g
  sig_peptide (245)...(380): this location contains the signal peptide sequence, MPTFFSFFLFCFLSEVQSNNVSKWGVRVEDGLQHCLIIWSPHGAQ, Run with SignalP
  misc_feature (448)...(385): similar to gi950401 in the genepept database release 114, Run with FASTXY 3.3t00, default parameters
gggtcaattaagtggtaagttcagaggcatgagagctgatggatcgagagacaaaccccagcttactcctcttggcaggacatctcttaccaaacccccatcagtgcgctaaggagcagccaacctctctgattccaatctcaatcataatcatggaacaaggggccttataaaaccacctccctctctgctacctcgggaggccagcaggccagcctatgtgcagagctacactccagatcaaatgcccaccttcttctcgttcttccttttctgcttcctctccgaggtccaatccaacaatgtctccaaatggggtgtcagggttgaagatggcctgcagcactgcctgatcatttggagtccccatggtgctcaactccaaaatcccaaaaggtgactccagatgagagaagagggagggacgtggtgagggtggagcctccagcaggaagttgatctgaaaggatgaggaccaccccttcgtgaggagtgtctccctgtccatggctgtagcatttgctcaacctgtggcctggagggttgaccctggcttggcagactacttggttatttctcaactgcccctgcccccaggagaaacagtaaacaaatccagcttcagccttaaggtggagtgcagctagagaaggtgttctccagcttctccctgaaatgctttcagtttattatattcacagttgagaaaaccgataaaaaatcaatacttaacccncccttggatgaaacaggggagctatgtagaaggtaaaggccctgttcctttgtcctcttgaccctgcctcatatccacaattaattaggtcctgaacatacatcactgatgaataaaggaagaaaatagtcaagagagccagtgtggagtggacctgaaggtgggctacagggaataatttagtgatgccaccttaaagtaaaggactgtggaaggtactttgtgaccaggtcacaggccatgcccctcccgcttttctccaccctctccaaccaaagccaaaaggaagcttaaccatgtgcagcaataaacttgacatgtttattaattaaactatcccttaaataaaaaaaagtgcatagaaaataaacatgtttaaaaactccttttttttacaactatgtacactttttacttttacattcagtctttcgtagagagctttcagcattattattttttgaactattaaagtattttccttcatccctgtcacagggagttaacactgatggactttagacacattttcctttttttttttctctttttctctaaccagaagcttggaagaacacaaggaaaaaaaacagatctgttatacatgataaagttgtcaaaaaatgtcttatttctagaaaagaagcttgtcatctgttgagctcttgaaacaattattcaactacctgtatttactaaagagactgttaaaagttcaataaaagaaacaccacaattctattttcttggttgaaagacagaactagagtacctcggaacaagataccaggaaagcacagaacacaattttcccctaaatgcaggtggtaaccccaacattcataaccaaaaatagagaaacaaggaggacaggtactgactggcaacattcatgggcagaaaaaaatccaggtgaccccatgtctgcatttttctctgatccgaggaatggactgttctaccattcctttatggttagaggttccccccatttcgggaatcagaggaaagtgagcctgacatcttcctgccgctactagcaactgtaacacaatccttatctatagtgt

SEQ ID NO: 81726 - DNA, 383 bp, Homo sapiens
  misc_feature (1)...(383): n = a,t,c or g
  sig_peptide (143)...(278): this location contains the signal peptide sequence, MLISFCLFMEGTSLYHLYDFVYTVYISLSPLFLPLAWFRPVLFIS, Run with SignalP
  misc_feature (62)...(232): similar to gi4062208 in the genepept database release 114, Run with FASTXY 3.3t00, default parameters
acctctctgctgagcttgcaacctgtttattcacatggcctgccatgccacttggaggtttctgattactcccaaacctgctggttctttatgtctttctcagcgaataattccatctattcatgttggaaacttaggtgatatgctcatctccttttgcctgtttatggagggcaccagcctctatcatttgtatgatttcgtttacactgtttatatctctctgtcccccctttttctgccattggcatggtttagacctgtactctttatcagcagaggtactgtaatatatttgtgatccctcagcttccaggcttactcctgngctctgccttcctatctacatatccttttaaaataaaattttaactatctcctga

SEQ ID NO: 81727 - DNA, 2168 bp, Homo sapiens
  sig_peptide (122)...(257): this location contains the signal peptide sequence, MLKVSAVLCVCAAAWCSQSLAAAAAVAAAGGRSDGGNFLDDKQWL, Run with SignalP
  misc_feature (122)...(1432): similar to gi3581970 in the genepept database release 114, Run with FASTXY 3.3t00, default parameters
tttatttcaggtcccgggctcgagacggcggcgcgtgcagcagctccagaaagcagcgagttggcagagcagggctgcatttccagcaggagctgcgagcacagtgctggctcacaacaagatgctcaaggtgtcagccgtactgtgtgtgtgtgcagccgcttggtgcagtcagtctctcgcagctgccgcggcggtggctgcagccggggggcggtcggacggcggtaattttctggatgataaacaatggctcaccacaatctctcagtatgacaaggaagtcggacagtggaacaaattccgagacgaagtagaggatgattatttccgcacttggagtccaggaaaacccttcgatcaggctttagatccagctaaggatccatgcttaaagatgaaatgtagtcgccataaagtatgcattgctcaagattctcagactgcagtctgcattagtcaccggaggcttacacacaggatgaaagaagcaggagtagaccataggcagtggaggggtcccatattatccacctgcaagcagtgcccagtggtctatcccagccctgtttgtggttcagatggtcatacctactcttttcagtgcaaactagaatatcaggcatgtgtcttaggaaaacagatctcagtcaaatgtgaaggacattgcccatgtccttcagataagcccaccagtacaagcagaaatgttaagagagcatgcagtgacctggagttcagggaagtggcaaacagattgcgggactggttcaaggcccttcatgaaagtggaagtcaaaacaagaagacaaaaacattgctgaggcctgagagaagcagattcgataccagcatcttgccaatttgcaaggactcacttggctggatgtttaacagacttgatacaaactatgacctgctattggaccagtcagagctcagaagcatttaccttgataagaatgaacagtgtaccaaggcattcttcaattcttgtgacacatacaaggacagtttaatatctaataatgagtggtgctactgcttccagagacagcaagacccaccttgccagactgagctcagcaatattcagaagcggcaaggggtaaagaagctcctaggacagtatatccccctgtgtgatgaagatggttactacaagccaacacaatgtcatggcagtgttggacagtgctggtgtgttgacagatatggaaatgaagtcatgggatccagaataaatggtgttgcagattgtgctatagattttgagatctccggagattttgctagtggcgattttcatgaatggactgatgatgaggatgatgaagacgatattatgaatgatgaagatgaaattgaagatgatgatgaagatgaaggggatgatgatgatggtggtgatgaccatgatgtatacatttaattgatgacagttgaaatcaataaattctacatttctaatatttacaaaaatgatagcctatttaaaattatcttcttccccaataacaaaatgattctaaacctcacatatattttgtataattatttgaaaaattgcagctaaagttatagaactttatgtttaaataagaatcatttgctttgagtttttatattccttacacaaaaagaaaatacatatgcagtctagtcagacaaaataaagttttgaagtgctactataataagtttttcacgagaacaaactttgtaaatcttccataagcaaaatgacagctagtgcttgggatcgtacatgttaattttctgaaagataattctaagtgaaatttaaaataaataaatttttaatgacctgggtcttaaggatttaggaaaaatatgcatgctttaattgcatttccaaagtagcatcttgctagacctagttgagtcaggataacagagagataccacatggcaagaaaaacaaagtgacaattgtagagtcctcaattgtgtttacattaatagtggtgtttttacctatgaaattattctggatctaataggacattttacaaaatggcaagtatggaaaaccatggattctgaaagttaaaaatttagttgttctccccaatgtgtattttaatttggatggcagtctcatgcagattttttaaaagattctttaataacatgatttgtttgcc

SEQ ID NO: 81728 - DNA, 1787 bp, Homo sapiens
  sig_peptide (660)...(795): this location contains the signal peptide sequence, MRSYKPNPLLFPKLQILIFLTSYLIFTLRYLPGVFNILFKTVLLV, Run with SignalP
  misc_feature (1093)...(1362): similar to gi4894471 in the genepept database release 114, Run with FASTXY 3.3t00, default parameters
tagggagaagtgccaacatatttgcagtttattttcaaatggttcagaggctgtctgtgtacatgagaagacaaagataaggcaaatgcagcaaaattgtaataattggtgaatccaggtgaagggactatggctggtctttgtacttttttttccaacttttctcgtaggtttaaaattttcaaaataaaaaatgggaaatactttaaaaattgtaatcaaagacattagtacagaaactttcataatgtattttatttttacagtaaaattaatttatgtaaattgatagaattttactaatttcactcccaagttacattaaaaggcttacatatgtttgataatagcatatgtaaactagaactctgaatgatatccattggtcataatacgtactatgtagcggtaatggtgacttttgtgattgcacaagtctagagatgccccaaatgacattgacttagacatctggttattctaaggctgaaactgaagttgaatagaaggttttagtcaaatactgagatgaaaactgaggcagtcctggcgggggggagtgagtgtgtgtgtatatatacacacatagacatcatgcttctaaacatttacagaaagaaagggtagattatctacaaaaaaataagaatcagactgatatgagatcttacaaacctaacccccttctctttcctaaactccagattctcatatttctgacttcctatttgatatttacacttcgatatttaccaggagtcttcaacattttgttcaaaacagtactcttggttttcttcctccaagactactccttactcatatcagcaaatagcagctcttttcaagtgctcagtgtaaaaacctacaattaatccttgatttctctttcagtcagcctatactaaatcaatttcatttaaaatatctcggctactactctgcatctccactgctaccatcggcctctccagtcacattctccaagagcactctatctcatttaaaagacaaaatctctgcagtggcctgtgatgctccttaatggcctacataatccagccctcaagcacctccgtgatctctgtaaaactttcccttggtcactgtgcttcagccacattaaccagcttgcatatttctcacattcaccaagcttgttcctgccttggggcctttgtacttaccatgttctgttctgagaatactctgcctcaagatatcctacaactatcttactgtattcagctctctgctcaagtattaactgatgaaacctgtcatccctactccactccatgttctgctttacttaacagcaattgcacatatggccccctgaataatatacatttagtcacttatttttacttatctgctaattaaaatgtagactttttctattctgtttactgctgtattcccagcatgttttatccgaatgtgcagtggtttcttttcttctcccttatcgtgggaagtgatgtgcacaaatacacataatggagcctgaatgtcatattgctttcatacctgtgtgaattttggtaagaaaggaaaagtagcgattgacaggtaatataattacattaagtcactctcatagttagctgtttattgctttcctgctcttattctcagtccccaggaccaaatgttgaccactaccttcccccacatataattaggttatttaccgaacgccatgcaggtggctgttaaaaggaagatatatacttacaatataaacacaacttttccctgttgtctttctgtctcacacgaaa

SEQ ID NO: 81729 - DNA, 2013 bp, Homo sapiens
  sig_peptide (1359)...(1224): this location contains the signal peptide sequence, MSYVEILIPVLLCLHAFFPSSRRHVAWFLIFICKFFKFCLILKFI, Run with SignalP
  misc_feature (166)...(442): similar to gi1710216 in the genepept database release 114, Run with FASTXY 3.3t00, default parameters
ctttttgtaaggaggttgtcccaataagtcccccccccaaaaaaaaggttcttttccaaaattcccaggtaggttttaataaggccccccataaggaaaaaaattttaccttgccagcccccgttaaatttggcccccccaagggttcttttaaacggcccccccttttttttttttttggagacggagtcttgctctgtcaccaaggctggagtgcagtggcacgatcttggcttactgcaacctctgcctcctgggttcaagcaattctcctgcctcagcctcccaagtagctgggactacaggcgcacgcccccacacccagctaatttttgtatttctagtagagacggggtttcaccatgttggccaggatggtctcaatcttttgacctcatgatccacccgcctcggcgtcccaaagcgttgggattacaggcatgagccaccgcacccggcctcacttcaagaattttttacaagcacagaaactatatctcagtgtatgataactgttactataatactatattgtattataaatatacaagctcatttgagtgtgtgatagctccactacctccaccaagctttaggaatatatataatctactttgaacccaaaagccacagaagcagtgacaacgacgctaagaagcagaaagagtatatggttagtagaaactatctggcatcttgctcacctgaactacacctaaagtgctgttatttcccgtacatgcacttttccattatgttcttcacaaaggctcacctcttttccataagccaccatgcccagtccacaaaccaaattatttttaatgttcaacagaaaagaaaggtagcaacaagttccttatttttgttaattccttgtttcttgtaataaagagtatcacttcctctcaccaaaaagctatagagcttctgatgaaattcaactgttcaaaaggtttacctcttttccaggggtaggtgtgattaaacagctggcatttcttcttaacaaagtaatgaaaaggcaattactaaaaaatcagcattgtattaccagaaaggcaagtcatttcataaaataagaactggagagttttaaatccatattcattaagaagctaaaaaattcatactaatttttaaccacttagagttttgactcacaataatcaaaccactttccagtttataaataattcaagatcaaaataataaattttaaaattaagcaaaatttgaaaaacttacatataaatatcaaaaaccatgcaacatgacgtctgctacttggaaaaaaggcatggagacacagtaataccggaataaggatttcaacatatgacataatggcataaggcactacctcaacttcagtctacacttgagtcatcataacccaaatatgggacaggagaagaaaacacacaaacacaacttttcacatccttttggctggtctggcagttaactgcttttctctttcaaactccttctctcgttgctgctccctttccaactcttctttttgcctcttctgctgcagtttaagtgctcttttttttaactttgatgttttttcatgaagcatcagcatctcttttcttatattcaccaacttggcatgatagtgtttagcctcagcaaacaaagcattaatatccaacatagaatgacattctttaaattttgaaatctcttgttccagtgtgtctaacaatacaacttggttctgtgtgagttcctggagggcttgttttgatctctgcagatctggcaaataatgagaaagcaatccttctgccagttgctccactgctttgtcttctatagtcaagtcctctattaacccttcatctggagaagtgtcacttaaaccaggcgtcggctccccggcctccaggcagtagggtggccgtgtcagggccccgtccggagacgacggcccagggacactcatgtccctccagctgggaacacagggaagaagcaaacgtgtggctcgtcagaagcaag

SEQ ID NO: 81730 - DNA, 624 bp, Homo sapiens
  sig_peptide (340)...(475): this location contains the signal peptide sequence, MLGPCVFIYLLAKPGGVLALKWGKGSEGEAFGCEGLEVLCVKGGS, Run with SignalP
  misc_feature (285)...(417): similar to gi3287115 in the genepept database release 114, Run with FASTXY 3.3t00, default parameters
cggacgcgtgggtttaaagaggcagtaaacacacaccgtggtctgtgtgcccttgatgtggaagtccatggaacttttacctgggttaagaagttctttcctttaattaattaaataaataaaatctgcatttatgactcggctgaaggatatgctaagatagtcaagattcagaagcaggcatctcgaagtcatttcatgtggcttcatttaaaagaaatgctctcggatccagtacacttacatcaacttcataaatgcagccaatttacaataaacattccccttgcaacccctcctcccccacccacctcactctacctgaaaagatggctaattatgttagggccttgtgtattcatttatttgttggcaaaacccggcggggtgttagctctgaaatggggaaaaggctctgagggcgaggcctttggctgtgaggggctggaggttttgtgtgtgaaggggggtagcctgctggtctggagcacgctgataagatgctcttcttttcacagggctctccttagatttaaagactaaaagggctgactgaatcagaaaaacaaacagactttcttttttctataggcaaagaaagaaatgaatgtgtaggcattatac

SEQ ID NO: 81731 - DNA, 985 bp, Homo sapiens
  sig_peptide (502)...(637): this location contains the signal peptide sequence, MELKGFWLCLFLRFVKWFVNKGMILCTLFYNLIYSLYNMCWTVLW, Run with SignalP
  misc_feature (517)...(641): similar to gi1142588 in the genepept database release 114, Run with FASTXY 3.3t00, default parameters
ttttttttttttaattgcaaaaattttaaccaagacctaattgttgcaacaaatgaaaaagtgcaaacaggctgggcgtggtagctcacaccctgtaatccctagcactttgggaggccaaggcgggcagatcatttgagtcccaggagttcaagaccagccctggggaacacggcgaaatcccatctctacaaaaaatacaaagcttagctgggtatggtggcatatgtctgtagtcccagctatgagggaggctgaggtgggaggatcgctggagcctgggaggtcgaggctgcccctgagctgagattgtgtcactgccttccaccccggtgacagagtgagacccaatctcccccaaaaaaaaagaaaggaaaagaaaaagtgcaaacatgattaaaaaaaaaggtactggtctctccttaccatcataagggattcaaagttaacaagctttgcgaatgtcctccaggtttataaaaatatatataaacatatgatatggaattaaaggggttttggttgtgtttatttctgcgatttgtcaaatggtttgttaataaagggatgatactatgtacattgttctataacttgatttattcactttataatatgtgctggacagtactctggattaggaaatatcaaactctcttgaaggaatcattcttttctttaaatacatttttattcaaagacaaggcatcaacttctattcccctataattgcttgcctagatcatattgacattactccctcctatccagctcgccgcgaccctttacttcttactccccatctacccgcctaccactattataccttatattctattatactctccccctttatacctcctatgccaacgctcttttcttcctggatactcttctccttcctcaacatgctatcaatcgcttccacatcttacaatctcaaaacatagacatcttcttctccaatcatcctcactaaggcctc

SEQ ID NO: 81732 - DNA, 631 bp, Homo sapiens
  sig_peptide (189)...(324): this location contains the signal peptide sequence, MHVSTVMQTLAVRACALPVLCSLSLDTFKWEMVPFYLKPNNFTHL, Run with SignalP
  misc_feature (371)...(301): similar to gi414517 in the genepept database release 114, Run with FASTXY 3.3t00, default parameters
acaccctagtggcccccacagtgtttctagcattgcaattgtaacagtcacttatttagcacttacaattacatagcaagtacttacatagtgctgagcatgtgccaaacaatggttttcatacttcgtatagattcacttatctaatatctccaaggagaagtgacttgctaaagcctcaagcagccatgcatgtctcaactgttatgcaaaccttggcagtcagagcctgtgctcttcctgtgctttgttccctgagtttggataccttcaaatgggaaatggtccccttttatcttaaacccaacaacttcacccatttagtttctgccagtctctgaaagcatttgcctctggccatagagaatgattttggataagaccaccagcacagggcagaaatgtgcagagtgtatacaggggggaccaaagtaaaagagatgccagaggtaatggagaacaaagggcatagatgccacaataggatcagaatggtgccgaaagggggcaatggggagggagaaaccctccaagggtcaaatttcagagattacatttggataaaagcatggaaaatttccagattgaaaaggtggtttgcaggtttttgataggggcaatgggaaaccaa

SEQ ID NO: 81733 - DNA, 360 bp, Homo sapiens
  sig_peptide (185)...(320): this location contains the signal peptide sequence, MIYHICATLNILILKILLFSIESFCFIEFSISTHNLKNLPQYNYK, Run with SignalP
  misc_feature (209)...(326): similar to gi4164560 in the genepept database release 114, Run with FASTXY 3.3t00, default parameters
caaatactttggaagaaagcattggtgtgtctttaaggttacataatcttgataaactttctgttagtcatattggttttaatataacagactagaatgagtgttggttggatgaacactgggctttgatcagttgatattttcccaggcattactttcctcattcgataaggcgttctaatagatgatctatcacatatgtgccactcttaacattttgattctaaaaatcttgctgtttagcattgagtctttctgctttattgaattctcaatctctacgcacaatttgaagaatcttcctcaatacaattacaaatacctgcattgctttctgagcaatcagagcctgtctactct

SEQ ID NO: 81734 - DNA, 715 bp, Homo sapiens
  sig_peptide (228)...(363): this location contains the signal peptide sequence, MRFVTLSSACLCPCPLGPCWTRHPSYGNLHEASTSLPPRHWTGAR, Run with SignalP
  misc_feature (346)...(225): similar to gi298973 in the genepept database release 114, Run with FASTXY 3.3t00, default parameters
gcgcgcccaatcgagaatcgagacctatggccgagtggtggaattcggcggcctcagacttcctcctgagggcaacaggtttttagctggggaggaccatgaccaaatctgcctttcccagtcacctctctgatctctttgatgcagtgtagatctgtgcttagcaaactcagaaggccctgtcaccaccaggaaggaagagaccccacgactgagggcagtgggctatgagatttgtgaccctttcctctgcctgcctctgcccctgcccattgggaccctgctggaccaggcatccatcctatggaaatctccatgaagcgtcgacctccctgccccccaggcattggacaggggccaggaaatggaatgaaagcagccactgtctgaagagctggagaccatcatctgcctctggaagcccagagaacctcggctcagacagaaggacagagactgagggaagggagagagactgtgacagagaagcagaggagggtgacagagtcagggaggaacaaaacagcctgcagtgggagcagagacagaaatgtgggggacccacagggaggggagggagggaaggggagggacggagggagggacaactgcccgtccaagtggctgtgagagccctggggctggggagaggcaccctcctcctgttggcttctcatacaggctctatcaggggacccagggaacaagtaagctc

SEQ ID NO: 81735 - DNA, 739 bp, Homo sapiens
  sig_peptide (539)...(674): this location contains the signal peptide sequence, MTLERFSPICTECHRLPLLSALLAPLCTWAASRVWPDCGPCPNRA, Run with SignalP
  misc_feature (326)...(384): similar to gi1335031 in the genepept database release 114, Run with FASTXY 3.3t00, default parameters
cgaaactttatggactcaaggactagagaatgatgacatcccccaggaagacggaggtcactgcattgacagtgcatgcaggaaaccccatagaccagaggcttatctgcaattagtgagtaagtctcctcttcccgccttgctgccaacatatttgatgctggggagaagagactgcaggcttcctatccctcttaacatttttttttttaacctcaaaccgcttgctgacctttggggtcttcttttgccctcacagcattgcctgccctacctcttttaatcaggactttccaaaaactgtttgcaatggaaataggggagggagttggggggtccaggagaagaagagcgaggcacgcctgtccgccgtggccccagagcgtccctgcttctctgatcacgtgctaatgccagcgctggtgggaagacagagtgacctgtctttttctctttccccttcattcctcaggctccgagttgggttactttgagaagaaatggcattgagaacatgtcttctaggttttcctcttttatgactcttgaaagattctctccaatatgcaccgagtgtcacagactgcccctcctctcagctctcttggctcccttgtgtacctgggctgcctcacgggtgtggccagactgtggaccctgtcctaaccgggcagttgatccaccaggcaagtgacaatcaggatgcaggaagagaggccagtacacatggtctgttcca

SEQ ID NO: 81736 - DNA, 708 bp, Homo sapiens
  sig_peptide (668)...(533): this location contains the signal peptide sequence, MGGVNSFHPFSLFFLPFILLFEKLYYILIICLAMRAGGFFLLYYP, Run with SignalP
  misc_feature (195)...(114): similar to gi4529916 in the genepept database release 114, Run with FASTXY 3.3t00, default parameters
cccgggtcgacccacgcgtccggtttggaggagcggtttcaagcttaagtctccagagattactcccatccaaacatacagtattggtgtacctagggaactgctcacttttgcaacagtcagggagttcactgttggaactattaatgttagaacatgttgcagtagttgtgttcaaggaatgaggaacctgctgtaacacttaatgactgtgcactggaatgcagaaaagttaaaccttctatgcctaaatgcctaaaacagacaaactggatagttatatttttagaatgatactgcgttttttagagtagtatgaattcctagatcagtcaaacatgcatgttatttagtttgttctttagtatattgttaactggcctaaatccaatgactgacatggtaaagattcaccacttctagcatactgggcactttttatttttgacttgattacattaactttttgaaaactattcagtgatttattcagccaatcttatgaggtacatctgagttgatctagatgctagaggatagtataacaggaaaaagccccctgctctcatggcgagacagataataagtatgtaatacaacttttcaaatagtagtatgaatggtaaaaaaaatagggaaaaggggtggaaggagttgacgcctcccatattgtgatccgatgattcccttaaggacccccccccacaa

SEQ ID NO: 81737 - DNA, 375 bp, Homo sapiens
  sig_peptide (112)...(247): this location contains the signal peptide sequence, MCVIQAPCLTWLRLAACHGCPEPANLRSPNLSPLGLESPLLPLCL, Run with SignalP
  misc_feature (242)...(107): similar to gi1354319 in the genepept database release 114, Run with FASTXY 3.3t00, default parameters
ttgggcatctgggtagcttctttttgtggggtatttataaaattgcatggatctttaaggcttaccctggaggccctctgaggccttctgactggggtttcttgagggtgcatgtgtgtcatccaggccccatgtctgacatggctcaggttggcagcatgccatgggtgccctgagccagccaacctgcggagtcctaacctttcccctttgggccttgagtcacccttattgccactgtgcctgctatagttaaagggcctcaggccctgctttcttttccctgcagctttttatttaatgtctatctagtaaagctccacagacccacatcgtttggaaagtaagacagaaacctgacagttatcctcaggt

SEQ ID NO: 81738 - DNA, 363 bp, Homo sapiens
  misc_feature (1)...(363): n = a,t,c or g
  sig_peptide (39)...(174): this location contains the signal peptide sequence, MVLXKXNSTFFFILYMMLLLMQPKVIFAFLRTITDASCADEFIAS, Run with SignalP
  misc_feature (164)...(242): similar to gi15943 in the genepept database release 114, Run with FASTXY 3.3t00, default parameters
cggacgcgtgggcggacgcgtgggcggacgcgtgggttatggttctganaaaancaaatagcacttttttctttattttatatatgatgcttcttttaatgcagccaaaagtgatatttgcttttctcagaaccataaccgacgcctcatgcgcggacgaatttattgcctcgaggattttggttctttgaaacaaacatcggattttttatatagagacacatatgatgcgggtttccatgctaaaaaaagcgagaagggcctttattagaaccctggttccaacaaaaaacaatgccccatactggttggaataaaagtggtttgaaaaaaaacaaaaataactttggtttgaataaaaan

SEQ ID NO: 81739 - DNA, 675 bp, Homo sapiens
  sig_peptide (178)...(313): this location contains the signal peptide sequence, MFLLPFPVFYSILLSGEDGYKAGGVSSCLFCLHLLILHHLSHVIF, Run with SignalP
  misc_feature (409)...(433): similar to gi2904 in the genepept database release 114, Run with FASTXY 3.3t00, default parameters
catgtccaaaattgcttattagaaactgttctcttccagtattgttttccacacattggagatgcatacatgcctaattccgacctgtgattagttaagctccacagaaaaaaactaaatttaaaagtgactagatattctctgtcttcttatttgctcttcatttactttttaactatgtttcttctaccttttccagttttttattcaattctccttagtggagaagatggatacaaagcaggaggtgtgagtagttgtttattttgtctgcatctgttaatattacaccatctttcccatgtaatattcttgtttcttcttagtttagcctcctgaatttatgcaggcaatgggcttgtttggttttcctttgtattacttataaaatgtagtttgttctgataacgttcttataagattgatgatattaatctgtatatatgcatatttgcttctctcctgttatatatatggcctttaaaaattgcacaccagaagctatggagcctcattgctttactcatccccttcattgattcaggcccctgacaggacgttcctaatgcgtggcaggccctgagaaatcaaccattgatgttactttttacgtactagagctactactttcacaggaaatgtccgctgcattttattattacccccatcgccccc

SEQ ID NO: 81740 - DNA, 917 bp, Homo sapiens
  sig_peptide (432)...(297): this location contains the signal peptide sequence, MLSPIVPLYMKTCCQEVFIYAGFTFPLLFLVTLSFHHVLWLTCSA, Run with SignalP
  misc_feature (350)...(237): similar to gi163558 in the genepept database release 114, Run with FASTXY 3.3t00, default parameters
aataaatataacagaagtgttaactattgtattcccatttttttctccttccatctcttctgcggtaattcatcacatagtatcttaaagggaacaaataatgtttcatcctatggaaatgtgaaggatgaattgagctcctggcccttctgatgctttgaaatggaaggattgttccttagagcttctctgcagaatcagtggagattttcagtttcccaccctgcctggctttctctcttggtgactcccttggtgttttggagtattctttctataggggtacctgtgaggggcagaacacgtaagccacagaacatggtgaaaactaagtgtcactaggaaaagtaatgggaaagtaaaccctgcatatatgaaaacttcctggcagcaagttttcatatatagagggacaatgggagacagcatgctgtttttatagaaaagaagttttacataatatagttattgacaagcttttggttttggctaaatacacacacacacacacacgctcatatgtgtttactctggaagtctaagttgattttatcactctcaaacatattgtaaaggaaacttgcttacaggaaggattaaacttgaactacttatcctattctttaaggcactccattgcctggccccaatttactaatcctgtcttatttcccacaaatcctttatactctactcgatgaaacatccttttgcacacccttgtgcctttgctcgcattaatccttccaagagacttccctcctgttctccattaatgaacgtcctacccagtcttcaactcccgggtcagatcctgtgtcctccataaaaaattttccagacaactccaatctgtccttcttccaagttcctagaggccttaattattcattctagccactaggtgcataggaatt

SEQ ID NO: 81741 - DNA, 908 bp, Homo sapiens
  sig_peptide (280)...(145): this location contains the signal peptide sequence, MLRKNAFIVLPLYNYLYLYWFSLLFLWIQVTIWHIHLVVKKITSK, Run with SignalP
  misc_feature (303)...(157): similar to gi1171610 in the genepept database release 114, Run with FASTXY 3.3t00, default parameters
ctctccatgggttgtgccaaccacctagtcagtctcaatgagagaacctgggtacctcagctgaaggtgcaggattcactcaccattttcattcttctcagtgggagccaccaatggcagctgcttctagtaggccatctttccactttgctggtaatttttttaacaaccaagtgaatatgccaaatggtaacttggatccacagaaaaagcaaagagaaccagtaaaggtaaagataattatataatggtaagactataaatgcatttttccttaacatgaatgaattaaacagtttattaaaaaggcagagattgtcagaaaacctgtgtaaaaacaagcaaacaaacaaaaacaaaaaataagacccaactatatgctgtccacaggagatacaccttttattcaaagatacaaatagactgacagtaaaaggatgagaaaaggtacatcattcaaacagcagccacaagaaagctggagtggctatactaatctcatacaaaatagacataacaaaaaattcctagagacattttataactatagaagggtcaatctatcaggaaaagctaacaattacaaatatgtatgcacccaacaaccaaacactacaatacacaaagcacacaactgacagaaataaggagttggagacttcaatgtctcactttcctattatggattacccaggcagaaaatcaactaggaaataaaagatattaacattataaaccaactagaccttaaccaaacatctataaaacactcccacacaacaagaaagtatacattcttctcaactgcccataaaacatctctttaaacacaccaccctatgcttaggctttaaagccaaccccttcttaaattaaaaggataccaaacctaaattatgtccccccac

SEQ ID NO: 81742 - DNA, 611 bp, Homo sapiens
  sig_peptide (316)...(451): this location contains the signal peptide sequence, MDLYVVIFWLVYIFSTYIITYIKGNVGLCFQILFQLSFERRPKSV, Run with SignalP
  misc_feature (271)...(381): similar to gi1574082 in the genepept database release 114, Run with FASTXY 3.3t00, default parameters
catttttttgtgttgtcagtaatttccttataaagatagtaattttctctaaatcaaatcttatcatgacttctaacattctgtaaaataatttgagagtactagttaactaattcacaaactttaaattagtagtttattttcagttaagcacacaagaaagaaatatacagtctatctataatgaaatcttagttgactagatgggttgtggtgtcttaaaaattcccataactgatcacatggcttttaaaataggaagtctgagatttttttgttttcctcaactatatcctttttaacaagttctattttatggatctttatgtagtgattttttggttagtatacatattctctacttacataatcacatatataaaaggtaatgtgggactgtgttttcaaatcttatttcagctaagttttgagagaagaccaaaatcagtaaggtaagctgagaactaagagtagaaagtttaaactagagcaggggccaagtttaggagcagccacaacttttcttgcacatcaacttagttgtaacaatttagtttgaaagaaaatctggaacataatactcagtttgtaaaattgaagttggtagaatt

SEQ ID NO: 81743 - DNA, 5826 bp, Homo sapiens
  sig_peptide (1621)...(1486): this location contains the signal peptide sequence, MCSLPRHLLFLIIFRAYSLAVDLSTHSLTTAKFPSPIVLPTLYRS, Run with SignalP
  misc_feature (317)...(2507): similar to gi2224679 in the genepept database release 114, Run with FASTXY 3.3t00, default parameters
tttcgtgtgaaacctggcccttcagttctcaagggccctttggaacatatttgactctaagcagaggtcactattccaagagtgactcatgtcttggggttaagtggagatgatgggtgggatccatgaacagatccagctcttcccaatgtggggggcaccagagtgcatagcttgggagggttggtcatccgaagaggcactgcgtgggtgcatcccgggcaaaaaggatgagaaggtgatccactggcttccataccctgggaaaggtgtcagaccgtgaggtcacatcaaaaggtcctacttgaagtccatcatgtccttcggcagagacatggagctggagcacttcgacgagcgggataaggcgcagagatacagccgagggtcgcgggtgaacggcctgccgagcccgacgcacagcgcccactgcagcttctaccgcacccgcacgctgcagacgctcagctccgagaagaaggccaagaaagttcgtttctatcgaaacggagatcgatacttcaaagggattgtgtatgccatctccccagaccggttccgatcttttgaggccctgctggctgatttgacccgaactctgtcggataacgtgaatttgccccagggagtgagaacaatctacaccattgatgggctcaagaagatttccagcctggaccaactggtggaaggagagagttatgtatgtggctccatagagcccttcaagaaactggagtacaccaagaatgtgaaccccaactggtcggtgaacgtcaagaccacctcggcttctcgggcagtgtcttcactggccactgccaaaggaagcccttcagaggtgcgagagaataaggatttcattcggcccaagctggtcaccatcatcagaagtggcgtgaagccacggaaagctgtcaggattctgctgaacaagaaaacggctcattcctttgagcaggtcctcaccgatatcaccgatgccatcaagctggactcgggagtggtgaaacgcctgtacacgttggatgggaaacaggtgatgtgccttcaggacttttttggtgatgatgacatttttattgcatgtggaccggagaagttccgttaccaggatgatttcttgctagatgaaagtgaatgtcgagtggtaaagtccacttcttacaccaaaatagcttcatcatcccgcaggagcaccaccaagagcccaggaccgtccaggcgtagcaagtcccctgcctccaccagctcagttaatggaacccctggtagtcagctctctactccgcgctcaggcaagtcgccaagcccatcacccaccagcccaggaagcctgcggaagcagaggagctctcagcatggcggctcctctacgtcacttgcgtccaccaaagtctgcagctcgatggatgagaacgatggccctggagaagaagtgtcggaggaaggcttccagattccagctacaataacagaacgatataaagtcggaagaacaataggagatggaaattttgctgttgtcaaggaatgtgtagaaagatcgactgctagagagtacgctctgaaaattatcaagaaaagcaaatgtcgaggcaaagagcacatgatccagaatgaagtgtctattttaagaagagtgaagcatcccaatatcgttcttctgattgaggagatggatgtgccaactgaactgtatcttgtcatggaattagtaaaggggggagacctttttgatgccattacttccactaacaaatacaccgagagagacgccagtgggatgctgtacaacctagccagcgccatcaaatacctgcatagcctgaacatcgtccaccgtgatatcaagccagagaacctgctggtgtatgagcaccaagatggcagcaaatcactgaagctgggtgactttggactggccaccattgtagacggcccactgtacacagtctgtggcaccccaacatacgtggctccagaaatcattgcagagactggatacggcctcaaggtggacatctgggcagcaggtgtaatcacttatatcctgctgtgtggtttccctccattccgtggaagtggtgatgaccaggaggtgctttttgatcagattttgatggggcaggtggactttccttctccatactgggataatgtttccgattctgcaaaggagctcattaccatgatgctgttggtcgatgtagatcagcgattttctgctgttcaagtacttgagcatccctgggttaatgatgatggcctcccagaaaatgaacatcagctgtcagtagctggaaagataaagaagcatttcaacacaggccccaagccgaatagcacagcagctggagtttctgtcatagcactggaccacgggtttaccatcaagagatcagggtctttggactactaccagcaaccaggaatgtattggataagaccaccgctcttgataaggagaggcaggttttccgacgaagacgcaaccaggatgtgaggagccggtacaaggcgcagccagctcctcccgaactcaactcggaatcggaagactactccccaagctcctccgagactgttcgctcccctaactcgcccttttaataagacccttttactcaaagtcctagcttaaccctttgagactctgagatttttttcccccaaatttgtgtaaaacagtttcatctgatctatctagcgctcaatgcttgaatggcagaactgaaagtgttttcaggtatctttgtagcggtttccctttactgaataagatgacacgtggtgattgtgaagatggtaatttgctgctaatagagtcctcaaagggttaaggccaatttgcaatttttttttaaacttagaagcaatgaatgttttcatcagtcaagctaggatctgcagtatgtaatatagcacttgttaaccctctgagtgcatagaattttattgagaattcttgtttgggaatttttcaggcctttggatgtatacacacatgtttcttgattttactgcagatcaaggggtgttgttagatgctgaaatgtccagaaaagaaggacatttagaatgatatcttgtttgtccttttctgtgggtttagaacgtggcaggtttataacttagacacacgcacggttctttcttcttcacaatcctattcagaaacagattttttttttcattagagatatgactgtcagttgcagtgagttctgcatcccaagtggagggaattgggtttgtggcaaagagcttgacccaggaaatagatggtgccccccaaattgtctccacatgaagatgtactgatgacgccccagaaatgctgcttccatatcagctgctgctagcgccagcgcagactctcagggagtcaccacagcttgtcttgtgcttggtgagtgagggtctctctactcagtgtcagacatctacaggaaagaaacaactggtggaaaagagcaataaattgcccggtgctctgcagggctggaatttcaaacagaaagagggaataagatcctgtgatttttctcacctgcttttccacgcactgtggtcatcactgtgcaatctacatctagtatgaaatccacacataggagagctggggcacaaggggactggaggcagttgctttgcaagatggctgaggagaaagcacactgggaacacaatccagaatgttctaacaataagttttcagtgaataaaccactggcaagacaattccatgtgcacctttaggttacctatatagtctcctaggaagatcaggatgaaagacctagatgatacccctgaggataaaacctccatcccctaaaatgattttttttaaataccactgtctttagctgtccaggaggtcagagtgttttttctgtctttgggccaagtcctgtctgagacctgtattttcactcttgttaccaaatctatctccctagtgcagtgtctccaggcctgagtttcttctggaacagattccattttagaatggggattcacaggttctgtgcatcaccacagtgctcagagaggattctcctggggtgtcttagaggcaggtgcccaactcaaatgtattcccaaggtttgctgggctctgggatccacgagacaaccagagagggatatctcatgaaatttgcatctggtggctgaacagtacctatgttctctgttttgaatatactttaatacctgagagtcttaaaatttgtgaacaacgtttctatagtcctttattttcaaatgcacgttgatcttcacttgctgcatttttactcttcaaccctgaaactatggtctacattaatatggatttttaaatcacatgtcattacttttgcaacaccatcaccaaaattttttgctcttttacatttaggttcatctctgtggtctgtgttgtcctgacatgtaaaaagcatatcgtttattgaggtttttttcccccccttttagagcatccggaagtgataacacgcaaaatcacaaagtagcataaatcagtaaattagttgagttgtttttgggggggaggtgggggtagggggcacagaacaccagaaagagtgttggtgtgtaggtagattccatattaatgaggaacactgaactagttggaaattactgctttctctagaaatataaagcaaagcactattccaaggctatggagtagctctacagcctggcctcaactctaaaagtgtgaagaatgcaatgggcagagacctacctgcagtggactgtcattttcctttctttctctgaattactgctttttctgtgggcattaactatattgctacagcatctagtgtactgagcctgcggtgcatggctcaggccttttcccatcgacgtctagggggactctggaccgtgtgaagctagggggtgtttctcagcacactgcagaagggcagctcagaaggaatggcaggggccccatttcagcatgggggatccccagcacatcactgtagaatttaagtgatctatgctgaataaacagtggaatgtgaccagtcaagtagaaatcttgagtaatcagatggaatgcaatctttctaacattaagctaccaagatcctgaatgtcagagatgtactcagagggttaacagacaagcacaaggcatgctgactacattggtgtatccagattgctttgcttttagccagtgctttctaatttttttctcgacattcttgggatagttcaagtttgaaataattaagcgggggggggtctttaaggaatttctataacccaattgatcttatttttgatttcccttatcctacacccaatatgtatcattatggcagtgtatctatgtaattatcaatttaatcatcaccacgggtgttttccatattttttcccaagtatttaatatagctctcttatggtggtggcctggtgatggggaccgtctttcttttactgacacatgaccaatcatatggtattttcaagggaattttaagattcatcttttcagtttgatagtagactagttaaggaagaactctttcattacttgcatcgtgtaaatcatctctgtagacatgtgttcatattaatgaacacattttttctcaacattgtagcagaaatcattttattcgtcatgatcaatgaatatgtgatttgctccagatcgttagaaggaaaagtaagatttcagtcatcaaaaatgtttttaccgtagccctcatctaacttacacgtggtgcatattaaaataagcagagaaaaaaaaatgtgaataaacaactgaaaacaaaaaaaaaa

SEQ ID NO: 81744 - DNA, 968 bp, Homo sapiens
  sig_peptide (231)...(366): this location contains the signal peptide sequence, MSFPIHLRFFSLFFLHWLLLSGFSSLLPWASAFVQYSRCPEHTPS, Run with SignalP
  misc_feature (261)...(479): similar to gi169584 in the genepept database release 114, Run with FASTXY 3.3t00, default parameters
ccccaaacacttagctggctccccatgacttaagtgtgttctcttgtgtcctatggaatccagttctgaagaggtgggggaggacaactgtgggaaaagccctgggggcccctcccaaggccccatcagtgctctgagtaggctgtcatcagaacaaagggctccactgctgacaaggtttgagaactgctggcttgaggtgagaacccctttaacctctgcgggacagcatgtctttccctatccaccttcgattcttttctcttttttttcttcattggctccttcttagtggattctcttctctactgccctgggcttcagcctttgtgcagtactctcgatgccctgaacacacaccttccctttgcccaggcggtgcaaacaatccacttcttcaagctccaacacaaatgctgcctcctttaggatgcctgctctgtgctctccctgcctcccctagcccatacctctgctggcaccttctgtaccatgccttcagaaaccttcttatccccctcatctctggggccccctgtggatctggcatacccaagttcagtaaatgtctatcagtaagctgatggtacatgcattttctaaaatagagctgggacttcccatggggcccacatctgacctggcagcccatgtattccggccattagggatgggaagccatgaggacctggccttctgcccgacccaggcagccattcaaggtgagcaatggccacttccaagactcaagtgcacctggaccctgcccaacaggcccccccaggaaaaacaggctgtccctggcggcagtaagtagcaggcggcccaaggtttctggagctcttggttttggcccaacccccccacccaaaatactgggttaggacaggggacttgtagctccccctcagtgacctttggccctggggccaagccccctggattgggattcggggaacgctccagtc

SEQ ID NO: 81745 - DNA, 569 bp, Homo sapiens
  misc_feature (1)...(569): n = a,t,c or g
  sig_peptide (36)...(171): this location contains the signal peptide sequence, MIGDILLFGTLLMNAGAVLNFKLKKKDTQGFGEESREPSTGDNIR, Run with SignalP
  misc_feature (294)...(169): similar to gi15930 in the genepept database release 114, Run with FASTXY 3.3t00, default parameters
cgcttccggttctgacggacgcttcggccgtaacgatgatcggagacatcctgctgttcgggacgttgctgatgaatgccggggcggtgctgaactttaagctgaaaaagaaggacacgcagggctttggggaggagtccagggagcccagcacaggtgacaacatccgggaattcttgctgagcctcagatactttcgaatcttcatcgccctgtggaacatcttcatgatgttctgcatgattgtgctgttcggctcttgaatcccagcgatgaaaccaggaactcactttcccgggatgccgagtctccattcctccattcctgatgacttcaagaatgtttttgaccagaaaaccgacaaccttcccagaaagtccaagctcgtggtgggtggaaaagtgttcgccgaggtgtgcatggtttcccagccacgtccctgttttcaaagatagtttcactttggtctctgaattgaaatgctgtctactgaaagggttttcaggagcntttattgtaaggggctgtgatgaaattgcattcccctaggtaaaaggaaaatcatttct

SEQ ID NO: 81746 - DNA, 1762 bp, Homo sapiens
  sig_peptide (208)...(343): this location contains the signal peptide sequence, MSIAWLVISICHLLKVKYTLALLDSVTGHFRSSNKSQVFGYCFQS, Run with SignalP
  misc_feature (597)...(440): similar to gi457064 in the genepept database release 114, Run with FASTXY 3.3t00, default parameters
tgaagataagacttttagatcacagcttcaaattttatggaaaattaagcaagcaatacctagccaatagttctgcttaactttttggttaagtattttgttgggattcctataaataatttttcacacaaagttttaaatttctggtgtactttgactctcaactgagagtggatagagtttttcttttgaggattacatcttaaaatgtccatcgcctggctggttataagcatttgtcaccttttgaaggtaaaatatactctggcccttcttgactcagttacaggtcattttaggtccagtaataagagtcaggtgtttggttattgctttcagagtcagacattgtttaggtttatttaaaaactattagcaggttttcactgacaatgcttttttaaaaataaaaaatgtaaatccacttttttaaggcagattgttcattatgcatatacagcttgaactatagtttgggtccatataggaaccaatcaccaaaaactctggtaacagaattaggaaatcctcttgagaagagggccttaatgaccttttatgtgaaaaaaattttggagagaatttctggacatttttttttctgtctctctcacagggtttggttttcagataggagttaggtatgagaacaagaagagagaaaacttggcgctgaccctgttatagtggttatagtggtgtccctaaagggaggaaatgatttcaggtaaccacagtgaaatgttaagctgaatgaagagttttatatgtatgggtttaaacagagttgaaaagtgagattcctgaagtgttctttggctgtttaacaattatttgtatgagtgttttattaaaataacggttgctgtctttggtaacatagatgagggtggatttttaaatggctttggcccgacccctttctacaataaagggagggagtctatgttgctccatataaattacagaatgaaaatagatggggcaaaagtttgactaaactttacctttttatagtttcactttttaagttatatttagaatatattgatagattataaattgattgtgaaacttttttctgaattttttcaacatgttttactcagttacatgagttaaaggatattttcagtcctgttatcttcaattgcagtctttaaaaaaacccaccctattgttctacttgttatatgtctattcatacagtaaattcatttcaaggtttatgccagtgggtattattggtgctttttgaagttgaggtgaaccatccaggaaggtcttgttaatgttatgttcatctataatggcataggggaaatatatatatttttaatattgtaaacatttgtactgaataacctttttttccccccctccgcaagcaaaactggttgaacagcggatgaagatatggaattcaaagctctaatggacctttttgaagagaagttgtggcttatgtggagtttacatgggcctctgatggaagaaagctaatctgtttagtatttgtgcattttactaaaatggcagcttaaagttgtgtatctgctattgtgatgccaatgccggtgttttaagtggaaaaaaaatgacctctttgatttgtgctgtgtacacaagatttctggaaaagtaaagaaaaaccctttttatggctcacacagcttaagagtagctgtctctcaaacgtgcgctcacagttgagctgcttttgttttattctaaataaattgtttcttttgaggaaaaaaaa

SEQ ID NO: 81747 - DNA, 1958 bp, Homo sapiens
  sig_peptide (294)...(429): this location contains the signal peptide sequence, MSLTIWTVCGVLSLFGALSYAELGTTIKKSGGHYTYILEVFGPLP, Run with SignalP
  misc_feature (63)...(1568): similar to gi5668545 in the genepept database release 114, Run with FASTXY 3.3t00, default parameters
caattcccgggtcgacgatttcgttttccctctgttttatttttcccccgtgtgtccctactatggtcagaaagcctgttgtgtccaccatctccaaaggaggttacctgcagggaaatgttaacgggaggctgccttccctgggcaacaaggagccacctgggcaggagaaagtgcagctgaagaggaaagtcactttactgaggggagtctccattatcattggcaccatcattggagcaggaatcttcatctctcctaagggcgtgctccagaacacgggcagcgtgggcatgtctctgaccatctggacggtgtgtggggtcctgtcactatttggagctttgtcttatgctgaattgggaacaactataaagaaatctggaggtcattacacatatattttggaagtctttggtccattaccagcttttgtacgagtctgggtggaactcctcataatacgccctgcagctactgctgtgatatccctggcatttggacgctacattctggaaccattttttattcaatgtgaaatccctgaacttgcgatcaagctcattacagctgtgggcataactgtagtgatggtcctaaatagcatgagtgtcagctggagcgcccggatccagattttcttaaccttttgcaagctcacagcaattctgataattatagtccctggagttatgcagctaattaaaggtcaaacgcagaactttaaagacgccttttcaggaagagattcaagtattacgcggttgccactggctttttattatggaatgtatgcatatgctggctggttttacctcaactttgttactgaagaagtagaaaaccctgaaaaaaccattccccttgcaatatgtatatccatggccattgtcaccattggctatgtgctgacaaatgtggcctactttacgaccattaatgctgaggagctgctgctttcaaatgcagtggcagtgaccttttctgagcggctactgggaaatttctcattagcagttccgatctttgttgccctctcctgctttggctccatgaacggtggtgtgtttgctgtctccaggttattctatgttgcgtctcgagagggtcaccttccagaaatcctctccatgattcatgtccgcaagcacactcctctaccagctgttattgttttgcaccctttgacaatgataatgctcttctctggagacctcgacagtcttttgaatttcctcagttttgccaggtggctttttattgggctggcagttgctgggctgatttatcttcgatacaaatgcccagatatgcatcgtcctttcaaggtgccactgttcatcccagctttgttttccttcacatgcctcttcatggttgccctttccctctattcggacccatttagtacagggattggcttcgtcatcactctgactggagtccctgcgtattatctctttattatatgggacaagaaacccaggtggtttagaataatgtcagagaaaataaccagaacattacaaataatactggaagttgtcccagaagaagataagttatgaactaatggacttgagatcttggcaatctgcccaaggggagacacaaaatagggatttttacttcattttctgaaagtctagagaattacaactttggtgataaacaaaaggagtcagttatttttattcatatattttagcatattcgaactaatttctaagaaatttagttataactctatgtagttatagaaagtgaatatgcagttattctatgagtcgcacaattcttgagtctctgatacctacctattggggttaggagaaaagactagacaattactatgtggtcattctctacaacatatgttagcacggcaaagaaccttcaaattgaagactgagatttttctgtatatatgggttttggaaagatggttttacacacta

SEQ ID NO: 81748 - DNA, 844 bp, Homo sapiens
  sig_peptide (103)...(238): this location contains the signal peptide sequence, MSVFWGFVGFLVPWFIPKGPNRGVIITMLVTCSVCCYLFWLIAIL, Run with SignalP
  misc_feature (67)...(311): similar to gi2584789 in the genepept database release 114, Run with FASTXY 3.3t00, default parameters
tattgacacttcctggtgggatccgagtgaggcgacggggtaggggttggcgctcaggcggcgaccatggcgtatcacggcctcactgtgcctctcattgtgatgagcgtgttctggggcttcgtcggcttcttggtgccttggttcatccctaagggtcctaaccggggagttatcattaccatgttggtgacctgttcagtttgctgctatctcttttggctgattgcaattctggcccaactcaaccctctctttggaccgcaattgaaaaatgaaaccatctggtatctgaagtatcattggccttgaggaagaagacatgctctacagtgctcagtctttgaggtcacgagaagagaatgccttctagatgcaaaatcacctccaaaccagaccacttttcttgacttgcctgttttggccattagctgccttaaacgttaacagcacatttgaatgccttattctacaatgcagcgtgttttcctttgccttttttgcactttggtgaattacgtgcctccataacctgaactgtgccgactccacaaaacgattatgtactcttctgagatagaagatgctgttcttctgagagatacgttactctctccttggaatctgtggatttgaagatggctcctgccttctcacgtgggaatcagtgaagtgtttagaaactgctgcaagacaaacaagactccagtggggtggtcagtaggagagcacgttcagagggaagagccatctcaacagaatcgcaccaaactatactttcaggatgaatttcttctttctgccatcttttggaataaatattttcctcctttcaaaaaaaaaa

SEQ ID NO: 81749 - DNA, 951 bp, Homo sapiens
  sig_peptide (177)...(312): this location contains the signal peptide sequence, MGFAFLCGACFYFSVLPPALPLASFYYYYYYYNEVRLKEPLGANE, Run with SignalP
  misc_feature (92)...(32): similar to gi470682 in the genepept database release 114, Run with FASTXY 3.3t00, default parameters
ggcacgagagcatgcctacttttggtgccgtaaaaatggcagctgacaaaatagttcttacaggtaaacaatttggaagacattatacaaaataagtttatagttatcttagaaggaaggtgaaacaactctctagatgggataaaccaggtgctaatacggatgtgttaccttacatgggctttgcatttctctgcggtgcttgtttctacttttctgtcctacctcctgccctgccccttgctagtttttattattattattattattacaatgaagtgagattaaaggaacctttgggtgccaatgaaaatattaaccaaaatatactttctgaataagaattaattatggttctgaaggtgatagtaaaaattgtattaaaattttagtccctgagtaaaaagaacaaagctggaggtatcacgttacttgatttcaaactacactacaaatctatagtaaccaaaacagcatggtactggcataaaaacagacacatagaccaatggaacagaatagagaacccagaaataaatccacatacttatagccaactcactttcaacaaaggcatcaagaacatacattggcaaaaggatagtctctttaataaatgctgctaggaaaactagcatatgtagaagaatgaaattcccgtctctcaccatatacaaaaatcaacctaaatgtggctgggcatggtgactcatgcctgtaatcccagcactttgggaagtcaaggcgggcggatcacctgagatcaagagttcaagactagctgggcgaacatggtgaaacatggtggcacacacctgtaatctcagatacttgggaggctgaagcaggagaatcacttgaacccaggaggcagagtttgcagtgagctgagaacacaccattgcgctccagtcggtgtgacaagagcaaaattctggctcaaaaaaaaaa

SEQ ID NO: 81750 - DNA, 748 bp, Homo sapiens
  sig_peptide (103)...(238): this location contains the signal peptide sequence, MKEDHSPSSGTSVFLVSPLCIDSSAVLMLLFWLILLSCLHHLFCQ, Run with SignalP
  misc_feature (337)...(231): similar to gi1407796 in the genepept database release 114, Run with FASTXY 3.3t00, default parameters
ggcacgaggaactaagaagctacttttcttgtgtgttattctagtgatgatggtcattataattgatgtacctgatattatgctaggtttagggatacagaaatgaaagaagatcacagtccctcatctgggacctctgtttttttggtgtcacctctctgcatagacagttctgcagtattgatgctgctgttctggttgatccttctgtcatgcctgcaccatcttttctgccagactgaagtgttcttgcttggggaaaagcagatttgcaaaggttctctttttcctgattgttgctttgcagattgagtatatttgtttgtttgtttttaagagaacaaaagttgaatgagattgattactggctctttaaggaataattactcccccttttgacttatgaaccatcttgaggagatctatgaacgctgggacttgtcatgacttgcatctcattaatgtggtcgggcccagaccatggtgttcattgagatcagtatgacagccattacttgcccgtggaattgataaaaacactgagcccgaggccaagtgttttcctaacaaaaggggcaagtctgggccctgggcggaagccttcactcccaaatggaagattgtgcctggcggcgtaagtctctggcacttcaccagccctcgtgtagcggccggcccccttctgttttctaaatcatctccagccgcggcgcgggccgtgcctctcctcgcccctataagacgcacg

SEQ ID NO: 81751 - DNA, 364 bp, Homo sapiens
  sig_peptide (81)...(216): this location contains the signal peptide sequence, MGALCAHCRILAFCPYGSGISLVPYLLICLRGRNIHYATTIPVLV, Run with SignalP
  misc_feature (53)...(117): similar to gi1827460 in the genepept database release 114, Run with FASTXY 3.3t00, default parameters
ggcacgaggtgttcttccagagatttttttaaaaagcctcggccttttctcactccctccctctttttcttttaacacacatgggagcattgtgtgcgcattgtcgtatacttgctttttgcccatacggatcagggatttctctggttccttacctcctgatctgcctgcgcggcaggaacattcactatgcaacgactatccctgtgctcgtcaacgttcccgtgtgaccttgcagttaggggggaccatgtaactacttgtggctagcaaactgtgagaagcgagttgtcccacttcggggctgaagcactaggaacctccagctctgccacagaagctgcgtgtcatgtggtggagcctt

SEQ ID NO: 81752 - DNA, 729 bp, Homo sapiens
  misc_feature (1)...(729): n = a,t,c or g
  sig_peptide (135)...(270): this location contains the signal peptide sequence, MKNLLMVHLWGICTLYLEFSAVSAISFLNHISVKTYFPNSSSFYR, Run with SignalP
  misc_feature (222)...(102): similar to gi1825765 in the genepept database release 114, Run with FASTXY 3.3t00, default parameters
agtgattatcctaactgctataggagttagtgatgagatcagcccatagagctcagaaggctattctttgaggaaccccaataccagagatttaataatagagacatgaataggaaagagatgactgcattaaaatgaaaaacttgttgatggtccatctgtggggaatatgcacattatatcttgagttttctgctgtgtctgccatttccttcttgaatcacattagtgttaagacctatttcccaaacagctcctcattttacagagcaaccccaatggtccttgacttcatccttcactaacaaaatcaaattcaagccaattacctgaagggaacaaagctttacaggtatactttaacttacaaaattaccataattggccaagggtggtggcttacatctgtaatcccaatactttgggaggctgaggcaggcagattaacttgagctcaggactttcaagaaaagcctagggaagataatgagacctcgtcttctatacaaataccaaaattagcttggcatgggcgcttaaacctgtccttcttaactactcaagaggctgaggtgggaagaatacccttggcccccgggaggggcaggggttcctgggggaaattgccctttggccttccaccccgggggcaaaaaaaagggaaaccctgtcttccccncanaagaanacaccccacaaaacagcggggggtatttttttttttgggcc

SEQ ID NO: 81753 - DNA, 361 bp, Homo sapiens
  sig_peptide (41)...(176): this location contains the signal peptide sequence, MSFLVGNSQFIYFLSVASPMCLPEAFLNCSPSKEERLNGLYTPNL, Run with SignalP
  misc_feature (128)...(186): similar to gi4558670 in the genepept database release 114, Run with FASTXY 3.3t00, default parameters
ggcacgagcggcacgagaaataattcatacatgtttattaatgagctttttagttggaaattctcagttcatatatttcctgtctgtggcatctcccatgtgtctccctgaagcctttctcaactgctccccttctaaagaggaaaggctcaatggcctatatacacccaaccttgagcaccgtcatggcaggaaacagataacagtgtttttataggtcactaggatttatctttattcatatttccatttctcacttctaagaactagcctttccatgatcaccgtgatcacaaggctaagagataggtaacatagtctctttgcaaatacagtaggaatatcccactgagcatgtttg

SEQ ID NO: 81754 - DNA, 477 bp, Homo sapiens
  misc_feature (1)...(477): n = a,t,c or g
  sig_peptide (115)...(250): this location contains the signal peptide sequence, MMANMATSPWVLLIFIIILVDCIFCHYLMSFSSHNNALFPQSLFC, Run with SignalP
  misc_feature (260)...(209): similar to gi1495668 in the genepept database release 114, Run with FASTXY 3.3t00, default parameters
ggcacgagaataaatcaagctgattaattgtattgtgcaaattttctgtcttttctaattttttggctctttgatctaacagtaacggagagaggtgtgttgacatctcccactatgatggcaaatatggcaacttctccctgggttcttttaatttttataataatcttagtagattgtattttttgtcattatttaatgtcattctctagccataataatgctttatttccccaaagtctattttgtctcatattactaacaactactccagctttgcttcaaacactttcatgtccttatattttaggtatgtcgtttataaacgtcatggaattatgtggtatccacctttcaagatagccctccagtgaatcttatttcaccagtcccacccttgtgtagtctgatgttgagtagggctgacttgtataaccaataagatattgtggaaataagactcctgaagccagatcn

SEQ ID NO: 81755 - DNA, 624 bp, Homo sapiens
  sig_peptide (193)...(328): this location contains the signal peptide sequence, MRIMILLMSIFEKLCPSSSTNTSLALGNVTPFFSLAQTAGVTTKM, Run with SignalP
  misc_feature (158)...(131): similar to gi5139171 in the genepept database release 114, Run with FASTXY 3.3t00, default parameters
gttatttttcctaatagcaaagcaaagaataaactgtcgctttctttgaaagccaattagtcccctctgcaactatccaatcagtctcctgtttgagttggctgaaaatgcctgaaataaccataaaccatagcacctaggacaatgcctggtccttggtaggttttcaataaatgtatcttgaataaataaatgagaatcatgattttgcttatgagtatttttgaaaagctgtgcccatcctcctcaacaaatacttctctagcacttggcaatgtgacacctttcttctccttggcacaaactgcaggtgttacaacaaaaatgtggcaggctgttaagtcagtccagagcaattggtaattagcccacatcagggcaacacttgatatttccagcaggacaagctcttgcattgcacgggggtaatgattgtttttctcttacgcctttctcagcttggattcattacctcatcaacaagttactaattattaaaatttccagtcaacatgagggatacctattggtatgattatgaaggaatcatttaacaagaagtttagaaaaaataatcccgcagaaagctaacccccatttgaaacactttgaaccctggaacat

SEQ ID NO: 81756 - DNA, 511 bp, Homo sapiens
  sig_peptide (222)...(357): this location contains the signal peptide sequence, MSATPVIPLPLLLLIISDSGWVQWAKYTQKIEPKIKSLLPTLLGI, Run with SignalP
  misc_feature (297)...(412): similar to gi972904 in the genepept database release 114, Run with FASTXY 3.3t00, default parameters
ttttttttttttagcagaagcagagttgtagctttatttcataaatgttttgagtgtctactatatttcatttaaaatataagagctttctggctatagtgtgaagaacaacccatagtagagaaaaagagataaagagctctgttgggagtagatgagtatcagactaaggcagctacagctaaattagcaccagaatagttcgttctgtcactgaagccatgtctgctacaccagtgatccctttacccttactcttacttattatctcagacagtggatgggttcagtgggccaaatacactcagaagatagagcctaagataaaatctcttctacccactttactggggatatggcaattatcaggcactgctatcaagtgtttggaccaagactggatggctcctttctaagtccttccataactactaccctactaaagcctctgaacccaagggaacggcagcctggctgtgccaagaaaggggctcccagcttctcacattct

SEQ ID NO: 81757 - DNA, 399 bp, Homo sapiens
  sig_peptide (197)...(332): this location contains the signal peptide sequence, MVKWEVRHPLFSCLMLLFSILSCSVGELNCPGSLPACFSIIPISE, Run with SignalP
  misc_feature (244)...(115): similar to gi1262724 in the genepept database release 114, Run with FASTXY 3.3t00, default parameters
aggggacttcataaacttgaagacaaagagaaagatcgtttctgaaaagagtaatatatttgactccattaaaaattaaaacttctgtttgccaaaaagcaaatccacacagtgataagtatgtgccacagatatgagggacaagtgactaggaatcttaaaagaccaagccaattgataacaatgcatgattacaatggttaaatgggaggtcaggcatccattgttttcctgcctaatgctgttattttcaattctttcttgctcagtgggagaactcaattgcccagggtctcttcctgcttgcttttctatcattcctatttctgagccccagcaggggcctggtcttacattccatggcattccctgcctgaggccttctagctctcacatgag

SEQ ID NO: 81758 - DNA, 489 bp, Homo sapiens
  sig_peptide (139)...(274): this location contains the signal peptide sequence, MGQRSLGAGTFGLFFFSLAILTKQSFDHTFPISKLLYIFFQQLPA, Run with SignalP
  misc_feature (149)...(305): similar to gi1903029 in the genepept database release 114, Run with FASTXY 3.3t00, default parameters
gaaaaattgattcatacgtccgcccgacattccaggtcgagcacgacgcacgcgtacgcccacgcgtccgagggatatcccacaacttgccttgtaggcatccggccccttttgtggtggcggtgtcctttttgatgtatggggcaaagatcactgggagctggcacctttggcttattcttcttttcactggctatcctcactaagcagtcttttgatcacacctttcccatctccaagctcctctacatcttcttccagcagttaccagcgccgctggcttcgaagtcagacaacaagtttggaaaatggcatcatcccaagaaggtcaactgatgagacattcagcttggctgaagaaacctgtagctctaatccagctatggttaggaggaagaaaattgccataagcatcatcttttccctatgtgagaaagaagaagcacaaaggaatttccaggacttcttcttttctcattttgccctgtg

SEQ ID NO: 81759 - DNA, 396 bp, Homo sapiens
  misc_feature (1)...(396): n = a,t,c or g
  sig_peptide (129)...(264): this location contains the signal peptide sequence, MLIYFSKLRISITYLLLRTQVIIPQHLMALLRVQRLRWSFHHHPG, Run with SignalP
  misc_feature (204)...(264): similar to gi1929874 in the genepept database release 114, Run with FASTXY 3.3t00, default parameters
ctcttttatggatctaggcagtactacttatctcacactttcgaggaaagacagtgtcattttggaatgtaaaaaaacaaaccatttatccactaaaacggtaaagtttttaacaacttttaaaggaaatgcttatttactttagcaaactgagaataagtattacttacctattattacgcacacaggttattataccacaacatcttatggcgctattgcgggttcaaaggctcaggtggtccttccaccaccaccctggtcctctaggcgatattgttaagccttcaggacaattgtctctacattaagtgacccttgactgctatgcctccagaatattacttctctctgtggaaatgggctacttntaccaccccattcctacctgtaaat

SEQ ID NO: 81760 - DNA, 405 bp, Homo sapiens
  misc_feature (1)...(405): n = a,t,c or g
  sig_peptide (217)...(82): this location contains the signal peptide sequence, MPKHIYILFYFIIWFFIFKVSGDYFGLCKLVSSPSSPPPFNALPC, Run with SignalP
  misc_feature (208)...(127): similar to gi563136 in the genepept database release 114, Run with FASTXY 3.3t00, default parameters
cacaaaatctaagtcacatcagccacactagttacacagatgtatggaaactgcaggtttcagttttccagcctgtgcagtgcaaggaagggcattaaaaggaggaggactagatggtgagctgaccaatttacacaaaccaaaataatccccagataccttaaatataaagaaccaaataataaaatagaacaaaatatagatatgtttaggcatttaaactgatattttttagtatttgaagtattacgctatatgttagtatggggtgtaataacatgcattggaaacaccctgaagttatcagtatataattgcttgttaattatggcacatcacagggactgtcactcattctttaaaagaattagaggatatttaatgatacgaaaagatgttcacaan

SEQ ID NO: 81761 - DNA, 7418 bp, Homo sapiens
  sig_peptide (209)...(344): this location contains the signal peptide sequence, MWSLHIVLMRCSFRLTKSLATGPWSLILILFSVQYVYGSGKKYIG, Run with SignalP
  misc_feature (209)...(5281): similar to gi4160232 in the genepept database release 114, Run with FASTXY 3.3t00, default parameters
tcgagagcgccgcgaagaggcagcggggcgcgggtggattggggctggaggtgcgcgtcccgtggggtggcaaggcggcactcctggcgctgcgggcgtccccacaggaacagactttgacccagaacacagaacctcacttgtcaacaagaaccttctggaagagaagactggcagaatattttttaagtactaagacttgcctgcgatgtggtctctgcacatagtactaatgaggtgctccttcagattgaccaagtccttggccacaggtccctggtcacttatactcattctcttttctgtacaatatgtatatgggagtggaaagaaatacattggtccttgtggaggaagagattgctctgtttgccactgtgttcctgaaaaggggtctcggggtccaccaggaccaccagggccacagggtccaattggacccctgggagccccaggacccattgggctttcaggagagaaaggaatgagaggggaccgcggccctcctggagcagcaggggacaaaggagataagggtccaactggtgttcctggatttccaggtttagatggcatacctgggcacccagggcctcctggacccagaggcaaacctggtatgagtggccacaatggctcaagaggtgacccagggtttccaggaggaagaggagctcttggcccaggaggccccctaggccatcctggggaaaagggagaaaaaggaaattcagtgttcattttaggtgccgttaaaggtattcagggagacagaggggacccaggactgcctggcttaccaggatcttggggtgcaggaggaccggcaggtcccacaggatatcctggagagccagggttagtgggacctccgggccaaccagggcgtccaggtttgaagggaaatcccggtgtgggagtaaaggggcaaatgggagacccgggtgaggttggtcagcaaggttctcctggacccaccctgttggtagagccacctgacttttgtctctataaaggagaaaagggtataaaaggaattcctggaatggttggactgccaggaccaccaggacgcaagggagaatctggtattggggcaaaaggagaaaaaggtattcctggatttccagggcctcggggggatcctggttcctatggatctccaggttttccaggattaaagggagaactaggactggttggagatcctgggctatttggattaattggcccaaagggggatcctggaaatcgagggcacccaggaccaccaggtgttttggtgactccacctcttccacttaaaggcccaccaggggacccagggttccctggccgctatggagaaacaggggatgttggaccacctggtcccccaggtctcttgggcagaccaggggaagcctgtgcaggcatgataggaccccctgggccacaaggatttcctggtcttcctgggcttccaggagaagctggtattcctgggagacctgattctgctccaggaaaaccagggaagccaggatcacctggcttgcctggagcaccaggcctgcagggcctcccaggatcaagtgtgatatactgtagtgttgggaaccccggaccacaaggaataaaaggcaaagttggtcccccaggaggaagaggcccaaaaggagaaaaaggaaatgaaggactctgtgcctgtgagcctggacccatgggcccccctggccctccaggacttcctgggaggcaggggagtaagggagacttggggctccctggctggcttggaacaaaaggtgacccaggacctcctggtgctgaaggacctccagggctaccaggaaagcatggtgcctctggaccacctggcaacaaaggggcgaagggtgacatggttgtatcaagagttaaagggcacaaaggagaaagaggtcctgatgggcccccaggatttccagggcagccaggatcacatggtcgggatggacatgctggagaaaaaggggatccaggacctccaggggatcatgaagatgcgaccccaggtggtaaaggatttcctggacctctgggccccccaggcaaagcaggacctgtggggcccccaggactgggatttcctggtccaccaggagagcgaggccacccaggagttccaggccacccaggtgtgaggggccctgatggcttaaagggtcagaaaggtgacacaatttcttgcaacgtaacctaccctgggaggcatggccctccaggttttgatggacctccaggtccgaagggatttccaggtccccaaggtgcccctgggctgagtggttcagatgggcataaaggcagacctggcacaccaggaacagcggaaataccaggtccacctggttttcgtggtgacatgggagatccgggttttggaggtgaaaaggggtcctcccctgttgggcccccaggccctcccggctcaccaggagtgaatggtcagaaaggaatcccgggagaccctgcatttggtcacctgggacccccgggaaagaggggtctttcaggagtgccagggataaaaggacccagaggtgatccgggatgtccaggggctgaagggccagctggcattcctggattcctaggtctcaaaggtcccaaaggcagagagggacatgctgggtttccaggtgtcccaggtccacctggccattcctgtgaaagaggtgctccagggataccagggcaaccgggactccctgggtatccaggtagcccaggtgctccaggtgggaaaggacagccgggagatgtggggcctcccgggccagctggaatgaaaggcctccccggactcccaggacggcctggggcacatggtcccccaggcctcccaggaatcccaggtccctttggagatgatgggctacctggtcctccaggtccaaagggaccccgggggctgcctggtttcccaggttttcccggagaaagaggaaagcctggtgcagagggatgtcctggcgcaaagggagaacctggagagaagggcatgtctggccttcctggagaccggggactgagaggggccaaaggagccataggacctcccggagatgaaggagaaatggctatcatttcacaaaagggaacacctggggaacctggacctcctggagatgatggattcccaggagaaagaggtgataaaggaactcccgggatgcaagggagaagaggagagctgggaagatacggaccacctggatttcacagaggggaacctggtgagaaaggtcagccagggcctcctggacccccaggccctccaggctcaactggtctaagagggttcattggttttccaggacttccaggtgaccagggtgagccaggttctccaggtccccctggattttcaggaattgatggagcaagaggacctaaaggaaacaaaggtgaccctgccagtcactttggtccacctggtccaaagggtgagccaggtagccctggatgtccagggcattttggagcatccggagagcagggcttgcctggtattcaagggcccagaggatcacctggaaggccagggccacctggctcctctggaccaccagggtgcccaggtgatcacgggatgcctgggctgaggggacagccaggagaaatgggagaccctgggccaagaggcctccagggggatccagggataccaggtcctccgggaataaaaggtccctccggatcacctggcctgaacggcttgcatggattgaaaggtcagaaaggaactaaaggtgcttcaggtttgcatgatgtggggccacctggtccagtgggaatacctgggctaaaaggggagagaggagaccctgggagcccaggaatctctcctccaggtcctcgtggaaagaaaggtcccccaggacccccagggagttcaggaccacctggtcctgcaggtgccacaggaagagctcctaaggacattcctgacccgggtccacctggagatcagggacctcctggtcctgatggcccaagaggagcacctgggcctccaggcctccctgggagtgttgaccttctgagaggggagccaggtgactgtggtctaccagggccaccaggtccccctggcccaccaggccctccaggatacaaaggctttccaggatgtgatggaaaagatggccagaaaggaccagtgggattcccgggaccgcagggaccacatggatttcctgggccacctggagagaagggtttacctggacctccagggagaaaagggcccactggtcttccgggtcccagaggtgaaccggggccacctgcagatgtggatgactgtccccgaatcccaggccttcctggggcgccaggcatgagaggaccagaaggagccatggggctccctggaatgagaggcccctcaggaccagggtgcaaaggagagcctgggctggatggcaggaggggtgtggatggcgtccctgggtctcctgggcctcccggacgtaaaggggacacaggagaagacggctaccctggaggaccagggcctcctggtcccattggggatcctgggcccaaagggtttggccctggatacctcgggggcttcctcctggttctccacagtcagacggaccaggagcccacctgccccctgggcatgcccaggctctggactgggtatagtctgttatacctggaagggcaagagaaagctcacaatcaagaccttggtctggcagggtcttgccttcccgtatttagcacgctgccctttgcctactgcaacatccaccaggtgtgccactatgcccagagaaacgacagatcctactggctggccagcgctgcgcccctccccatgatgccactctctgaagaggcgatccgcccctatgtcagccgctgtgcggtatgcgaggccccggcccaggcggtggcggtgcacagccaggaccagtccatccccccatgtccgcagacctggaggagcctctggatcgggtattcattcctgatgcacacaggagctggggaccaaggaggagggcaggcccttatgtcacctggcagctgcctggaagatttcagagcagcaccattccttgaatgccagggccggcagggaacttgccacttttttgcaaataagtatagcttctggctcacaacggtgaaagcagacttcgagttttcctctgctccagcaccagacaccttaaaagaaagccaggcccaacgccagaaaatcagccggtgccaggtctgcgtgaagtatagctagagaatgcgaaattcaccaacacgtggccaagagaaacttcctagggggctaagacttcctagactgtgctaagagatgtccatggtgctcattttggactccccttccagggggtcccttccggtttggtccgtggttattccccaggagtcctctggttccttaccacattaagcaaatgctgcacagatggatttgtttggacctcccaatctaggggagcctagatactcttattttactgaggatgatcgaagaactggctttacttaaaaatatgcctaattcctcagaagggcaagtagatgataaaggcccagattacaaattacattactgaaaacttcattccttgggttaacagtatctcaaacaattgaagtcaattactctataatacagtgggcttctggatggattttataggaaaaaataaacaggtcaatgaatgaaactagaaagcagagattttcaacatttcaaaatgatttcctctgtaatctatttttccatatactttaaataatggtaaaaccatgacgcaaagagagatttttttttaaagagaaaaaaaaaaacttcacactgccagcgttaacagttcctttcaaaggagaatgaatcatgatggcaggaaggccccaaccagtcgccgtattccagagatgcgacgttagcataaacacatcacagatgaatataaaacattatgttctcttctgcatttttcagagaatagaaatgcctactttggcaacccttttgaaaagtagcaattatggaaaaaaaaatattcaataagagattaggagcctaaaagctattagtgaatattaaggtagttattcacaaaaattgactccccattgcagtgaacttccagacagactgcttttccccagtcggggtccggcgtgtcacaggtgcgtgcgtgctaatgggactgacgctacatggggctcactcaggcaggcacgcgcttcatacaaagcatctcactcccctccccaggagagcctgcacagcttcttgcactcacaacggacactttgctccacacacataatggcagctcacacagggacgtgacagagctatcattatcgacttgggagaaaattaagggccgatttaattaaacttaggtaagaagattcatttaagtcagggttaccccatcaggaggacatggctctatctttaaacgaaacaaagacaatttataatttgaattttatgcctcccgtggttggctgttacaggagcatccattttgccaattttaaagacattcttatatttcatatcagtcttgtaccaaggcaacagtttgacatttggcattagtattttctaaaaaagtttagaatgtgtgtcaatttataatgattatttttttctgtaaagcaaaagatccctttttctgttttgctaggaatttggtgatctaatcctaaatttaaaagatttgttggaaaaaatttttaggaaactcaccttcctcatctaaaagaaaaaggcattttagagaaaactaaagaaatttctcatcgagcgtgacactcattttagtgctttgtttccgtgcacttaaaaataattgagaagaaaaactcaattaaaattttgtttataagaaatgttttccttgccaaaccttgatttgtaatgagctcttatatgcagaacacatttcaaatgagttttgttctatgggctgcccccagggtggcaattttttttacgagtattttctggtaaaaagaaaaatgtgtattttaagatgaaatattttcttgatgtagcagaatatttcctagttcatttgacccatttgatattttttaaaccatgctctggcatgttgaatatttttgtgcacctaaaacttaagccaatttcaatcttatttgtgattacctttctccttcccaaaaagctttatctattaccaaaagtcaaccctcctaaaagttcaacctgttcatcttgaacttggcctgagaacattttctgggaagaggtaagggtgacaaatggaacatcagaaacgtatcttgcttgctaattattttaaacactttaatgttggtattagaatattatcttcataagttaataaataagtaaaaaaaaa

SEQ ID NO: 81762 - DNA, 774 bp, Homo sapiens
  sig_peptide (231)...(366): this location contains the signal peptide sequence, MLGWQIWRLRPQLLSFHTQDRCHWSITSQCSKPESQESFLSTIHL, Run with SignalP
  misc_feature (231)...(303): similar to gi2708701 in the genepept database release 114, Run with FASTXY 3.3t00, default parameters
tctttagtatatataatattaaaaatggctatatatggaattctatctgagaattattatatggttaaattcaaatcctggctctcttcctttgtcttagtagatgggtccttcttttattataactagagttttaagttctcttttattagggcatttgaataaaaaacaatcattgtagaagtataattaattaataactagctatcttatgtcatcttgagggaatcatgctgggatggcaaatctggagactgaggccacaactcctctccttccatacacaggacagatgtcactggtctatcacatctcaatgctctaagccagagtcccaagaatccttcttaagcaccatccatctattagagggagcacaggaggggacacccactgaatgactattcaaacaatttcttaaagaatatgcaatgcataataaggtgttgagatacagaatgctactttactaaaatactacagtgtaagaatgtatagaaaaaagcacatgctttggagacttaaaggcctgggtatgaatcatggctctgacattaacaaacctcacctcctctttaaaagagtaataatgattggtatctcattgagcttcgtaaactaaaaaactacagagtaagaagggggggcccttacaaaagctttggagggggacaaacctggcgaggaatcatggctctgtctttatctcccatcaccgcctctctaaaagagtaaaaatgagtgtttggcatggaactttgtcttaagaaagaa

SEQ ID NO: 81763 - DNA, 756 bp, Homo sapiens
  sig_peptide (207)...(342): this location contains the signal peptide sequence, MSLLCLKFFSGLWTITFSKGAKIIHWGRSLFNWISMCKRMKLDPY, Run with SignalP
  misc_feature (299)...(458): similar to gi3170221 in the genepept database release 114, Run with FASTXY 3.3t00, default parameters
tcccaagtcctactaactttatttcccaagttataaccaccttctttccatctctactaccattactggggcccaagtcaccatcatctctggcctggataactgcagcttcctacataaactgctctccctacataaactcttgcccctccaatacacactctatatagcagccagcaatactgtcttaaagcataaaagaaatcatgtcactcctctgcttaaaattcttcagtggtttatggacaattactttcagtaagggcgccaaaataattcactggggaagaagtcttttcaactggatatccatgtgcaaaagaatgaaattggacccctactcataccatacacaaaaattaactcaaaatggatcatagatctaaatctaagggctaaacctacaaaacttaggaaaaaatataggggtaaaaatcttcatgacttggatttggcaacatcttaaatatgatgccgaacacacaagcatccagagggggggaagagatatacagggccgggtgcgggggctcatgactgggatcccagcacttttgggaggccaaggcaagaggatcgcttgaggtcaggagttgaagactagcctgaataacataggagacggccccctaacaacccagggggggtaaataatacctggccggccgctcggtggaagaaaaaaacacgcccttcgtataaaaaccctcaggggcccaggttcacgagctaccaacaacaaactccctcctagcc

SEQ ID NO: 81764 - DNA, 772 bp, Homo sapiens
  misc_feature (1)...(772): n = a,t,c or g
  sig_peptide (60)...(195): this location contains the signal peptide sequence, MILPNLSSPKLFHFIFLMNIYSYKGIFWLLQFLLPLLSPSQIKQK, Run with SignalP
  misc_feature (361)...(279): similar to gi622955 in the genepept database release 114, Run with FASTXY 3.3t00, default parameters
aaacttggcaaagtcatcttatctctttgactgtctgctttactgcaaaatggctttggatgattctcccaaatctctccagtccaaaattattccacttcattttcttaatgaatatttattcatataaaggtattttttggctactccaattcctccttcctttactttctccctcccaaataaagcaaaagccaagtgtatcaaaagagattcagaaaagtgatgtagcaataggagcaaatagcaacttaactttagggtagaaaggagaaaacattaaagagatacagtgattttgacagccttttcaagtattcaaggcagagcaaggttaccctgagcccaggttcaaaaaatctactccttgaaggatttcactacatgttattccatatgtcactgtatctgcctggcattaccccttcttaaaacacacattaaagtctcttctagagtttctacttaaagaccctaaatttcagcttatctgtgccagttttcagataaaaagttattttggaaaagatgaatcttccatattaaaaatatatgattccaagaaaatgagtttttttcatcagcaaactagntacactcagcactatctacttaaaaaaaaataaaaaaaacccaaacccaaccctcttgttaaaatgggggtttaacggaacaccaaacccttacaaggagagaaaatcagaatttttttaaggcgcggggctttgattagcaacaaatattaaaataagggtgtctattttaacaaaaa

SEQ ID NO: 81765 - DNA, 770 bp, Homo sapiens
  misc_feature (1)...(770): n = a,t,c or g
  sig_peptide (141)...(276): this location contains the signal peptide sequence, MRETGILLCFLSALNYITLVTSQKLILSKKMHVNHYLPKKTISKF, Run with SignalP
  misc_feature (93)...(290): similar to gi1703627 in the genepept database release 114, Run with FASTXY 3.3t00, default parameters
aaaagaaggtaataaattaaaaagatcatttacagagatagcctggggtgataagagtttaaagttttgatctttttgttcatcttaaaaaaattatgatatatgtattctctctagctcacagtcttctcattttcaaaatgagagaaacagggatactattatgtttcttatcagcattaaattatataacccttgtgacatcccaaaaattgattctatccaaaaaaatgcatgttaatcattatttgccaaaaaagacaatctccaaatttctttattttgtaaaagtattccatgacctagtcctatagagcaggtgaatattggagattgttttctctgtaactttactatcatctacctatcttcgtattttggtgagagatcatgaaaccctctatcaaactctctttatgcagtaagttataacaaattagcactggcttataaagatatatcaaattagagtaaaatgcaactgaaaatatcataaatcattcggtaattaatgttttcttaaattcttggggnaagtacaagagaagaaattggagatgtgcagactttaaatgacctaaacagtcttacacaggagtttttgcagtatggtaagaaggaggtggctacttatgttttcaaaaagcacatgacctcatgaaaagtatgcaaggctatactgtcgacggtagaaaaacgagagacagagaataatttaaagaaccttcccatgttaggcgtgaaaatgaaaaggcttaaatttaggtgcc

SEQ ID NO: 81766 - DNA, 772 bp, Homo sapiens
  sig_peptide (345)...(480): this location contains the signal peptide sequence, MERTIHFVSLFASMWLSLQTKSFFFKNWSRDSFSKLRKTFSNSFQ, Run with SignalP
  misc_feature (470)...(382): similar to gi4062489 in the genepept database release 114, Run with FASTXY 3.3t00, default parameters
agaaaagtccaaactgccctctcagcatttcagtaccacttattgttgagtcagtattaagacaaactggaatgatagatctgttctccagttttgtggggaaaggaacaaagacacagtttgctgtgtgccctgcccacgagcaggagcctgctagaagagaacctgcccttgtatctccccctcctcatggcctgcagtcagagtgcccaggaggcttctaggcgtcaaagcagctcttattattatggaaagaatgtcagcattttgaaacagagaaaaccagttgacctcaaaccatggcatgtcataatctgtacattctgccccttgataagtatataatggaaaggaccattcattttgtgagcctgtttgcatccatgtggttgtccttgcaaacaaaatcttttttttttaaaaattggagcagggactcattttctaagcttcgtaaaactttttctaattctttccagaaaaagcatgaatctcaaaggtcccaagggtttctaagttaggggggccccccgtgcaagtgcttatttagaagatctttctgttttagaaaagggactaggggatcggtccataaacaggaaaaacgttttctaaatctttcaagaagaggccggaaccttaggagtttcaggcgctcttaaattaaaacggcgctcccctccactgttcttctttgaagttctaacggggaatcacaaggaatctttcaatctgggccccaggaaggcttccctataatatacctccctgc

SEQ ID NO: 81767 - DNA, 326 bp, Homo sapiens
  sig_peptide (71)...(206): this location contains the signal peptide sequence, MENINSWGRRGSLILFLSLAAIIKWALGALSSRQNSRSYTLYIMM, Run with SignalP
  misc_feature (213)...(290): similar to gi1353506 in the genepept database release 114, Run with FASTXY 3.3t00, default parameters
aactgcaaaaaaggctccaaacttccagccaccaccacagaaacaagacgtttgcctccctcctcaccctatggaaaacattaacagctggggaagaaggggatctcttattttgtttctaagtcttgctgccatcatcaaatgggcacttggagctctgtcatctaggcagaacagcaggagctacaccttgtacattatgatgaacgtcaacaatttgttttccagaatggtctttcatcaacactgctggagaaatacctttattctgcatttatctacgatgtaatacagatcaacactactccggtaaacagttaagaacg

SEQ ID NO: 81768 - DNA, 358 bp, Homo sapiens
  sig_peptide (160)...(295): this location contains the signal peptide sequence, MKCKLIPVCPFLRLNTQPLLIISYGIFLHIFRDFSYIHRVRERHS, Run with SignalP
  misc_feature (53)...(135): similar to gi1017807 in the genepept database release 114, Run with FASTXY 3.3t00, default parameters
tgagaatgcaactaatcttagttaacaaaagaatcatagagttaaaggagatcttgattatttctttctattcatccttttgactttgtgtaggatgataccaacaacattccagaaaaacttcattctgagcttttgcattcaccccaaatttctcagatgaaatgtaagcttatccctgtttgtccctttctcagattgaatacacagccgctgctcattatctcttatgggatattcttgcatatatttcgagactttagctatattcacagggtcagagagaggcatagtgtcttcctatctgtaggacagcagtggtgtcctgaattgacaaggagcattttcttattgaatt

SEQ ID NO: 81769 - DNA, 394 bp, Homo sapiens
  sig_peptide (118)...(253): this location contains the signal peptide sequence, MRNVSLLIYRRLMTVVLLQRTEDLRTEVEWGDSLFTVYLVVPVGF, Run with SignalP
  misc_feature (256)...(195): similar to gi3643969 in the genepept database release 114, Run with FASTXY 3.3t00, default parameters
ggctgctctatatgcgctgatatgaaaatatctctaagatacgtcatcacataggaaaaaaaaaggcaacaaggaaaaaaaatatgtgtgaggggctactaagggtataaggttcatatgcggaatgtctctctactaatatataggagactaatgacagtagtactcctccagagaactgaagacttgaggacagaagtggaatggggagattctttattcactgtataccttgttgtacctgtaggatttcaaactttgcattgtatattcaaaaacaaattatttcaattgataatacagaggtaaaaatacctaggaaaggaagataaaggttttatccctttatatctacacattcatgcacacacatgtacaaacgtcgacgcggccg

SEQ ID NO: 81770 - DNA, 649 bp, Homo sapiens
  sig_peptide (77)...(212): this location contains the signal peptide sequence, MLFLHIAECSFLRLKVAFPSSLNFQPLAQFLAHILEVFYKCLWKK, Run with SignalP
  misc_feature (326)...(160): similar to gi912713 in the genepept database release 114, Run with FASTXY 3.3t00, default parameters
aaacattctttccctgggaagttttttattgatccttgtttgaagttgatacataatattatatcataactgtgtgatgctgtttctgcatatagctgaatgcagctttttgagactaaaggttgcatttccttcatctttgaatttccagcccctagcacagttcctggcacatattttggaggtattttataaatgcctttggaaaaaaggagttcaagtgtttaatttcctggcaaactaaatagctataaagagagagcttagaaagtctagagtaagagatgattagcatgcttcctagaccatctgtcactaataccaattgtttctacttggcactgcagacttgttttttgagggggagggcacgcttgtgtaaagttaaaaaaaacagaacaaaaccaaataccagaactcttaggttattctatacccctctgtttagtggctaaaaagtcattgctgatttctaaaaaacatggacattcttattcaggagagatagatgccattattgctttttccaagagcaatacagttgctataactgagagctggttctgccttgcccccttacaatctattcttgatgcggcaaccccgagtgatcccattcaaaggtgcaagggcaagaaatatgtttctc

SEQ ID NO: 81771 - DNA, 348 bp, Homo sapiens
  misc_feature (1)...(348): n = a,t,c or g
  sig_peptide (99)...(234): this location contains the signal peptide sequence, MYTVVFFCFPNLMCSGNIGRNQALLVMFLKTKFQPLMLTISKKFI, Run with SignalP
  misc_feature (55)...(109): similar to gi59607 in the genepept database release 114, Run with FASTXY 3.3t00, default parameters
tttgtaaattaaaaaaagatatacgcgacacacacattggagataagatttatatacccttcctttgggactctgctaaagcatattaattatggaatatgtatactgttgtattcttctgttttcccaacttaatgtgtagcggcaatataggcagaaatcaggcattgttagttatgtttctgaagacaaaattccaaccactaatgttaacaattagtaaaaagtttatattatgtaattaaacatttgaggagctaaagtattaaatattttgcaattaaacacaattaccaattttctattttccagttaagccacaactttcctagtaatttaagaaaaatn

SEQ ID NO: 81772 - DNA, 459 bp, Homo sapiens
  sig_peptide (55)...(190): this location contains the signal peptide sequence, MKQLIYWFSLFFCCSCCHLNRHGNRLHTTEIFPSLFHLVCCADPL, Run with SignalP
  misc_feature (261)...(69): similar to gi3282303 in the genepept database release 114, Run with FASTXY 3.3t00, default parameters
tgattcaactgattccttgaaataaaggtagtcagacctcgcggtatgatggagatgaagcaactgatttactggttttctctatttttctgctgttcgtgttgtcatttaaacagacatggaaaccgtctgcacacgacagagatctttccgagcctttttcatctagtgtgctgtgctgacccgctcccctggatgcctgcacactcatttggttctcccttttggtcacttttttccacttaccctggcagaaattcacgtggctgtcagtagtaattcagtgacctgctttcaaaaaatgttataaattaagcagcttttctgtgtatagcttttgggttgaactgagaagggctaagtgaagggagaagctatgttgagctcagagtcagaatgccctgccccagacattttgagatgtgaatttttcatttgttttgtttgtcgacgcggccg

SEQ ID NO: 81773 - DNA, 353 bp, Homo sapiens
  sig_peptide (146)...(281): this location contains the signal peptide sequence, MSILVVSAFLANLWLLMTISTSQMLNMTKITYLVLFLHLSALRIG, Run with SignalP
  misc_feature (134)...(265): similar to gi561535 in the genepept database release 114, Run with FASTXY 3.3t00, default parameters
cgcggccgcgtcgacctaggcagagaaaccatgagctggataatctttccttgtctttgaagtctctgttactgagaactggtgagaacaggtgagcaaagacaaatgaatctctgcctaagagcctattgctgttggggactacatgtccatattggttgtttctgcctttctggctaatttgtggctgttgatgaccatctcgacttcccagatgttaaatatgacaaaaataacctatcttgtcctttttcttcacctttcagctctcagaattggcagtacaccccacagcttcttgctaaagtcctatcacctggggacccacttttcattatttcacatgaactcac

SEQ ID NO: 81774 - DNA, 655 bp, Homo sapiens
  misc_feature (1)...(655): n = a,t,c or g
  sig_peptide (19)...(154): this location contains the signal peptide sequence, MSPLLPLSYKLVLCFPTPNGVVTHGEQNASSTDIEHGLKTILIKP, Run with SignalP
  misc_feature (19)...(65): similar to gi1388132 in the genepept database release 114, Run with FASTXY 3.3t00, default parameters
tgcactattaagtagaccatgtctccccttctcccactgtcctataaattggtcctgtgtttcccaaccccaaatggggtagtaactcatggagaacaaaatgccagtagtacagatatagaacatgggttaaaaactattctgatcaaacccccagcaagaatcttgaagaggaagacagagggggaagaaagcaataggcttactctccctacaacttaattccatgctctaattcagagcagtataattaaccccgagtttcactgctaacactgaagtttttcagcctgatgagaatatcatttagtatcctgcaatcgccaataatagcaatatgacacaatggtgcccattgaggctctaatcagagcacatagtcatttacatagaacattttctgtgactctctgtaatacaacgccacaaagactcaattgagacacaagtctccctttcccataanctannnaaaaaaaaaaacccagaaaaatgggttgggggggggaaaaaggaaaagaaggaccccccttttttttttcaaggagaaccaaattgttccccaccattattccggggggtttacaggcccggggtttttctttaaaaaaggttatttccggtgcctgaaaaaaaaattaaaccttgtcctttt

SEQ ID NO: 81775 - DNA, 3612 bp, Homo sapiens; identical to SEQ ID NO: 58677
  sig_peptide (176)...(311): this location contains the signal peptide sequence, MGWLCSGLLFPVSCLVLLQVASSGNMKVLQEPTCVSDYMSISTCE, Run with SignalP
  misc_feature (176)...(2654): similar to gi33834 in the genepept database release 114, Run with FASTXY 3.3t00, default parameters

SEQ ID NO: 81776 - DNA, 653 bp, Homo sapiens
  sig_peptide (110)...(245): this location contains the signal peptide sequence, METSSAFTNPLLVCFLALLHSVMNITYTPPKKKNENCSKPLILTS, Run with SignalP
  misc_feature (360)...(298): similar to gi2224518 in the genepept database release 114, Run with FASTXY 3.3t00, default parameters
agtttccatgacattttcactgcttttacaaacccactcttagtatgttttcttgcattactacattcagtaatgaatataacatactaagagtgggtttgaaaatgtcatggaaacttcctctgcttttacaaacccactcttagtatgttttcttgcattactacattcagtaatgaatataacatatactcctccaaaaaagaaaaacgaaaattgctccaaacccctgatcctgaccagttccctagggactgtacaataagttagaagcagcattaacactaccaccggcaattaaaaaacaaaataaccaaaaataacgaaatcagaaaatgctgcagtaatgacagtggcctagcagagcgagcgagcaggctgagggttacatacctcctggagtttggggcaaggaaaaggagagccaaaatcatggaaacatacaaatgagggagaaaagaaaattaaaacaaagaaattaaacccgattccttaatcttaaagtgcaatgtatcagtcacattcatgcctgcctggggagagagctgaactaaaaacactcaacgggcaaatgatcccactactgtctggcacgtgaacgacgggctcttacatgccacgttccacctcatcaaggcaagattgtcgacgcc

SEQ ID NO: 81777 - DNA, 804 bp, Homo sapiens
  sig_peptide (191)...(326): this location contains the signal peptide sequence, MFFLLTSTSIYVTTYRLFLLKCPRGTSICPKSTLPSARKTWSSSH, Run with SignalP
  misc_feature (202)...(82): similar to gi2224406 in the genepept database release 114, Run with FASTXY 3.3t00, default parameters
gtttttgtgtgtactaagtgggtaggaaggatagtagagcttctgtctggttttctatgaactcaaattgttaagagcctctgccaagataaactcatccactaaccttttgagttcatagaaaatcagacagaagtcccagtccttcctagtcattttaaaacaatgactcaaattatgtatcctgatcatgttttttctcctgacctccacatccatctatgtaactacctatagactatttctacttaaatgtcccagaggtacctctatctgtccaaagtctaccctaccatcagctcggaaaacttggtcttcctctcatcttccctttttcatttctggcattataactggttaatcacacaaacctaaaatctgagtgatcgctcatcactgattcaccaattctgtctgttgtatttctaaaatctctctaatccatcttcttctctacattacaatggccactgccatccatatccaggcttatgtcctcatcatcccttgcctgggagacttcgacagtctgccatccagtctttgaccttctccagtttccccttagccaaagtcaatcccttatttacactttttttaaaaacagcaaatctgctggggtctctcccctgttagaaatcccttaaggagcttatgtccaagctgcataggacagtctttgaggccttctcatatcctgttcttgcccatctttctcgtcacatctcctctgcttctgcctccaggccccgtcatgtttcttacattccagcaaactagacaactggagtctctgaatacacc

SEQ ID NO: 81778 - DNA, 650 bp, Homo sapiens; identical to SEQ ID NO: 81687
  sig_peptide (145)...(280): this location contains the signal peptide sequence, MILVSLLILIVEPLFASLTPLSLCFECVVFLNVGQHLTDQTFSLN, Run with SignalP
  misc_feature (321)...(256): similar to gi414762 in the genepept database release 114, Run with FASTXY 3.3t00, default parameters

SEQ ID NO: 81779 - DNA, 655 bp, Homo sapiens
  sig_peptide (74)...(209): this location contains the signal peptide sequence, MTYFVRALQNCLAPLLVFVLQNQLYGKMKSPSISGVMRRGQFLSI, Run with SignalP
  misc_feature (149)...(276): similar to gi1304602 in the genepept database release 114, Run with FASTXY 3.3t00, default parameters
cttcccaagtgcaccagatttgactgagcaactacaatgtgcaaatcactgtcctcaaagtgtgagatgcattatgacttattttgttagggcacttcaaaactgcttagcccctcttttggtttttgttctacaaaatcaattatatggaaagatgaagtcaccatccatctctggagtaatgagaagaggtcagtttcttagtattgaaggttatcaactagtcttaattacaaaagaaaagccaaagctccagggaaaagcaaaaatgtctaaggtcagcagctactgtggatttacatttcacagcttcgaaaagaagtgttcaagttcagaaggtcgaagagttacattttagctctgccagtcaggatgagatactaccagccctttcatcacacttcacaaatctggaaaatctttcaccaccagcagacccaggagacatcatcagataaaatatcagcacatcagacagttcataatctcaagatgttggataatgttccaaatgtacttttttcttccttctttcaaccggcaagaatgctcacagcagagagcctccaggcatacacttcagcatcaaaacacgaaacattttatccctcagtgtccacagatgtgctgtgactctgaagcctgaagttactaa

SEQ ID NO: 81780 - DNA, 418 bp, Homo sapiens
  sig_peptide (213)...(348): this location contains the signal peptide sequence, MYISLLAPTTFLLWPHGPTHCLLNALHIFLFQCLSIHNLLFLISA, Run with SignalP
  misc_feature (125)...(67): similar to gi4884994 in the genepept database release 114, Run with FASTXY 3.3t00, default parameters
gccgttacctgagagtagcagagagagttatcctagctgactttgctcttagggatttgcttctaaagcaatccttaggaaagaaagagcagtatccacaggagactggtgggcactggcttccccagaaaacctacctagatgaattctattctcaagggactcctatttagataaggggctttgttagttctcagagcaacacaaaacagatgtatatctcattacttgcccccacaacctttctgctctggccacatgggcctacccactgtctgctaaatgcacttcatattttcttgtttcagtgcctcagtattcataatcttcttttcctaatctctgcccctcacttacctgaatcttttgtattctcaatgacctgctccatcccagccctttcaagaacctttaatac

SEQ ID NO: 81781 - DNA, 614 bp, Homo sapiens
  misc_feature (1)...(614): n = a,t,c or g
  sig_peptide (10)...(145): this location contains the signal peptide sequence, MTWQVTELLPCFTILLLIFFESIKPFFRKSVSLKEEPETRILEQV, Run with SignalP
  misc_feature (274)...(381): similar to gi4235065 in the genepept database release 114, Run with FASTXY 3.3t00, default parameters
aacaacagcatgacttggcaagtcactgaacttctcccttgtttcactatattattacttatcttctttgagagcattaagcccttcttccgtaagtcagtttcgctaaaagaagagcctgagacaaggattcttgagcaagtgatttatggagtgattgctctcaactgaatccagtacaggagcaggtaataggattgaactgaggaagaaactaggcaaagaaatgggctcagctgaagtctagcctgatcgaacagggctttctggagtataactgacactagagagctgtctcaacttgatgaaagaggggtgactatttgtacccagtatctattaaaaactggctatcagctgtctctgaggaaaggctttactcctctgacatgtctgggtgagtaatttcctttagtcaagaacaattatcaggaacagaatataactatgagctgttaatagccaacatccaagcagtggaaggctggaggcactgatctggtaaaagtgatttgagtgaggcagcaatagtgtcttttatacttttccaangccccataatagggtcccaagagacaagttccttataaggccaccccattccacccagtgtg

SEQ ID NO: 81782 - DNA, 2393 bp, Homo sapiens
  sig_peptide (940)...(1075): this location contains the signal peptide sequence, MALRFLLGFLLAGVDLGVYLMRLELCDPTQRLRVALAGELVGVGG, Run with SignalP
  misc_feature (940)...(2040): similar to gi4589468 in the genepept database release 114, Run with FASTXY 3.3t00, default parameters
gaccaaggaggcgcccgcggctgcagagctgcagagcgggatctcttcgagctgtctgtgtccgggcagccggcgcgcaactgagccagaggacagcgcatcctttcggcgcgggccggcagggcccctgcggtcggcaagctggctccccgggtggccaccgggacccccgagcccaatggcgggggcggcggcaaaatcgacaacactgtagagatcacccccacctccaacggacaggtcgggaccctcggagatgcggtgcccacggagcagctgcagggtgagcgggagcgcgagcgggagggggagggagacgcgggcggcgacggactgggcagcagcctgtcgctggccgtgcccccaggccccctcagctttgaggcgctgctcgcccaggtgggggcgctgggcggcggccagcagctgcagctcggcctctgctgcctgccggtgctcttcgtggctctgggcatggcctcggaccccatcttcacgctggcgcccccgctgcattgccactacggggccttcccccctaatgcctctggctgggagcagcctcccaatgccagcggcgtcagcgtcgccagcgctgccctagcagccagcgccgccagccgtgtcgccaccaagtaccgaccccctcgtgcagcggcttcgccccgccggacttcaaccattgccctcaaggattgggactataatggccttcctgtgctcaccaccaacgccatcggccagtgggatctggtgtgtgacctgggctggcaggtgatcctggagcagatcctcttcatcttgggctttgcctccggctacctgttcctgggttaccccgcagacagatttggccgtcgcgggattgtgctgctgaccttggggctggtgggcccctgtggagtaggaggggctgctgcaggctcctccacaggcgtcatggccctccgattcctcttgggctttctgcttgccggtgttgacctgggtgtctacctgatgcgcctggagctgtgcgacccaacccagaggcttcgggtggccctggcaggggagttggtgggggtgggagggcacttcctgttcctgggcctggcccttgtctctaaggattggcgattcctacagcgaatgatcaccgctccctgcatcctcttcctgttttatggctggcctggtttgttcctggagtccgcacggtggctgatagtgaagcggcagattgaggaggctcagtctgtgctgaggatcctggctgagcgaaaccggccccatgggcagatgctgggggaggaggcccaggaggccctgcaggacctggagaatacctgccctctccctgcaacatcctccttttcctttgcttccctcctcaactaccgcaacatctggaaaaatctgcttatcctgggcttcaccaacttcattgcccatgccattcgccactgctaccagcctgtgggaggaggagggagcccatcggacttctacctgtgctctctgctggccagcggcaccgcagccctggcctgtgtcttcctgggggtcaccgtggaccgatttggccgccggggcatccttcttctctccatgacccttaccggcattgcttccctggtcctgctgggcctgtgggattatctgaacgaggctgccatcaccactttctctgtccttgggctcttctcctcccaagctgccgccatcctcagcaccctccttgctgctgaggtcatccccaccactgtccggggccgtggcctgggcctgatcatggctctaggggcgcttggaggactgagcggcccggcccagcgcctccacatgggccatggagccttcctgcagcacgtggtgctggcggcctgcgccctcctctgcattctcagcattatgctgctgccggagaccaagcgcaagctcctgcccgaggtgctccgggacggggagctgtgtcgccggccttccctgctgcggcagccaccccctacccgctgtgaccacgtcccgctgcttgccacccccaaccctgccctctgagcggcctctgagtaccctggcgggaggctggcccacacagaaaggtggcaagaagatcgggaagactgagtagggaaggcagggctgcccagaagtctcagaggcacctcacgccagccatcgcggagagctcagagggccgtccccaccctgcctcctccctgctgctttgcattcacttccttggccagagtcaggggacagggagagagctccacactgtaaccactgggtctgggctccatcctgcgcccaaagacatccacccagacctcattatttcttgctctatcattctgtttcaataaagacatttggaataaacgagcatatcatagcctggaaaaaaaaaa

SEQ ID NO: 81783 - DNA, 484 bp, Homo sapiens
  misc_feature (1)...(484): n = a,t,c or g
  sig_peptide (139)...(274): this location contains the signal peptide sequence, MLLFSLNFFFWKIVMFHKNVIFILTCNGFIIVTFKWIDKFILNIS, Run with SignalP
  misc_feature (127)...(314): similar to gi1171594 in the genepept database release 114, Run with FASTXY 3.3t00, default parameters
aggagtgcccaggggnnccaaactgaaatcccctacntntctacgcacanncnggnacgagggagnaggtacgagaatacagaatacggntgttttctattaagcacacacattacagagatttgcaaaaatgttacaatgctgctcttctcactaaactttttcttttggaaaatagtcatgtttcataaaaatgtaatatttatattaacatgtaatgggtttattattgttacttttaaatggattgataaatttattttaaatatttctattttaatttctaacacagtaaatgttaatagccataatccacataaacaaaagttctttggggatctcagtaatttttaacagtgtaaaggggtcctgagaccaaaaagtttgagaactgctgcaatcaactataaagagtaagtttgccctgaactgcattaactggtatactttttctctgtctttgatcaataagggcttaaatatg

SEQ ID NO: 81784 - DNA, 835 bp, Homo sapiens
  sig_peptide (242)...(377): this location contains the signal peptide sequence, MQAMVLKILLKFPLSLTLLLSVICRQKNLHSFKEGNYKYHNLFLE, Run with SignalP
  misc_feature (636)...(617): similar to gi172221 in the genepept database release 114, Run with FASTXY 3.3t00, default parameters
ggtgaaagggttaggatgttaaaatactgacgttatatcactcaggtttctcttacagttatattttttttcttcaagagaacttttagcaggtgatagtggaaaactaaggtgtgattggtaccaaaatgaccattgtcccagggtataataagggatgaataactggggagtgtatttactaggaaataagaaaatggggttgggttaaatggcaggaaggtacattccaaaatctataatgcaagctatggttctcaaaattttactgaaatttcctctctctctcactcttttgcttagcgtaatctgcaggcaaaagaatttgcattcttttaaagaaggcaattataaataccataacttgtttttagaaaaaatcttagacgtttatccagaggcaacctgtctgaatgaaaatgtagttctaggatttgccaacacaaaagacttcagtgtctacctttaatgcttattaacattaatggtgatcatttaaaggtgtgtgttttatgtttagacttataggtgttgttgatcttaagcagactaggcagagaaatccttcacattttctgtgctctcattcaggatggccctaggcatgttacatgggaaatgagaatatgtgaataaatactctcatactttcttgggcctcaatgaaaagaacatttgttaccatttttagtcataaattaaaattatttcagagtaggaaatataacattattttaaaaaatgggtgtcataaatgaaaacgttttaacatgtatttgctgggggagaaatttccttgcctttattggaaagcctctcctttattaaggttagc

SEQ ID NO: 81785 - DNA, 538 bp, Homo sapiens
  misc_feature (1)...(538): n = a,t,c or g
  sig_peptide (135)...(270): this location contains the signal peptide sequence, MKDVKLAIFTYFRMKNVKLFLYLVILLHFKTSNNLIVTMSKQQLM, Run with SignalP
  misc_feature (35)...(117): similar to gi403750 in the genepept database release 114, Run with FASTXY 3.3t00, default parameters
ngaaggactgaatcgatacatgacctnganacgccaagcttggcacgagggtgggacaaggggaatactaggcctagtcaattgtatctgccaaattaattgtttctgccaaatctacccaagaagtcaatgaaatgaaagatgtcaaacttgctatattcacttattttaggatgaaaaatgtcaagctatttctgtatttagttattttacttcattttaaaactagtaataatttaatagtaacaatgagtaaacaacagttgatgtgtttatcaagaagaaagtgctatactgaaatataatttacagcaaagggaattcacactgactgcttactatatgccaagtataatgctgagtatttcatgcatactacactaacccgtctctcaaataatacaatttcaataaaaaggaacaaatactaagtcctacatatgttattctttacagccccaagtatcttttgattcgaggacatctgaaagagctatagtcagatacgtacttactaaatgctcactgaatcagngcg

SEQ ID NO: 81786 - DNA, 345 bp, Homo sapiens
  sig_peptide (41)...(176): this location contains the signal peptide sequence, MCYLRSFEEVLPVCCFVFLMWSQKGTKRLGWSLEATENFCESLSV, Run with SignalP
  misc_feature (325)...(148): similar to gi1652227 in the genepept database release 114, Run with FASTXY 3.3t00, default parameters
tccttgcttaagtgcatttaaaaatgtgtccacgatacgcatgtgctatttgcgcagttttgaagaagtgcttcctgtatgttgttttgtctttttaatgtggtctcagaagggaacaaaaaggctgggctggtcccttgaagctacagaaaatttctgtgaatccctatcagtgactctgaaaatttttctaggtctacactgctgaattcgtttacaattcctagaagcactaactccaacttctgattcccttttaaaggtctgtttcattctctcctccttgcaaaggagatgagcaaagctgaataattctgcctcctgaatcacagctgttcatagcta

SEQ ID NO: 81787 - DNA, 822 bp, Homo sapiens
  misc_feature (1)...(822): n = a,t,c or g
  sig_peptide (111)...(246): this location contains the signal peptide sequence, MLLFGKFLQPTAKLLAFNAGVSKDWFSSLEGLFLMRAHSCPQSMQ, Run with SignalP
  misc_feature (273)...(216): similar to gi950642 in the genepept database release 114, Run with FASTXY 3.3t00, default parameters
tgggaggacagagtgagtgagcaggtgcaagactattgtctctctggtccgtgctgtaaaacagtagctgctagaggattgcagtgatattgtcgtttccttagtaacagatgttgctgtttgggaaattcctacagccaacggccaagctcctggcatttaatgctggtgtctccaaagattggttctcatctcttgagggcttgtttttaatgagggcacactcgtgcccccagagcatgcaggttgatgtcacacgcagccctgaatcacactgtggtaccgaatcacactgtggtaccacgtttccctgacgtaaagctaggagaggaacgatgtgaccatcccaaatgttccagtcaccctgacctttaaccctggattctaagaaggctccagatgttttttgtggntagagctcccagaaaatgactccttcctctatgagacattatctgatgacaagaagattctgagcaatgtgggggagtgagaatattttcataatatctgccattagaatgacttagaaatggaagacccagttcagaaattaggatcccatgcacactgtactcttgtggaggggngcagaagntatctcttccctttggaancctctttcttagaactcgcatatttatcaaccacctaactggctgctttgaggatggacacctttttttgggttgcaaagaaaaggaagttgcaaaaggtcacaaaaccactccatatcctttgaaattttagagggccagctttcatgtagataaacccgaaaccaatttaagtcttttatgttggactaaagccagaaatttt

SEQ ID NO: 81788 - DNA, 968 bp, Homo sapiens
  sig_peptide (144)...(279): this location contains the signal peptide sequence, MAISWLGTWLLQSHRHWSEPQLCRLPARHHLINLNFMVAEGIGDR, Run with SignalP
  misc_feature (809)...(702): similar to gi553203 in the genepept database release 114, Run with FASTXY 3.3t00, default parameters
gaggccgagagggtttcaatgaacgcatctgaccgttgagaacctcggtcgaccacgcgtccggccagcaccagggtcagccgtgactcagacatgagttcacctctgcgccgtctctcagcaggcaggcacctgccacctgcatggccatatcgtggttaggcacgtggcttttgcagtcccatagacattggtctgaaccccagctctgccgcttgccagccagacaccatttgataaacctcaacttcatggtggctgaggggattggagatcgtgcctggcacataataagtgctcagctgttcatgacttttagctttcatgcagttattctacaaacagatctgggagaggccgggaaatataaagacaagtgagacacagtttcagtgtcattcacgtgcccgctccgacttcactcatccacactgctggctctgtgcttgtgttggacacagtaattctcatgataggtcatgtgtgttgagctctcactatgtgctaggcagcatcctttacaaatcacaaatcacaactgtgtgagacaggtcctgctactgccccatttcataaataaggcaagaggggcttggtaacttacccaaagccccgcagctgggaggtgggaatgccgggatccaaacccaggtcagaggctgcccttcaaatgctctgccaaaggccagagcccacacctgtaattccagcactttggaaggctgaggcgggaggaccacttgagctcaggagtttgagaccagcctgggcaatgtgacgaaaccccgtccctacaaaaagtacaaaaaattagctgggcgtgttggtgcatgcctgtagtcccagctatttaaggaggctgaggtgggaggatcgctggtacccaggatggggaggttgcagtgagccataattgcaccattgcactccagcctgggtgacagagtaagaccctgtctcaaaaaaaa

SEQ ID NO: 81789 - DNA, 476 bp, Homo sapiens
  misc_feature (1)...(476): n = a,t,c or g
  sig_peptide (168)...(303): this location contains the signal peptide sequence, MFLVPRSLTVFILAIVYSPFFCCVHFLIELWDLSCKKPIKPFSYF, Run with SignalP
  misc_feature (454)...(329): similar to gi4378767 in the genepept database release 114, Run with FASTXY 3.3t00, default parameters
ggaaggaacccgggggtttcggctgaatgcagactgncagcatccgaaancncgnncgacccacgcgtncggataattttctgttttttagaaatcttttgtctctttggttatagaaaaagagaacctctttttaattttattttttaaatgactagtcaggttgaatgtttcttgttcctaggtcattaacagtttttattttggcaattgtctacagcccatttttctgctgtgttcattttctaatcgaattatgggatttatcttgtaaaaagcctattaagcctttttcatactttacacaagagatcacatctacttactttaccttaaaataacatttacttattttcttataaaagtaatatattatgtttgaaaagaaaaataatatgcaataatatgcaataatatgtataatcataatagacaataataaaaatgaaaaaacaccaaccagaggtaattaacan

SEQ ID NO: 81790 - DNA, 2750 bp, Homo sapiens
  sig_peptide (1530)...(1395): this location contains the signal peptide sequence, MVWVVLLSLLCYLVLFLCRHSSHRGVFLSVTILIYLLMGEMHMVD, Run with SignalP
  misc_feature (1632)...(358): similar to gi950412 in the genepept database release 114, Run with FASTXY 3.3t00, default parameters
acggccccccccttttttttttttttgaatatttcctacttttatttgacaataacaaattgtatataaaaaggaagaaggaaggcggggaggccctggatctccccttctctgtttccccaagcatccccctctaggccccagcaggcaccacccccttcctgccttgtggtggggtggggattgacaggcatgaaaatggtgtgattttgtgtgtgtgtgtgtgtgtgtgtgttgaggtgttgggggtcaaggatggagggggtcaaggagtagagagagggccttccctcatcccccatcagtggcaccctgagaggggtcttaagagggttatgagggtccacagatgtgcctcagcctatgagacggtagaagatccagcatccaaaagtgacccagtgactggcccagctgagctctgaccacttgtggacagtgtatgccatgccgtagccctgctcctctgtggtgtcatccacatcgacatcaaacagggagcccaggtaggccaggtggaagatggccagagctccaaagagcaagtttaaggctcgcacccccaggcccaagcgatgctggtgcgaacagtctggcgggcaccgctttgacaagacacaggcactgaggatccgagccaggcgcttccggaggacatgctccacgtaagtgataaaagccagggacagcaggaccgcagccaggtggaaactgaagccatgtaggagggcgctggctgcataggtgaccagcacagccgagaaggtccccaggcggagagcattcttgaaaacatagttatttagccaataagacatgggcaggttccagcttgtgacaacttccaccattgaccgaggcagctccacattcagtggcttggacaccgtcaggtcccattccaggtgatccttctcctcggtaaagccagcccccgccaacgtggccgtggcctcggaaagaaagcccacaaaatagttgctgaagtggaaggagacagcactctcgtaggctcgcagccaccttaccatggtgcccctggctttgcgtttcttgttgcgaaggaggcggtcaccgttgagggggatgaagtacgggaagaggtaggggcccacgcaagtggacagcacaaggcacagcagggccagtgccaggctccgggccaccttctgcagccaccggcagctcagtgggcggccttggacagcttgtaggtagctgtggaaggatatccagggcccgaagacgatggtgcccacgaagtagaggtagcccatgaactccactggcgagggcaccgtacccacctcgccccggtccaggtcgaagcccagagacactgccttcatggccacaatcatctgtgcccctcgcatcttgtgccatgtcacggtgtctaccatgtgcatctcacccatgagtaggtagatgaggatggtgacggataggaagacgcctcgatgggaggaatgtcggcagaggaacagcacgaggtagcacaggaggctgagcagcacgacccaaaccatgtgcagctggaagaagtggtagaggctgcccggaggaggcagcggcggcggcagcgcgtcctcggtccccaggaccacggcttctttcctgccaggtaggtcgccagtagtgcgcacgcggctccccagctcccatccctgggccggcctccccaatttttccagcagctactgcaaggctgtctcctgcctactgcccagcagggccttgaccagatctggctgctccttgccatctgcctcgcctgccgcctcctctggaggctcgggttgccatcctacctgaagcatgcaagcaccgtggcaggcgggttcttcagcctctaccacttcttccagctgcacatggtttgggtcgtgctgctcagcctcctgtgctacctcgtgctgttcctctgccgacattcctcccatcgaggcgtcttcctatccgtcaccatcctcatctacctactcatgggtgagatgcacatggtagacaccgtgacatggcacaagatgcgaggggcacagatgattgtggccatgaaggcagtgtctctgggcttcgacctggaccggggcgaggtgggtacggtgccctcgccagtggagttcatgggctacctctacttcgtgggcaccatcgtcttcgggccctggatatccttccacagctacctacaagctgtccaaggccgcccactgagctgccggtggctgcagaaggtggcccggagcctggcactggccctgctgtgccttgtgctgtccacttgcgtgggcccctacctcttcccgtacttcatccccctcaacggtgaccgcctccttcgcaagtggctgcgagcctacgagagtgctgtctccttccacttcagcaactattttgtgggctttctttccgaggccacggccacgttggcgggggctggctttaccgaggagaaggatcacctggaatgggacctgacggtgtccaagccactgaatgtggagctgcctcggtcaatggtggaagttgtcacaagctggaacctgcccatgtcttattggctaaataactatggttttaagaatgctctccgcctggggacccttctcgggtgtgctggtcacctatgcagccagcgcccttctaaattgcttaagtttccccctgggtgggggccctgctgccctgggtttttataattaccatgagccatggtcctccgggagccccctgtcgtggaacactcg

SEQ ID NO: 81791 - DNA, 628 bp, Homo sapiens
  sig_peptide (106)...(241): this location contains the signal peptide sequence, MWKVFTFTKVVIIESWSLLMCPFLKGVCRLSSLYNHIHIYCYLFH, Run with SignalP
  misc_feature (45)...(145): similar to gi512491 in the genepept database release 114, Run with FASTXY 3.3t00, default parameters
tgtgtttagaaggaaatacccctgagatctgacccctgagatatgatgactcagagccttcctttcaggatttccttgtaataatgggaaagggaaggcatatggatgtggaaagttttcacttttaccaaagtggtgattattgagtcatggagtcttctaatgtgtccatttttgaaaggagtttgtagattatctagtctgtataaccacatacacatttactgttatcttttccattacgtacattgcttagaaagtacgctcggcttaccaaactcttaacatccgcttgtttcaaaaagaaatcgttgattaaagcaggaaatttaccttgaaaaacaactgcgggccttttaaattaaattgatttctaaatgtgtatgtgattagttaaaactcaaatttgttcagtctttttattttcctgtttaagattgagggataacggtagaaaatacgtccttttgtcttctgtgttaccaacttaattctataaaatttgtgccttaaatggtacataaatattataaatctagtgggtttgcggcccagaaataaaaagaagtagaatgacttttaaaaagggcagtaaataggccactccattataaattaaaatttaact

SEQ ID NO: 81792 - DNA, 700 bp, Homo sapiens
  sig_peptide (347)...(482): this location contains the signal peptide sequence, MPQFPVAFGIMFTYFTLAHKVLHSQASACLFSIICFFPTCTLHFS, Run with SignalP
  misc_feature (437)...(561): similar to gi1060985 in the genepept database release 114, Run with FASTXY 3.3t00, default parameters
cccacgcgtccgcggacgcgtgggtttgaacatgaaggcagacctgaagcgagtgagggagtgagctatgcagctaaccagggaagagttccaggtagtggggatagcaagtgcaaaggcactgaggaaagggcacatgggagggggcagcaagaaggccactgtagccagagcagtgagtgagggaaaaggagaaataatttcagagatagcgagtgatcagcatgtatagggtattaagcataagaaggactttggattttatcctgtgtgagatgggaaaccattggagtgccagagtaattttttcttaaagctagtctgcttgtcatttcttttcttaaaaatgcctcagttccctgttgcctttggaataatgttcacgtactttactttggcacacaaggtccttcacagtcaggcctctgcctgtttatttagcatcatctgcttctttcccacatgtacccttcactttagccaagtgggatcacatgcagctccctggatgggtcatgatgctttgtgtcttcgcgtctttctgtaccgtttgccctgtgagaagccctccccctcagctcacatggtcactggctctgttttagagggtcctctttgtgctcttgctctctcatcatttccacccggagccactttgcacttaagctgcttaagcttgaaacgtgctgtgttcttttac

SEQ ID NO: 81793 - DNA, 1165 bp, Homo sapiens; identical to SEQ ID NO: 71912
  sig_peptide (276)...(141): this location contains the signal peptide sequence, MSCSFSRRRLMIFLAASFSFLWSRCIDKVWGARATDRRCRKSSPW, Run with SignalP
  misc_feature (285)...(388): similar to gi3064165 in the genepept database release 114, Run with FASTXY 3.3t00, default parameters

SEQ ID NO: 81794 - DNA, 727 bp, Homo sapiens
  sig_peptide (269)...(404): this location contains the signal peptide sequence, MQLKFSQLTTSSLSFSSALWLLAFSRVFLLADSNLFVKPSSDLGS, Run with SignalP
  misc_feature (348)...(122): similar to gi887907 in the genepept database release 114, Run with FASTXY 3.3t00, default parameters
gtttaaaatcatcaatgacatcaaacaacagcaaaacttcttacaaaaacaagaagagccagtggtgtctgagcatccgcattacgtccttcccttctgcctgtgggtactgaatcagttacctgtatgagaccgtttgtgaagctccaagttgcttgggtgtttaaaaggtttcccgcataattcacacgcgtattgtctctgggactgaagtgtctgggactggtcttccagggcagccgggtcttcaggcctctccgtctcactaatgcaattaaaattctcacaactgacgacttcttcactttctttttcttcagcactttggctgctagctttctctagggtatttttactagcagattccaacctctttgtcaaaccatcatctgacttgggttcagatacttgctctgcggatttctgtgacttcaggaaattgagcttcttcagatgaatggcctttttgagcctcatctgcttgacaggttgttggcatgtggcgtctgactcagggtgtggggcagagtcattcacaggtgtaaaagtttctgagtttgtaatagtaatttggctgtttgaaaggcagttctgtgcagctgccatctgaagtatcaggagcttgttttgagatttcacctgcggagtgatgacgattaactgatggtgaagcatgcggatgcgattcatccaacgttttgttctgctgtgcatctgctgaacattc

SEQ ID NO: 81795 - DNA, 510 bp, Homo sapiens
  sig_peptide (88)...(223): this location contains the signal peptide sequence, MQKLVYLWLWLLTAKACGAESGRERTGEAGPKGNFQTPLPVGPQG, Run with SignalP
  misc_feature (348)...(213): similar to gi871449 in the genepept database release 114, Run with FASTXY 3.3t00, default parameters
atcttctaaaggttacattaataggggatgtgttgggctccccaagaccaccctgaggttgggtgattcactggaagaactcagaaaatgcagaagctggtatacctgtggctatggttgctgacagcaaaagcatgcggagcagagtcaggaagggaaaggacaggtgaggcagggcctaaaggaaacttccagactcctctcccagtggggccacaaggctacgcgtaactactccagcaccagactgtgaccacacgtgaaatgctgccaaccagggaaggtcattacagactccgtgtccagagtttttactgagggctggacccataggtaccatctgcctggcttgaaccaaaagtccaaactcccaaaacaaaagcaaagtgttcagcagaaagcacattgcttgcgcaaacggtttaggcagaatcccgtatcaattattggaccgatgggaacctttctgaaatccaaattcccagacaccagccaaggtcgacgcggccg

SEQ ID NO: 81796 - DNA, 510 bp, Homo sapiens
  misc_feature (1)...(510): n = a,t,c or g
  sig_peptide (135)...(270): this location contains the signal peptide sequence, MLKWQSNWSWIRGRMGLTVWLMVSVQGAVVSMEFQSAGVSLFWKH, Run with SignalP
  misc_feature (223)...(124): similar to gi4903080 in the genepept database release 114, Run with FASTXY 3.3t00, default parameters
agagtccnnnnnnnnattttaaactgagtgcctgncggaannatcgacggcctttccggnnngacccacgcgtccgggaaacactgccacgtaagctgtatatcttgattgcgtgatgaaactaagttgcaggaatgttaaaatggcaatcaaattggtcttggattcgaggtagaatgggcttaacagtgtggctgatggtaagcgtgcagggagctgtggtcagcatggagttccagtcagcaggtgtttccctattctggaagcatagtgagaagtcagaggagctgtctttgtgatcttcgggaagtcactttagctccctgagtcatagaggaggtgctgatgggacacttctcacgcagcgctagtaagaaggaaagagatggtgaggggctacaaggggcaaggntgtctgcctgcttctcanggcacttcagcctccggcacttgaccactgtggtgagccaggacgccctgcccacatctggtcccctttgccacaatggg

SEQ ID NO: 81797 - DNA, 419 bp, Homo sapiens
  sig_peptide (38)...(173): this location contains the signal peptide sequence, MSLWFCRLSLPRLLALESPGSLDKETLPPTRYTCCTEKQPDCLFK, Run with SignalP
  misc_feature (236)...(156): similar to gi733131 in the genepept database release 114, Run with FASTXY 3.3t00, default parameters
ctccctgggatggagacccagtggggcggggcagctgatgtctctgtggttctgtcgactcagccttcccagactgctggctctggagagtccaggcagtctggacaaggaaacgctacccccaacacggtacacctgctgtacagaaaagcagccagactgcctctttaagcgtgtccctgatcctgtccttcctgatggggtgagaacttcaaacaggggtctccaaacaccttctacaggagcatccaggctgacaacagggcagtgaaggtcacagaaatagactcttgaattcattatacctgagtaaaggcctgggaaggtgatggagtcaccgccgttgacccagaagagcacccaaagtaccaatgtgaagagatcatggacctcaagctaaaaatcacaaaagataagtg

SEQ ID NO: 81798 - DNA, 1983 bp, Homo sapiens
  sig_peptide (1929)...(1794): this location contains the signal peptide sequence, MEFGLSWVFLVAILKGVQCEVQLVESGGGLVQPGGSLRLSCAASG, Run with SignalP
  misc_feature (1932)...(201): similar to gi33451 in the genepept database release 114, Run with FASTXY 3.3t00, default parameters
ttttttttttttcttttgaatggatctttttatttctaattttataagatgcaacatctcaccccgttgacacggttagtttgcatgcacacacagagcggccagccgccccgagcctgtgggcaggccagcagggtcagtagcaggtgccagctgtgtcggacatgaccagggacacgttgtacagggtgggtttaccggtggacttgtccacggtcctctcggtgaccctgttgggcagggcctcatgggccaccacgcaggtgtaggtctcccccgtgttccattcctcttcggacacggtcaggatgctgtgggcgaagtaccggcctggggcctggggctcaggcattggggcgctggtcacatacttctccggggacaagggctgccccctctgcatccactgcacgaagacgtccgcgggagagaagcccgtcaccaggcacgtgatggtggccgactcccgcaggttcagctgctcccgggctggtggcagcaagtagacatcgggcctgtgcagggccacccccttgggccgggagatggtctgcttcagtggcgagggcaggtctgtgtgggtcacggtgcacgtgaacctctccccggaattccagtcatcctcgcagatgctggcctcacccacggcgctgaaagtggcattggggtggctctcggagatgttggtgtgggttttcacagcttcgccattctggcgggtccaggagatggtcacgctgtcataggtggtcaggtctgtgaccaggcaggtcaacttggtggacttggtgaggaagatgctggcaaaggatggggggatggcgaagacccggatggctgtgtcttgatcggggacacacatggaggacgcattctgctggaaggtcaggcccctgtgatccacgcggcaggtgaacatgctctggctgagccagtcgctctctttgatggtcagtgtgctggtcaccttgtaggtcgtgggcccagactctttggcctcagcctgcacctggtccgtggtgacgccagaccccacctgcttcccctcgcgcagccaggacacctgaatctgccggggactgaaacccgtggcctggcagatgagcttggacttgcgggggttgccgaagaagccgtcgcggggtgggacgaagacgctcactttgggaggcagctcagcaatcactggaagaggcacgttcttttctttgttgccgttggggtgctggactttgcacaccacgtgttcgtctgtgccctgcatgacgtccttggaaggcagcagcacctgtgaggtggctgcgtacttgccccctctcaggactgatgggaagccccgggtgctgctgatgtcagagttgttcttgtatttccaggagaaagtgatggagtcgggaaggaagtcctgtgcgaggcagccaacggccacgctgctcgtatccgacggggaattctcacaggagacgagggggaaaagggttggggcggatgcactccctgaggagacggtgaccagggttccctggccccagtagtcaaaacacttatagcagctggtactactacaattgtcagcccttgcacagtaatacacagccgtgtcctcggctctcagactgttcatttgcagatacagcgtgttcttggcgttgtctctggagatggtgaatcggcccttcacggagtccgcgtagcttgtgctactcccatcagtattaatacgtgagacccacaccagccccttccctggagcttggcggacccagtgcatccagtagctactgaaggtgaatccagaggctgcacaggagagtctcagggaccccccaggctgaactaagcctcccccggactccaccaattgcacctcacactggacaccttttaaaatagcaacaaggaaaacccagctcagcccaaactccatggtgagttctctgtgtgcagtcctgatcagcaagcagaaagagctgggaatcccag

SEQ ID NO: 81799 - DNA, 610 bp, Homo sapiens
  sig_peptide (206)...(341): this location contains the signal peptide sequence, MAKPCFFLIAFTTFTIILFFMCWFLFPTEECNSHEDKNYSFLFSV, Run with SignalP
  misc_feature (202)...(281): similar to gi4049913 in the genepept database release 114, Run with FASTXY 3.3t00, default parameters
ggtggggtactatattgtagtggacggccattcattagctttgacaatgaaagattgatctctgttttcatggccagtgtctatagttttcttatgcgttagtagaagtctgtagactccatgtccttttgatgtaactcttcatgaattatttatttttaggtctgttagaattccacaattcagctttcaaagactgtaatctatggcaaagccttgtttcttcttaatagcatttaccacatttacaattatcttattttttatgtgctggtttttatttcccacagaagaatgcaactcccatgaagataaaaactattcttttttgttcagtgtgtccccattgcctagcgtagagccaggctcatagtagctgttcagacatgttgggtaaatgaatgatggctgaatctagtagtaacgaaagctagtagcctatgttacactctttgacatggttacgcaattgatagtttaacaataacacttaaaacttacatcatttgattgtatacaggaatatatcagatacttaagggggtagagaaaccaatcgtttagaggcccaaccatttcattcaaaaaataggactgacctgaattttgc

SEQ ID NO: 81800 - DNA, 417 bp, Homo sapiens
  sig_peptide (13)...(148): this location contains the signal peptide sequence, MEFGPSWVFLVAILKGALCEVQLVESGGGLVQPGRSLRLSCTASG, Run with SignalP
  misc_feature (13)...(370): similar to gi4512282 in the genepept database release 114, Run with FASTXY 3.3t00, default parameters
tttcgtccaaccatggagtttgggcctagctgggttttccttgttgctattttaaaaggtgccctctgtgaggtgcagctggtcgagtctgggggaggcttggtacagccagggcggtccctgagactctcctgtacagcttctggattcacctttgatgattatggtgtgacctgggtccaccaggctccagaaaaagggctggagtgggtaggtctcattagaagtaaagcttatggtgcgacaacacaatacgccgcgtctgtgaaaggcagattcaccttctcaagagatgattccaaaagcgtcgcctatctgcaaatgaacagcctgaaaaccgaggacacagccgtgtattactgtactagagtgccgtcctatgacctgaagtacgtcttctttgactactggggccag

SEQ ID NO: 81801 - DNA, 402 bp, Homo sapiens
  sig_peptide (45)...(180): this location contains the signal peptide sequence, MQLRTDLGLGSWLSRCFWLLLHWSPFPAASQHQEELIWGPGVQGC, Run with SignalP
  misc_feature (260)...(80): similar to gi1334957 in the genepept database release 114, Run with FASTXY 3.3t00, default parameters
tttcgtggaactgccactttccctgcccagtggccatacgggttatgcagctgaggactgacttgggcctggggtcatggctttctaggtgcttctggcttctgcttcattggagcccctttccagctgcaagccaacaccaggaggaactgatctggggacctggagttcaaggctgtaaactcccacaaaggccaaagctggcggagctggagaaccccattctgggaagctggtggtgagggcctctgcctttgatcaccaggaaaacagaggtcagctggattccagcctatttcctccctgccccaccaacccagcaacgaccaccccaaatgactgccctgagacttatgagtcatgagacaaaagggaggcctgcctaggggagacaggggagat

SEQ ID NO: 81802 - DNA, 426 bp, Homo sapiens
  sig_peptide (160)...(295): this location contains the signal peptide sequence, MMKSAFILKIMLPYWEVALVKFKSHRFADCAILLLTQLETGLRNV, Run with SignalP
  misc_feature (217)...(373): similar to gi392079 in the genepept database release 114, Run with FASTXY 3.3t00, default parameters
tttcgtttgacggcgggattgggtcagttactgaagagttaccttcaaaacactaaacttacattggcacatcgctctttcatatctcttacaaacctcgaggatttgattgtttttcctgatgttacttatgaggtgctttcagtattagaagaagtgatgatgaaatctgcttttatattaaaaatcatgttaccatattgggaagttgcactggtcaagttcaagtcacacaggtttgctgactgcgccatattgttgctgacacaactggagactggacttaggaatgtttttgccacacttaacagatgtccaaaaagactcctgactgctgagtcaacagctctttataccacctttgatcaaatattggcaaaacacttgaatgatggtaaaatcaatcagcttcctcttttccttggg

SEQ ID NO: 81803 - DNA, 432 bp, Homo sapiens
  misc_feature (1)...(432): n = a,t,c or g
  sig_peptide (105)...(240): this location contains the signal peptide sequence, MVLHWVTAWVVVLCTDWGERGGSTSVERRDHGSTFEHTEFEVSIG, Run with SignalP
  misc_feature (157)...(106): similar to gi2108258 in the genepept database release 114, Run with FASTXY 3.3t00, default parameters
taccgcgctcggaatttccgggtcgacgtctgcgagaagcgacagaagggagaagctactatagagatggaagttatgggtcagagtggataacgaaggacaagatggtgctgcactgggtgactgcatgggtggtggtgctgtgtacagattggggcgaacgtggaggaagcacaagtgtagaaagaagggatcatgggtccacttttgaacatacagagtttgaggtttcaataggacatctttgtagggatgcgtagaagacagttggaaatacaaatgtggattcagagacaagtccagccttcagtggaactcagacaagtccaggaagatgaggaggaagggggctagagaaatagtagaggaagggggctagagaaatagtaaagaaaggaaaggacagagatctgcgaagctgggggaggagtn

SEQ ID NO: 81804 - DNA, 407 bp, Homo sapiens
  sig_peptide (43)...(178): this location contains the signal peptide sequence, MESGLSWIFLLAILKGVQCEVQLVESGGGLVQPGRSLRLSCAASG, Run with SignalP
  misc_feature (43)...(396): similar to gi4512307 in the genepept database release 114, Run with FASTXY 3.3t00, default parameters
tttcgtcattcagtgatcagcactgaacacagaggactcaccatggagtcgggactgagctggattttccttttggctattttaaaaggtgtccagtgtgaagtgcagctggtggaatctgggggaggcttggtacaacctggcaggtccctgagactctcctgtgcagcctctggattcaggtttgatgaatatggcatgcactgggtccggcaagctccagggaagggcctggagtgggtcggaggcattagttggaatagagacagtatcgcctatgcggactctgtgaagggccgattcaccatttccagggacaacgcccagagttacgtctatctgcaaatgaacagtctgagacatgaggacacggccttgtattattgtacaaaactcaggtcctctat

SEQ ID NO: 81805 - DNA, 3197 bp, Homo sapiens
  sig_peptide (96)...(231): this location contains the signal peptide sequence, MCPGALWVALPLLSLLAGSLQGKPLQSWGRGSAGGNAHSPLGVPG, Run with SignalP
  misc_feature (96)...(1385): similar to gi5932438 in the genepept database release 114, Run with FASTXY 3.3t00, default parameters
agatgccggaccgctccttcccagctcctccccgtgctcgctaacacagcacggccgcctgcagtctcctctctgggagatcgcgcgggcctaagatgtgtcctggggcactgtgggtggccctgcccctgctgtccctgctggctggctccctacaggggaagccactgcagagctggggacgagggtctgctgggggaaacgcccacagcccactgggggtgcctggaggtgggctgcctgagcacaccttcaacctgaagatgtttctggagaacgtgaaggtggatttcctgcgcagccttaacctgagtggggtcccttcgcaggacaaaaccagggtggagccgccgcagtacatgattgacctgtacaacaggtacacgtccgataagtcgactacgccagcgtccaacattgtgcggagcttcagcatggaagatgccatctccataactgccacagaggacttccccttccagaagcacatcttgctcttcaacatctccattcctaggcatgagcagatcaccagagctgagctccgactctatgtctcctgtcaaaatcacgtggacccctctcatgacctgaaaggaagcgtggtcatttatgatgttctggatggaacagatgcctgggatagtgctacagagaccaagaccttcctggtgtcccaggacattcaggatgagggctgggagaccttggaagtgtccagcgccgtgaagcgctgggtccggtccgactccaccaagagcaaaaataagctggaagtgactgtggagagccacaggaagggctgcgacacgctggacatcagtgtccccccaggttccagaaacctgcccttctttgttgtcttctccaatgaccacagcagtgggaccaaggagaccaggctggagctgagggagatgatcagccatgaacaagagagcgtgctcaagaagctgtccaaggacggctccacagaggcaggtgagagcagtcacgaggaggacacggatggccacgtggctgcggggtcgactttagccaggcggaaaaggagcgccggggctggcagccactgtcaaaagacctccctgcgggtaaacttcgaggacatcggctgggacagctggatcattgcacccaaggagtatgaagcctacgagtgtaagggcggctgcttcttccccttggctgacgatgtgacgccgacgaaacacgctatcgtgcagaccctggtgcatctcaagttccccacaaaggtgggcaaggcctgctgtgtgcccaccaaactgagccccatctccgtcctctacaaggatgacatgggggtgcccaccctcaagtaccattacgagggcatgagcgtggcagagtgtgggtgcaggtagtatctgcctgcggggctggggaggcaggccaaaggggctccacatgagaggtcctgcatgcccctgggcacaacaaggactgattcaatctgcatgccagcctggaggaggaaagggagcctgctctccctccccacaccccacccaaagcatacaccgctgagctcaactgccagggaaggctaaggaaatggggatttgagcacaacaggaaagcctgggagggttgttgggatgcaaggaggtgatgaaaaggagacagggggaaaaataatccatagtcagcagaaaacaacagcagtgagccagaggagcacaggcgggcaggtcactgcagagactgatggaagttagagaggtggaggaggccagctcgctccaaaacccttggggagtagagggaaggagcaggccgcgtgtcacacccatcattgtatgttatttcccacaacccagttggaggggcatggcttccaatttagagacataaaacacaggcagatcaagtagcattgatcaatggcatgattccaactcagatttgtgggacaccaaagcccaggatcttcccaagtgccctgctgcagtttagcaggtcctctccagctaaagagcagtgagacattgggagcccaggagtgttgaggccaggccaggctgaggcccatcagtcacaggtgtgactgggctgcttgtcacacacagggcgtggtctggccactgttgccagtgctcactcagcggccaaatgctttttaatatgacccctgaggcactgaaaaataaccccaggccaactgcaggatagagagagaggtcaggacagcagccctgtgggctgcatgatacactgtggctggagttattgtgaccccctggtgcagtgctcccacggccagtggtgcacacagggccattcactgtccatagactgaaaccatgtgaccatttgagagggccgggcacactttcccctgagggatggggcagcctgtggccagcacctctgcagttactctgcatagccagctcaccagcatgccatgcccagggtgccccccagtgacaacctcatgggagacgggcctggatttgaatttgttggaattaaatgtgctctggctttggtctttgaaacatatctatttttattccttggtgacatgtccttaagtgacaagactccagccttcctgggcgaggcctctccagcctcggaagagctgcagtccttatcggcgatcactggctctgcctgcatttgccggctctcttgagtcacgtgcatcccagcaccccgcctgggctcggactgtgggaccagactcagcctccccgaacacaagggaagataaggcttccatttgctctgtgtttcaccctctcctctgtctctccaggccacacatggaacggggcggtatgaggaagagtctgaaagtggtgaagagtgcacctatggccctctgacctccagccagagcagggcctaggggaggcttagagaggccagggcctctccccgtggttgaagctcccatttatttaagaaaaagtggggggtggggaaaacgttatgttaaatgtttacatggaaccaatgaacaactttaacacacaaatacaacgaaacattcttgtttaattactggcgttatagaaaatatgaattcctgctacatgccgggcagtgtagtgttacaatgctattccaagttgggtgttgagcatcttctttcagtcctggtggtgtgcttctgtgcctgcttgaaaatttcactaggaaataaagtcaaatgtctaaaaaaaaaa

SEQ ID NO: 81806 - DNA, 2297 bp, Homo sapiens
  sig_peptide (1560)...(1425): this location contains the signal peptide sequence, MERGNALVVLRSLLWPGLTFYHAPRTKNYGYVYVGTGEKNMDLPF, Run with SignalP
  misc_feature (214)...(399): similar to gi4981125 in the genepept database release 114, Run with FASTXY 3.3t00, default parameters
cccacgcgtgcggggggcctcaaggctctggtgtccggctgtgggcggcttctccgtgggctactagcgggcccggcagcgaccagctggtctcggcttccagctcgcgggttcagggaagtggtggagacccaagaagggaagacaactataattgaaggccgtatcacagcgactcccaaggagagtccaaatcctcctaacccctctggccagtgccccatctgccgttggaacctgaagcacaagtataactatgacgatgttctgctgcttagccagttcatccggcctcatggaggcatgctgccccgaaagatcacaggcctatgccaggaagaacaccgcaagatcgaggagtgtgtgaagatggcccaccgagcaggtctattaccaaatcacaggcctcggcttcctgaaggagttgttccgaagagcaaaccccaactcaaccggtacctgacgcgctgggctcctggctccgtcaagcccatctacaaaaaaggcccccgctggaacagggtgcgcatgcccgtggggtcaccccttctgagggacaatgtctgctactcaagaacaccttggaagctgtatcactgacagagagcagtgcttccagagttcctcctgcacctgtgctggggagtaggaggcccactcacaagcccttggccacaactatactcctgtcccaccccaccacgatggcctggtccctccaacatgcatggacaggggacagtgggactaacttcagtacccttggcctgcacagtagcaatgctgggagctagaggcaggcagggcagttgggtcccttgccagctgctatggggcttaggccatgctcagtgctggggacaggagttttgcccaacgcagtgtcataaactgggttcatgggcttacccattgggtgtgcgctcactgcttgggaagtgcagggggtcctgggcacattgccagctgggtgctgagcattgagtcactgatctcttgtgatggggccaatgagtcaattgaattcatgggccaaacaggtcccatcctcttcatgacagctgtgagctccttactgtgggagagctgcagggagccaaggtgggctgcctgacacacttgccgctctcgtgtgaatccaagaaactgcgttcctcaaaggggccctggttgtcaccttctcccacagccatttccacccatcgttgtctagaatctctttcattagcacattccaacccctctgccacttggtttagaaatgagctccctggctcagtgggcctttcagaatctggaaccagacggaggtggagttaagaagataggacagaacaggcaggccaagttcactgaagcttaagaaaatcatgtttagactctgtttaaaaacatccaggctggctcccattctatagcatgaagggcaagtccatgttcttctcgccagtgcccacgtagacgtagccatagttcttggtgcggggagcatggtagaaggtgaggcccggccagagcaggctgcgcagcaccaccagggcattgcccctctccatctggatgctccaggaccctttgggaatgtcatgctccaaggagtccatgaaatccagggaggggtccaggtcagccttctcaagcaaggtcttattctttagctcaacaggctccctgaaatggaagtaggagctgagcttcttggcctcagacaaggacagtccttcaaaggtccgattgacatgggtgggtccaaaaggggtcttgaagagggcgcctcgggggatgatggccacagccttgtcaatctggtcaatgacagacaccaagcgggtctcttccttgatctggaccactatttcttcttcaaagactttttcaccttcattcaccttctgcagctcagtgtgttcatattcgtatgatgggtcccccatgaagcggcccttcaccacagacgactgcgccaccatctcctctgtggcagggggcaagaggctccactctgtgcagttcaggctatagagcgtcttgcgcggtgcgagctggtcctcactcaggccctgcgcgatgtagtaatcggcgacgaggccaaggatgcggccccagaagagaacccgatcatagcggtagtcgcgcttaaccagcataagagacgtgagcagcgaggcccgacggtccgggctgaggccctgcccactgccggacgccagctccagagacagcaggaggctgtcggcgtccatcaggtcagcggctccgctcaacgcccgtcgagttgctaggagaagccgacgaaa

SEQ ID NO: 81807 - DNA, 2600 bp, Homo sapiens
  sig_peptide (673)...(808): this location contains the signal peptide sequence, MITVQFSYTAVKWLLNCFVLILYVILSILFQVSQKNSSKLGRFKN, Run with SignalP
  misc_feature (2496)...(1834): similar to gi1150416 in the genepept database release 114, Run with FASTXY 3.3t00, default parameters
tttttttttcattgtattactacttaaattttattaacatcttcagtttgtgcgtcatttaaaatgagacatgtgctttaaaaagcattcttatacataaatagaccaaggaacagttaggtaattgatccctaaaacatgcacatcaattttattcaggtgtgtataaggaaagggaaataaggctttaaacctttttctttgggattaaaaacatttgggaaattattcaggaatgccmaaatgtttttctggaacagatgtattttccaataggaaatactgatgcaattaagaggcattagtgttgataaagaagactggaaaaacgtttgtgctatgctagataaacaagaaaagagttcaagtgggcctaagatctatgtcaaataaatgaatcaggtagcatgaattgaaaggtttggatagaagaacaggtaccatgagccagattatgggacacatatatgttcaaggcacatgactaggctaaacaggtggctagattctacagactaatttgttcattcattgagaaagtgtaaaatgtaatataatttcaatttaatggcacttattgataaataaatgcaattggatctagggtagaaaatgtcttcctttcagatacacaccagaaatgcatactagataacagatgccagtagcgatatgattacagtccaattttcttacactgcagttaaatggttgttaaactgttttgtattaattctatatgtcatactgtctattctctttcaagtttcacaaaagaattcatcaaaactaggcagatttaagaatttatttaaccacaaagaatgctcaaaactattattcaacaggaatcaagcccaaaccctggagttgactgctgaccgtattcggtttgggcttttcccagaatggaaacacttttcccacactacctccctttgcacagctaaaatgctagcatatccactgtggttcccttctttttctttggcaagtcagaggaatttacctccccaccccctctactacatattctattagcgacacgattgccctaaatattcacagaagaaaaaggaacacatttaaaaaactgcaactttcaacaatatttaaaccttcatcttctcaaatcaactgcaatgggaaaacagaagatatcaagctatcccctgtattgtgaatgatcagcacactgaactttattcctgaaagtcaatattaggaggacaaggataattctgtgtgcttctaatgggctagcaaaatgttccccatctaactgaaataagaatgtttcatactttacttgtctgagctcttagaaggaagcagcaccaacatcattacaattccccaaataacaactattatccatttatattgttttgaagcacctaaaacttctcaataacaaaagacattaagatgagatgttagcaatactgtctcttgaatacttttgtgtgcacatacaaagtttctccatagttttagtagatagctcataagactagcggcgacagctttgagcaattaaaaacaaaaatgtttctctaaatagatgacactagttaacaaaccaaagaaataaacaaaagcctttttaaggctactgctgcaatgaatggttcaatctgaagttcacaggaataaactggtagataagacaaagataaacctggaggcatggaacaagattttaaaaagtgagaagagggttgaagagactggcagataccatctgtcagtatgtgaaaggcttgagtcacatggattgcttttaactccttgttctctcatatccttggttaatggtaacttcttctttcctatttcttcacacagcttggccatgtaaatccaccacagagaggtgaaacaatgatatagatgaacacaattgatacgatgatgatgataatagtgagcttgaggttcttcatacacatggctcgagcaagatttctgctggtagttttgaaggtgacagaagaatccacaagattttctgttttgtcaatcaataattccaatctttctcctcgctgagctaccagatctatgtttctgaccatgattcctttcagttcatccacttgggcttgagtctccatcactttgtctaggcccttattctcagagtgatgcttcagctgtgcagctaagacacttgagaactcgctattcatggcatatggaagtgctgtctgtgctcttgaaccgtaagtagtctggaacctcttctttatctcattcagaaaattaaaggctcgggaacgttcaaaatcatcatcagtgatacaaagatatacaatcctgtcttggcagatgtaatgaaacaaataattgccatgtgagtacgttagtttgttattttcagaaggtatcttagccagaatctgctctgtcacctccaggaagtttcctccacaccaagcatgtttggcaaggatagtggtccccctggcaacaacagcaaaaagaatcgccatggcttcagtctgtccgggcaccctctgagggcgcgcgggctcgggacggagggacgcgggtcagtgcagggtcgccaactgcccgctcccagaggaggctgggac

SEQ ID NO: 81808 - DNA, 444 bp, Homo sapiens
  sig_peptide (187)...(322): this location contains the signal peptide sequence, MFGMIKRRVRRAVFVGRTVLCGSCNSGIIMHRGKTPPLKMVCRFE, Run with SignalP
  misc_feature (139)...(304): similar to gi5880805 in the genepept database release 114, Run with FASTXY 3.3t00, default parameters
gacttcggcacgagaatagctgagtttacaaagatgcattaaatagaaatagaacgcaaaggaaatcccagccattaccatgaacaaaatggtaagttacttctactagaactttactgactttaagctagagagaaagagaaagagagaggtaaaacaaaaatcaaaaaggaaaaggctcagatcatgttcggcatgatcaagaggagggtcagaagagctgtttttgtgggccgcaccgtgctctgtggatcttgtaactctgggattattatgcaccgtggcaagactccacccctgaagatggtctgccgatttgaagaatcattttcttgcttatttttaaactcttaaagacagggaaaaagactgaaggagcctaaatgctgtggtttcctcaaaccattattgttgtaaatcctatgggtcctgaagtaactcact

SEQ ID NO: 81809 - DNA, 459 bp, Homo sapiens
  misc_feature (1)...(459): n = a,t,c or g
  sig_peptide (22)...(157): this location contains the signal peptide sequence, MGFLFLLDSALMQTWVTVIDVSLHHVEIKAPRIRLMWSLPLRRQK, Run with SignalP
  misc_feature (28)...(136): similar to gi414511 in the genepept database release 114, Run with FASTXY 3.3t00, default parameters
ataacagggcaagtcacagccatgggattccttttccttctggattctgccctcatgcagacttgggttacagtaatagatgtaagtctgcatcatgtagagatcaaagccccaagaataaggctcatgtggtccctacccttgaggagacaaaaatatacgatgtagatggacagctgcattatgcacacagatccatttcaatataacatggtgggctactctgggaacactcctgctccacaaggagcagtataaaaaaataaattaatcaaattttaaaaaagcaacatggtagatcctgggcgcttagagagtactgctcaagtgctatgagaacacttgggcagagatatctacccagacatgggagtgacgtggttgagaaatctgatcctacactgctaacacctctgtctggagaagttctcgtgccgaagtcttcagagcggttctatn

SEQ ID NO: 81810 - DNA, 488 bp, Homo sapiens
  misc_feature (1)...(488): n = a,t,c or g
  sig_peptide (173)...(308): this location contains the signal peptide sequence, MVYCTFAGFVVLLRSLHFVVQAISSRICEMRTSILKISCSFWLHI, Run with SignalP
  misc_feature (218)...(144): similar to gi576457 in the genepept database release 114, Run with FASTXY 3.3t00, default parameters
tgggggtcgccnaattgancgctgcagaanaattgtccgcctgcggcagaaattgcttatccagagtgtaaggaggctgcagcatcagctggaaagtgagtctgtgacaggcttttcacctcattgagaggcagagccacatgctgtgagatgctgaggcccctgctgtgaaatggtgtactgcacatttgctgggtttgttgtattgctacgctctttgcattttgtggttcaggcaataagcagcagaatatgcgaaatgaggacaagtatattaaagatatcttgtagcttttggttgcacatatttaaactgctagaaacagtagctccgggttcatactttctgtcctttatatgtgtttaatcagttagaaagcctatctctgctttgtaaagcaataactaggaggctgatctttatgttcagaaaaaaagggacatgtcagaaacactgttatcaggaatcttatgcatatggaatggtg

SEQ ID NO: 81811 - DNA, 1266 bp, Homo sapiens
  sig_peptide (37)...(172): this location contains the signal peptide sequence, MLATLACMAIPWTHLGCSCLLACLPFSHHLGLSEDIISSEKPSVT, Run with SignalP
  misc_feature (88)...(232): similar to gi1181518 in the genepept database release 114, Run with FASTXY 3.3t00, default parameters
caccagatgtattgtgtcctaccatgaattcactccatgctagccacattggcctgtatggctattccttggacacacctaggatgttcttgcctcttagcttgcctacctttctctcatcatttgggcctcagcgaggatatcatctcctcagagaagccttctgtgaccatgctatctaaaatactccagcacttcagtcaccctttatcccattactctgctttttcagaaacattggtgctccctgaaacgtatttgtttacttgcttagcgtcttttctcccgcactaccatgtaagcttcttgagggttagggaccttgttagggataaccactgtatccttagagtgtgacacatagtaggttctcaatacatatttttgaaactctaccctgatgcaaaagagatatcaaataattatagtttttgcattataaatgtctttggtgaaatccctggcacaaaactaataataaagaaataaacagataatggtgagttctgggcctgcaaacctaactctttaaagcagtcacagtaaatgtgtcattggatccatagaacttgggaagtcagcatattttattgggaaaagcatgaacttcaaagtaaaacttatggtcaaatctcattactggtgcgttcttaagtcatttaacctttgagccacaaggtacacaaatgtgaaattagaggaataatagtgactccataagaccctcaagaaaaggaaataaggtattgtagcccgatgatccttatcacatggctaacaaattagggggtctaaaattctggtatgggcatacccggaaacacgtcacgcatgtaggggcctactaagaaaagaggttccttgagtcgggaccagggacgttatgcgaaatggcgggaactggaggccgcggggatgggccacgtcgagcattcgccggcatcggggattgggggaacccgggcggttcgtgcgcggggggcgggaacggggggcgcgtgagcgaagagggagcatcggcggctacggcgcgcaaccgggcgagcagcaccggcagtggcgcaatatacgcggagcagctcccatgtaacggcgcagtttgtgcgcatccggcggaagtagggcgaagaccacgtcggtgcgcgggaaactcgcgcgcactcgccggcgacaacggcacgggcaccgccggactagggggccaccgcgcggtgcacctgctggctcgtcggcgagaacgcgggcggataattcgcggaccgagcc

SEQ ID NO: 81812 - DNA, 1233 bp, Homo sapiens
  sig_peptide (298)...(433): this location contains the signal peptide sequence, MVSPTFSLSFVLHLQILSAFPASPDTAGYGWGDKMGHKVPSGSKL, Run with SignalP
  misc_feature (361)...(427): similar to gi1572804 in the genepept database release 114, Run with FASTXY 3.3t00, default parameters
gaattcggcacgagatggaatctgtgaagtcttgtctttctccaaaagagagggaacaagtcacggcgacaccccgaatagccaaggcagaacagcataattatcctggtatcaaattacagattggtccaatccctaggtaagcaaactctaaagcagactttgtgttcacagacttaattctagtccaagtctcgatttttccttcacagatctagagtaactgagacctgacctgcagtgaggaaggtgctgccagagtcaggaggggtattagaatgcattcacccccgtcctatggtctcgcctaccttttcactctcatttgtcctgcacttgcagatcctatctgcctttcctgcaagtcctgacacagctgggtatggttggggtgataagatggggcacaaagtcccaagcgggagcaaactctgtagctgtgggagaaaagggacagtgaatacccctctaagaacggagagcagtggagtatgtactagtcagagactgctcataaagtcagaaacgttttattttttaacagatataagattaagggagaagccatagtagtttaaggagctatggtcgggcggcagggccattttctacaagggggtgcagcacccgccttctctgactctggtctggagagagatccccacaagggcccgaggacaacagatcttgggattcaggacgtggaaggcgcgcgccgaaaatcttccattctagactctgggacacacgcggatttcccgggtacgcggggttatcggaggccgagtcagttacgcgctaatccgttgaacggaaccgtcgctatcggcgaatgggggcggggcggcgcaccgactcccggtcatggcggtgcagtgtacttggcattcggggcccttgccggggcgaacgatcgcgcgcccccacgtacatggtccatggcggcgggttgacacgcgtaggccggcggtccgacttccggccataggcgcccgcgatcgtgcgaccaccggttgcactatcggggtgagcattgcgcaactccggcggtgttcagagaggcggatcgcccggactccccgctgtcgtcgcagcggttgcgcgacggcgggtaccgtgggaatctcgcgcgcgccggccgcgctcggggagccagcggttatacatcggcacgtctcgcgcggagggggagacgcgggcgggattgcgcgggaagtctcgtcgcgcgcgccg

SEQ ID NO: 81813 - DNA, 928 bp, Homo sapiens
  sig_peptide (16)...(151): this location contains the signal peptide sequence, MSLRPCRIWTLPLSSFPLTSKVSYYHPSAYFSLAPMVFLRAATYQ, Run with SignalP
  misc_feature (422)...(486): similar to gi2826806 in the genepept database release 114, Run with FASTXY 3.3t00, default parameters
aattctgaagttcttatgtccttaaggccatgcagaatctggacacttccactctcctcattcccccttacctctaaggttagctactatcatccctctgcttacttctctctggctccaatggttttcctaagggcagctacatatcagacactgccctgaacgcttaggctccatcaataaacaaaacagacgaaaagctctgccctggtggaagttgtgtaatagtgtatgtttgagggcagggggaagagataataaacacaatcaatgaggaaattatatactgtttacttctcctggcaagaaggtgacaagtgccatggaggaaacagagctgttttttacactggctgttaccctgtagatacatgcatggcttgttgtctccgtccagtctttgctttttaaatgtcagtttcttaaaaagatgtgcctattttatttaaaactgcactcccctacgtctgattcttgtaccttgctccgttttctttatggcatttgtcaccttctgtcatactatataatttcctggatgggattattggcttttccacataatcctcgaacccagttttacctacctgatgtgaaggtaggctttttgtctgttttattgatgactctttaagagttcagagcagtgtctagcacatagcaggtcctcaataagaatttgttgaacaccataattaaatcctggctgggtgggaggacccacattctgaacgccagcacttttggaggcccaacgggtggggattgcttcgaccccagcaggtggggaaccacgcctggaccacggggcgaaaatcgccttcttttccaagaaaattttcccctctccctcgcctgggtaaccctctggcctgagagacccggcttcttcgccccatcttccactggaccacaaatgactctctcg

SEQ ID NO: 81814 - DNA, 647 bp, Homo sapiens
  sig_peptide (85)...(220): this location contains the signal peptide sequence, MHTPHLPNIIVYFILLYICSQYLYLLTIRHNHLTQSLFYNKLLSV, Run with SignalP
  misc_feature (94)...(162): similar to gi255307 in the genepept database release 114, Run with FASTXY 3.3t00, default parameters
ccacgcacacgtttctgttcgatatacagatgcttcttgactcacgatagagttacatctcagtaaacctgtaatgaattaaagatgcatacacctcatctaccaaatatcatagtgtattttatcctactctacatatgctcacaatacttatatttacttacaattaggcataatcatctaacacaaagcctattttataataaattattgagtgtcttgtaatttattgaatgctgtacgttgtgacaaaattgcaatggtttggcaccatcataaatttggaaaatcatttagtggaaccttcataagttgggaactgtttgtatacctataagtggaattattcggtcatagagtatgcgtatcttcaacttgagtagatttgcaaatggttttccaaagtggctataccaggttatatcaatttacattctaaccagcagtgtttaagagttctggtgctccacatctcaaacatatatatatatgtgtatagagggagagagagagggagagcgagagccacagagagcgcatgttttcatatgttcctgctaactctttcttgcagaatgactgatcattttttctaattgatatggaagatttctttgtatatctcaaatacaaaaacctttatgagt

SEQ ID NO: 81815 - DNA, 2516 bp, Homo sapiens
  sig_peptide (295)...(430): this location contains the signal peptide sequence, MREWWVQVGLLAVPLLAAYLHIPPPQLSPALHSWKSSGKFFTYKG, Run with SignalP
  misc_feature (268)...(1275): similar to gi2292890 in the genepept database release 114, Run with FASTXY 3.3t00, default parameters
atccttaattaaattaatcttcccccccccccccccggccgcggcaaccagcacaccccggcacctcctctgcggcagctgcgcctcgcaagcgcagtgccgcagcgcacgccggagtggctgtagctgcctcggcgcggctgccgccctgcgcgggctgtgggctgcgggctgcgcccccgctgctggccagctctgcacggctgcgggctctgcggcgcccggtgctctgcaacgctgcggcgggcggcatgggataacgcggccatggtgcgccgagatcgcctccgcaggatgagggagtggtgggtccaggtggggctgctggccgtgcccctgcttgctgcgtacctgcacatcccaccccctcagctctcccctgcccttcactcatggaagtcttcaggcaagtttttcacttacaagggactgcgtatcttctaccaagactctgtgggtgtggttggaagtccagagatagttgtgcttttacacggttttccaacatccagctacgactggtacaagatttgggaaggtctgaccttgaggtttcatcgggtgattgcccttgatttcttaggctttggcttcagtgacaaaccgagaccacatcactattccatatttgagcaggccagcatcgtggaagcgcttttgcggcatctggggctccagaaccgcaggatcaaccttctttctcatgactatggagatattgttgctcaggagcttctctacaggtacaagcagaatcgatctggtcggcttaccataaagagtctctgtctgtcaaatggaggtatctttcctgagactcaccgtccactccttctccaaaagctactcaaagatggaggtgtgctgtcacccatcctcacacgactgatgaacttctttgtattctctcgaggtctcaccccagtctttgggccgtatactcggccctctgagagtgagctgtgggacatgtgggcagggatccgcaacaatgacgggaacttagtcattgacagtctcttacagtacatcaatcagaggaagaagttcagaaggcgctgggtgggagctcttgcctctgtaactatccccattcattttatctatgggccattggatcctgtaaatccctatccagagtttttggagctgtacaggaaaacgctgccgcggtccacagtgtcgattctggatgaccacattagccactatccacagctagaggatcccatgggcttcttgaatgcatatatgggcttcatcaactccttctgagctggaaagagtagcttccctgtattacctcccctactcccttatctgttgtgtattccacttaggaagaaatgcccaaaagaggtcctggccatcaaacataattctctcacaaagtccactttactcaaattggtgaacagtgtataggaagaagccagcaggagctctgactaaggttgacataatagtccacctcccattactttgatatctgatcaaatgtatagacttggctttgttttttgtgctattaggaaattctgatgagcattactattcactgatgcagaaagacgttcttttgcataaaagactttttttaacactttggacttctctgaaatatttagaagtgctaatttctggcccacccccaacaggaattctatagtaaggaggaggagaaggggggctccttccctctcctcgaatgacgttatgggcacatgccttttaaaagttctttaagcaacacagagctgagtcctctttgtcatacctttggatttagtgtttcatcagctgtttttagttataaacattttgttaaaatagatattggtttaaatgatacagtattttaggtatgatttaagactatgatttacctatacattatatatattttataaagatactaaaccagcatacccttactctgccagagtagtgaagctaattaaacacgtttggtttctgaataaattgaactaaatccaaactatttcctaaaatcacaggacattaaggaccaatagcatctgtgccagagatgtactgttattagctgggaagaccaattctaacagcaaataacagtctgagactcctcatacctcagtggttagaagcatgtctctcttgagctacagtagaggggaagggattgttgtgtagtcaagtcaccatgctgaatgtacactgattcctttatgatgactgcttaactccccactgcctgtcccagagaggctttccaatgtagctcagtaattcctgttactttacagacaggaaagttccagaaactttaagaacaaactctgaaagacctatgagcaaatggtgctgaatactttttttttaaagccacatttcattgtcttagtcaaagcaggattattaagtgattatttaaaattcgtttttttaaattagcaacttcaagtataacaactttgaaactggaataagtgtttattttctattaataaaaatgaattgtgccaaaaaaaaaa

SEQ ID NO: 81816 - DNA, 464 bp, Homo sapiens
  sig_peptide (243)...(378): this location contains the signal peptide sequence, MHGLFGQCFQEALGFLLLPRFPQSSQMLKFLKVDVTGSLTTNKLA, Run with SignalP
  misc_feature (49)...(228): similar to gi2827286 in the genepept database release 114, Run with FASTXY 3.3t00, default parameters
aaaacagctttagctgttctttatcttgtgcacatgatacaaaatatgttcccgtacaatatggggctgtcacttcttgccaacccagcaccctcttcctcttctaacctgctttctgaggcttctgctcttcacctcctgctcgctgatggaaacctccagggcaaagctgaaggtttcttggggaagccaggaaagccagtatttcctatgtgtcagatctgcttggcttccaagaagggatgcatgggctttttggccagtgtttccaggaggctctgggcttcctgcttcttccccgcttcccccagagttcacagatgttgaagtttctgaaggttgacgtcactggaagtctgaccacaaacaagttggctgttactgtatttgaaacccagtacctttggcagctcacctctaaccagtaaaataagaggattccatggtttcaaaaaaaaaaaaaa

SEQ ID NO: 81817 - DNA, 984 bp, Homo sapiens
  sig_peptide (777)...(912): this location contains the signal peptide sequence, MFSRFYLSHILVPFLPGLYHGEGIPGFYTKKQNFWFWPPLFPGEG, Run with SignalP
  misc_feature (334)...(238): similar to gi1592792 in the genepept database release 114, Run with FASTXY 3.3t00, default parameters
gcggtggaattcggacctagggcaatgtttctcaaactttgctgcatgttgggatcacttaggaaatctttaaaaaatactgatgcccgtctcctaccttctgatttaattagggtttgaattggactttgggattttgtttttttaagtccctagatggtttttaatgggcaacaagcttgtgaaccatgaacttaggggactagagaagtcaagactggagagactgtccataataacagaaagatgatattttggtggcaccggtgctgtttgtcccactcttggtacaactgtagggtatgtgcggattcttggcctccggcctcccctatcctcagcgggcccagcctcttctgctctccagtcttgcaaggccctcggtgctttcctcttcctcctcggtgcaggctgtggcttgccgtggctgcagccttaggttcaccattttctgcagtgagctggggctctctttgtgcctggtgtgttctgggtaatacagttgtggttaaaggaagctcatttttttcggctccaccctctgtgtctccccacatccttcgttaccctgctcatgtgatctcgtctggtctattctgtttctcctccatctcactaggggctctagaggcagtaaaccatccctaccctctaataacacggcaatttaatcttgaatatcagaagtacaaatatggggagtaggagcctcgtggctttaaaataatatcgcgttagggttggttttgactgatgacattttattctttagctcaatgttctctagattttatctttcacacatcctggttccttttttacctggcttatatcacggtgagggaattcctggtttttataccaaaaaacaaaacttttggttttggccaccccttttcccgggagaagggacccccggggaaaaaaagaccaaaggggaaggtggcctttcccaaatagagggccgggctccacaaaaaaaaa

SEQ ID NO: 81818 - DNA, 460 bp, Homo sapiens
  misc_feature (1)...(460): n = a,t,c or g
  sig_peptide (144)...(279): this location contains the signal peptide sequence, MLIVMTLKYTIPIRLSLSSAILLTHDENLPTGRKALSHGKHLVCH, Run with SignalP
  misc_feature (297)...(209): similar to gi5360872 in the genepept database release 114, Run with FASTXY 3.3t00, default parameters
nttttaattgaagacctctagtaccgtgcggtggaattccagaaatttaataggaaatttttgtgggaatttcctgtttaaaaaaaagtcaaattcatcagataacttatcacattagaaaatgtagattatagtttttttccatgttaatagtgatgaccctaaaatatacaatccctattcgactgagtttatcatcagccattcttttaacacatgatgagaatttaccaactggaagaaaggctctctcacatggaaaacatctagtctgtcatcaatggccaacctaattacatataattttataatgaattttacttgctatttgagacagaggtaaaaaaaatgagacatttgcagatgattgaaatgctcttataatttgaaaactatggtctgttctgttgggtttggagtacaattaatagtgtgttaaaggaaggccaggtgcagtggc

SEQ ID NO: 81819 - DNA, 470 bp, Homo sapiens
  misc_feature (1)...(470): n = a,t,c or g
  sig_peptide (186)...(321): this location contains the signal peptide sequence, MCFSDINLCVTWILLGLVLWSSCLDSHSSCLSSRVFTWLSTSVVD, Run with SignalP
  misc_feature (241)...(360): similar to gi2832809 in the genepept database release 114, Run with FASTXY 3.3t00, default parameters
ntgaataggatgataccggaagataccactgtcatgtggatcctggtgggtctggtcctgtggtccggctgtcttgattctcactccaactgcttgtccagcagggcctttacccagctcggcacttctgtggttgcactgtctttccaaggcttggttggcatcacatgcagattgcccaggtcatgtgcttctctgatattaacctatgtgtcacatggatactgctgggtctggtcctgtggtccagctgtcttgattctcactccagctgcttgtccagcagggtctttacctggctcagcacttctgtggttgacctgtctttctggggctcggctttattccaaatcttcgagaactctctgaaaataactagcatttacgacagccattacctccaagcttctccacggaagcctcgaattccnccgcnctggactaagggtcctcaatcnnagggtctcaag

SEQ ID NO: 81820 - DNA, 712 bp, Homo sapiens
  sig_peptide (201)...(336): this location contains the signal peptide sequence, MGKWDGVACVKLLWKLLYLKFWFTAFIGLSVGANKGKPPKLVLLS, Run with SignalP
  misc_feature (272)...(193): similar to gi5070450 in the genepept database release 114, Run with FASTXY 3.3t00, default parameters
gcccatatcgttaattcctgacactctgagactggaccccaaagggggacggcccagggatcctccagacctcaacttctccaaaggggacaccctaggcagagttctgaggtctagtattaagccctccttagaattttctctcgcagttgcaatactgtttggcccaatattgtttggaatctggagcttgctgttgaatgggaaagtgggatggagttgcatgtgtcaaactgctgtggaaactgctatatctgaaattttggttcacagccttcattggattatctgttggggcaaacaaaggaaaaccccccaagcttgtattgctatctcatgccttaagattcccagttaaaagcgattgaatcttcgtttgtgtgcgtctatacatgtctagatgtgtttatttgtatgcacacttattggtacatgttgtggctaccagattggcttataactaaaagagcacttaaaaattaagtaagtaagtctaagcaattttcaaggtcacgtgacttaagtatacttttactaaacaagctggctttaaagttattagtaaaatataactaggcatgccttcagaattgtcacaatacattctttgtctggattttatatttggctctgctaaatattttgaaaagtcaatggtcggccttagaagggcatactaacttctagcttcaggccccatacccgagaggcg

SEQ ID NO: 81821 - DNA, 1063 bp, Homo sapiens
  sig_peptide (607)...(472): this location contains the signal peptide sequence, MILLKVCSAASLLGEGFMNQVTSTNKASLSLLSLTMKVAVNKGKK, Run with SignalP
  misc_feature (259)...(171): similar to gi5306149 in the genepept database release 114, Run with FASTXY 3.3t00, default parameters
ttttttttttttaacgtcttttatttaaattttattttaacttagtgcataaacattacagccagtttaacttgtccgtggaaaggcagtagaattttaccccgggaccgtcttgcatactgctttttttgagttttaacatccgcaaaatcttggcatattaatttagttgggttgtagaattctgagtttaggaacaaaaaaaatttaggtggagatggttgacctatgctccctactctgtagcttttgtttttttaaaaactaagttttaaatcccgttttctgtcctgtcttctttaaaagcaaaacaaaacatttaagtttcttaactttttcctgggacaaggaacggtgcaaactcaaagctacagtattcttggaaagaagaagcaaccccctcccttggctcctttaggagctgataggtcatttattattggaactgaaatggtataaacaattctctctctttttttcccttgttaacagcaactttcattgttagagagaggagagagagagaagccttgttggttgacgtcacttggttcatgaagccttcgcctagaagtgaagctgctgaacaaaccttgagaagaatcatctcctgcttcaatctgctgctggataggaactaatcagagagagagaggcggaagacggagaaggagggagtcgaaggctttcccgatcacaaatctcacctccactacaactctctttatacttttcttgcagaaataataatagaaataaggaggtggtggggtttccaaaaatcttaaccttcaaccatctggggaaaaggcaaaaatcccatctaccgcaactctcagttcgagagtaaaggtttcccaacagtgatgtcacaagattgaccacattgatcacagtaagaccaaaatgatagttaagcttttaaggaagtttggttttctctgagaatgagaattgacttagaaaacatatataatttgaaattattatttcttttgctagccagatgaatgttaacattttaaatgaatcatatcttatacttctagctagttatttaaat

SEQ ID NO: 81822 - DNA, 432 bp, Homo sapiens
  sig_peptide (133)...(268): this location contains the signal peptide sequence, MLLTPVVLIASLSPPFSSGDGGPAPASPPHSGGPFNRLTPGHASP, Run with SignalP
  misc_feature (145)...(412): similar to gi296127 in the genepept database release 114, Run with FASTXY 3.3t00, default parameters
gtcaaggtgagtgtaaagaaggggacttggtaattctcacaaataaatccccatacactccagggaaacctccttttgtgcctcaacgtggggtggaaaggagaattcatccccgcgtgcgttgtatgaaggatgcttctgacgcctgtggttctgatcgcctcgctatctcctcccttctcctccggagatggggggcccgctcctgcctcacctcctcactctggtggtccctttaaccgcttgactcctggtcatgcttcacctctcctctttatcccgtatcctcttctctggtctgagccagcgtcattccctctaccacaggtcactcctacctcctacctctcacctccgccttctgccccccatcctgttaacctgcgactctttgcgagccccttcctaccctctggtttactccccctgctg

SEQ ID NO: 81823 - DNA, 447 bp, Homo sapiens
  sig_peptide (187)...(322): this location contains the signal peptide sequence, MPVTPDPSAVSLFVTPWPLLLCLPWPHRVPGQSHPGLHSRAPVHR, Run with SignalP
  misc_feature (97)...(337): similar to gi342297 in the genepept database release 114, Run with FASTXY 3.3t00, default parameters
ctagagagcgtggggaattccaggattgcccacttgggaccctgactatgaagggtcaagatagcccattctgccccagcactcagagccctattaccaaggcccctactccaagaatccaccatcaaaaccggggccctgccagtgccttcccagtgttcaggcctagggaagaatagccccattatgcctgttactcctgatccttctgcagtctctctctttgtgaccccatggcctttgctgctatgtctgccctggccccacagagtgccaggtcagagccaccctggcctacatagcagggccccggttcacaggctaaaacctgggcctcctgccaggctgcaactcccagctgcacaccgcaacctgagacatctcagcatattctaggaactagtaatggggacgcttccgactcgctggggaagggagatgagggcc

SEQ ID NO: 81824 - DNA, 1057 bp, Homo sapiens
  sig_peptide (108)...(243): this location contains the signal peptide sequence, MPQWLALQRQQALLTLLSGAGTWAGMRPPSQCWPQGPSTGNQSLS, Run with SignalP
  misc_feature (193)...(63): similar to gi338423 in the genepept database release 114, Run with FASTXY 3.3t00, default parameters
gagaacaacccattcctccctccctcaagcaccttggacaatctgggagggctccccaaaggaggtgagcaccttggacaatccgggagggcttcctgaaggagttgatgccacagtggttggctttgcaaagacagcaagctttgctcacattgctctccggggctggaacctgggcaggcatgaggccccctagtcagtgttggcctcaaggtcctagtacaggtaaccaatccctgtctcacggaaggggagaattgctgacccatgctgtgggagtctgcatctgaaaaggtcactggggcctgagagggcagctcccagaacagtgtgaagtgtccaggaggccagagacacctataggagaacctccagatattgcatctatttcgtctacatcctggttgtgtcgtgccccagggatgccagcctcacaccgtggctcttccggaaggtgtggggccaggcctgctgcacttactgctttgggctaatgattcagagagtgaagggtgctttctccccagaggaaggagcgaaggcctttgcaggagatgacacactgacgaaggtttcccatgccctctccaagaaaactgatggacaacggggctgcatcctgggcgggggcttacctgggaaccacgtgggaccaggtccggagaaccatcctctagccagctcgtcttggcaagtgtcgtccaacccagtgctagctgatagaaccttctgcaacgatgggaatgttctgtacctggataaccccctggcacagatgactactgggtactggaaatgtggccacaaggaaccaaatttttcattgtgtttcatcgtaatttaaattcacatggccctgggtggccagtagcgctcacattggacaaaacagctctatcgtcatcatctgtgctctaccggttttcttggtggctaatttgtaaactggttttggcttcatgcctgcgtaagaactgcaagcactagtagtttatgcctggttttacattttgtgcctgtcgaagtgacattataagaaaagacactatatggtctt

SEQ ID NO: 81825 - DNA, 466 bp, Homo sapiens
  misc_feature (1)...(466): n = a,t,c or g
  sig_peptide (193)...(328): this location contains the signal peptide sequence, MESFIVWFLVQSVLFFMLQLKSGPKWQHSSAGQNRLQILFLLIYA, Run with SignalP
  misc_feature (292)...(392): similar to gi1262616 in the genepept database release 114, Run with FASTXY 3.3t00, default parameters
gcgcgcggnagtccccttggaccctangccagccangcancgnanagngcggnggaattcaaagcaattttgaaaatatagtaaatttgagtttttcttctccgatctgctgtctgaatggcacgagagaaaaatcaatcccgtggatagcaatgatcatcagttctttagagcaacccttgctttagtgtaatggagtcattcatcgtctggtttttggtccaaagtgttctcttctttatgttacagctaaagtcaggacctaaatggcaacacagctcagcagggcaaaacagattgcaaatcttattcttattgatttatgcttttgttggaaaggattatcatttgttaccttatacgaaagcctgctctgtgaccacaggttcagttggtaaaatacagggctgagaataaaattcacatacacctgtggggatccaaacacattttcatttttctgcaa

SEQ ID NO: 81826 - DNA, 446 bp, Homo sapiens
  sig_peptide (9)...(144): this location contains the signal peptide sequence, MSWYTCQCLFFLSNTLRNGATSCHWYCSPDDMQMVDFSSTYERIF, Run with SignalP
  misc_feature (15)...(158): similar to gi2369800 in the genepept database release 114, Run with FASTXY 3.3t00, default parameters
aaaacatcatgtcatggtatacttgtcagtgtctcttctttctcagcaacacattaaggaatggtgctacttcttgccattggtattgtagccctgatgacatgcagatggttgatttcagctcaacatacgaaaggattttcaggccatttgtgttcaagataaaagggcctgacagctttaggatagacatgagccccatccctgaagacatttaatcacaatctagacaagctcttgttgtaaatgagctcaagtatcagatttggaagtgaatgatcttttacatttttgtcaagcttgaggttcgtgaacttggatccaacctcttattttttgcagataagaaaacaaggatcacaccagttgagagatttctccgaagtcagacatctcattagagctagagaggccagactagcatgtctcccatgatccagtctgaa

SEQ ID NO: 81827 - DNA, 488 bp, Homo sapiens
  misc_feature (1)...(488): n = a,t,c or g
  sig_peptide (294)...(429): this location contains the signal peptide sequence, MHCIFSCLLWCIQLPSMLSVLKTQPSKNHPLWPCKYAYNIFFFLC, Run with SignalP
  misc_feature (261)...(386): similar to gi5924129 in the genepept database release 114, Run with FASTXY 3.3t00, default parameters
cgcgttgagacctattgaggcgtcggaaacgacccnngaaatacttcagggatgaaacaaattgatgaaaagtcaaggatagtagactttccatgctgttctcaaagaagcaaagtcaattttctagcaaaggtggaggaaacataagtaacaatagcataagaatatattcttctaacattcaataatccttaataactctgggatttagctgagtaaatgactatccagtctcacagctctttattgaagagaggccaccaagttttgaaatctgtccattcttattcctcatgcattgtatttttagctgtcttctatggtgtatacagctgccttccatgctcagtgtccttaaaactcaacctagtaagaaccatccattgtggccctgtaaatatgcttacaatatatttttctttctttgtattatctgaaattctgacttaaaactaaccatagaatttagaaatttaatattactggcg

SEQ ID NO: 81828 - DNA, 762 bp, Homo sapiens
  sig_peptide (184)...(319): this location contains the signal peptide sequence, MPHSLVSLALLMCGGAFSRAPVPVSQVYPDYAGNGFLLLPVGVGG, Run with SignalP
  misc_feature (400)...(247): similar to gi1354319 in the genepept database release 114, Run with FASTXY 3.3t00, default parameters
gcccatgacgagtattcccggaaccagggctggggacaggcagtaagaagtgcagcccaggggtctgcttcctctgtttccccacagaagctcacctttctgttgcttaatagagctgccgggatggggcaggactcccgttccccctccttcactctaccacccaagcggtccccaaggtgaatgccacattctttagtgagcttagccctgctgatgtgcggtggtgccttttctagggcccctgtgcctgtcagccaagtctaccctgactatgcagggaatggctttcttctcttgcccgttggcgttggcggcaggcaggggcctagatgttggcttcttcactttccctccctggctccacagatctcccccagttgcaggctctctggttccttgaacttccaaagataaataaatagtgattgcaaatggaggaagggagaaggggaatggactcccccagcaggagccctcacaggcggtggcccaggctgcattcctcaggaaagagctgacagcagagccacagcccataggcagggctgtgcagccctcctgctcacaggcaaggaagactctgagatctctggcctgggtcatacagcttttctgtgatttcctttggctaaatgaagacactcaaagtctaaagaagaattctactggaacacccactcctgggaggctgaacagaggccaaaggccatttaatgaggcgaggcttccccaccactaggaatgaaatgtctgatggag

SEQ ID NO: 81829 - DNA, 485 bp, Homo sapiens
  misc_feature (1)...(485): n = a,t,c or g
  sig_peptide (92)...(227): this location contains the signal peptide sequence, MYASRISKCLLVFSCCNLLVPAHSCITEALCKHMAWMHLEIVIHG, Run with SignalP
  misc_feature (182)...(54): similar to gi3878124 in the genepept database release 114, Run with FASTXY 3.3t00, default parameters
aaaaagtgataaccttcccangtttgataatccctctatctattgtaaggaggtgggaggagaagtactaaggttataagaatttctcttcatgtatgcaagcagaatttctaaatgtttgctggtgttttcctgctgtaacttgttggtgcctgcacatagctgtattactgaggcactgtgcaagcacatggcatggatgcacctggaaatagtcattcatgggccactggctctagagaaagctttcctctcaggtggcctagcacactattaaccccctctcctatattatttctacagaaccttgagagataaaagattttaaggaatgtgaagaagactttgaactttcttcattttatggtgccagatacagctctgctgtcatcggctaaagtatagaaatgttgatgtgacctacagcttcagtgtggtatggtcaaatggaaatagcattgaatatgggattaaagcaacctcgn

SEQ ID NO: 81830 - DNA, 1716 bp, Homo sapiens; identical to SEQ ID NO: 58735
  sig_peptide (212)...(347): this location contains the signal peptide sequence, MSDLLSVFLHLLLLFKLVAPVTFRHHRYDDLVRTLYKVQNECPGI, Run with SignalP
  misc_feature (212)...(1589): similar to gi30297 in the genepept database release 114, Run with FASTXY 3.3t00, default parameters

SEQ ID NO: 81831 - DNA, 1610 bp, Homo sapiens; identical to SEQ ID NO: 59609
  sig_peptide (52)...(187): this location contains the signal peptide sequence, MARVLGAPVALGLWSLCWSLAIATPLPPTSAHGNVAEGETKPDPD, Run with SignalP
  misc_feature (52)...(1440): similar to gi184497 in the genepept database release 114, Run with FASTXY 3.3t00, default parameters

SEQ ID NO: 81832 - DNA, 1509 bp, Homo sapiens; identical to SEQ ID NO: 80745
  sig_peptide (637)...(772): this location contains the signal peptide sequence, MQPIVAKALVVLLEVHPLQDQAESGRLGHVHLLCAPAALQHALRG, Run with SignalP
  misc_feature (951)...(777): similar to gi415839 in the genepept database release 114, Run with FASTXY 3.3t00, default parameters

SEQ ID NO: 81833 - DNA, 4710 bp, Homo sapiens
  sig_peptide (3740)...(3875): this location contains the signal peptide sequence, MYFFLLLLFFNVQRLAFPFGIPNDPMLWSEGQSHLCWRSPLIPSA, Run with SignalP
  misc_feature (146)...(2432): similar to gi35006 in the genepept database release 114, Run with FASTXY 3.3t00, default parameters
gaattcctttccaaaaataatcatactcagcctggcaattgtctgcccctaggtctgtcgctcagccgccgtccacactcgctgcagggggggggggcacagaatttaccgcggcaagaacatccctcccagccagcagattacaatgctgcaaactaaggatctcatctggactttgtttttcctgggaactgcagtttctctgcaggtggatattgttcccagccagggggagatcagcgttggagagtccaaattcttcttatgccaagtggcaggagatgccaaagataaagacatctcctggttctcccccaatggagaaaagctcaccccaaaccagcagcggatctcagtggtgtggaatgatgattcctcctccaccctcaccatctataacgccaacatcgacgacgccggcatttacaagtgtgtggttacaggcgaggatggcagtgagtcagaggccaccgtcaacgtgaagatctttcagaagctcatgttcaagaatgcgccaaccccacaggagttccgggagggggaagatgccgtgattgtgtgtgatgtggtcagctccctcccaccaaccatcatctggaaacacaaaggccgagatgtcatcctgaaaaaagatgtccgattcatagtcctgtccaacaactacctgcagatccggggcatcaagaaaacagatgaaggcacttatcgctgtgagggcagaatcctggcacggggggagatcaacttcaaggacattcaggtcattgtgaatgtgccacctaccatccaggccaggcagaatattgtgaatgccaccgccaacctcggccagtccgtcaccctggtgtgcgatgccgaaggcttcccagagcccaccatgagctggacaaaggatggggaacagatagagcaagaggaagacgatgagaagtacatcttcagcgacgatagttcccagctgaccatcaaaaaggtggataagaacgacgaggctgagtacatctgcattgctgagaacaaggctggcgagcaggatgcgaccatccacctcaaagtctttgcaaaacccaaaatcacatatgtagagaaccagactgccatggaattagaggagcaggtcactcttacctgtgaagcctccggagaccccattccctccatcacctggaggacttctacccggaacatcagcagcgaagaaaagactctggatgggcacatggtggtgcgtagccatgcccgtgtgtcgtcgctgaccctgaagagcatccagtacactgatgccggagagtacatctgcaccgccagcaacaccatcggccaggactcccagtccatgtaccttgaagtgcaatatgccccaaagctacagggccctgtggctgtgtacacttgggaggggaaccaggtgaacatcacctgcgaggtatttgcctatcccagtgccacgatctcatggtttcgggatggccagctgctgccaagctccaattacagcaatatcaagatctacaacaccccctctgccagctatctggaggtgaccccagactctgagaatgattttgggaactacaactgtactgcagtgaaccgcattgggcaggagtccttggaattcatccttgttcaagcagacaccccctcttcaccatccatcgaccaggtggagccatactccagcacagcccaggtgcagtttgatgaaccagaggccacaggtggggtgcccatcctcaaatacaaagctgagtggagagcagttggtgaagaagtatggcattccaagtggtatgatgccaaggaagccagcatggagggcatcgtcaccatcgtgggcctgaagcccgaaacaacgtacgccgtaaggctggcggcgctcaatggcaaagggctgggtgagatcagcgcggcctccgagttcaagacgcagccagtccatagccctcctccaccggcatctgctagctcgtctacccctgttccattgtctccaccagatacaacttggcctcttcctgcccttgcaaccacagaaccagctaaaggggaacccagtgcacctaagctcgaagggcagatgggagaggatggaaactctattaaagtgaacctgatcaagcaggatgacggcggctcccccatcagacactatctggtcaggtaccgagcgctctcctccgagtggaaaccagagatcaggctcccgtctggcagtgaccacgtcatgctgaagtccctggactggaatgctgagtatgaggtctacgtggtggctgagaaccagcaaggaaaatccaaggcggctcattttgtgttcaggacctcggcccagcccacagccatcccagcaaccttgggaggcaattctgcatcctacacctttgtctcattgcttttctctgcagtgactcttcttttgctctgttaggaacttgaacacaaaaattaaatttgcttaaaagcccagttcctatgaaaaagatcagtgccccctttggaagaacctggcaggaccaccatggccacagctgctgagcaaccattctgtgtggaagagaaggttttgtgattggaaaaagctttacctccagacatgtcaccactcacagatacttttgtgccacttcataaggagtttgccccctttttaatggcagtaaaaagaatttgagagctctttctttaaatgctatttttaaaaaccatcatgctagatttacagagaagtttctgcatatctgctacttgttgcattttgggttcaaacctaaatatgatgtagcagaggaagaattctaagtaccttctaaagcttgtgtcagattgttaaaatcaccacacattcccctcattctaactctgtgctccttgtcctcccttcaataataattggctttgcttgcaattaagcatttaagtgcccatgttaaaagagccagaccgcactgattcacatgagcgttttgctgacatgatgggcaactgaagtcacccctgttgcccatgcactggaaaaaaagttgaatttgttggatattttctggggctgatgaacgttctgggatgtgctttcagtcctcgtattacggccagcaccttacactgtctctgtgaacggggccaagccatgatgtgccaacaagtgtcagctttgaaaggtgtttgtctcccaatcggggtgactcccctgctgcctggcagcatgtcgcagatcagcacagagtggggccgtggttcagcagtgacccacagaatggctttgagcatcagtctacaggacaggttggaagcatccactgtgaaccaggcattagtcccctacctggcctgtgtgtgctcagtagagaaggagagggacaggccactcccagactgcccagcccaggagggttaataaattggggccgagccaacctgtcagtgcttcctgaatgccccagcctctgtattggtgcgttggttcagtgacattttctaaactctcctgaaaatccagctgctcctccctgctgcttgggagttcacccaggagaggaaatgggtgtgttttgttaaggtcccttgtggagactcagggctgaatcctgcttggtaatatcagtgtgtgtgcttggggatggaccttctactgaataaaaactccctccctccccccattgtggtcacatatcattctacatatctcatctctgagcatctccatggaagcttgatttttgttctttttggtttctttatgtatttttttctgttgttattattttttaatgttcaaagactagcctttccctttgggattccaaatgatcccatgctgtggtctgaggggcaaagccacctatgttggcgctcgccattaatccccagcgctcagtttagaggctcacgtgcagacatcagaggctccatgctgcacagtagctcaggcagggtagtgcctctcaacccagccacaaaactctccccgctggagtcccagatggcgcttcacaccaaggcagtggaggcaggcatggtttttgggcacagggcagagcataaggatcccaggtcagtgtgggagagctactggctcttaggatcaccttgggcagaagtcacacggcttcatcctaggagggcccagcttgggagtctgcctccccctgatcccaggaccacccacaggagaggggcagtgtccatctttctgaagggaccctttggagatctcgtcctaagtgtggagaggactgacgtggccctgtcatctcaacacatcccagggtcaggcaggcctcagctgaaacaatgtcagggtcctcaagggtcccatttagacagacccacggcttgtaacagtgcgctcctcaggaggcagcactagcgcatacccactccccacggacactgagttcctggtgacagctgcagccccagccccgccaggagtcctggagacagcagccctcagagaccctgcaggagtgagtgcaccccaccttgctcagccacaccccactcccctgtgccctgtagttgtgctgcccatgctccacacaccatggggcccctttgctcatttttggactatttatacagcaggtttggatcatgtttttctactaataagaatgctaacattgttgtgtagataatcagtgagggctttatgaagtttacacctttgcattattaaaggaaataacagttcatgtgaaaaaaaaa

SEQ ID NO: 81834 - DNA, 711 bp, Homo sapiens; identical to SEQ ID NO: 59147
  sig_peptide (398)...(263): this location contains the signal peptide sequence, MARSARTFLLSSTWHLTKFPMSAGYFSPCSWLAAVIRLIQRVLMF, Run with SignalP
  misc_feature (142)...(427): similar to gi2983472 in the genepept database release 114, Run with FASTXY 3.3t00, default parameters

SEQ ID NO: 81835 - DNA, 536 bp, Homo sapiens
  sig_peptide (238)...(373): this location contains the signal peptide sequence, MPPSSLLFYFLLGACMFTREVNPTETSIGQKENVLKLTQHSRVEK, Run with SignalP
  misc_feature (156)...(49): similar to gi3250866 in the genepept database release 114, Run with FASTXY 3.3t00, default parameters
gcaggtgaggccgttcataggcgcttgtgtgcctcccagcaggctgcctgccattgccagggctggccttcagcagggtgcgccaccatggcctgagtggttttctgctgaagtccgtgctgatttggccagtggataggcatcacctgggtgcaaaaccattgtctccaggtaggaatgacctcagctgtttgctccgtgtctcgctcagcctgtagatgtgtccctcatcccttcatgcctccctcttcactcctcttttactttctactcggggcttgcatgtttacaagagaggtgaacccaacagaaactagtataggccaaaaggaaaatgtgctgaagctcacacagcacagtcgtgtggaaaaggcagcagtgactgcttcatccagtgcccttcccacagccagtcagttgcgacccaaggggcttagggtaggagtgtttctccataggggaagagtaacagcctgcacccaccacacacccaaagccctacatcctgccacactgagacctcacttcatttgggc

SEQ ID NO: 81836 - DNA, 752 bp, Homo sapiens
  misc_feature (1)...(752): n = a,t,c or g
  sig_peptide (222)...(357): this location contains the signal peptide sequence, MAVRVLWGGLSLLRVLWCLLPQTGYVHPDEFFQSPEVMAGKTPHV, Run with SignalP
  misc_feature (434)...(339): similar to gi3822175 in the genepept database release 114, Run with FASTXY 3.3t00, default parameters
gcggtggaattctgacacactggttaacaaaggagggggctgtttgcaaacagattcaaccaacccattgcctccagccatccaaagattctgcacagccagccacccctaaggctaagaaatcccagatgcagatctgtggatccagcgtagcatctgtagcagctgggacatcattccaggttttgggcccggtgtgttggcaacaactggatctgaagatggcagtcagggtgctttggggtggtctcagcctgctccgagtgctgtggtgtctccttccgcagacgggctatgtgcacccagatgagttcttccagtcccctgaggtgatggcaggtaaaactccgcatgtgtggctgagacaagctgcagcagagtctgcttgagaagctgacgggagactttgtggggagggagtagcatgtctgggtagatgagtagtaaatccacaagcagagcagcagcctctctctctggggtaagaacttggaagtggggacttcatatctccttcccgagtggtgacactgaccttctgggtaatgcttataaaccatcagtctctttgatgtatccctgcttggaccaacaataccgggcatttagaatggggnacaaacacnaaaaacacaagggttttttttttagggggcgcgggcttttttctttttagggggggaatttttctttggccccggccgctttttaaacgggggaggggggaaaacacggtggtaccaccatttaca

SEQ ID NO: 81837 - DNA, 453 bp, Homo sapiens
  misc_feature (1)...(453): n = a,t,c or g
  sig_peptide (63)...(198): this location contains the signal peptide sequence, MSLAQSPNSLITQLVFLVWLATIPSHLVSINSGNPITQEIPRIRS, Run with SignalP
  misc_feature (280)...(217): similar to gi555375 in the genepept database release 114, Run with FASTXY 3.3t00, default parameters
gggagactgagacctcccgaaaactganaccctacggacagncnggnggaattctcaggctgatgtcactggcccaaagtcccaactctctaatcacacagttggtctttctggtgtggctggccaccatcccgagtcaccttgttagcataaactcaggcaatcccatcactcaggaaattccaagaattagaagcttcctcctaggaaccagaaacaagggtcagacaaatgatttattacaggacacacatatgtacaacaggtaggactgaaattaatgaagtatcctctctctcctcctgtgaataaaaatcttctgtcactggtcagttttctagctcataaaaagaagggattcttgcttgctgggatcaaatttatgggacagatggggaagaggggagaggaggctgagagcaggggcttgggaaggggagcaagaagtgaggg

SEQ ID NO: 81838 - DNA, 806 bp, Homo sapiens
  misc_feature (1)...(806): n = a,t,c or g
  sig_peptide (79)...(214): this location contains the signal peptide sequence, MSFICFLNFVVPTSAIPLRLWNYCGMNSPSRSWDCLCTPLSRQSA, Run with SignalP
  misc_feature (388)...(290): similar to gi786132 in the genepept database release 114, Run with FASTXY 3.3t00, default parameters
cgtacccctgtggaggaattcctcccaaccaccttaaccaagtcagcccctcccacatagtccctagttaagatcagaatgagctttatctgcttcttaaactttgttgttcctacctctgcaatccctcttaggctatggaactactgcgggatgaattcaccaagccgcagctgggactgcctttgtactcctctctctagacagtctgccccagtctcacacatggccaaagtctggtaggtagttgctgagttcctgagtgttgctctctgggccaaggcagtacagggcaacttcccaaggcagagcagacaggagtagtgcttggatttggatcagaccacactgggctttgctgagaggaactgggccagcatacagaatggtttttaatggactgggtttgaaacagttctcagagtgttgagagcaattatgaaggaatcagagtggctgtggatgctgagaggtttggaggtccctaaaggtatcccccaatctgtactgcagaattggaaccccgctgacaagaagagaactagaggaggctggagcaggcgttgccctccagtgcaaggggttgcacctcacagggctgaagctgccgaaggctagggacaccggccgccaccaacaacttggagcttctgcttccttccctcgaaggggggaggggccccgttaggactcgcgcgcgaggcttgcactttgtacccggggacccaccccccccccccccaaattcaangatataaatactgcaacccccgtctcgcgcccttcacccgcccctatggaatagc

SEQ ID NO: 81839 - DNA, 1085 bp, Homo sapiens
  misc_feature (1)...(1085): n = a,t,c or g
  sig_peptide (493)...(628): this location contains the signal peptide sequence, MLCFQAYTYYCVLVVLAQIFLPWPCTVHHDFRKSLNNRQRKEIPK, Run with SignalP
  misc_feature (182)...(132): similar to gi287461 in the genepept database release 114, Run with FASTXY 3.3t00, default parameters
cccagaatgtatgttgtagagaacagtcattagctcaagcccatggtaaccgcctctactgtgcactcgaccagtagaggcgatgatgacggcacttgattctcttgtgtgtaactcagccatcctccctagacccacgtcccaggaggcagggctggtaaagctatgactgggcagtgtttgacccagctgtgcttttactctgtgcctcctctttatattggggcatttctctcttctcctttatgttctttttctttttatgccaaaattcttgctgttgccaaaacaaaaacaaaaaaacacacccacacccaattacaacctgcagttcaaagaaccactctaggtcggctttaaagtattgtctttctctggtaaccaaatctgtacctgctgcctaatttactgtttgggggcattgtttacagtatttctgtttgtaatgtgcttttaatatagaaatcctcttttttgttcttaaatctatgaatgctgtgtttccaagcttatacttactactgcgtgttagtggtcctggcacagattttcttaccctggccttgtactgtccaccatgactttagaaaaagcttgaacaataggcagagaaaggaaatccccaaaagggattattttccccttggacatgagaagtttagttacaggtttcttgaattcgtttttgtccagaggaatcctctttttatctgatacggttgatgaccaaaaatgaagtagggaagccgaaggcatagccggaaaggaacagaagagctttttccccgagtgctcatcaccgggttcattaccggccagagatggacggggagaagcacgttagtttcctgtcatcttatggaaaagatgatctgaagttaaaaaatgaaggtcacaagtggcagttgcctgacccctgtccccagacattccttgcccgataaccattgaggttccatagntcgcacccctgaatggggcttttaacgaaatggcagccttttcccccccccagctagaaagggtagcctggtccgaaacaatttttcgttccacccctaagggcccccccccggccccgaggc

SEQ ID NO: 81840 - DNA, 452 bp, Homo sapiens
  sig_peptide (99)...(234): this location contains the signal peptide sequence, MNCRLGLALWVGSSFVPWLPGAQYRMADSPRLVCRPQHLEGHMVA, Run with SignalP
  misc_feature (238)...(200): similar to gi2460433 in the genepept database release 114, Run with FASTXY 3.3t00, default parameters
tttgaaccccctttgtagatccctagtccatgcggtggaattccacgattccctaataaatcatgtttccaaggcagagccacttattctcccgggccatgaattgccgtctgggtctagcactttgggtcggctcaagctttgtgccgtggctccctggggcacagtacaggatggcggactcccctcgcctggtctgtagaccccagcatttggaagggcacatggtggctccttgccacccatcagatgctccaggggcaggacctgctctggcaacccagtaggttcaggcaggaacttggcacacaggagctggtctcaggctgccccacaggcagggaatgactacgagtgaccctgaggcctctggagaccagccagacggtccagcctggctctgcagcagaaaacaatttgtcacacggactgtcagcaaacaacaatggcgg

SEQ ID NO: 81841 - DNA, 1076 bp, Homo sapiens
  sig_peptide (216)...(351): this location contains the signal peptide sequence, MAGPELLLDSNIRLWVVLPIVIITFFVGMIRHYVSILLQSDKKLT, Run with SignalP
  misc_feature (228)...(939): similar to gi5823570 in the genepept database release 114, Run with FASTXY 3.3t00, default parameters
tattactgcgagatgacgacagaacggggcgccggaagtggaagaccaggcagcccagctgaaggcagtaagctcggctcacagtcgcaggagagttctggggtacacgggcaaaggggcttgagaaggcccggaggcgaagccgaagagaagcaactgtgccccggagaagagaagctcgcccattccagactgggaaccagctttcagtgaagatggcagggccagaactgttgctcgactccaacatccgcctctgggtggtcctacccatcgttatcatcactttcttcgtaggcatgatccgccactacgtgtccatcctgctgcagagcgacaagaagctcacccaggaacaagtatctgacagtcaagtcctaattcgaagcagagtcctcagggaaaatggaaaatacattcccaaacagtctttcttgacacgaaaatattatttcaacaacccagaggatggatttttcaaaaaaactaaacggaaggtagtgccaccttctcctatgactgatcctactatgttgacagacatgatgaaagggaatgtaacaaatgtcctccctatgattcttattggtggatggatcaacatgacattctcaggctttgtcacaaccaaggtcccatttccactgaccctccgttttaagcctatgttacagcaaggaatcgagctactcacattagatgcatcctgggtgagttctgcatccctgggtacttccccaatggtatttgggcttcggagcatttactcctctgattctgggccaagataatgccgctgaccaatcacgaatgatgcaggagcagatgacgggagcagccgatggccatgcccgcagacacaaacaaagctttcaaggtatactccttcacctttcaaagctgcagcaatgctctgaaaggtgttaccaagagctattttaaaaatagcttccttgaagggagtgttgtgtggttccatcggttttaatttaaacttagtaaaaacattagtttacacgtctctctttcctgagacagaatcatctattaagtaaatggaaattcttggtgctttt

SEQ ID NO: 81842 - DNA, 1174 bp, Homo sapiens
  sig_peptide (679)...(814): this location contains the signal peptide sequence, MSCHVASMLLRFHKIIIIFLLLFAVMSFSFLGTLFIFLHSFFDPV, Run with SignalP
  misc_feature (285)...(424): similar to gi1235929 in the genepept database release 114, Run with FASTXY 3.3t00, default parameters
gggtcctgtgtgtcacagaatgtttagcagcatccctggtttctgctcaccagatgccagtatcccccctccccgcagtgtgacaaccaaaaatgtcaccagacattatctgatgttctcccaggggcagaatcacctctgagaaccagtgctccaaaggaaagtatgcggaagaatggactgtctaggattcatattgtaattgtagagtggagaaatgggactgctattgtcttttttatttaaaagtgttgcctgtgttaagagggagaaaaccttaggacaagttaaatttaacagagtttaatccagtagaaaaaggttcagggaacactcagggaccaaaagtggtgcagaatgttccaccccatagtggaggttgtgcaggctatatttatagtcagagaaaaggaaatgagatacagaaatagcctgattggctacagttatgtgtttgccttatttggtcatgttttggcaggctttagcctccaattggctggaggtttcagctgctatgattggctgagactcagctatttgttacacttgtaacctaactcttatgttaagttacagtttgtttatacattaaattaggttacagttcactatctttggaggcagctttaacttaacacctgtttccttaaagatctgtagttctttaatgccattatgtcatgtcatgtggcctcaatgttgttaaggtttcataaaattataattatatttctgcttctgtttgctgttatgagtttttcattcctaggcacactatttattttcctgcacagtttttttgaccctgtcttctttatatattcttggtagaaagaatattcttatgtatttcctataagcttgtagattgttctctcagaatgaaacccaggggcacaattcctttggagaaacactaattagaaaagttcagtagaatcatggaatcactggaccaaggatttttctggagggcccttaaaattctttttggccccccaccaagaaggggttttaagggcaaagaacattactccccccaacacaatggttattggagtataccctgctggcttacatggggactggccctaggggcctgaaacaagcaaggagtttaaatgggcccctcggcctttattgggggtgcccttttttggggagcccgcct

SEQ ID NO: 81843 - DNA, 479 bp, Homo sapiens
  misc_feature (1)...(479): n = a,t,c or g
  sig_peptide (151)...(286): this location contains the signal peptide sequence, MTAKIFCCSHFPGLLGLFCSPNPLCFTDGWLRPWEVAGSGSPNVH, Run with SignalP
  misc_feature (260)...(150): similar to gi169643 in the genepept database release 114, Run with FASTXY 3.3t00, default parameters
cggagcctttgtcgcgtccatagtcagtgtggtggaattcgacagaacccagagcccaggtcccactcagccactaattccctgaataaccttgggtaggtctctcacctctctgagcctaagtttcatcatcttttaatgacaagtaccatgactgctaagattttttgctgctctcactttccaggattgttggggctcttttgttcccccaaccccctttgctttacagatgggtggctgaggccctgggaagtggcaggctctggctcacccaatgtccacagtggcacctgagctagaacccaaacgctcttgctctaacactaggcccttttctcctggtccttttctagagaagtcagcagtgtggtgctagaagatggagcccagcttgcaggaggcccagagagctggcactggggagaccacaccttcatggatctgtgatcccttcactgccaaatcctcagcctgtn

SEQ ID NO: 81844 - DNA, 526 bp, Homo sapiens
  misc_feature (1)...(526): n = a,t,c or g
  sig_peptide (262)...(397): this location contains the signal peptide sequence, MLLCFDTNLCFVLLYSTFLFLLNYLTLFAKNGVLGEANTEIELGG, Run with SignalP
  misc_feature (41)...(78): similar to gi521077 in the genepept database release 114, Run with FASTXY 3.3t00, default parameters
agtccttctcactatcctcctctcatgatcttccctactcctcctatctgattcgtggcttactctttttatttatggaggggcgnnnnnnccttgatcccttggaacccccggaatcgggcgaccaccgccgataaatcaaatgcatatttacgaaaatactatatgacaaaaagggaatgaagcatggaatgaagcagcagcatgtttatgttcacaagaatcattcatatctgttaaaaaatatatgtagcctcacagatgctactgtgttttgatacaaatttgtgctttgtattattatacagtacttttttgtttctcctcaattaccttaccttgtttgccaagaatggggttcttggggaggctaatactgagatagaattaggagggcaagggctttttggaggcaggaaatctaatgcccatgtaagataaaaggggaggaagcaggattgaacagggaaggctttcagagcgggatgttgatctgacacttgtgaaaggaaagggaaccagaggg

SEQ ID NO: 81845 - DNA, 749 bp, Homo sapiens
  sig_peptide (285)...(420): this location contains the signal peptide sequence, MLFVVLPLLIIVFNIPMREAVFDFLFMIKIIKVLKVFYCIACFII, Run with SignalP
  misc_feature (306)...(434): similar to gi1334275 in the genepept database release 114, Run with FASTXY 3.3t00, default parameters
taaaaatgttgaaaataaggcttacttttattatttgaatatggtaattatgtaattatccttttaatatgttaaggttatattctgtgccttagagtatgctaagcactttatacataattatcttatttaagcctcgtagaaatcttatgagcaaaatgttactcggtacacttaaagtacaggtaactgaggcttagagatgtaaaataatttgtccaccacagtgcttttaaaagatgctcgtaaccactatattgtaatttcaaaccctgattccattaatgctttttgttgtgttgcctttactgataattgtgttcaatattcccatgagggaggcagtctttgactttttatttatgataaagattattaaagtgcttaaagttttttattgtatagcgtgttttatcatcaaacaggctttagttttttaaggtaaactgaccataaataataaaaggtgatgggtttatgacacttgggtttgagagaactttaattggagcaatatttcaagaaaatccttcttactgtttttcgaaactggtgaggggcagagatgccccaagaacacttctaggtttattggttcgaaagaaaggactaccgggagtggttttaggcgcccctcgggcaagaattaataagggcaagaattcccggaagatttctaagggtttgggccggggaccggctgggggaacgagaccccccccggcccttgtggttgcaacctgccccct

SEQ ID NO: 81846 - DNA, 517 bp, Homo sapiens
  misc_feature (1)...(517): n = a,t,c or g
  sig_peptide (1)...(136): this location contains the signal peptide sequence, MRVPWLLAHLPLGSWTGVTTGVGLFRSDLPKPELAAWSHLYLVSP, Run with SignalP
  misc_feature (271)...(198): similar to gi553241 in the genepept database release 114, Run with FASTXY 3.3t00, default parameters
atgcgagtgccttggctgctcgcccacctgcctttgggcagctggacaggagtgacgactggcgtaggtctgttcaggtctgaccttcccaaaccggagctggcagcctggagccacctgtatctggtgtctccagtggggctgcacagcagtggcctgtttcagcaagcttcagttagttcgttgagactgggctgctcagggtgaggagaaagtgacccaggtcttccttcctctggccgaggtgccctgcctggcacccatgacaggtgtgcctttggtctttgagtgttttaaagatcaggcacttggtgttagcatgttagtagaagtgtntttcaggccctgtctattctctacaggaantgcattgtataatcatagncttatggaattggagagagctataacagcaggctctaaacgcgacccgctgaacgccagcctgaattgagcacttttcacacccttcttctaatttatccttcaacaaccttgggagacagctgttcttctg

SEQ ID NO: 81847 - DNA, 732 bp, Homo sapiens
  sig_peptide (198)...(333): this location contains the signal peptide sequence, MNTGLGPPCCFSDCLGLSLCLCSCCFLHLFLLFLVCTPCFALGSL, Run with SignalP
  misc_feature (275)...(353): similar to gi1683614 in the genepept database release 114, Run with FASTXY 3.3t00, default parameters
cggacgcgtggttgaatgaatgttcagactaatgaaaaactttcttcttaatcccaaccttttccactcatattgtttagggattttagatatttctatgcagtcacccgagcttgtcttgtattatcttcccacatgctgtattatcttgtattatcttctcacatgctgtatgggaacagcagcatgaggtctccatgaacacggggcttggccctccctgctgtttctctgattgcctaggtctctctctctgcctctgctcatgttgtttcttgcatctatttctgttatttctagtttgcaccccatgctttgctcttgggtccctgcttgctcttgcccttggcacatcaagactgacttcggcttccccactttgtggtcttccatactgtgcatggactcagttcctctccatgccccagtatttcttgctttttgaccattgaatactatctcctgtgtacccatctttgattgtcttctcctagccaaaatttgactgacttcttctcaccttctttagccacacttgttctttagatggagccagggcctatccatgcccctatctacttgtgtttgccatatatataattacggggaccctcttttatgtgccctcagcccaattttccgggtctctcacttcgccccccccttgggtttttttttcagggccagcgtttttttctacccaggcggagggaaaaaaaaaaaacccccccc

SEQ ID NO: 81848 - DNA, 461 bp, Homo sapiens
  misc_feature (1)...(461): n = a,t,c or g
  sig_peptide (148)...(283): this location contains the signal peptide sequence, MKMLCVKLNVRTPIFLLLSFPSXCNWPLHQLLMKKYNADKRTTCI, Run with SignalP
  misc_feature (133)...(189): similar to gi1591423 in the genepept database release 114, Run with FASTXY 3.3t00, default parameters
cggacgcgtgggctgtaagtaatttgtacaagattggctagtaagtgaccaagcaagaatttgacacagacaactttgcaagtttaatgctctctcatttttgttcattatgtcattatgtgtagcccaggtgtgaggagactgtttatgaaaatgctttgtgtcaagcttaatgttaggacaccaatttttcttctgctctcatttccgtcgngatgtaactggcctctacatcagctactgatgaaaaaatataatgccgataagaggacaacttgtatagaaggtttacagtaaagcaatgaacagagggaaataagctgtggtgcccagactcttgaaagcattaccttcacattacgaagttcctgaaacttgtattgcttattgttgaggatggagagccgaatgcctcagtgtaaagaatccttgaatcctccagagtagtaaagattaaccan

SEQ ID NO: 81849 - DNA, 1322 bp, Homo sapiens
  sig_peptide (179)...(314): this location contains the signal peptide sequence, MVWRRLLRKRWVLALVFGLSLVYFLSSTFKQEERAVRDRNLLQVH, Run with SignalP
  misc_feature (503)...(568): similar to gi11073 in the genepept database release 114, Run with FASTXY 3.3t00, default parameters
gcacgagctcctccgctgactaatatgcttaaattcagggcggcggggccggcgcctgcctggagggatggggctgccgggcgcgtaggggccatgccgcccgggacccgggcctgccgcgttccgcgccccggccgccgcgccccacgtccgcgccgggatggtgaacctggcggccatggtgtggcgccggcttctgcggaagaggtgggtgctcgccctggtcttcgggctgtcgctcgtctacttcctcagcagcaccttcaagcaggaggagagggcagtgagagataggaatctcctccaggttcatgaccataatcagcccatcccgtggaaagtgcagtttaacttgggcaatagcagtcgtccgagcaatcagtgccgcaactccattcaagggaagcacctcatcacggatgaactcggctacgtttgcgagaggaaggatttgctggtaaatggctgctgtaatgtcaacgtccctagcacgaagcagtactgctgtgatggctgctggcccaacggctgctgcagcgcctatgagtactgtgtctcctgctgcctgcagcccaacaagcaacttctcctggagcgcttcctcaaccgggcagccgtggcattccagaacctcttcatggcagtcgaagatcactttgagttgtgcctggccaaatgcaggacctcatctcagagcgtgcagcatgagaacacctaccgggaccccatagcaaagtattgctatggagaaagcccgcccgagctcttccccgcttgacgggtgcagcggacttgctccagcctgggtgaggaggccccgctgaagaactcgcctcctgggacccagcttcagccatcgggccaggctgcaggaagaagacaaaggcagcgtgaggaaaccttggctttgaccccttctcgtgttgtcatctttggcttcgctcaccacccgggcttaccagatggaactcttctgtaaagcagcttggcccctccagccagtcccattcgggaaagatgaaaccggaggccgggctcacggtggtggtggagttcttggatgactcagccctgggaccctgcacagggacctgtgacttgtgttcatcgggggccggtgtcacttccagttttgatccaggctctttcactgtaaaattatttattggattcctttggagtaatgggaacattttaatgttttatgtaggaaaatgccttgccattttagttgaatatgttcaaggaaattatttttgttgttgttctgtgttctcgagtttcaggagttaaatcatttttccccccagaaaaaaaaaaaa

SEQ ID NO: 81850 - DNA, 1099 bp, Homo sapiens
  sig_peptide (62)...(197): this location contains the signal peptide sequence, MFVKLFLWHLGHMPAGICFQNSLTNYNTPCFSRSVVVLVGAFRTA, Run with SignalP
  misc_feature (576)...(715): similar to gi4164567 in the genepept database release 114, Run with FASTXY 3.3t00, default parameters
atcgcatggctgcgcaattcggcacgagccagattgtgttaccatttgaatacactgactaatgtttgttaaactttttctgtggcaccttggccacatgcctgcaggcatttgttttcagaacagtctcaccaattacaacacaccgtgttttagtagaagtgttgtggttttagttggtgctttcagaactgctgcctaggaaactataaacccttggttaaggggaaatcatggcttgttctctttgtacagttactttatttatataggtgttaagctttgtggaccaggtgtttttcttttggggcgaacccctgagcagagaatcttactaggctttggttatcaccaaaacaacctccagtatataccaaagctttgacttgtttgagctcttgagcttagaagttgattttgcacttatttttttggggggtgggaatgtactgcagtcagtaaacattattgactgtttaacttaaacagatgctttatggcacctgctcaagcccgtgactgtacagaaggatcctggttgctaccagtgggtgctgattcagcatcacaagtgactgaaattggctgtggatctgttctttgtgaaagaattcctgatttctccatggagcatgtacacaacaattttgatcatattaactgtacttcagttttgcatttttattcaaatgttatctctttttttctttgagaaataaactgtcactgatgtgacagcgttctttctttattctaataacatgtatagatctaaagcaggttgtgttgtttacatgtttctacacatttcatcctttaaaaagttgttgagagaggttgtatttaccttcccaaggttggaaagcaggggaatttcccagtgtcctagttttccaccagaggaatatgtgtaagtagcaaagtatttgctgcttacatatagtgtgtatgtatgtatatatgtaaattgtgtgttaaagagctgatactgattttcatatgacaatgttaggcaaaggccctccctgcatttgaaggggcaggttttcatttatatgtatttttgggataaaaaaataaaatttgtaaatatagcccc

SEQ ID NO: 81851 - DNA, 428 bp, Homo sapiens
  sig_peptide (24)...(159): this location contains the signal peptide sequence, MGQLTIIASPSRFVYDCYFLVLLRMLLVNGICLDTDFGGEVISLQ, Run with SignalP
  misc_feature (385)...(278): similar to gi4098456 in the genepept database release 114, Run with FASTXY 3.3t00, default parameters
ggaattcgaaagacaacaggttcatggggcaacttactatcatagcttccccaagtcgatttgtgtacgactgttattttctggttcttctcagaatgttacttgtaaatggtatttgccttgatacagatttcggtggagaagtaattagtttacaaagaagaattctcagcatgtggatgtaagcttaattgagtcctcatggtgttttacaattagcttctctagctgtgggatttcaagaaatatgtgaggtagctgatgacacccaagttgtcttaacataactgtacaccttgcacatgctcttgtttacagatgtggaatgattgctttccacaagcagctgactgatgtaaacactggggattttcttcaagtttaaaagcattaaggaatcaaagtaaaaatttcttgggtatattctt

SEQ ID NO: 81852 - DNA, 438 bp, Homo sapiens
  sig_peptide (198)...(333): this location contains the signal peptide sequence, MTFSSYTLTFYLISYSLQLSALGYLPPKGLKDLGPLEALLSGPSK, Run with SignalP
  misc_feature (257)...(386): similar to gi4588301 in the genepept database release 114, Run with FASTXY 3.3t00, default parameters
tcactctggtggaattctaacttttctacttagcataaaatctacctttgttttgaacattacctagctatttattttttaataaatcacttaactactctagacctgttttttaatctataaaatgaaggagctggactagataatttctcaagtttctgtctggccttaaaattatttaattcatccatagtactatgacattttccagttataccctcacattctatttaatctcttactctcttcaattgagtgctcttggttacctacctccaaaaggtctgaaggatttgggtcccttagaggctctactgagtggtccctccaagaaggaactgaaaaaaaagagagagaaaaagaaagggaggaggggtggaaccacccttaaatccaaagttgcacaactattcactaggataagaggtctctccccaa

SEQ ID NO: 81853 - DNA, 783 bp, Homo sapiens
  sig_peptide (277)...(412): this location contains the signal peptide sequence, MVTYFIKCFHYEVSFLLWFAVVRNDVDRPVSLSLFSSYSLFSTYP, Run with SignalP
  misc_feature (244)...(409): similar to gi563136 in the genepept database release 114, Run with FASTXY 3.3t00, default parameters
tccctgcggtggaattcgcacacacacacgtagtacaaagaaatactatcagtgaatggaggcaagtcattgagttctgtaatcttgatagtccagagaaagggatgaatctgccagatcagaggagctcctgatgtcttcttcatcaggttaaggatattttcttttatatctaatttaattcatctaagaacgactcattaaattacgtataattctttactacataaatgaagttccctcttattcctattttactttttttttaaattaggaatggttacttattttatcaaatgctttcattatgaggtttcttttcttctttggtttgctgttgtcaggaatgatgtagacaggccagtctccctgtcactcttctcttcctatagtttattctcaacatatccagacacatgtcccttgttcaaactccccacccacttactgtgttgtttagaggaaatataaatgtccttattataactgacaaggccctaccctgttcaatcttactacttttctgcctaatctacttctctctctctatctaactcatcctactcagtcatcttggctttcttgatgttcctggaatatactggacatgttccctttacagagccttttcagttgctcgtctccttacctgggatgtatttccatcccacatcaccacacttagttagatccctcacagacttcagatctttactcaaaggtcaccttttttatgagtccttccttgggcacccttttctaaaggtcatcccatcttgcctt

SEQ ID NO: 81854 - DNA, 1777 bp, Homo sapiens
  sig_peptide (532)...(667): this location contains the signal peptide sequence, MQLIRRSHNRHWFRSAITFLMCKGITLLWLWKLLTGNDCIEYIRK, Run with SignalP
  misc_feature (90)...(862): similar to gi509291 in the genepept database release 114, Run with FASTXY 3.3t00, default parameters
cctcgtcagtccatcttggtcctgccctgacagattctcctatcggggtcacagggacgctaagattgctacctggactttcgttgaccatgctgtcccgggtggtactttccgccgccgccacagcggccccctctctgaagaatgcagccttcctaggtccaggggtattgcaggcaacaaggacctttcatacagggcagccacaccttgtccctgtaccacctcttcctgaatacggaggaaaagttcgttatggactgatccctgaggaattcttccagtttctttatcctaaaactggtgtaacaggaccctatgtactcggaactgggcttatcttgtacgctttatccaaagaaatatatgtgattagcgcagagaccttcactgccctatcagtactaggtgtaatggtctatggaattaaaaaatatggtccctttgttgcagactttgctgataaactcaatgagcaaaaacttgcccaactagaagaggcgaagcaggcttccatccaacacatccagaatgcaattgatacggagaagtcacaacaggcactggttcagaagcgccattacctttttgatgtgcaaaggaataacattgctatggctttggaagttacttaccgggaacgactgtatagagtatataaggaagtaaagaatcgcctggactatcatatatctgtgcagaacatgatgcgtcgaaaggaacaagaacacatgataaattgggtggagaagcacgtggtgcaaagcatctccacacagcaggaaaaggagacaattgccaagtgcattgcggacctaaagctgctggcaaagaaggctcaagcacagccagttatgtaaatgtatctatcccaattgagacagctagaaacagttgactgactaaatggaaactagtctatttgacaaagtctttctgtgttggtgtctactgaagttatagtttacccttcctaaaaatgaaaagtttgtttcatatagtgagagaacgaaatctctatcggccagtcagatgtttctcatccttcttgctctgcctttgagttgttccgtgatcacttctgaataagcagtttgcctttataaaaacttgctgcctgactaaagattaacaggttatagtttaaatttgtaattaattctaccatcttgcaataaagtgacaattgaatgaaacagggtttttcaagttgtataattctctgaaatactcagcttttgtcatatgggtaaaaattaaagatgtcattgaactactgtcttgtttatgagaccattcagtggtgaactgtttctggctgataggttatgagatatgtaaagctttctagtactcttaaaataactaaatggagtattatatatcaattcatatcattgactttattattttagtagtatgcctatagaaaatattatggactcagagtgtcataaaatcactcttaagaatccatgcagcaggccaggcacagtggctcacacctgtaatgcctgcactttggaaggccgagacaggcggatcacttgaggtcaggagtttgaaaccagccaggccagcacagtgaagccctgtctctactagaaatacggggggttggccgggcatggtggcaggcgcctgtggtcccggctactcggggggctgaggcaggagaattgcttgggcgcgggaggcaaaggttgcagtgagctgagatcgcgccactgcactccagcctgggcaacagacctcgactccatctagaaaaaaaaaa

SEQ ID NO: 81855 - DNA, 1106 bp, Homo sapiens
  sig_peptide (232)...(367): this location contains the signal peptide sequence, MHWKMLLLLLLYYNAEASMCHRWSRAVLFPAAHRPKRSSSLPLNP, Run with SignalP
  misc_feature (553)...(527): similar to gi53861 in the genepept database release 114, Run with FASTXY 3.3t00, default parameters
actgtggtggaattcgagcgtcaaatgaagagaggtaccgactcctgtcccacccaggactcagccttcagcctccagccttctgaggcagagtaggcatttctgcacgtctgcaaaaggaagggagggaagcactccatcatctcactgggaagaacggcacgggcatacctgcagctactggggttccactgggcttgagggtcgatttttcaccttttgaaggacaagatgcattggaagatgttgctgcttctgctgttgtattacaatgctgaggcttctatgtgccacaggtggagcagggctgtgctcttccctgccgcccaccggccaaagaggtcctcatcactgccattgaacccagtcctgcagacctccctggaggaggtggagctgctctacgagttcctgctggccgaacttgagatcagccctgacctgcagatctccatcaaggacgaggagctggcctccttgcggaaggcctcagacttccgcaccgtctgcaacaacgtcatccccaagagcatcccagacatccgccggctcagcgccagcctctccagccaccctggcatcctcaagaaagaagactttgaaaggacagtgctgaccctggcctacacagcctaccgcacagccctgtcccacggccatcagaaggacatctgggcgcagtccctcgttagcctcttccaggccctgaggcacgacttgatgcgctcctcacagccgggagtacctccctgagagactggcccacaccaggacctcagagcagggaccagcacagtaatccagaaagtcttcattctctactccatttacagagaccagcaacaaaacacttaccgctgacacagagcagcagagatcaaacagtaaccccgatgctcttttctccttgtagtttcctggaagacacatctgattcatgccatcatgtgacctgggctggaagaaagggctggaatggtcattcaagacgcctccatgggcagaatggtttgcctatggcaggcagaattctgatatgcttcaacccagagcagtggccacacactcaagagtgagaacaggccgggcacagaggctcacgcctg

SEQ ID NO: 81856 - DNA, 1322 bp, Homo sapiens
  sig_peptide (818)...(683): this location contains the signal peptide sequence, MRLLFSSQVNSKRLTASRAFLVLVPAHLSYLLALPSIPATRGFWF, Run with SignalP
  misc_feature (764)...(654): similar to gi2289099 in the genepept database release 114, Run with FASTXY 3.3t00, default parameters
tccggttgaggaattctattttcatccttatatcagagacgagaaaactaagggtcagagaaaattagcaattggtctaaaattgtacagttgtaacaggatctagaacagggacttcagtacaggcctccctgacccccaagcctgtgttctttctactgtactaggcttggaagacagcgtacgtgagagcaaagacaagctctgtccactctgtgcatattcagtgtaggtgctggtgagattcccgccttcaggtgtccagcaagtggttggagacatggagcccaatctcaaggacattgggaggattgaaggtcaaggcttaagaaccatctgcatcctcatttatttattcagcagctatttgttgtgtcttcgtggaccagcttggcagcatgaatgctgtgaccaacaagagaggtgtgtccttcacggagctgccaggctgggagggagccctgatggcgtggcttgagtgtaaggcaggaggtgtgcagattggctgtgggaacttactggcctaaccttgtcaggtcagggaagctctctagaggcagttgtggttctcaacatgagactcaaaacatgaggacccagttaaaaagtgggaaaacagcataccccaggccgtggaagtagcgcgtactcaggcagagcaagataagaacacagtgtctttaaaccaaaaaccacgtgtggctggaatggagggaagagcaaggagataagacaggtgagcaggaaccagaacaagaaatgccctggaagctgtgagacgcttggaattcacctgtgaagaaaagagtagcctcatctgaattccttgcctcgattatggtctccaatagaagattaaatggctgtggagtctagaggttttttccttcagtgtgggcatcaccccttctgaaaggatggtgtaatggctaattgtatgtatcagcttggcgaggccacagtacccagatacttggtcaagcaccagtctagatgtcgctgtgcaggtatttttttagatgaggtttaacatttatatcagtagaaggagtgaagcagattatcctttgtaatgtatgtaggcctcatatatcatcagttgaaggccttaagagaaaaagattgaagtccctaaagaagaaggaactctgtctccagactcccttcagactcaagactgcaacatcggcctggcacggggggctcacgcctgtaatcccagcactttgggaggctgagatgggtggatcgcttgagatcaggagttcaagaccagcctggccaacatggtgaaaccctgtctctactaaaaaaaaagtcga

SEQ ID NO: 81857 - DNA, 1842 bp, Homo sapiens
  sig_peptide (236)...(371): this location contains the signal peptide sequence, MRGQVVTLILLLLLKVYQGKGCQGSADHVVSISGVPLQLQPNSIQ, Run with SignalP
  misc_feature (236)...(1334): similar to gi4894520 in the genepept database release 114, Run with FASTXY 3.3t00, default parameters
aactgagtacctagtcagtgtcgtggaattcgctccaggcgctggggctttctcagtggccttgtcagctcacagcaggcgttaacagcctctaattgaggaaactgtggctggacaggttgcaaggcagttctgctccccatcgtcctcttgctgactggggactgctgagcccgtgcacggcagagagtctggtggggtggaggggctggcctggcccctctgtcctgtggaaatgcgggggcaagtggtcaccctcatactcctcctgctcctcaaggtgtatcagggcaaaggatgccagggatcagctgaccatgtggttagcatctcgggagtgcctcttcagttacaaccaaacagcatacagacgaaggttgacagcattgcatggaagaagttgctgccctcacaaaatggatttcatcacatattgaagtgggagaatggctctttgccttccaatacttccaatgatagattcagttttatagtcaagaacttgagtcttctcatcaaggcagctcagcagcaggacagtggcctctactgcctggaggtcaccagtatatctggaaaagttcagacagccacgttccaggtttttgtatttgataaagttgagaaaccccgcctacaggggcaggggaagatcctggacagagggagatgccaagtggctctgtcttgcttggtctccagggatggcaatgtgtcctatgcttggtacagagggagcaagctgatccagacagcagggaacctcacctacctggacgaggaggttgacattaatggcactcacacatatacctgcaatgtcagcaatcctgttagctgggaaagccacaccctgaatctcactcaggactgtcagaatgcccatcaggaattcagattttggccgtttttggtgatcatcgtgattctaagcgcactgttccttggcacccttgcctgcttctgtgtgtggaggagaaagaggaaggagaagcagtcagagaccagtcccaaggaatttttgacaatttacgaagatgtcaaggatctgaaaaccaggagaaatcacgagcaggagcagacttttcctggaggggggagcaccatctactctatgatccagtcccagtcttctgctcccacgtcacaagaacctgcatatacattatattcattaattcagccttccaggaagtctggatccaggaagaggaaccacagcccttccttcaatagcactatctatgaagtgattggaaagagtcaacctaaagcccagaaccctgctcgattgagccgcaaagagctggagaactttgatgtttattcctagttgctgcagcaattctcacctttcttgcacatcagcatctgctttgggaattggcacagtggatgacggcacaggagtctctatagaacagttcctagtctggagaggatatggaaatttggtcttgttctatattttggtttgaaaatgatgtctaacaaccatgataagagcaaggctggtaaataatatcttccaatttacagatcagacatgaatgggtggaggggttaggttgttcacaaaggccacattccaagtatttgtaatctagaaagtggtatgtaagtgatgttattagcatcgagattccctccacctgattttcaagctggcacttgtttccttttctcccctctctgggttgactgcatttctaagactttgggcggccccaggcccatttttccaaagcaggaaggaagggattgattttggggggactcaaggggaaaaagaaaccggccctcctttttaaaacccgggactggcccggctggagaccgggg

SEQ ID NO: 81858 - DNA, 758 bp, Homo sapiens
  sig_peptide (176)...(311): this location contains the signal peptide sequence, MTFEFHLLQIYLVRLTIFFHFSIALALPSPRFLGSYTSYDYLKRN, Run with SignalP
  misc_feature (245)...(310): similar to gi575473 in the genepept database release 114, Run with FASTXY 3.3t00, default parameters
ttttgatgcgttgattagtccagtgcggtggaattcggatgggccagcagacgggacataactaagtgattgtgttttatttatcttcaatttccttggccaaatgagagttagtgatatgttcctttatagaccaaattatggtgaaatggtggatgttggttgatatttttaaatgacatttgagttccatttgctgcaaatttacttagttagattgaccattttctttcatttttctattgcgcttgctttgccatcacctagatttcttggctcttacactagctatgactacttgaaaaggaacgtcaagtggtaagactggcaattaatgtgaggctgttccataaggtgtccctcactgtgtcactggcattatgtgcactttcagattttaatgtcatcatcaagggcttagtctaaattcatgaaagcaagataaaaaagccaatcataagacttcttcaatgaaaatttatgaaaatgaccaggagtattccaaatgtatatgttattgttggtgcacataaagctagtgcagctttggcattcagcagtaaggtttagatggcaatgttgcaattatgggtcttttaaaaagatttgtgtgaattttgtgttacatattaacaattggcaatctgaaaaaataaacatacatggcacaatttgacttaaatgaaccttggaaaataaagcaggatctgctgctctagcagtcatttaaccaaaaaatggacctggtaactcaaggg

SEQ ID NO: 81859 - DNA, 734 bp, Homo sapiens
  sig_peptide (172)...(37): this location contains the signal peptide sequence, MTDFFLCIHSFYLCVLLQASLDMLSVKSFSFKVLCLMKAKEKPNT, Run with SignalP
  misc_feature (559)...(594): similar to gi2290522 in the genepept database release 114, Run with FASTXY 3.3t00, default parameters
gcggtggaattcgaatctattaccaggtggcaactggtagtattaggtttttcttttgctttcatgagacacagaactttgaagctaaaacttttgacgcttaacatatcgagactagcctgtagaagaacacacagatagaatgaatgaatacacagaaaaaagtcagtcatggaattaggggaggtttttatggttttattaattttatttaacaaatgcttctctgggtctagacattgttctaaacacttttcaaatattaacttcttaatcctaggagcaaccttatgagataggttctaatattccctactgatgaggaaaccaagatacagagatacagaaaccaaggtaacctgcccagagtcataacagtgcccagtggtggagccagacagttccacctggagatttatgctttagagtaaaagcagtgctgttcagtgtgtgaccacagacagccaaggtctttgaactaagtccaatccacagtgagatgagcccagaaaatgagtgttttgacagttccacaacatccaagagtgtgatgtatttcataaaagtattggtctggccaggtatgatggcttatgcctgtaatactatcgctttgaaggctgaggcaggaggatacctttggcttcagagttcaaaccagtcgggaccgacatagtgagacccctcgtttttttttttaagagaaaaagtgccgggccgaaattcactgtccc

SEQ ID NO: 81860 - DNA, 732 bp, Homo sapiens
  sig_peptide (572)...(707): this location contains the signal peptide sequence, MNLFCPLPSFSVAYILWLGSHLIQSATLLRVYASFIFKPSSLLLF, Run with SignalP
  misc_feature (406)...(433): similar to gi3822265 in the genepept database release 114, Run with FASTXY 3.3t00, default parameters
gtcgcggaattcttttcctagaggagctcaaagtctagttgtaaaaagtgaacatgtaaacaaatgattgcaatacactgtggtatttgcaaaatagcgaggatgcctgccatctaagaactcaagtataattattcccattccctgcttttgtaaatcctaaaattatgtcacgtcctcctagggtttctgttatttttgcagtagccaaccagttcttcgttggtcagaattaagtccagaataaaagttttcttccttattttcaccttggaaaagagagatcgtcagcaaggaatgttttatcaggtttattttcttctagcagatttagacttcagagatgttagggtggttgacaccttccatgtctctgcaattttgtcatttgttttggggaagtcatattgggtgaatattctggtgatctgtgtattgtctccttattttacattcccttgaccatctttggatctcttcacagggctttgttcatggtcactgctcagttttgtgctcacctaaatgcttccctccaggctgctgctttgacattgtaaagatcttttatatgaatcttttttgtcccttgccttcatttagcgttgcttacatattgtggctcggctctcatctgatccagtctgcgacgcttctaagggtgtatgcatcttttatattcaaacctagctcacttttactattctttatataaccttgacactgagtatc

SEQ ID NO: 81861 - DNA, 655 bp, Homo sapiens
  misc_feature (1)...(655): n = a,t,c or g
  sig_peptide (6)...(141): this location contains the signal peptide sequence, MTARFLICLFQTTMYAEFNLGQRRWQTRNAPNLSGWLGLAGAAPW, Run with SignalP
  misc_feature (232)...(287): similar to gi1785641 in the genepept database release 114, Run with FASTXY 3.3t00, default parameters
cgaccatgactgcgaggtttcttatttgtctctttcaaaccaccatgtatgcagaattcaatttggggcaaagaagatggcaaacaaggaatgcacccaacctttctggctggttggggctggcaggggctgctccctggcaggggagaatcagccccatgctagggaccaaggtatccctgtgtaacttgtctgaagagtccttagctccattggccaagcatactcccagggcctagcctggggcatggaacactgtgggtgcctaatcaatgtttgttgtgtgaatgaatgactaaaaggagagcagaagtgttgcctcagttcgggagctgggggtgcacctctcccccagggctcctgggtggcagtcacttaaatcttgtctggccccgtcctgcccagcctcccctaggcttcagcagggctgaatggcagtgtaatgggaacaggcggagagctggcgctaacaattggaacatctccggtcagccggggcccattgtggnctcttcctgcctctgctgcccgctagctttgctactctttgtgttgctgcctcccaggtggccagcgtcatgcccatagtgtgtctttctggcctgctctggggtctcagaaatggcctggaaatgttttgctgattattaggctc

SEQ ID NO: 81862 - DNA, 655 bp, Homo sapiens
  sig_peptide (352)...(217): this location contains the signal peptide sequence, MFSPANLTCLLCWFSKNNPTIRTNIEHIKTEILCKLIRMKVLKSY, Run with SignalP
  misc_feature (299)...(217): similar to gi5104175 in the genepept database release 114, Run with FASTXY 3.3t00, default parameters
agtaacccagccccccagatagcaaaaatcacattatagtttgtcctgctgaaatttttgtgaacatttcataaagttaacaggttttatatcctgttactaagggtattttgtcgattgagtaaaagtgagtgtttttcactttgagtctaaatcactcagttttaagtagtgtccccttaatttctgattactgtgtgatgtaaagaatataccagtatgatttcaagactttcatgcgtatcaatttacatagaatctctgtttttatgtgttctatattggttctgatagtaggattatttttactgaaccagcagaggagacaggtcagatttgctggtgaaaacattcttgagacaggagcttagctattcttttctagcaagaaagcagtccttcaagaagagtgtcttaaaataaatattttgatgtgtttttgtcaatgaaaatgtatctcaaatttgcaaaaggactctttcaagttgtcaaatctgaaaattatttttccctttaataatcgataattttgcttgaaaggaacttccttcataactacccaccattgtaatgtacatgttaagattcctttcacacttttggacaatctgataagtaccgctacaatctcattagaaaataattgacaagcagg

SEQ ID NO: 81863 - DNA, 334 bp, Homo sapiens
  sig_peptide (47)...(182): this location contains the signal peptide sequence, MSLSYGVIYFPCSLLFLINKEILIGGFAESPHHVSLKCNQFPKIC, Run with SignalP
  misc_feature (140)...(279): similar to gi1296429 in the genepept database release 114, Run with FASTXY 3.3t00, default parameters
ggaaactccagataattaatgatccttgtgaaatggtttctgattaatgagcctgagctatggagtgatttattttccctgctccctgctctttttaatcaataaagagattctgattggaggatttgctgagagcccacatcatgtaagtctcaagtgtaatcagtttcccaagatttgccctttttctccatattcagctctacctggcgaccacttaccagcctcctgcggtgggccagcccctgtgacacactaccaggagtgcaaagatgggtgagtgggagtggaaaggtggtgccagcatacacgttctctacatctgctatatcac

SEQ ID NO: 81864 - DNA, 336 bp, Homo sapiens
  sig_peptide (114)...(249): this location contains the signal peptide sequence, MGKTWALKLGLTMVGGIWPCLPFLLSSGVVGRKDKAGGNYRPLSG, Run with SignalP
  misc_feature (210)...(318): similar to gi396380 in the genepept database release 114, Run with FASTXY 3.3t00, default parameters
ggggggcattttgatctggaacaagtggggaaacagattcctgttggaaaatgctatgaatcatttgtgggcaccacctggtgccaaactttggcccccgttctgagaaccatatggggaaaacctgggcactcaagttgggcctgactatggtaggtggtatttggccctgcctacccttcctcctcagcagtggggtggtagggagaaaagacaaagctgggggaaactacagaccactttcggggggatgggaggatgacactgtcatcctggaaagcaagcgtatgacatgggccggcgcacgccagaaacctatgcttgctttctgactgg

SEQ ID NO: 81865 - DNA, 882 bp, Homo sapiens
  sig_peptide (176)...(311): this location contains the signal peptide sequence, MPKSWLNLLRLWVLVRFIMRSQTGAFLMLSPNILHQDVFPENSDL, Run with SignalP
  misc_feature (301)...(397): similar to gi2815734 in the genepept database release 114, Run with FASTXY 3.3t00, default parameters
ccccccaatcgtagaccactagattagagtggcggaattcggagattggaacgggtgtcaagcactgtccattgctggagacttcctggatggtgaccagggatgccaggcagctgctgccacagcaccgtcccacccttctgagtagcatggagcagctggagagctgtgtgccatgcccaagagttggttgaatctgttgaggttgtgggttttggttcgttttatcatgcgttctcaaacaggggcgtttctaatgctttctcccaacattctccatcaagatgtgttccctgaaaactcagatctgccacctttagcacctactcaaacttctacctggtcagctgtgggcagttcccccctttctgggcactgcctcctcctttcttcctccctacccccaggactcagacaaggagacaaggaattggctgacaggcactgctgtgtggtcggttgcctgttatacacttaaacttccttaaggacagaaaagcacatatgctgttccccattatgctccttgggctggctcccaactctgcaggtggtcactctgtggcgtaacgatgactttccctctgtgggatgtctttgccttgggcactgcactcatccccctagcagggaaatatgggctctaccttgctgggacattgggaggttgaacagggaaatgtgagaatgcgggaggctcagttcctggcctgtagtgatgactcaccttttgcaccactggggaacacttgctgatgagcctccacagcccggcctcagcatcagtccctgtgtgcagcagctcaggggacaattccgagctggagctcggggtcactgaggagctttaaagctggtgggtgttgtgcccggacgcgtggg

SEQ ID NO: 81866 - DNA, 745 bp, Homo sapiens
  sig_peptide (277)...(412): this location contains the signal peptide sequence, MLVIKLLPLGSKSTLLHLLWDAGSRTLVSIFLHCQLARCQVLLTG, Run with SignalP
  misc_feature (506)...(537): similar to gi6013459 in the genepept database release 114, Run with FASTXY 3.3t00, default parameters
ccggggtaattccttcttgactactgataataaggagatgagatcacggttatcaggacctatgaacttggagaaaagtctttaaccaccgagttaagttccctctaattctctttatcaagaactttgattcagaaccaggccagaaagaaaaaaggtcttattcattgattccctaaaatccaagcatgaccagtgttagaccagaaagtgaagaccagggttttccgctggacctaagtttcagcagccttgtctaaggaaggtggttactaaatgctggttattaagctattgcctctaggatctaaatctacccttttgcacttgctttgggatgctggatccaggactctggtaagcatatttctccattgccagcttgctcgctgtcaggttctgctgacagggatgttggagagagactggaaggcaagagaaggaagaactgtccttcctatcagctggctactcctggcaataggcccaggaatggtccttcatcctagcagcaggttgtcccactcaccagcttcttttaacgccctcataacatgcctcatgacacctcctcagaaggaccgtgtgagtgaggcagcacccactctacagagatctgagctctgcagggcccctccgtgataaacagaatcagtcagagggggacttaactcggaggctgaggacttttctccaaggttggagggcccggtaaccctgacattcttaacccttttatgggcct

SEQ ID NO: 81867 - DNA, 444 bp, Homo sapiens
  sig_peptide (157)...(292): this location contains the signal peptide sequence, MCAMLLFWFVAYDQTLLSSTTCVGLPSFPGEFTSSWQNALCVGGV, Run with SignalP
  misc_feature (182)...(275): similar to gi332793 in the genepept database release 114, Run with FASTXY 3.3t00, default parameters
ggaactcctttaaaataaatgagtgaatgaataaatgaattgatgaaaaatatcaaatgagtaaaatgaaactactgagacaattcaaatatgaaatgcacttgtgtgtgttcccagggaggaccctgttaggaatgtcagactgttgtttccttgatgtgcgcaatgcttcttttctggtttgttgcttatgaccaaaccctgctcagttctacaacctgtgttggcctcccatcttttccaggtgaattcacctcatcctggcagaatgccctctgtgtgggaggggtcttgcaagctgactcagtgccacaggggccaccctggtcatggaaaatgggcaggcactcttccctgttggaggtgaggcagcctgctcccaacccaaccacctgccacagctgtttgcccttcaggcttctcaagcctgattctgacagtagg

SEQ ID NO: 81868 - DNA, 743 bp, Homo sapiens
  sig_peptide (19)...(154): this location contains the signal peptide sequence, MANPERWTDLVGLVIRLLLMKICLPNLPSSKSDILPELNLIALTA, Run with SignalP
  misc_feature (313)...(266): similar to gi1786150 in the genepept database release 114, Run with FASTXY 3.3t00, default parameters
ctgtggtttaattccacaatggcaaacccagagagatggaccgacctagttggcctggtgatcaggttgctactaatgaagatctgcctgccaaacctgccttcctcgaaatctgatatcttgcctgaattaaatctaattgccttaacagcattcagtcagcattgccatgatgtgtcaaaggatgattgggtggccaaaattgatattagtttctttagtttttcatctttaggcagataaagacaatatcatacataaggcttggaagtgttccacagaataccgtagttataaagaagttaagcatttgtctcctggtaacaaattcaaactatgttgagtcatctggcttgttggttttttcttcaacaaccacctgagcacaattgttaacaaactttcaaatcaatgcctaaaattgaaagttgtttcttcatcttttcataaaagtgaaaattcttactttttacaacagatgtaaaaactaatgaaacatttggaatttttaacttccttgtttcttcatcttgtagttttgaatactttgcatgataaaagttggtgtataatgtgtcttttatcactggtagaatctagttgacctttacaatttttatgtattaaatattcttattttattactcattattaacaatttcttttaaaattcttcattctagatagtgatcatttatttcactttcttttgatctctcttatgtggttggccattttaacat

SEQ ID NO: 81869 - DNA, 1477 bp, Homo sapiens
  sig_peptide (709)...(844): this location contains the signal peptide sequence, MMCRCMCACVCAPVCVHMHGLAPAPAIWIEQFWVENFFSPFLKVS, Run with SignalP
  misc_feature (702)...(778): similar to gi1333929 in the genepept database release 114, Run with FASTXY 3.3t00, default parameters
cccacgcgtccgagaacatctcttggcactctctgctccaatactatgaataatgaagctcattactttatccctgccaagggcaattcagttcaaccaacattgattaggtgccttctttttgtgttcttagttctttagggagaactaagaacttctccctatttgacataaaaaaagaaggtaaaactctatctctggaattcgtcatattccaaatattgtcccatgtagcttctactcatggtagctctgtttgataaggaatgtacattttcaatgattccagatatatcggcaaaattatggcttttcacatttctagacatttcttctttcttacttgggtccctaattattaggttccaagacaagtcaactaaaagagaaatttgaaagagtcagatggtttatataactcttaaaatccgtattggtggattaagccattcctgatattggaccttattgtcttcacccgcacaatgagagtggagtacaatgcactattgaaagtctccttgtatcctgaaattctgtgtttatgtctttaaatactgttggagccctgatatttgatgattagatgattcaaaaaagaggggggaaaacaagtattatttaggtcacatgtttggagagatggaaagtcttaatttattgtttaagtcaacatcatgacaaatacccagctctacagggtttactatgatgtgcaggtgtatgtgtgcctgtgtgtgtgcgcctgtgtgtgtgcacatgcatgggcttgcccccgcccctgcaatttggatagagcaattttgggttgagaattttttttcccctttcttaaaagtcagtttctattcacttcctgtttgtattgagaaatcatcaatatgatttattgtcattatgtccctttgaatgactataattttggtttcctttgccttaaattaaaacccctaagagataatttattttcaaaattaaatatgtctgtgtatgcaaaagatgattaaatacacccacatacatatttagtggttttttaaagggtcttggcatttgctacttaagataccttttatttttttcttacattggcaacattggcacatatttctgctgtaaatatacttaaataggaaggcttcctaggataccctaaaatttaaacgaaacatacttttaataatggaggggaacattggcgttgcctttccctgggtaaggatttaatggcttagcttttttccaggggccgagggccaactttttgtcgtttcatggggttccctaaccaagtaaagatatctgggctttttccttttgagataaacttctgggtcataacattgtatggccttctcatatgcgtccctctcgtccagtgtgttgtcgtatctttctgagcactctgcgcttttccacaacgtacgcgatcaccggacacattttattccgtatctcttctcactgtccttgccct

SEQ ID NO: 81870 - DNA, 429 bp, Homo sapiens
  sig_peptide (256)...(391): this location contains the signal peptide sequence, MAVPIMLFYFSLLYKSLAFFESYSFAEYHPPTSGRQGCVKDILKR, Run with SignalP
  misc_feature (214)...(316): similar to gi2688771 in the genepept database release 114, Run with FASTXY 3.3t00, default parameters
ggtgaacattttctgagcttctttctagctcttacatgctgtggttctgcgaattctttgccttctcaaagatttcagaaaattaactctcattgagtggcattttctgactccgggaataaagcattttttttctaagattgttttcttaaaattagaagactgatgttgtattattaaaaacaaccaactcaccatgcttcagggtagagattcttttgtctattgctaatggaggatgttagagagaaggtcatggctgtacctattatgctgttctatttcagcctactctataaatctctggctttttttgaatcctattcttttgctgagtaccacccacctacttctgggagacaaggctgtgtgaaagacatcctcaaacgtctcatctggtttctcatccatctgcacctggatgctggg

SEQ ID NO: 81871 - DNA, 462 bp, Homo sapiens
  misc_feature (1)...(462): n = a,t,c or g
  sig_peptide (108)...(243): this location contains the signal peptide sequence, MTSLVSLWKTTLCCGELLGLKSTAEKEPAFLICVQGEAHYKCPGP, Run with SignalP
  misc_feature (125)...(263): similar to gi4757225 in the genepept database release 114, Run with FASTXY 3.3t00, default parameters
nttgaatcgttgcacctcanacgccagcttggcncgagggtaggtcctaggaggaaagtcattcccacagcagattgcaaggcaaactcacctggcagggagaagagatgaccagcttggtttccttgtggaaaactactctttgctgtggagagttgctgggattaaaaagtactgcagaaaaggagcctgcatttctgatctgtgttcagggagaagcccactacaagtgcccagggccattagcggggcagagccatcctggtgggtaacacagcagcacagcatcatgtgtgagctacacccctccccccaggcacatcgcagccttgaccttggggctccatgaaacagcttaagaccctggattcactttgagcaatagaagccacacaattacagctttggttttgttttgttttggtttcccccttcttcttcaaattggccatgcacacacat

SEQ ID NO: 81872 - DNA, 388 bp, Homo sapiens
  sig_peptide (212)...(347): this location contains the signal peptide sequence, MTTSFIFLQTFSGCGCTKMYPIILCPKMESYKVYCYFYGSITCHI, Run with SignalP
  misc_feature (72)...(133): similar to gi554399 in the genepept database release 114, Run with FASTXY 3.3t00, default parameters
cagcaactgtcctgaagagaccaaaattatgcacatttagggaagtccatggctaatgttattatattatgtgctattgtaatggatggggctgcggagtgtatgaatttataaatcactggtcttgtaattaaaattcaaacactatagaaaaaggccatgtagaagataaaagttcctctataatcccggacccctaagataactactaatgacaacttcatttatattccttcagacattttctggctgtggatgtactaaaatgtatcctattattctctgccctaaaatggaatcatacaaggtgtactgttatttttatggctctataacatgtcatattgtacgcgttggtatggccattttaaccattttctagtgaggg

SEQ ID NO: 81873 - DNA, 390 bp, Homo sapiens
  sig_peptide (84)...(219): this location contains the signal peptide sequence, MGGVHILMLRAASGLFLIGIWSSSVFTEEDKNSCFCRKKESLNLN, Run with SignalP
  misc_feature (348)...(144): similar to gi406349 in the genepept database release 114, Run with FASTXY 3.3t00, default parameters
ggcacgagagccagagggctttcacaatatgacatagtctggatttaacaactggggagagaagggctatgtgaaccacatccatggggggtgtgcacatcttaatgctgagagcagcatctggactctttcttattggaatctggagtagttccgtgttcacagaggaagacaaaaacagttgcttctgtagaaagaaagagtctctgaatctcaactctaagaggcccaaaaattcacctgtatttttcagggaaatggagaatatagatagcattacgcttttttgtttgttagttgggtggtttgaaaacaaagactcattttggacccacgctggaggcaatggacaatctttggttaaagaaccctcccttccaaggtaaggga

SEQ ID NO: 81874 - DNA, 734 bp, Homo sapiens
  sig_peptide (297)...(432): this location contains the signal peptide sequence, MRHGGCVMFEVWALLALLSKLGKGPPFFTAGKASAWAPQVVEQSM, Run with SignalP
  misc_feature (438)...(370): similar to gi504506 in the genepept database release 114, Run with FASTXY 3.3t00, default parameters
cgtcgcggaattccttagctgaattaagacagaaaccaatgttattcttcattttaacattaagttactttgcacatggtccggtgactggaaatatagcaacactgctgtaatatgtcagtgagaaaatgaaattggctgcaaagaaaatggaaacattagattaaacaagcccccgtgaaaatcattaggacaatgaagctgtctagtgggtattaagtaataatcatagtagtagatcagggctgctgctggcccattggggatctttatgcaaaatagaaaacactgtgggcatgaggcatggtgggtgcgtgatgtttgaggtgtgggcacttcttgctcttttgagtaaattaggaaaaggcccccccttctttacggcaggtaaagccagtgcctgggcaccacaggtcgttgaacagagcatgggctggatttgagccctcacaggccacctccctccctcctcctgagctggctgccttgtgcatggacaacctttacagctgaactaaaggagtcccgtcagcaagaagagtgttgaatgctgaattatagctttgtcttctaggaaaatatttcgttctttttttcttttccttccaggaaggagggagctgacagaacttgagagagattaaatcttttcctctactaatcctagctgcattcctttactcatttggttctgatttttttttctggccttgaaggataggccatagggttta

SEQ ID NO: 81875 - DNA, 490 bp, Homo sapiens
  sig_peptide (320)...(455): this location contains the signal peptide sequence, MLIVQGWYCCNIILTSLPSANAKALLRLLSKDLLEPFLSFCFKHF, Run with SignalP
  misc_feature (95)...(156): similar to gi236026 in the genepept database release 114, Run with FASTXY 3.3t00, default parameters
gcccgtgtggaggaattcgtgacagcgatgtcatgcgggtatgtggctagcgcagctgtatagtaccattgactaaggtgaagaagatttgaaggtgcgggttggaggatcagattatcagttctgttttggacatgtttggaatttgagatggagatattgattatagacagttggatatgttggcctggagctctagagaatggtctagaggaaagatattaatttgggaatcatcaggtaattaatggtgattgaagcaaaagggactggcttcagtgatttgaggaggagggccggggaggaggctcagtagtgcatgttgattgtccagggttggtactgctgtaatattattttgacatccctcccttctgctaatgcaaaggctttattgagactactcagtaaggatctccttgagccatttcttagcttttgttttaaacacttcatttggacagtcttacatgggatgtcaacataaaac

SEQ ID NO: 81876 - DNA, 717 bp, Homo sapiens
  misc_feature (1)...(717): n = a,t,c or g
  sig_peptide (56)...(191): this location contains the signal peptide sequence, MLRLAGTRVPLLGWAVLLWLGLVSVLPPWVGVTRVQPGFAFSTVT, Run with SignalP
  misc_feature (88)...(220): similar to gi1549349 in the genepept database release 114, Run with FASTXY 3.3t00, default parameters
cgcgcgtaattccgcctttaagtgtattgaggaccccagagcggcgtagcccgagatgctgaggcttgctgggactcgggtcccactgctaggctgggcggttctcctctggctggggctggtctcagtgctccctccatgggtgggcgtcacccgagttcaacccggttttgctttttccactgtgacggcagcactgagttcaatgcacatctcaggtgccgcgcccgccctcccacagctgctcagatcctacccgtgccgtgtggctgctgccagggggtggagagtgtcgtcagcaattcaaagccgtctttcctaccctcttcagtgcctctttcagcaaaacgaagttaaaaccaggtactgcgattgcttacctgatttttggttcttatgaaggtgcttttttgtacagatagttgtcaaatttagtgtttctgggtggtggggggaactatcagtggaggcttctatttcgccctctcactctgcacagcctctgctgcattttctttctactgattttcatttttctttttttccttttgatatcttatctctcccttattttgnggtgncttgaggcatccttgggtaaacacaagatcaataccatggatttttaanacttttctttggcacagggatatcatgtctggcccgttggagtacagtctcgcgtcggcccctgacagcctacactggcagttagac

SEQ ID NO: 81877 - DNA, 441 bp, Homo sapiens
  sig_peptide (95)...(230): this location contains the signal peptide sequence, MHFSPRHSLWGRWVKWVCPCHQLVTLTLRVHCPLAVLRTSVHHGS, Run with SignalP
  misc_feature (414)...(306): similar to gi1621209 in the genepept database release 114, Run with FASTXY 3.3t00, default parameters
cactgtggtggaattcaaaaaaccaagaaaagctggagaggaatgggctctgttgtggttcaagcctggatgtgagttctgagaacagtcaagaatgcatttctctccaaggcattcactgtgggggaggtgggtcaaatgggtttgcccttgtcaccagctggtgaccttgactctcagagtacattgccctttggcagttctcagaacctctgtgcaccatggctcaggccttcttgaagccaacacttaaggaatggaccctctggggcccacctccttccagccctgccttataagaccccagggacctggcacctgcaaccatagcaggaggcaggagccagcgttcctcaggattcaggacctctgagtgggacaaatggggcttgggaactgccactttccctgcccagtggccatacgggttatgcagctgag

SEQ ID NO: 81878 - DNA, 775 bp, Homo sapiens
  sig_peptide (745)...(610): this location contains the signal peptide sequence, MSPVAFLVVQVVFCPAFPTLFLILPSKLFCSLCLNTFQSWELCCR, Run with SignalP
  misc_feature (268)...(386): similar to gi3695398 in the genepept database release 114, Run with FASTXY 3.3t00, default parameters
tctggtactagctcaggtggccaaggggtttcaggagagggtctggacttccccacatcctgctttcatcagctctaagactaggtggtgacatctgcttctcaataaccttcaccaggcttgctgtgaaggtcacctgagataagagacgtgaaaggatgctgaagatgcaaaagcctaagccaggcagccctgcttggcctggcctcctggaaaggggcaatgccccagcccagcacacaaccagggcctcatgatgacaattctgcaaaactggtccttggctcgtcctcccttgccaggatgagactgtgcaaagccccacccacaggcagctgctccaggtgtcgtttaagggctccaaattccttccaactaaaagtatctttccatccctgttggtatagtggttaggggaaaaaaaattaaaagaaaatgaacaatgtattttccacgtcaagatgcctgaacttcccataacagctgtcactttaagaagccataagagaaagggccaggtctccataggtcattattcttaccaggcggggtcaacttcctctattaacacccatgcacgtatcagaagctacccatgaaaggccaagggcctacagcaaagctcccatgactggaaagtatttaagcataaggaacagaatagtttcgagggaaggataagaaagagagtcgggaaggctgggcagaacactacttggacaactaaaaaagcaactggggacatctcaaagagtgggctggcgtcgacgcgaac

SEQ ID NO: 81879 - DNA, 1280 bp, Homo sapiens
  sig_peptide (107)...(242): this location contains the signal peptide sequence, MVSASGTSFFKGMLLGSISWVLITMFGQIHIRHRGQTQDHEHHHL, Run with SignalP
  misc_feature (260)...(328): similar to gi607220 in the genepept database release 114, Run with FASTXY 3.3t00, default parameters
gcggtggaattccgggagcgcagccgccagctccggaaggcgcgggaccccaggacccggtcccaggctgcctttgaccctggcgcactgtcctaacgcctggaaaatggtttccgctagtgggacatcattttttaagggtatgttgcttgggagcatttcctgggttttgataactatgtttggccaaattcacattcgacacagaggtcagactcaagaccacgagcaccatcaccttcgtccacctaacaggaacgatttcttaaacacttcaaaagtgatactcttggagctcagtaaaagtattcgtgttttctgtatcatctttggagaatccgaagatgagagttactgggctgtactgaaagagacctggaccaaacactgtgacaaagcagagctctacgatactaaaaatgataatttgttcaatatagaaagtaatgacaggtgggtacagatgaggaccgcttacaaatacgtctttgaaaagaatggcgacaactacaactggttcttccttgcacttcccactacgtttgctgtcattgaaaatttaaagtaccttttgtttacaagggatgcatcccagcccttctatctgggccacactgttatatttggagacctcgaatacgtgactgtggaaggagggattgtcttaagcagagagttgatgaaaagacttaacagacttctcgataactctgagacctgtgcagatcaaagtgtgatttggaagttatctgaagataagcagctggcaatatgcctgaaatatgcaggagttcatgcagaaaatgcagaggattatgaaggaagagatgtatttaatacaaaaccaatcgcacagcttattgaagaggcattgtctaataaccctcagcaagtagtagaaggctgctgttcagatatggctattactttcaatggactgaccccccaaaagatggaagtaatgatgtatggcctgtaccggctcagggcatttggacactatttcaatgacacactcgttttcttgcctccagttggttcagaaaatgactgaggcctggagaataatagacctgtgctgtccaagagcacttgaaatgtggctagtccaaattctgatacagtgtaagtgtaaaatacgtacttcattcaataattcatatattattagaaaacagtatgaagatgtaaaacatctcagtaatatttcatattgactccacattgaaataatgttttggatattttgcattaaataaaatatactattaaaattaaaa

SEQ ID NO: 81880 - DNA, 882 bp, Homo sapiens
  sig_peptide (412)...(547): this location contains the signal peptide sequence, MAVKNVALVITWAYGFVKVTLSLLVFCVYCMYVILHLRMYITHKG, Run with SignalP
  misc_feature (442)...(604): similar to gi262249 in the genepept database release 114, Run with FASTXY 3.3t00, default parameters
ggaattcttttgggaataggtaattatagtcacatggtttaaaattcaaaagttacaaggggatataaatgtctccctcccaccttgtccccagaggtggctgtttcgatcagagccttgtttctagacgtgtgtgtgtgtatgtgtacgcatgtgtgtgtatgcacaagtagttttgggttctcttttcttggtggtgtacagaagggtagtcaaagcccgactcatgatccctaactcgagtcttttaatgggattgtgtcctaactgcaaaacccgcctcaccaactttgttataaactccccgggtttatagggacagtcatctactgtcccttcctaacagcatggtgcagaaacactccataaatgagtcttgtgttgaatcagattgaattaagtgagaaaggaatggcggtgaaaaatgtggctttagtcatcacatgggcctacgggtttgtgaaagtaacattgagtctccttgtgttctgtgtgtactgcatgtatgtcatcttgcatctaaggatgtatattacccataaaggagcatgcagacacatgagtgcatcttggcttgccactaactgcctgtggccttggggctgtcactcaacttttcatctggaaattgagaataataatactattatccttctggaattgtgtgcataaatgcacagggcctggctcataaaaagtactcagtgagggccaggcgcggtggcgcacgcctgtaatcccagcactttgggaggccgaggggtgcagattacgaggtcaagagatcgagaccatcctggctaacacggtgaaaccctgtctctactaaaaatacaaaaacaaaattagccgggcatggttgcggtgtgcctgtagtcccag

SEQ ID NO: 81881 - DNA, 2290 bp, Homo sapiens
  sig_peptide (413)...(548): this location contains the signal peptide sequence, MQCPPPFLGQWLLCPAARQWGPGAGSPGPVLVPAGRRRPPPRSGP, Run with SignalP
  misc_feature (670)...(303): similar to gi780241 in the genepept database release 114, Run with FASTXY 3.3t00, default parameters
ttttttttttttctaatttaattctttatcattcaagtagagagacaggcattttccaaagcaaacccaaccctcgtgattatttctagccagggtgaagctaaggaaggtagcagtaggtggtaggatcagcaccttggttccaggcatcacgccagtcattttatttccatcatcatccttgtgaagaaatggaagtctggagaggtgaaatgatgaaggcaatctggccacaaatcttccttctggatcctgctcttcagggcatgcatctcccatgctgaaggttaaaatgggggtcatttgccaacaaatttgggagtccgcttctccctgaaggctgccatgccctctagccggtcccgggttggaatattctgggcatagcacatcccttcaatggccatcccagatgcaatgtccacctccgttcctcggtcaatggctactttgcccagccgcacggcaatgggggcctggggcaggatctcctgggccagtgctcgtgcccgctggtaggcggcgtccccctcctcgttctgggccacagcgtgattcaccagccccagtacgtgggcctcagttccactcagtcgtcggcccgtgaagatgagctccttcgccagggccacccccagacaacggggcagcctctgagtccctcctaccaggatggagggagcagggtgggaatcagcatgggaagtgggaacccagagaaggctcagcctgggactcagccaagacttctcagaggagcagggttcaggtgggagggcagagcccagaacagagggcaaaaaaggaaagcagcgaaggaccctggatggggtggaattgggcgggtgctgtagttgcgattacctgcccccgggaggagccctcgcgtggtctcaatcagtcccatgactgccgaggaagctgctcagatagaacaaagtgaggcctccctcccccatccggtcccccagtgctaatcccgggggccacagctgcctctgctgtctactcgcccctctagccacttgccccatggtctggccacagccaggcctctccagactctgcctttggaagagccctagcccagaagtcaggagcccaggcccttatttcaccatgcccctttgatggagttgtaagtcaccagcaagtctcacccttcccaagcctcaaaggtggaagaaagatggctggccctcttctgtctgcttcagagagccgctaaggatcacacgaggtacgacgcttggaacaaggagagttcctaggaggtgccccatatctatttgtggattactattaataggttctctggcttagccctggcctggcctagaatgtcagtgactcctgctcctgctacagtcgtccgttccagctttgtcacagcctgaaattgccctgactgttccagtccatgtcctcctgagttctgcttccttccttcgagaaacttgccttgactgacgcacccccccgggtctgtctccttttctgaattccctcagcatggaccatgtgaacgtgggcagaagggagtgggttttacattcactccgtcttagtcttccccaaaaccctgtgagttagttgcgtgaacgtgggcatgtgagaaggagagttggggctagaccagcctggtattttggtgcctggacacctggtcagttccttctctttgacctgcattgtgtagacagaagctactttcatgcctggagctacacatttttatatgttgctcctggggtggcaggagagagcggtggggggagaagggaagacattcagactttgcctaactgcatccaagaaggctgctcctaatcaccaggtcagtcacctgagaaaatgatcagttatcttctttatcccctcccattcttcaaacaaagctcaattgctcagaacaagtaatgcaaatttggctggtgccagtattcctgcccaggcacctttgtgattagctcagccattgacaaactatccctgaggctcacctttttccgaaacatggtcgataaatctgacttggacagaatgggaagactggacattgctctttgacctccttggctcgtaacagcaattgctttgaggttggtcaaatattcccaagaatgaaggaagcaggttctgacaggtcacagatactacagcagctaatggctgcaccaggaggggaagcagcttctgcctgagcaccctctgtgctctgccttgccttagttttgcttttggttggaagccaagaacagtggctgactgcagaatgtccagactcacc

SEQ ID NO: 81882 - DNA, 483 bp, Homo sapiens
  misc_feature (1)...(483): n = a,t,c or g
  sig_peptide (211)...(346): this location contains the signal peptide sequence, MPLPAYLSLWVGGRVCADWPSNGGLGFGIGXXXXXXAAVQFKRPL, Run with SignalP
  misc_feature (218)...(122): similar to gi415478 in the genepept database release 114, Run with FASTXY 3.3t00, default parameters
gcggtggaattctgataaggcaagattttctgcttgggcctgttgcgggctacccaaaggctgtggactggggccaaggtacataggactttggcttgtcttttgagctaacaggatcctgtagaagaaatgagatgagcctgagagggggtcggggggtgagacattagggaagggagaggccaccaagggtctctagcccagaatccaatgccccttcctgcctacctgtccttgtgggtgggaggcagggtgtgtgctgactggcccagcaatggtgggctaggatttgggataggcnnnnnnnnnnnnnnnnnngcggccgttcaatttaaaaggcccctttaaaccccgttgatcaccctggatggggctttttagttgccacccttttgtggttggcccctcccccgggctttctttgaccttggagggggcccctcccattgtcttttcttaaaaaaaggaggaaatggcttcgcc

SEQ ID NO: 81883 - DNA, 765 bp, Homo sapiens
  sig_peptide (125)...(260): this location contains the signal peptide sequence, MSVWSPLTLLLCPFLCITDAAIASSPLIVTIKLGNLCNGLQSVAF, Run with SignalP
  misc_feature (499)...(556): similar to gi325484 in the genepept database release 114, Run with FASTXY 3.3t00, default parameters
cggacgcgtgggtttgtaagaacataaaatctcagcatttggcttgtttgttgctttgaatcttgtgaccttattctccactgaaagaagcttgttttgatgttaaatgttagatcacttaaaaatgtcagtgtggtctcccttaactctacttttgtgtcccttcctttgcatcactgatgctgccattgcctcttccccactgattgtgacaattaaattaggaaatctttgcaatggtctgcagtctgtggcattttactagtactagtaagaaggaagggtgcctcctccatacagtgaattatttcaggatattcagctcttattaacaatttaccttcttgcccttgagatatggtgggagtgaaaaaaactacggatactggagtggattcagagataagatagccacatgacattatccaggggaagaacatttatgtgctggtgcaggcatttgataggatatgtaaccttgtattatcccccccagataatactactgtgtatgggtctcctcctcctaaaggccatcccttctccatccccttccccgtcctcttcctcttcaactgaaagggaagatggccctctgcttccacaacacctagctgtccaacacgtcctatacccctcccgctattgccgggttctttgtcctctcccttacgcgccgacacagacataatccctttcttccccccccccccccccctttttttgtttcccccccccccccccccccccgccccccccataatt

SEQ ID NO: 81884 - DNA, 754 bp, Homo sapiens
  sig_peptide (103)...(238): this location contains the signal peptide sequence, MIFMRVLMLLCCMDSLGSLDTFQWLSRVLCPTENLIFELNGYELN, Run with SignalP
  misc_feature (274)...(153): similar to gi1246922 in the genepept database release 114, Run with FASTXY 3.3t00, default parameters
ctttataccctgtgctttaaggctgctgtgtgtcacctctagtgagcctgacttgtaccacattttggtctggtttgttgtgctagactagaattaacaaagatgatttttatgagagtgcttatgcttttgtgctgtatggacagtttggggtctttggatacattccagtggctatcaagagtattgtgtcctactgagaatttgatttttgagttgaatggatacgaattaaatagtacctggtttggttggcttaatacataatattgaattttattggctcacgtgaataaaactgaacacttcatgattacatgatggggaaacatgtgggggctttgtctctattgaaatatttttcttacgggtgcgattgaattttattctaggcaagagtgccctactctatcttaatggaagtatggtattcccagactctgagggctggcgtgaagcttacactatgtggtatggtggatgggactagccttatgcgggaagtctcattgctgggctcgccgtggtttattttgctcaaaccacaagaacgataccttagttgaaggatgtcatactaagactccttagcacagtgcgaagccgacactctctggttttgtttccgccaagagaataaaagctggaaggcccatggttggactgctgctggtgcgcgacgttaaccctccttccccccctttggaaccccccccccaaatttgaattaaagcccccccccatattcgccccc

SEQ ID NO: 81885 - DNA, 656 bp, Homo sapiens
  sig_peptide (460)...(595): this location contains the signal peptide sequence, MLTPFFFRILLKYHLISGTCPEYPYKIATTIPLYFLSHLSFCVLL, Run with SignalP
  misc_feature (277)...(414): similar to gi4388757 in the genepept database release 114, Run with FASTXY 3.3t00, default parameters
gcgttggaattcgcaattttctacagaggtaaccacagaatctctcccccccccctctttttttccctttttatccagacttttaatggggatgcaccatgccagaccgtggaagatttaacgaatggggttgtgatggcccaggttcttcaaaagatgtaagaataaattgcttatctttatgtgtattcttatgcatggatatttgttaggttgaaaacatggattaaaaaagtacttacatgaaacgtgtgtagagtaagagttgtaggcggcagcagcactagttttaatggaatgtacttattaggtatagattgggttgcaagtttaataagggctgtgattgtgttagatactctaatggttttagcagaattattcttgtattttttggcatatgcttggcagaaattttcttgttagtggccagattttgctgttacaggggtatctaagatgcttactccatttttctttaggattttgctgaaatatcatctcatcagtggcacctgccctgagtacccatataaaatagcaacgacaattcccttatactttctatcccacttaagcttttgtgttcttctttcaaggttgtgacaccatctgatataccatatatttggttggtcattcatctgccccaacag

SEQ ID NO: 81886 - DNA, 718 bp, Homo sapiens
  misc_feature (1)...(718): n = a,t,c or g
  sig_peptide (334)...(469): this location contains the signal peptide sequence, MKFQLFLSYVFITQVFSRPFQSNLGSLTPASSQIPLQLPKALCVR, Run with SignalP
  misc_feature (196)...(254): similar to gi575950 in the genepept database release 114, Run with FASTXY 3.3t00, default parameters
cccacgcgtccggagactgggctctggctctgttcggcctttgggtgtgtggtggattctccctgggcctcagtgtgcccatctgtaaaggggcagctgacagtttgtggcatcttgccaagggtccnnnnnnnnnnnnnnnnnnnnnnnnnnnnnnnnnnctccatgtgcgtccatatttaacatgtaaaaatgtcccccccgctccgtcccccaaacatgttgtacatttcaccatggccccctcatcatagcaataacattcccactgccaggggttcttgagccagccaggccctgccagtggggaaggaggccaagcagtgcctgcctatgaaatttcaacttttcctttcatacgtctttattacccaagtcttctcccgtccattccagtcaaatctgggctcactcaccccagcgagctctcaaatccctctccaactgcctaaagccctttgtgtaaggtgtcttaatactgtccnnnnnnnnnnnnaaacagggtttggaaaattccaaataactatccaaagccctgggggccccctggttttggcccggccctgggcctccaaatttccaagccccaaatttnnnnnnnnnnnnnnnnttcccaaaatggggggaaaaacctttgcatatggccgaataaaccccacccggcccgcaaaaaacnnnnnnnnnnnnnnnncatctttggcgtctctaaaccccaccg

SEQ ID NO: 81887 - DNA, 976 bp, Homo sapiens
  misc_feature (1)...(976): n = a,t,c or g
  sig_peptide (778)...(913): this location contains the signal peptide sequence, MFGVSGFCLLFTFLELVLLGLGRWWRTWKHKSSSSKYFLTSESTR, Run with SignalP
  misc_feature (196)...(914): similar to gi3006230 in the genepept database release 114, Run with FASTXY 3.3t00, default parameters
ctttttacatagatgatttcattaagtagtaaagaggtgcaatcagagtcttggtatttaatcagtcagatacttggagaggaataanaaagcttgccttcagtgatccttggattaggagtgacaaggtggactggagctccctctgaaggacagtgaacaacactgatctcttgtcctctgctccaaaacaggatgtgtggcaggttcctgcggcggctgctggcggaggagagccggcgctccacccccgtggggcgcctcttgcttcccgtgctcctgggattccgccttgtgctgctggctgccagtgggcctggagtctatggtgatgagcagagtgaattcgtgtgtcacacccagcagccgggctgcaaggctgcctgcttcgatgccttccaccccctctccccgctgcgtttctgggtcttccaggtcatcttggtggctgtacccagcgccctctatatgggtttcactctgtatcacgtgatctggcactgggaattatcaggaaaggggaaggaggaggagaccctgatccagggacgggagggcaacacagatgtcccaggggctggaagcctcaggctgctctgggcttatgtggctcagctgggggctcggcttgtcctggagggggcagccctggggttgcagtaccacctgtatgggttccagatgcccagctcctttgcatgtcgccgagaaccttgccttggtagtataacctgcaatctgtcccgcccctctgagaagaccattttcctaaagaccatgtttggagtcagcggtttctgtctcttgtttacttttttggagcttgtgcttctgggtttggggagatggtggaggacctggaagcacaaatcttcctcttctaaatacttcctaacttcagagagcaccagaagacacaagaaagcaaccgatagcctcccagtggtggaaaccaaagagcaatttcaagaagcag

SEQ ID NO: 81888 - DNA, 610 bp, Homo sapiens
  misc_feature (1)...(610): n = a,t,c or g
  sig_peptide (8)...(143): this location contains the signal peptide sequence, MATNSLLYFIKYFFSACCLYFDFDFNIIKFCFMDCGIRRPHPKLQ, Run with SignalP
  misc_feature (159)...(316): similar to gi304006 in the genepept database release 114, Run with FASTXY 3.3t00, default parameters
attgattatggctactaactctttgttatattttatcaaatattttttctcagcctgttgcttatattttgactttgattttaatattatcaagttttgctttatggattgtggtataagaagaccacacccaaaattacaagtatattttcctacatcttttcctactacttttaattttttttgaagttttgatctttaaacctcatgggatttatttgattatgtggtatgacataaagatcaaaccttttatttccggtaacacccacagtttcctcttatacattgtccattctgtttcccccatggcttgaaatatgacctttgtctaatgctatatcccgcctatatatgtctctgaattgctagggtttttttttgcagcgagcaacgcttcttttgcctaaacctgcaacacccaacctttttatcattatcacacaagagtccccctaaacttgtatcactacttaagacctgcgcaccatccccgccttcttatttttacgatctgctagggttaccttctcctccgggaaccgactcacctcgcctcaccatgcctcaccccgcctcgttccccttccccccccccccngggcggggc

SEQ ID NO: 81889 - DNA, 4710 bp, Homo sapiens; identical to SEQ ID NO: 81833
  sig_peptide (3740)...(3875): this location contains the signal peptide sequence, MYFFLLLLFFNVQRLAFPFGIPNDPMLWSEGQSHLCWRSPLIPSA, Run with SignalP
  misc_feature (146)...(2432): similar to gi35006 in the genepept database release 114, Run with FASTXY 3.3t00, default parameters

SEQ ID NO: 81890 - DNA, 382 bp, Homo sapiens
  misc_feature (1)...(382): n = a,t,c or g
  sig_peptide (32)...(167): this location contains the signal peptide sequence, MRHISALTYTIWRLEYISHYIGTYIALTMLITGGALLMWCDILER, Run with SignalP
  misc_feature (29)...(201): similar to gi4160365 in the genepept database release 114, Run with FASTXY 3.3t00, default parameters
acctgttatagattaagagcggccgttctatatgagacacatttctgcccttacctacaccatctggcgacttgaatatatctctcactatattgggacatacattgcgctaactatgttaataacaggaggcgccctattaatgtggtgtgacatattggaacgaacttactacgaatacacatggctttggagcaactataaaaacattgagtgcattatgagttatactacctgaagaagctagctgaatgaaagtttacattanattccacgttagatttggtttgaaaaactaaaatttcagatttctgaggatatactgacttatacttattgtacacacttagtttttattcacttgttttcactctgaatttta

SEQ ID NO: 81891 - DNA, 961 bp, Homo sapiens
  sig_peptide (662)...(527): this location contains the signal peptide sequence, MEGVWRHLLVSMTIPFSLFMCIAFSSSYSLLPYYFQGAFFCHLSA, Run with SignalP
  misc_feature (171)...(62): similar to gi3046698 in the genepept database release 114, Run with FASTXY 3.3t00, default parameters
cccacgcgtccgcccacgcgtccgggattcttcaggcatggggatttttcagtagctattaagaattctgtgtttgggagacatcaagaagttaaaaaaaattggaaatactataagaaaaaattttacataagctaaaaccactcttgtgacccactctgagcatacactaaaagagaccagggaatataatgcagatctcactgagtttattctttgccacccatcaaggaaaggagccattccacacataatgttcaggagacattcctcactcaggtttccactggttggacacatattcattttaagactgagtaactgcaaatgcttgcttaccagcttgatttgcatagctctgagttacatacgaatgggactcatggcaaagctatcattaaagagaaacaaagcagaagaccgaacaaaggatacattctgtgcaaagtttgaagttgagactgtttcagtgatccttgtcatggtaagaaagctgtccgccccttcccccacctaaaacagaatagcagacaagtgacaaaagaaggccccctggaagtaatatgggagcaaagagtaggatgaactaaaggctatacacatgaagagagagaaaggaattgtcatggacacaaggagatgccgccaaacaccctccattcatagcacggagatatgtgattaggttagaatcacttacctcttccccagtgcattaaagtaggaataggtcaggcctggagaaaggaatgacatcttgatgaaactcagctttctcagaggcctaacaaggatggcaatacagatagagctagaatcttctcactggcccttttgtatcaaattagtgaattcctgtatttccagactgaaatgttttccagtaagcaagagagaaaaggcttctggaggcagtggaaatgactttcgttcttctatgggtaagagtacatgggctttg

SEQ ID NO: 81892 - DNA, 1277 bp, Homo sapiens
  misc_feature (1)...(1277): n = a,t,c or g
  sig_peptide (187)...(52): this location contains the signal peptide sequence, MHTCQIYIYSTNVTFLFFVLDVRACSYVRYLHKLLHYFFLCNTFL, Run with SignalP
  misc_feature (267)...(139): similar to gi1154659 in the genepept database release 114, Run with FASTXY 3.3t00, default parameters
ttttttttttttagagtttaaggaaagaaatatatttgaaccacataaacaaacaaaaaggtattacataagaaaaaataatgtaacaatttatgtaagtacctaacatatgagcatgctcttacatctaaaacaaaaaataaaaaggtaacattggtactatatatatatatttgacaagtgtgcattaaagaattctctaatataaaacatttaaaatgtggagaatactttttcaagatacagaaaacaattgttatgataggcacacccacaattcttataacaacatgcttgcgaggataaaatccacctgagcactcatttctcagatgtaccaacgctagaaaagtgttaagcactgaatattgccacccacttttgcaatgtttgagtttcaacactgattggtatgaattctgaattacacaattaattactgttatttttcagtctttctgccatgttccatatagaaggcatgtatttaatatgaatacttaacacagcaacattatttgtagcaaagtcacttccctgtgttcatttttcctttaaaggcactatatttagaaaagttattacaacaaatagtgctttggaagatctgaaactccaaatcaatgtgctccatcaaccataagtagatctaagaagccctgactgaaaataacacaaatgtaaaaagttgataaatttaaagattataaaattggtttattgtaaaagcaattcaagaatacccagttaaaatcttatcccaatgctacccaatacaaccaagaagcagttaagcacttttacattaggaacaaggacataaaacaagagaccacatcaaggctatgattcaaactcaaaaagggaaaggactcttaggtctccttcaggtcagtacagagggcatcgtaagatcaaagcactgtgccaggtatcacagtactgctacaacactgaggtataactgggcaaattaaagttgaggggtaaaggaagatctccatattcatattgttttgtgggtgtacttaggtgactgaaactctagaacagctgcctttaatggcagcacggtgtaagacaagtctttattaaagagaaagaagtttataaagttctctatcaaggtccccctaaattttcacaacccccccccaaaactttcccaccctccccctaagctaaagctaatctgctgatatataagatataatcttaatctgtgcctcgtgccaagcttggcgtnntgntggtcaagacggtttcaaagtgtcaat

SEQ ID NO: 81893 - DNA, 1644 bp, Homo sapiens
  sig_peptide (15)...(150): this location contains the signal peptide sequence, MAAARCWRPLLRGPRLSLHTAANAAATATETTCQDVAATPVARYP, Run with SignalP
  misc_feature (15)...(1311): similar to gi2599492 in the genepept database release 114, Run with FASTXY 3.3t00, default parameters
aatcgcgggcaaagatggcggcggccaggtgttggaggcctttgctacgcggtccgaggctttcattgcacaccgcggctaatgccgccgccacggctacagaaacgacctgccaagacgtcgcggcgacccccgtcgcgcggtacccgccgattgtggcctccatgacagccgacagcaaagctgcacggctgcggcggatcgagcgctggcaggcgacggtgcacgctgcggagtcggtagacgagaagctgcgaatcctcaccaagatgcagtttatgaagtacatggtttacccgcagaccttcgcgctgaatgccgaccgctggtaccagtacttcaccaagaccgtgttcctgtcgggtctgccgccgcccccagcggagcccgagcccgagcccgaacccgaacctgaacctgcgctggacctcgcggcgctgcgtgcggtcgcctgcgactgcctgctgcaggagcacttctacctgcggcgcaggcggcgcgtgcaccgttacgaggagagcgaggtcatatctttgcccttcctggatcagctggtgtcaaccctcgtgggcctcctcagcccacacaacccggccctggccgctgccgccctcgattatagatgcccagttcatttttactgggtgcgtggtgaagaaattattcctcgtggtcatcgaagaggtcgaattgatgacttgcgataccagatagatgataaaccaaacaaccagattcgaatatccaagcaactcgcagagtttgtgccattggattattctgttcctatagaaatccccactataaaatgtaaaccagacaaacttccattattcaaacggcagtatgaaaaccacatatttgttggctcaaaaactgcagatccttgctgttacggtcacacccagtttcatctgttacctgacaaattaagaagggaaaggcttttgagacaaaactgtgctgatcagatagaagttgtttttagagctaatgctattgcaagcctttttgcttggactggagcacaagctatgtatcaaggattctggagtgaagcagatgttactcgaccttttgtctcccaggctgtgatcacagatggaaaatacttttcctttttctgctaccagctaaatactttggcactgactacacaagctgatcaaaataaccctcgtaaaaatatatgttggggtacacaaagtaagcctctttatgaaacaattgaggataatgatgtgaaaggttttaatgatgatgttctacttcagatagttcactttctactgaatagaccaaaagaagaaaaatcacagctgttggaaaactgaaaaagcatatttgattgagaactgtgggaatatttaaattttactgaaggaacaataatgatgagatttgtaactgtcaactattaaatacattgatttttgagacaaatatttcttatgtcaacctgttattagatctcttactctgctcaaattcatcactgaaagatttaattttagttaccttttgttgatttaaaaataattgcatttgtatattgctaactgataagacaaattgagttattgagctattaaatgcacattttaatataaatgcagaaatcccaaataaaatgctaacatactg

SEQ ID NO: 81894 - DNA, 402 bp, Homo sapiens
  sig_peptide (141)...(276): this location contains the signal peptide sequence, MFILLIKMSLGNYFIEDRHHKSIHVVNIWSFILVPWFFLGVVILN, Run with SignalP
  misc_feature (111)...(273): similar to gi336820 in the genepept database release 114, Run with FASTXY 3.3t00, default parameters
ccgcacgaggagagagagggggagagagagatagagagacagacagagagagaaagcatgagtaactaatacgagtcccacaatgtaaaaatagaatttgacaagccaacattcacttggcaaatactgcgcccttcctcatgttcatcttgctcataaaaatgtctttgggaaactattttattgaggataggcatcacaaatcaatccacgttgtaaacatttggagcttcatcttagttccttggttcttccttggagttgttattctaaacatcaatttggacatcttttcatatcttcttaagcaagtggcaaaccaacttctttggcagaattcgaaaagcaacttgtacgcaactctaagacagatgaatgtatacaaaactcatgcttcatctt

SEQ ID NO: 81895 - DNA, 659 bp, Homo sapiens
  sig_peptide (78)...(213): this location contains the signal peptide sequence, MRIWSRAVGDGPAAVCCPLRSWCLLLWALDSLDPAAVTTHASAML, Run with SignalP
  misc_feature (170)...(283): similar to gi1339 in the genepept database release 114, Run with FASTXY 3.3t00, default parameters
tttcgtggaggagtggcccgagcctctttgctgcctgacagccctgggctcactgtcctgcagccccaccagcagtgatgaggatctggagtagagctgtgggggatggccctgcagcagtctgttgtcccctgaggtcgtggtgcctcttgctctgggccctggattctctggatcctgcagcagtcaccactcatgcttctgctatgctttccggtgtcttcactcctccttttgtctctgccttgcctgtccagtggatgcaaatgcctgttctcagttttctgtctttaactgggagttctgtttatgtccacatggctctcctctcaggccaccagggaagtgacacctgcagtggtctgtagcctagcccatttgttagggagatgggctctgggtgtcactggctgacagaatggccacggccctggacttaagtctctctgcagggcctggaggggcgctaggctgccctgagatggcacagcccccgggaattgaacagttgggtcacaaaggaaacccatatgctgcagggttgctggccgctgtgggggattccactttgccccgttttcaaaaatcaataaccggggaaaaaatgggccattgccacctgagggaggggcccttcgcctttttttatctagaggcac

SEQ ID NO: 81896 - DNA, 1094 bp, Homo sapiens
  sig_peptide (680)...(815): this location contains the signal peptide sequence, MGLFAIHISSWLLRACFLIIENFESVLYISNTHPFIYMGLHRFFS, Run with SignalP
  misc_feature (188)...(108): similar to gi4029234 in the genepept database release 114, Run with FASTXY 3.3t00, default parameters
atcataatcaccataataaatacattatatatatatgcatcactccaaaaagttttcacatgtccctttgtaatacctccctcttctcctcccctcaacaatcacgctactggtttgtgtctttttgtagaatttaaatacatgaaattgttcatgcagtgtgatactttttttaaatcttaaatcttttctcagaataattcttttgagactcattcgtgtagtggaatgtaccaaatgtattatttttttattgtagagtggaatttattgtatgcatatatcataatgtgttttcatatttatctgttgatgaaaagtcgacttgtttttaatttttgctatcacaagtaaaacttctgaacacatttgtgtatgagtctgtatgtaggcacatactttcattttatttggtactaacaccaaggagtagaataattggatcttatggtaggtttatatttaactttttagaaaactgccacattattttccaaagttgttgttttttttcacattctcaacaccaatgcatgaagaagttcagttactctacatcctcattaatagttggtatggtcacatatttaaatttttgctctttttatagatcagggataatatctcatcagttttaaattgcatgtcacttataattaataatgttaagaatattttcatgggcttatttgccatccatatatcttcctggttattgcgtgcctgttttcttattattgaaaactttgagagtgtattatatatttcaaatacccatccatttatatatatgggattacacagatttttctcccagcccagcgtttggattttacttttcttaaccgggcctttaaataccaaaagctattatcattgatgcacttcatctcccccaccctaactttagtctctacttccttggccgacctactcaacgcatcagtttcaatcgactattcgctccgtgacacaaacgtcgctcttttactgtacgtggccagtcctctcagctcaatatagtgtcctaagtacctactctagtttcactgttcctatgcggccgccactatactctgtaccaccgcgtaact

SEQ ID NO: 81897 - DNA, 1103 bp, Homo sapiens
  sig_peptide (16)...(151): this location contains the signal peptide sequence, MLSISYFSNSLMLRLVPLAAYVLSYLICSVLLHINQTTVTTYRGR, Run with SignalP
  misc_feature (310)...(233): similar to gi860681 in the genepept database release 114, Run with FASTXY 3.3t00, default parameters
atttatattgcacttatgctatctatatcctatttctccaattctttaatgcttagacttgttcctttagcagcatatgtattatcttatttgatttgttcagtacttctacatattaaccagaccactgtcactacatatcggggaaggaaacaaagaaaaaagatacaatttgctaccggaaatcaccagtcagcacaaagctatagtgagctcttaagcctgtctctctctttttcttctcttctttcccctgtcttctctcttccttcttggtctcttccttccctccctcccttcttttctcactccccacaccagaaagggataatgatggtgcccagatcggtctagaaccctgataactatttcttgaaggatggcagaggctccagcccaacgtttacccaccctcttccccacccaagtggacgcacactgctcctaacataccaagtattacattcggtggcagttgcagtttggaaactacgcctacctagaaacattttgaaatgccaagttgttttaaacttgtatgattaattcaaataataacctttcactaataccatcagctcttgattgttcacaagccattctggaaggtgtgagcaccctgctcatcatccctccccccagccgcctctaggcactgtggctgctctgccagagggagggccttggaaaacaaagagctgcgacttcaaatcaatccattgttccacatgttatcagccctgaaaaaggctttgcggagaaaatagttgcaattccagtttaaaatatggttgggaaatacacggggatctatctatacgcttaccaatggctgattccttgcctgcagtcacggaggtaaaacacacaaggtggtgataaaaaaaaaatacaaagggcttgtgtttatatgcccaaaccttttattaatttaacgggcgactttatttacgtctcaacaagtcgtggaatctcttttataaattctctacaattctttttaagaaaaagaggggcttagacacctctgttgaaccccaacgtagcaaatcaatgggggcggcccttagagaccattctaacccggcgccgccggtatatct

SEQ ID NO: 81898 - DNA, 1276 bp, Homo sapiens
  sig_peptide (1203)...(1068): this location contains the signal peptide sequence, MSWWRNNFWIILAVAIIVVSVGLGLILYCVCKWQLRRGKKWEIAK, Run with SignalP
  misc_feature (400)...(321): similar to gi2108256 in the genepept database release 114, Run with FASTXY 3.3t00, default parameters
aaatgtatttttcctgtagcacccccaacacacctattgcaaaatgatgcttctaggtgtaaatcagaaggtaacttttgtcctttgtccattgttacagtacaacttgcaagcacggggagaaaacctaggtgaaaactcaaatctctatggtcaatttggcctacatcatataaaggcactggggtttgcagggtgtctaggtggggagggttcacgagaacaaaaggtactccctgcccttgcaaactcgcgagatgtggtgtgggaacctgggcacgagagcactcagctgtaactcacccacagcctcacagtgcaggaggtgggtggggtgagagggtaaagaccagcatgcttggtgagggccttgctggggatgggagcctgggagggtctgcacaaccaaatgctgagatttaatatcactcagaaccatgcaaaccaaagggaatgaagggggaaagaatgccaagaaatgagtagtttcccacaggtgggagccatggagccccgtggtccttcccatggaaaagtttccctccaaacagcacaaggctgacccctcctaagtcctcagagccgagcacccatgtgtctcctctggctgcagtcatccgatcgcaggggtgtcttcatttaaggtttgggaagtgctttatattatagagcttcataaaatccccactggctttcagggcccagagacctactgaagttcaaccattcttgattgttttaaaataagttgtgtgaaccctcttcagttttgccaaaaagaagaaatggctgtttcaaaatgatgctttttcagtatttgcagggatttcaacatcgtcatagtcatcttcaggctcaatgtagcttgggatggaaacagtcttcttatttttaactttatttaccagtgagtatgtagcgggcggctgacttggggcttcctgtggggaagagtcttctagagaaggccaattcctcggtggcagaggcggtaattgaactggcgactcattaagaacattctcatacatcttttcttcatctacttgcttgtgtttcaggggcttggcaatttcccatttcttgcctcgtctaagctgccacttacagacacagtacaggatgaggcccaggcccacagagacaacaatgatggccacagctaagatgatccagaaattattcctccaccagctcattgcagtggaatcctgaactgtgaaagtatccatatgtgagcagctaaggagacagcagtggctggagtgctgcagct

SEQ ID NO: 81899 - DNA, 417 bp, Homo sapiens
  sig_peptide (254)...(389): this location contains the signal peptide sequence, MGKNGIGGWGCRNHLPVVFKLLIKALGVLGVLLDGAGEGGVPACV, Run with SignalP
  misc_feature (388)...(310): similar to gi312036 in the genepept database release 114, Run with FASTXY 3.3t00, default parameters
acaaatcaacttctgacattgattgtaagggagtagttttccaacaaatgcaaaagattgcctagagagctggggtccgggctgtagactttatcagcagcaccatcttaggggtttgtagcctggatatgctgatggtttttcttatcttcttgagagacagaggaaggaaaggacagttgattgtaatagattagaagattagtggaaaagaaatggtcatttcttataaaacagtatgtgttcctatgtcatgggtaagaatggaatagggggatggggctgtagaaatcatctacctgtagttttcaaactgctcatcaaggccctaggtgttcttggggtactactggatggggctggggaaggaggagttccagcctgtgtgtcccccacgggcaacagtgtcagtgatgg

SEQ ID NO: 81900 - DNA, 390 bp, Homo sapiens
  sig_peptide (85)...(220): this location contains the signal peptide sequence, MLPLHGLVVCWMVWPPGRALLEKLNHKTPPSPKLLILILWFFKKQ, Run with SignalP
  misc_feature (341)...(245): similar to gi180816 in the genepept database release 114, Run with FASTXY 3.3t00, default parameters
ctgccccagcttccgcacttcagagttggttagaggccgccgggtagtgtcaggtgctgctgtatgtagtgagtggtgactggaatgcttcctttgcacggccttgttgtttgttggatggtgtggcctcctggtagggcacttctggaaaaactaaaccacaaaacacctcctagtcctaaacttttgattcttatactgtggttttttaaaaaacaaaacttcctcaaggtgcacccctctgggggctgcgtgtgggatgatgatgtttgtggcggccctgtgagccctgcactgccctcagctccaggttcttcgccatcagactttgagtctccagcctcatgaaagctttaaaatatagtttacttgcttaccatggcatttttg

SEQ ID NO: 81901 - DNA, 871 bp, Homo sapiens
  sig_peptide (226)...(361): this location contains the signal peptide sequence, MWRRHISLARTFLLLSSEVREVSLSFCLEVYMDCNCLIYLNLTFS, Run with SignalP
  misc_feature (168)...(89): similar to gi5616206 in the genepept database release 114, Run with FASTXY 3.3t00, default parameters
cattcatttcttaacaaagttgctttatacgttccataaaaagttttcatgaaaacattttacattagcatgttgtgtagtgggttttaagttataacaggtaattaacagatatttcggccaacgagacacacacacacatgaaaaaaataagtgaaaagacagaataaattgcaaaggttttacgagtggaccacaaagttaaggttaaacttctgtctttgcatgtggaggagacatattagtctagccagaactttccttttgcttagcagtgaggtcagagaagtatctctgtcattctgcttagaagtatacatggactgcaattgcttaatttacttaaacttaacattttcaatgggtttgctgtgtgaagatacagtctaagataagtgctttgacttgcctctgcagaggtcaacttatttctcatcacacacatttttcttatgtcatataagtaaaggaaagagtgaaacgttttatagaaaatattacagtggagttaagaacatctgcctcaaatgtacagtgcatttactttttaagttaatcatttagtagctacccttttaacctctactatgttcacagtattgcatttgctcttgtaaacaattttgttcccacctttacatagcgtatgacctactcagtgagaacattcatttattagttttgctattaattttcatttaaaaataggttattaactagcaaatctcaaatgccaaacatttttgaaggaatttttcctcacatggtgaatcctacctttcaaaaattgtgtaacaacatttcccattatccttttgaaggtacctatatatgggcgcatatgaagaaatttcattttcacttttcatcg

SEQ ID NO: 81902 - DNA, 625 bp, Homo sapiens
  misc_feature (1)...(625): n = a,t,c or g
  sig_peptide (85)...(220): this location contains the signal peptide sequence, MFKVVFCFGLVWFCFQRAHKPIRFEKHNFTINEGNLFSMNIPIVT, Run with SignalP
  misc_feature (85)...(185): similar to gi2224468 in the genepept database release 114, Run with FASTXY 3.3t00, default parameters
attttaaagtgtttctttttagtaaaagattgatcctcaaactgggttttacaaatgtagcaggtaagaggtagtgactgtcaaatgttcaaagttgtgttttgttttggtttggtttggttttgctttcaaagggcacacaaaccaatccgatttgaaaaacacaactttacaataaatgaaggaaacctgttctctatgaatatcccaattgtaacgattaggtctcaccacaggacaagttgctaccacaaattaatcacatgtgaacagcaaactgtctttacgaacataaagaggcattctaagttgtagcagacgcctgctctacgagacattaatggagtaaaatcctggagtattacagataaacagttaaagtgatgaacaagggctttatggtttgtataaacagaaatataaacaattttgtatttttctcaattatatgtaattaaataacgtttcaggctaacaaagtattgggtccctttttttaccagcttatgctaaagagggtttgaactaagggaatttgtttctagccccaatgaaaaagcccccccccccccccctccaaattatggaaagaaaaaaattggnccgagaccttaaaccccccccc

SEQ ID NO: 81903 - DNA, 376 bp, Homo sapiens
  sig_peptide (112)...(247): this location contains the signal peptide sequence, MNLYLFAVLFFYVFLHIKIIFICFATKWHNLFSKFSYFCILHVKA, Run with SignalP
  misc_feature (85)...(182): similar to gi2921366 in the genepept database release 114, Run with FASTXY 3.3t00, default parameters
atttcctaaaactttattcctctaaacatcttttcaattccccagatcttgttttagttgtagaggcccaaagtagagctctctaaacaaaggcttcctcagtgctgtaaaatgaatttgtatctctttgctgttctcttcttttatgtatttctacatataaaaatcatctttatttgttttgctactaaatggcataatttattttcgaaattcagttatttttgtattttgcatgttaaggctctaagccttaacttagggtctgggtaaatatgaactccaagactcctcgaaaatagtgtagaaataatagcaaaattaaagatgtttgtattccctgtgaatttattttttctttcattcaacacagaag

SEQ ID NO: 81904 - DNA, 404 bp, Homo sapiens
  sig_peptide (218)...(353): this location contains the signal peptide sequence, MPPVATRVMHVLEAALSCYFLDTYLVANTDIEYLLFLTREFILDE, Run with SignalP
  misc_feature (249)...(299): similar to gi4981871 in the genepept database release 114, Run with FASTXY 3.3t00, default parameters
atggattcagtaagaatgtcctttatggttttgaatacaataattctaacccaaatgagggtatgacccagctataatgggaagggaggaacttctacaaattacacagacccctggaggatccctgtgtatactgggaaatgttactggagaatgtgttgcctagggaagaaacaaaggcaggctccattgctttatagtggaaaggcagccttaaatgcctcccgtggccacgagggtgatgcatgtacttgaagctgccctttcatgctattttttggacacctatctcgttgcaaacacggacatcgaatacttattgtttttaaccagagaattcatactcgacgagaatgaataacgtctcgacggcggtaccgcctcttttatagtatggcgaagac

SEQ ID NO: 81905 - DNA, 891 bp, Homo sapiens
  sig_peptide (78)...(213): this location contains the signal peptide sequence, MFHLSFLQYNILLFKAIKHLMRYIFGGSSIKNGHLKMIASVVLPQ, Run with SignalP
  misc_feature (229)...(370): similar to gi2078227 in the genepept database release 114, Run with FASTXY 3.3t00, default parameters
attcaattagtcagtgattcaccgggctctctggactctggtctcctaatatcagttcaattcaacaggtgcttactatgttccatttgtcctttctacaatacaatattctcttatttaaggccataaagcatttgatgagatacatttttggtggtagttcaataaaaaatggtcatttaaaaatgattgcctctgtcgttctgccccagtcaagataacatattgcaaacgttatcatctatcagtgatacattagaatctggtaaagaaaggagaaaattcacaaagatgctgaaagagaagtggcatggtacagtggctagaaaggctgcttgttttgagtcacatttctcctcccacagtgtctgaagaccagatgtgtgatttctctgcacctatgtcctcatcagtaaaataatggtaaatactctacctaccttaccaaaaatgttaaggatcaagtgtaatagtattttacaaactataaaattctttataaatattaggcatttttcaaaatgtgctgttattgttaaagatataaattcccattatagccaagtggtcagaagttcttattatattttataacctcctactagtctatattaaggaatcataaccatagatacatctgaaataaaattctaaaatggtctatcccattatgaggcttaaactgtctcattttagtggcttctgttctcagtactcagtaagcatgtaatattgaaactgtaccagtttgccatattcctaccaatcccaagtgaatgggcataacattgttgccagaacctttttccatggccagtgaatgagtttccacatctccagacatggcccaagaagaggcaagggccttggttacaggaagggtaaagcccg

SEQ ID NO: 81906 - DNA, 434 bp, Homo sapiens
  sig_peptide (53)...(188): this location contains the signal peptide sequence, MRLSVCLLLLTLALCCYRANAVVCQALGSEITGFLLAGKPVFKFQ, Run with SignalP
  misc_feature (53)...(325): similar to gi4107229 in the genepept database release 114, Run with FASTXY 3.3t00, default parameters
tctaaatcactcatcattggttaaagccgagctcacagcagaataagccaccatgaggctgtcggtgtgtctcctgctgctcacgctggccctttgctgctaccgggcaaatgcagtggtctgccaagctcttggttctgaaatcacaggcttcttattagctggaaaacctgtgttcaagttccaacttgccaaatttaaggcacctctggaagctgttgcagccaagatggaagtgaagaaatgcgtggatacgatggcctatgagaaaagagtgctaattacaaaaacattgggaaaaatagcagagaaatgtgatcgctgagatgtaaaaagtttttaatgctagtttccaccatctttcaatgataccctgatcttcactgcagaatgtaaaggtttcaacgtcttgctctaataaatcacttgccctg

SEQ ID NO: 81907 - DNA, 842 bp, Homo sapiens
  sig_peptide (142)...(277): this location contains the signal peptide sequence, MYSLSLQLPVLCVLKSFKAYSLLWGVSTGVKEGFAGRTIVNHESY, Run with SignalP
  misc_feature (100)...(276): similar to gi1592048 in the genepept database release 114, Run with FASTXY 3.3t00, default parameters
cccacgcgtccgctgagctgaaaagttggatgtgccaaagtgtaaaaacactgatagtgttccttgctgcagataactgcagcaaaccatgtctttagcttcattatgaagattgcttctttcttgctgcagaataacggtatgtattctctctcactgcagctcccagtgctctgtgtcttaaaatcatttaaagcctatagcttgctttggggagttagtacaggggttaaggaaggctttgccggaagaacaattgtaaatcatgagagttactacttgcgcattgtgtggtagtctctttaatgcataatggtcctttttaataccaaaaattaattaataaaggaaatgattacattgtccaaataactgttaaacatgacagatctgttttatgatactgtgtttgacagttaaacattaagtaaacatttaattgactttaagcttgaaatgttcagaatgctctaacccttgctacagaatcttttctgcagcaagttaagtattttgtgtgttttttcccacctgtagcttatcaggcccggtccaaagccttctagcagaggggattgatcctgtcaggggttgctgccaagacatcggaaggatttttgaccaaggttttcaaaagctcagtgtcacatctgccatttgataaaggaaagattttggatgcagaacctggcatttactggcctttggggcgctgggatgtcggttagccctcggcactccacaaaggagccctgccacacttatttgtactgggggggggggctaatcattccccgaccatgcaatcgaataaatagtccctacaggggctctccagcccc

SEQ ID NO: 81908 - DNA, 843 bp, Homo sapiens
  sig_peptide (212)...(347): this location contains the signal peptide sequence, MSYKLTRQCPATLLYPPILIFSILRLHVSNAKFSTPEAGRKSNAC, Run with SignalP
  misc_feature (156)...(27): similar to gi1399886 in the genepept database release 114, Run with FASTXY 3.3t00, default parameters
gcaacttttaccaggagctcaagaatagtattataaagaagcatattgcctcagagaatttgcagcatataatgaaagaaaggaaactcaaaaggctaattctcattcctttagaaatgtttagagatgtatgtatgcttttaaggcttaatttttcttgacatgacaaacgagtctccatccttcaacaactgcattcatctttgtacaaatgtcctataagctaacaagacaatgtcctgctactttattatatcccccaattttaattttttccatcttaagattgcatgtgtcaaatgcaaaattctcaaccccagaagctggcaggaagagcaatgcatgcagaagaaatctattatgcaagtcagtggctattctggctatccctgcagccagcatcatttaagtatctccaggtttacagcagggctctctgccaggaaaaatagctgttttatatgtctttctatcattatatcatcaggtagttaacatgtacatcatacgggtgaaagtgctctggaagtattggttaatcttggtcagtccacatgaacactttaaaattttcttcagttgaagttttgatgtattattccctttctactcaattttgggccctaacccttgtaaatatgtagacaataaattttcttgttgaaatgaatactttgcggagggatcccaattccataacattgtcattttttatgcaaggaacacaggcttgagtctcaggactcctaagagacgccatacgactttgcccacccaggagaacaaaaccagaacttacactgagttataacccttgttgagcgggtggtcacctctcacgcc

SEQ ID NO: 81909 - DNA, 829 bp, Homo sapiens
  misc_feature (1)...(829): n = a,t,c or g
  sig_peptide (223)...(358): this location contains the signal peptide sequence, MPGSILSNLHVLLKYLFTFAEVFLVPGPFNVLFLSLRLETLTFFV, Run with SignalP
  misc_feature (294)...(370): similar to gi2589192 in the genepept database release 114, Run with FASTXY 3.3t00, default parameters
ttccaactgtgtgtcgggtactgtgctagcctggagcagcaaagaaggataaaaagaaccttgttttagaggagctattaagtcagattctgtccccaaactgaacagctacacaaagaggtgatttctgtttgaggggtttgtgtgatcatctaacaacaaaggagctgggaaccaagaaagttgggtcaataataacaatgactacattaatccagtatcatgccaggttctattctaagcaatttacatgtattacttaagtatttgtttacatttgcggaagttttccttgtcccgggcccattcaatgtgttatttttatctctacgtttagaaactttgaccttttttgttttgtggcttgtcccttatttgatttaaaaagtcattatatggccaggcgtggtggctcacgcctgtaatcccagcactttgggaggccaaggtgggcagatcacctgaggtcagtagtccaagaccagcctgaccagcaaggagaaactcccatctctactaaaatacaaaattatccgggtgtggtgatgcatgcctgtaatcccagctactccagaggctgaggcaggagaatcgctttaaccctgaggcggaggttgcagagagctgagattccgccattgcactccagcctgggcaacaaagtgaaactccatctcaaaaaaaaaaagggggggcccttaaaaagacaaatttataaaccggggtttgaaaaaaatttttttttggggcccaaatttaattcccggcccggttttaaacgggggagggggggaagaagnngnngnngcgagcacacccctcccgcccc

SEQ ID NO: 81910 - DNA, 384 bp, Homo sapiens
  sig_peptide (235)...(370): this location contains the signal peptide sequence, MYVLYKHFAFFKLFTVFSSLAVGINLTLMPTCRHLSENVLMSFHH, Run with SignalP
  misc_feature (253)...(175): similar to gi2633566 in the genepept database release 114, Run with FASTXY 3.3t00, default parameters
ctttctgtgttgcaaaaacctggtatcttgtagtaaagtgagtttacaaagaagacagcatttgtgtacagtagctatattagttgtgacatgtttcatctttgaaattatctttttcctctgtggttttagggaaaaatagctggggagagtggttggctgggaggaacctggctcgagtttctgatctgccatgttatctgtcgtgtctgaatttctcatagtcagcgggagatgtacgttttgtacaagcattttgcatttttcaaactttttacagttttctcgagcctcgctgttggaataaatttaacactaatgcctacttgtaggcacctttctgaaaatgttctgatgagctttcatcattgatttggaatattt

SEQ ID NO: 81911 - DNA, 677 bp, Homo sapiens
  sig_peptide (127)...(262): this location contains the signal peptide sequence, MCTLFMHLLFCHLQSIQLKQELRLNYLTLTQFWQRCYSEMIFFCL, Run with SignalP
  misc_feature (97)...(300): similar to gi218003 in the genepept database release 114, Run with FASTXY 3.3t00, default parameters
ctcatattggtgtaaaaattttatatcactgtaggctaaacttacctctgcacactcctccatgtccactgagcatctgctgaagtctgctttttcttcattttttatggaatggaaagctcatccatgtgtacattattcatgcatttacttttctgccacctccaaagcattcaattaaagcaggaattaaggctcaactatcttactttaacacagttttggcagagatgttacagtgagatgatttttttctgtctgtcaaaggtgtttcttcatgttttccaagatggtctagaacatcatttagagtaaattttcattttggaggaaatttttatgaaaagtctctgtaggtatctcctgtgaatagaggttttaaaaagaaaaagaaggggaaaaaagcccaaagggaaaaaataagtttcttactctgactttcacacatactgtgttctatttgctcccttcatatgtcccagagctaactcctcttcactgagaacgagggcttaatttgaatggttttaatgccttttaaccttttaaaatttttatggacaatttaactggcatttttactcccacccaccagtataaaacttcatgttggtaagaaacccaacaaaaatctttggaaccctgcaaaaatgttttacgttacaatttgacccctc

SEQ ID NO: 81912 - DNA, 484 bp, Homo sapiens
  misc_feature (1)...(484): n = a,t,c or g
  sig_peptide (103)...(238): this location contains the signal peptide sequence, MLCWRSQPKLKLCPALLVSWAHVAAQGLGGEGGVMCESAGAALAR, Run with SignalP
  misc_feature (118)...(308): similar to gi200533 in the genepept database release 114, Run with FASTXY 3.3t00, default parameters
agtgtctcgggccnctcccaactgatggcgatcngatgcccttccgaactgcaanncccggtccgacccacgcgtccggagcgagagagagagatagagatcatgctatgctggcgcagtcaacccaagctcaagctgtgtccagcactgcttgtgagctgggcccacgttgctgcccagggactcggtggtgagggaggtgtgatgtgtgagtctgctggggcagccctagcgaggcacacagaggccacctgggaaccgacggtgtccactgatggacgttttcctgggctgaagtatttcagatgcccagtgtactcccagccctcacagcggtcagttctgcttcacgggtttcccacatgatttggctaagacgtcagccggcaaagacgcttgggttggctttagacattacgaataaaaggaagctgcgggaggcggtcaaagtctgagacatgacaggtcaaagctgaaatcacag

SEQ ID NO: 81913 - DNA, 669 bp, Homo sapiens
  sig_peptide (322)...(457): this location contains the signal peptide sequence, MLSPKVFMFSICSMALQCGRDGVGLERSAVTTSHGASHSRLRGWD, Run with SignalP
  misc_feature (410)...(275): similar to gi2326711 in the genepept database release 114, Run with FASTXY 3.3t00, default parameters
tttcgtagctggggcaaggcttgtgtggaagggagagcatatggcatttgttcattagttcattcattcatccccattaaatattcatcaggcacttgctgggtgccagacgctgtccccggggctgggtgcagagcagggagcagcataaacatggtttctgtgtcttagagctcacagtctagtgggaggggccaatagtgaatcaaacagttgcacaaactatgacaagtgctctgaatagaagcggcccctgctgtgattgagagtaagagggcccagtttgcatcgctggagggatggacgtaccaagggagcgacatgctgagtcctaaggtctttatgttcagtatctgcagtatggcactgcagtgcggaagagatggagttggtctggagaggtcagcggtgaccacatcacacggggcctcgcacagcaggctgaggggctgggatctgtcttgagggcactggagagccacaagagtgctgggattaggggagggcggggtcagctctgggtacagaaaggccctcaggggccatatggggagggactggaatggggaggaaagaaaatctggaagtgaaggggttccattggtggggaagaagggacaaagggcctggaagggaggggtccccccgggccccccccggagttgggca

SEQ ID NO: 81914 - DNA, 1828 bp, Homo sapiens
  sig_peptide (1401)...(1536): this location contains the signal peptide sequence, MFATTLGVMGLWSGIIICTVFQAVCFLGFIIQLNWKKACQQGALK, Run with SignalP
  misc_feature (183)...(1510): similar to gi3337367 in the genepept database release 114, Run with FASTXY 3.3t00, default parameters
gaaaaaaaatctgaaaccctctcagttctacttcaggaaccgcccggaatccgggtcgacccacgcgtccggtacccactgccggcctccgcgctttctggccgcagtgttcgagtcacatggaagctcctgaggagcccgcgccagtgcgcggaggcccggaggccacccttgaggtccgtgggtcgcgctgcttgcggctgtccgccttccgagaagagctgcgggcgctcttggtcctggctggccccgcgttcttggttcagctgatggtgttcctgatcagcttcataagctccgtgttctgtggccacctgggcaagctggagctggatgcagtcacgctggcaatcgcggttatcaatgtcactggtgtctcagtgggattcggcttatcttctgcctgtgacaccctcatctcccagacgtacgggagccagaacctgaagcacgtgggcgtgatcctgcagcggagtgcgctcgtcctgctcctctgctgcttcccctgctgggcgctttttctcaacacccagcacatcctgctgctcttcaggcaggacccagatgtgtccaggcttacccagacctatgtcacgatcttcattccagctcttcctgcaacctttctttatatgttacaagttaaatatttgctcaaccagggaattgtactgccccagatcgtaactggagttgcagccaaccttgtcaatgccctcgccaactatctgtttctccatcaactgcatcttggggtgataggctctgcactggcaaacttgatttcccagtacaccctggctctactcctctttctctacatcctcgggaaaaaactgcatcaagctacatggggaggctggtccctcgagtgcctgcaggactgggcctccttcctccgcctggccatccccagcatgctcatgctgtgcatggagtggtgggcctatgaggtcgggagcttcctcagtggcatcctcggcatggtggagctgggcgctcagtccatcgtgtatgaactggccatcattgtgtacatggtccctgcaggcttcagtgtggctgccagtgtccgggtaggaaacgctctgggtgctggagacatggagcaggcacggaagtcctctaccgtttccctgctgattacagtgctctttgctgtagccttcagtgtcctgctgttaagctgtaaggatcacgtggggtacatttttactaccgaccgagacatcattaatctggtggctcaggtggttccaatttatgctgtttcccacctctttgaagctcttgcttgcacgagtggtggtgttctgagggggagtggaaatcagaaggttggagccattgtgaataccattgggtactatgtggctggcctccccatcgggatcgcgctgatgtttgcaaccacacttggagtgatgggtctgtggtcagggatcatcatctgtacagtctttcaagctgtgtgttttctaggctttattattcagctaaattggaaaaaagcctgtcagcagggtgccctgaaaaccttgaaggaattttaacgaacgatgttggaaagacaggcgagcctcagtcagatcagcagatgcgccaagaagaacctttgccggaacatccacaggacggcgctaaattgtccaggaaacagctggtgctgcggcgagggcttctgctcctgggggtcttcttaatcttgctggtggggattttagtgagattctatgtcagaattcagtgacgtggtaggaaagaaagtcaggtcaagtgatgcttttgagcttacacacaattcgcaggccgaattacgccactcttt

SEQ ID NO: 81915 - DNA, 926 bp, Homo sapiens
  sig_peptide (596)...(731): this location contains the signal peptide sequence, MERWLGLIQTLWLPAHSGPLGRAWVVPRATSGHYWGGKGTNEGGQ, Run with SignalP
  misc_feature (520)...(621): similar to gi168798 in the genepept database release 114, Run with FASTXY 3.3t00, default parameters
tttcgtggtggctcactcctgtaatcccagctactcatgaggctgaagcaggagaatcacttaaacctgggaggcggaggttgcagtgagctgagatcgcaccactgcactccagcctgggcaacagagtgagactctgtctcaaaaaacagagtattacaagagatgacacatttgaaacacttggaacagtgctgggcatggagtagtcactctgaaatgttagcagcattaccatcttcatgatatggctggcattgtgctggagatgccaaattaataaggcctctgaggctcacagtctgaggagggagggagctaactatccttgtgtgctaccacaccacaagtaaaacataaacaaggtgtgacaggaacccaaaacaaggagcgaccagggtctgggctgggtcagcttcctaaaggctgggccttaaaagacaaataggcttttaagctcttgaggtcggagttggggacagttggaggtgagtagagtcgaacttgggtagggcctgtggtagaaactatctgagggccaaaggccagggtcattgctctcctatatgctccagctgtcagagctgtagaccagatggaaagatggttaggtcttatccagacactgtggctacctgcccattcgggtcctctgggaagagcctgggtggttcctagggcaaccagtggccattactggggagggaaggggacgaatgagggtggacaagacaaggggcatttccccttgccaccacgttagaaataggaaggaccttccgggaagaagggttccccttgccaccacgttagaaataggaaggaccttccgggaagaagggttccccttgccaccacgttagaaataggaaggaccttccgggaagaagggttccccttgccaccacgccgaccctatgcagtct

SEQ ID NO: 81916 - DNA, 667 bp, Homo sapiens
  sig_peptide (62)...(197): this location contains the signal peptide sequence, MLLLLGLCLGLSLCVGSQEEAQSWGHSSEQDGLRVPRQVRLLQRL, Run with SignalP
  misc_feature (209)...(657): similar to gi3319930 in the genepept database release 114, Run with FASTXY 3.3t00, default parameters
tttcgtgcgctgcaaagcgtgtcccgccgggtccccgagcgtcccgcgccctcgccccgccatgctcctgctgctggggctgtgcctggggctgtccctgtgtgtggggtcgcaggaagaggcgcagagctggggccactcttcggagcaggatggactcagggtcccgaggcaagtcagactgttgcagaggctgaaaaccaaacctttgatgacagaattctcagtgaagtctaccatcatttcccgttatgccttcactacggtttcctgcagaatgctgaacagagcttctgaagaccaggacattgagttccagatgcagattccagctgcagctttcatcaccaacttcactatgcttattggagacaaggtgtatcagggcgaaattacagagagagaaaagaagagtggtgatagggtaaaagagaaaaggaataaaaccacagaagaaaatggagagaaggggactgaaatattcagagcttctgcagtgattcccagcaaggacaaagccgcctttttcctgagttatgaggagcttctgcagaggcgcctgggcaagtacgagcacagcatcagcgtgcggccccagcagctgtccgggaggctgagcgtggacgtgaatatcctggagagcgcgggcatcgcatccctggaggtg

SEQ ID NO: 81917 - DNA, 652 bp, Homo sapiens
  sig_peptide (136)...(271): this location contains the signal peptide sequence, MWRGPPGLCLFVLFLLESRRAGSRARAASARSPEWLQGDPLLGRK, Run with SignalP
  misc_feature (283)...(171): similar to gi5104088 in the genepept database release 114, Run with FASTXY 3.3t00, default parameters
tttcgtgtgaggccaacacccggcggccttcctgtctactcccacggaaaactgcatctaaccctgacacacacaggcagccactcggtacgggggaccctgttacacacggcccactgtgggaagcctgaggccatgtggaggggaccccctgggctctgtctctttgtcctcttcctgctagaaagccggagagccggcagcagagcccgagctgcctctgcccgcagccctgagtggctccaaggtgacccgcttctaggacggaagcacccggctcaggtctagcccaggtctagttctaatgtcaggtctagctccaggccatctggtcagtgcccacttctgagccaagggcgggcttagggcaaacgcggtacaaaaaagagtgcccaacttttctagttttggctgaagaagacttcatacgctgacggatctagtttccggtcctgatttttgaaaaacgcagcgctggccttgtgcacacaccacccaaaacccaggacctagcgaagagaggccacctgagggccgatggctgcattttcttaattttgttcacgctaaatatacatttacagatggatctccaactttacgaagggtttgactttacgaattggactttgaattttttcaaacttttatg

SEQ ID NO: 81918 - DNA, 1519 bp, Homo sapiens
  sig_peptide (89)...(224): this location contains the signal peptide sequence, MPQLSLSWLGLGQVAAFPWLLLLLAGASRLLAGFLAWTYAFYDNC, Run with SignalP
  misc_feature (290)...(1518): similar to gi3012097 in the genepept database release 114, Run with FASTXY 3.3t00, default parameters
ccggaactcccgggtcgacgatttcgtagctccctgagactttccctgggcctcaggatctcaccctccatcctgtctgccctgcaggatgccgcagctgagcctgtcctggctgggcctcgggcaggtggcagcattcccgtggctgctcctgctgctggctggggcctcccggctcctggccggcttcctggcctggacctatgccttctatgacaactgccgccgccttcagtactttccacaacccccaaaacagaaatggttttggggtcaaccaggacctcctgctattgcgcccaaggatgatctctccatcaggttcctgaagccctggctaggagaagggatactgctgagtggcggtgacaagtggagccgccaccgtcggatgctgacgcccgccttccatttcaacatcctgaagtcctatataacgatcttcaacaagagtgcaaacatcatgcttgacaagtggcagcacctggcctcagagggcagcagttgtctggacatgtttgagcacatcagcctcatgaccttggacagtctacagaaatgcatcttcagctttgacagccattgtcaggagaggcccagtgaatatattgccaccatcttggagctcagtgcccttgtagagaaaagaagccagcatatcctccagcacatggactttctgtattacctctcccatgacgggcggcgcttccacagggcctgccgcctggtgcatgacttcacagacgctgtcatccgggagcggcgtcgcaccctccccactcagggtattgatgattttttcaaagacaaagccaagtccaagactttggatttcattgatgtgcttctgctgagcaaggatgaagatgggaaggcattgtcagatgaggatataagagcagaggctgacaccttcatgtttggaggccatgacaccacggccagtggcctctcctgggtcctgtacaaccttgcgaggcacccagaataccaggagcgctgccgacaggaggtgcaagagcttctgaaggaccgcgatcctaaagagattgaatgggacgacctggcccagctgcccttcctgaccatgtgcgtgaaggagagcctgaggttacatcccccagctcccttcatctcccgatgctgcacccaggacattgttctcccagatggccgagtcatccccaaaggcattacctgcctcatcgatattataggggtccatcacaacccaactgtgtggccggatcctgaggtctacgaccccttccgctttgacccagagaacagcaaggggaggtcacctctggcttttattcctttctccgcagggcccaggaactgcatcgggcaggcgttcgccatggcggagatgaaagtggtcctggcgttgatgctgctgcacttccggttcctgccagaccacactgagccccgcaggaagctggaattgatcatgcgcgccgagggcgggctttggctgcgggtggagcccctgaatgtaagcttgcagtga

SEQ ID NO: 81919 - DNA, 432 bp, Homo sapiens
  sig_peptide (250)...(385): this location contains the signal peptide sequence, MFQKGLFLICVTCLILRDEGQCLDRNPTPFLPTTKLLISFIYLFF, Run with SignalP
  misc_feature (198)...(300): similar to gi440404 in the genepept database release 114, Run with FASTXY 3.3t00, default parameters
tttcgtcacaagcccagctcaggaacctatttaaggcttcagagtcttacgtatgggtctcttagtgggtttgcctgtcttctgttgatccttgggaaaatatatttcaacaataagtggtattagaagtggctaattagcaaggtttgtaaacataagcagtagtaaataaactcagagaggtatttcattaggctcttttgttgaaaccttttgatcttgatatgtatttagctaagggggttcttaatgtttcagaagggactgtttcttatctgtgtcacctgcctcatcctgagggacgagggtcaatgtctggacaggaacccaacccctttcctgccaactactaagttgctgatatcttttatttatttatttttctgacattaactttcaaaaacaatcctactatttgggaaaagtaacttg

SEQ ID NO: 81920 - DNA, 628 bp, Homo sapiens
  sig_peptide (175)...(310): this location contains the signal peptide sequence, MACCLFLNGSWLSMALKFFNCWGKKIKRIIFYVKIMKFKFQCPQI, Run with SignalP
  misc_feature (223)...(365): similar to gi1788243 in the genepept database release 114, Run with FASTXY 3.3t00, default parameters
tttcgtggttttttaaggaaccaaaagcatgtttgaaattgcccagtatcgacctgtttaaaaggcaaattctctgcctatgagagatatcttctgctataattacaagtctctaagatgtctatcagtagtcagcttttaccaagactagcctggcaccagggttagcgaactatggcctgctgcctgtttttgaatggctcatggctaagcatggctttaaaattttttaattgttggggaaaaaaaatcaaaagaataatattttatgtgaaaattatgaaatttaaatttcagtgtccacaaataaacacagccacgtacattcatttacatggttgcttttgcacttcaatggcagaattgagtagttagcagagaccatatggtccacaaagcctaaaatatttactatttggccttttacagaaaaagcttgctgaaccctggtctggcaggtagctacagcagataaattgataactttacataaaatagggcagggcacggtggctcacatctgtaatcgcagcactctgggaggccgagcagggtggatcacctgagatcacgggtttgacacttgacccaacccttggaattcaagatgttgggtcctaaacttccc

SEQ ID NO: 81921 - DNA, 632 bp, Homo sapiens
  sig_peptide (123)...(258): this location contains the signal peptide sequence, MTLVSGANWAWWLVTVRAMCNQGQDLHCGARDRVQGGTRAQCVHS, Run with SignalP
  misc_feature (173)...(244): similar to gi1911416 in the genepept database release 114, Run with FASTXY 3.3t00, default parameters
tttcgtcccacaggttccccgtgcccctgccagggatgagccggcttatatgacagaagattaacccagcaacttctccacaaggagatgggagcctggccaccctccctagggcctagaccatgacactggtctctggtgcaaactgggcatggtggctggtgactgtcagggctatgtgcaaccagggtcaggatttacactgtggggccagagacagggttcagggtgggaccagggctcagtgtgtgcacagtcagggctcagtatgtatgcagggtcagaacacagtctatgactggtgttagggcttgcactgtgtgaccattgcttaatgtgtcaagggttagagtgtgtgaccagggtcggggctcagggtatgaccagggtccgagcccagtctgtgactaggctcggagctcagtgtctgaccagggtcagggcccagagtgtggccagggtcagagctcagcttgtgaccagggtcggggttcaatgaatgaccaaggtcaaagctcattgagctaccaaagtaggagctcagggcggggcccaggttggggctgagggcacgaacattgtgagtactccagctgtgactccgtacggtatctctggtgaggaggaccgta

SEQ ID NO: 81922 - DNA, 412 bp, Homo sapiens
  sig_peptide (212)...(347): this location contains the signal peptide sequence, MLSEGFSPFLLSTRFLLLPSPLPNFFLRSSLLESTPDAFSLSGIV, Run with SignalP
  misc_feature (215)...(279): similar to gi1946304 in the genepept database release 114, Run with FASTXY 3.3t00, default parameters
tttcgtggagaggaaggtaggggacctttctaccggtgcagggcctggatccaacccctgctgtggaagactgagagctccacattctagctggctttccccagtccccaaatttgtaggggctccttgaattgcacgccccatgggtggaggatttcatcctgacgtatgatccccacgaaggttcctgcaagtttggcaaattattggaatgctttcggagggattcagtcctttcctactctccacgcgctttctcctactcccctcccctttacctaacttctttctccgctcttctttgcttgaatccacccctgatgctttctcactttcaggcatagtgcccccgaggaaatgaagctgttcacctcacttacttctatcagctgcagcccctacgtccttttgt

SEQ ID NO: 81923 - DNA, 1247 bp, Homo sapiens
  sig_peptide (553)...(688): this location contains the signal peptide sequence, MQKVTLGLLVFLAGFPVLDANDLEDKNSPFYYDWHSLQVGGLICA, Run with SignalP
  misc_feature (553)...(816): similar to gi1085026 in the genepept database release 114, Run with FASTXY 3.3t00, default parameters
tttcgtgcaggagacaggggaggaaaggggtagggaggcttgtacagtgcagggggccttatgtggactaggaggcagccgcccccaccagcacccactctgtagacccaggcgtctggctcccagcacccacggaaagagcctggctaggaaactgcagcctggtgcctggcagacagttctcattctccccagggcagggagcaggttatgaccaggactaaggtcccagagtccccaccctgacccctccctgctgttccagccgctccctcatatccacccctgccccatctcctgactttggtcacgctagcatcttctgctgatcctgaaattgtaccagcggcaagatgtggcctggaaggggactttaagttctccacaactgccagcaatccttccaccaggcaaaacacatcatctaaggaaaagaagtgaggtttgcttagggcgtggcagcttcggataaacgcaggactccgcctggcagcccgatttctcccggaacctctgctcagcctggtgaaccacacaggccagcgctctgacatgcagaaggtgaccctgggcctgcttgtgttcctggcaggctttcctgtcctggacgccaatgacctagaagataaaaacagtcctttctactatgactggcacagcctccaggttggcgggctcatctgcgctggggttctgtgcgccatgggcatcatcatcgtcatgagtgcaaaatgcaaatgcaagtttggccagaagtccggtcaccatccaggggagactccacctctcatcaccccaggctcagcccaaagctgatgaggacagaccagctgaaattgggtggaggaccgttctctgtccccaggtcctgtctctgcacagaaacttgaactccaggatggaattcttcctcctctgctgggactcctttgcatggcagggcctcatctcacctctcgcaagagggtctctttgttcaatttttttttatctaaaatgattgtgcctctgcccaagcagcctggagacttcctatgtgtgcattggggtggggcttggggcaccatgagaaggttggcgtgccctggaggctgacacagaggctggcactgagcctgcttgttgggaaaagcccacaggcctgttcccttgtggcttgggacatggcacaggcccgccctctgcctcctcagccatgggaacctcatatgcaatttgggatttactagtagccaaaaggaatgaaa

SEQ ID NO: 81924 - DNA, 598 bp, Homo sapiens
  sig_peptide (49)...(184): this location contains the signal peptide sequence, MAVWSLLSARAVTAFLLLFLPRFLQAQTFSFPFQQPEKCDNNQYF, Run with SignalP
  misc_feature (157)...(326): similar to gi3650462 in the genepept database release 114, Run with FASTXY 3.3t00, default parameters
gcttccagcgtcggtaccatggcgacgcgcggtggggctggggtggcaatggcggtttggtccctcttatccgcccgggccgtgaccgcgttccttctgttgttcctccctcgcttcttacaggcccagaccttctctttccctttccagcagccggagaagtgcgacaacaaccagtactttgatatctccgccctctcgtgtgttccttgtggagctaaccagaggcaagatgcccgaggaacttcatgtgtatgtctaccaggatttcagatgatctctaataatggaggacctgctattatttgtaaaaagtgcccagaaaacatgaaaggtgttacagaagatggctggaactgcatttcttgccctagtgacttaactgccgaaggaaaatgtcactgtcccattggccatattttaggtaagaattagattccttataaagaagtagtgataaatcttcattcttgtgtttgtttttatttgaaaagggcactaatttaaatagttaagtgattacttaatatttttgcagtggctcaagcaattctcctgcctcagcttcctgagtagctgggactgcacacataacacc

SEQ ID NO: 81925 - DNA, 435 bp, Homo sapiens
  sig_peptide (238)...(373): this location contains the signal peptide sequence, MCFTLGASFFGFCPLVRNSYKICSSHVNTCLDVFSSMQDTCRTIL, Run with SignalP
  misc_feature (180)...(270): similar to gi3298269 in the genepept database release 114, Run with FASTXY 3.3t00, default parameters
gttaaacaagcgcacgaataacccagtaaccataatacagggcctcactctaaggagatgcagaataaatgtttgctgaatagatgaatgattgtgttttggaatggagttggagtattgagtaccaggcagtttttacacttttaaggacagctataaaatatttgtagataactattttgtctccaaaaccccatttgaaagtaaacatgaagcccttcatgtgttcctcatgtgatgtgcttcactctaggggcctctttctttggattttgtccattagtcaggaactcttataaaatatgcagttcacatgtgaacacatgtctagatgtgttttcatccatgcaggacacatgtaggaccatcctttccccttgattctggaccatagagtcacattggtttacagaatttcagtgtcagaaaaatatt

SEQ ID NO: 81926 - DNA, 388 bp, Homo sapiens
  misc_feature (1)...(388): n = a,t,c or g
  sig_peptide (232)...(367): this location contains the signal peptide sequence, MLAIFPGNPWEIALIFTFQLWGHLFCEVSSHLFYCSAKVIALSSV, Run with SignalP
  misc_feature (136)...(87): similar to gi5306276 in the genepept database release 114, Run with FASTXY 3.3t00, default parameters
atcataccccgctgggctatcatcatggatagttaactgatatccctttccccctccttatctcttcttctcctagtccgtcttccatactgcttatgggtaaagttgcttacacaataaaattcaaatattttggaagggcatactagtcattgttctcaaatgtgctgaccacttttatgcttcgggtatttatatgaagctattttctttcacctgaatgctcttgacatgcttgccattttccctgggaatccctgggaaattgctctcattttcacatttcagttatggggtcaccttttctgcgaagtctcaagtcaccttttctactgctcagcaaaagtaattgccctctcatctgtattattatgacatgttatacttn

SEQ ID NO: 81927 - DNA, 406 bp, Homo sapiens
  sig_peptide (229)...(364): this location contains the signal peptide sequence, MQLEVHIWIHIFSIAPFFLALLMYNILLFCIHSPFDFSPNVIYHL, Run with SignalP
  misc_feature (192)...(268): similar to gi1302618 in the genepept database release 114, Run with FASTXY 3.3t00, default parameters
agctcaagaaatcttacatttctatagttacattactgtcactataacattaatagttgaactaggcttcccaacagatgtaaaagccttctaatctagagataaataaagattgtactttttgttatcatcagattttattattctttgatgatgattgactaaatatactaatgaggattgaaaaatatactgctttaaatagttatgtcataatttctatcagtcatgcaattagaagtacatatatggatacatattttttctattgccccttttttcctggctttgttaatgtataatatattgcttttctgcattcactctccatttgatttttctcctaatgtaatttaccacctgcagaagtatgaggcctggaaaatgcaggtgtgaaatgctcatt

SEQ ID NO: 81928 - DNA, 1096 bp, Homo sapiens
  misc_feature (1)...(1096): n = a,t,c or g
  sig_peptide (104)...(239): this location contains the signal peptide sequence, MWLRGFLFSGILTSYLGYKAECWAMFTFPLSGDINLSRMGGFPPN, Run with SignalP
  misc_feature (265)...(305): similar to gi5104883 in the genepept database release 114, Run with FASTXY 3.3t00, default parameters
cccaccttctctgtccctttaggctgctgcctaaactttgacttccacgtgagcagaattgcttaggagagtagtggaacatagatgtagcagaaattctctcatgtggttgagaggtttcctattttcgggcatcttgacttcttacctcggctataaagcagagtgctgggcaatgtttacgtttcctctcagtggtgacattaacctcagcagaatgggaggctttcctccaaatgcttgcatttcttcctcttcactcagggctcagctgtctcctgcttcaagagcaaggcatactgtcacatccacatttatgcctgcagaaaagtatcagacagacatttagaaatgtcacctaaacaaggacagacaggttttttgctctaggataggaaggtccattcttagaggtggggcacccctcagaaagagctcccttcagagactgacctctcatcggtcccttcttggacctttgagagagcctctgtggatcaggtgatgggatcgggtcacagggaggaagggcactccggatggtaaagagttgtctggtgaaggctggactgagcaaaagctgtcagccttccgggaggcctgtcctcctgtggcagtgaagggaattgatgggggtttcaagcagcccggaggctgtgccctgcactgctcctgcccagccgtccaggaggttatgggtggctgttgcccaaggccggggcctcctaacccttccttgctgggcataccagctacaaaagcctgggacacttacctgcttgtagggaggggcagctaaagcccagtgcacccagtggacgccttggtagatgacgtctancgcttgcgggaggcgacacgggcatcatctggccatttcggccaccttctgccatctgcgttcattgacgggcgcactgcgcaggtgcagttctacctgtttacctaagtcgcgctccgtcttcgctttagtgcccactatccacctctgcaactccgcttaccgtctgttcgtgccgacacccgcggcccgccttgagatgctccctcctcggtcggcgttccaacgcacattgctcgttctacgacatagtcc

SEQ ID NO: 81929 - DNA, 2070 bp, Homo sapiens
  sig_peptide (1906)...(1771): this location contains the signal peptide sequence, MGSACIKVTKYFLFLFNLIFFILGAVILGFGVWILADKSSFISVL, Run with SignalP
  misc_feature (1705)...(1777): similar to gi3928752 in the genepept database release 114, Run with FASTXY 3.3t00, default parameters
ttttttttttttgagacggagtctcgctctgtcgcccaggctggagtgcagtggcgggatctcggctcactgcaagctccgcctcccgggttcacgccattctcctgcctcagcctcccaagtagctgggactacaggcgcccgccactacgcccggctaattttttgtatttttagtagagacggggtttcaccgttttagccgggatggtctcgatctcctgacctcgtgatccgcccgcctcggcctcccaaagtgctgggattacaggcgtgagccaccgcgcccggcccacttacactttttaaacttcttcctcttctcctatacctaagggctccaatgatactacttatcagggaagaaagtactgtatctagataaactacccttaagtattacaggcttagcaagttgaatttctagaaaatactcattcataatttattttattttattttttttgagacagagtcttgctctgtcgcccaggctggagtgcagtggcgggatctcggctcactgcaagctccgcctcccgggttcacgccattctcctgcctcagcctcccaagtagctgggaccacaggcgcccgccaccacacccggctaattttttgtatttttagtagagacggggtttcaccgtgttagccgggatggtctcgatctcctgacctcgtgatccgcccgcctcggcctcccaaagtgctgggattacaggcgtgagccaccgcgcccggccccctcctccccaatttttcatacagttgcccctatacaatatacacacccttgagggcaggtagaagtccagcccacctgcgccagggacgctgtggggagcatttttctctgagttgataagagaaccctgatgggcggtgagcagaggaaccacagaacagccagggctcaaggctggcagcggataggccaggagagatcgctaggccccagaaagccccctactttcagtcagggtgggcaagagggtcttcgcagtgaagtgggaggcaggcctggaggagggagccagggagacccctgggagccctgaggttgggggccaggcagggagatggggatagcagctgcctcagtacttggggaccttgctgtagtcttcggaatggacgtgccggcacaagcagatggacaggaccatccccaggagctcgatgatggccacacccacgcccacgccgaggatgatgcccaggttctcctgcagccacgcctgcaccttctccatgcagccctcctggtacacaggccagtcctcagggtggttgccactctgggtcctgttgccgggggcctcgcagaagcccttcctcacagaaaggctgttgtcctcttcccccttgacttcgcaggaacaggggtaggtgacctcagggcgattcatgagctcagcgttgtctgtccagttgtagaagctgacccagccgcagcacttcacctgagcctgcacgtagtcccaggcatcctgcaggctgtcctcgcgactgctgttgtagtctcgaatgagctcagtcacgatgccgcccatctcctgcttcagcttgcccatgttgaagtagaagagggccccggccgtcacctgggcaatgaggatcaggagcaggaaagcaaagtacagccccagcaggcagcggacctcgttgacggcgccgatgcagcccaggaagcccatgagcatagtgactgcccccacgccgatgaagacataggcccccatcctaagcgagctggaggaggtttgcaggacagagatgaaactgctcttgtcggccaggatccacaccccgaagcccaggatcactgcgcccaggataaagaagatcaagttgaagaggaagagaaagtatttggtgactttgatacaggctgagcccatcccgccagtcctggagcttccttccacgaaaccagtgcagctggtcacagggcccacttctgcctgtgcccacgtgtcgtccacacagcagcagggaggactctgcgggttctgctttctgctccgcgctgcaggcccagcgtcacccgctcgtgcctcagtcgg

SEQ ID NO: 81930 - DNA, 826 bp, Homo sapiens
  sig_peptide (157)...(292): this location contains the signal peptide sequence, MFSAPSVLSSLLIQSLLGAQKSNILLPRSSVVQGFMATDYPPRAL, Run with SignalP
  misc_feature (309)...(200): similar to gi2098749 in the genepept database release 114, Run with FASTXY 3.3t00, default parameters
tttggcttttgtcaaggtcgttatttccagtgaagtatggcatcgaacatcagatagttgcccacacaaatgtctgttttaaggttctcaaccttttgacaatacaaaacaagaggaagtttccaggggaaagccctcaaatcagccattctgagcatgttttcagccccatccgtactctcctcccttcttatccagagccttttgggtgcccagaagagtaatattcttctgcctcgtagctctgtggtccaagggtttatggctactgattatcctcctagagcacttctgagatgttttatgctttctacttgtgagtgtgaagggaggagaggcaagtttgctgtcagtctgacaacatgtttttgccacgtgatctgccactgaagagaagttggctatggagggaggtcaagtagcccaggtaggtggtcattccaagtgtacctcctcgtgcagcccaccctctccacataaaattgggtcctgattttatgtggaagatgttgtgtgcctaggaacatgagagcatgttagacaagatatgatatagaaagaactggcgaagggactggtacaggataaacttgagggcgtataatcactcgataggtgggtgaaaatgggaatgccttcgataaaaattaatttgtaaaacaagtataattgaacaaatttaaaactaatattcaaaaactaaaattcctgaaaattggggaagaaggtatttggcaagaaaacgacagaataacaggttgctaggggcctttttcttcaaatcaaaaaaattgggccccttttgaaatcacctacacgcctttct

SEQ ID NO: 81931 - DNA, 405 bp, Homo sapiens
  sig_peptide (119)...(254): this location contains the signal peptide sequence, MQTFCFFAFWRLCYSFYQKKSSFHCLLNKFMFIVYVSAKHYFSMS, Run with SignalP
  misc_feature (99)...(222): similar to gi5059314 in the genepept database release 114, Run with FASTXY 3.3t00, default parameters
aaagaaacccaaaactaaataagaaaaactacaaaaatacaccgttttggaaactatcagcagtttataaatgttgaagtataactaagggtctaaactgtgaaggttctgtaacaacatgcagactttttgtttttttgccttctggcgtttatgttattcattctaccagaaaaagtcttcatttcattgcttacttaataaattcatgtttattgtttatgtctcagcaaaacattatttctccatgagcaatttcctgactcctctaggcaaactcggtcatattttctcttatgcttccatggcagtttttagaaacatccattaaacaattattttatgtatttgatattttaaaattttcttttcttaggaaggcaaactttatgagaagaagaataa

SEQ ID NO: 81932 - DNA, 422 bp, Homo sapiens
  misc_feature (1)...(422): n = a,t,c or g
  sig_peptide (119)...(254): this location contains the signal peptide sequence, MIVNKIAANVVLCLQQCFLTFLDIRSFSYNEHLVTPPLILWNENQ, Run with SignalP
  misc_feature (225)...(145): similar to gi150367 in the genepept database release 114, Run with FASTXY 3.3t00, default parameters
aatagtgcccatgtcatagagttatagtgaggaacatctgaaataattcacagaaagcacttagtgcaatgtttggcatatggtaagcactctgtaaatattagctgctattattttcatgattgttaataaaattgctgccaatgttgttctttgtctacagcagtgtttcttaacctttttagacataaggtccttctcttataacgaacatttggtaactcctcctttaatattatggaatgaaaatcaaagatctataacctgtatacatataattttgaaaaatgttaatattattctttaatggtaatagaaacaaaatagtagtccagggctacagtgtatgaccactatatcataaatccccaagacctgtctcaggttcataaatttactagaaggaatcacggngtctcagc

SEQ ID NO: 81933 - DNA, 536 bp, Homo sapiens
  sig_peptide (134)...(269): this location contains the signal peptide sequence, MDSLYFLFHHLPGVLWLHLIYLIFKGLAELERAELPGVGVADYKS, Run with SignalP
  misc_feature (327)...(398): similar to gi995915 in the genepept database release 114, Run with FASTXY 3.3t00, default parameters
aaattgaccaaaattaactgcaatttactgcccaaggcttcctgtggaagttgcaagccttcagtatgccgtagagatccaaaattgttacatcaggtagatactgccagtgtgtttgttgtctaggtaagaaatggattccttgtacttcctattccaccatcttcctggagtcctctggctccatctgatttatttaattttcaagggcttggctgagctggagagagctgagctgccaggtgttggagtagctgattataaaagtactagtcaagtctttaatcgtttattgctgtagtataatcaagagtctaagctggagaaagcatggccttcccgccactcccaacccgccaccaaccccagttctagttttccccatggaaaggcatgctggttgagggtcaggtggattgacagattttactgatgaggtggccatgaacaaaagtatctgtgcttcagtggagaagagatgctgggataaaggataggggaagtgctaggagtgggaaagtattgagtactgagtc

SEQ ID NO: 81934 - DNA, 384 bp, Homo sapiens
  sig_peptide (199)...(64): this location contains the signal peptide sequence, MILSVVLTSVVWEYIICVNKQMKTLATFRISIPKGIDGYVQINSY, Run with SignalP
  misc_feature (315)...(186): similar to gi5824645 in the genepept database release 114, Run with FASTXY 3.3t00, default parameters
tgactttttaaaaaagatgtataggccttgtgttaaactagtgtgcttttaatgggcactaggatagctgttaatttgcacatagccatcaatacctttggggatggagatcctgaaggtcgccagagttttcatctgtttgttcacacagattatatattcccatacaacactggttagaaccacactgaggatcatccaatgccctcaaaccaagagggtttccactagcagttacagtggaaaaggagggacttactgcaattaccactctcctgtcattttgtcttgtatcacgtgctaccatcagtttattgtttcatgaggacgcccacattgaatcaaggaggggtatccagagagatttcacttgcacacagaatc

SEQ ID NO: 81935 - DNA, 394 bp, Homo sapiens
  sig_peptide (24)...(159): this location contains the signal peptide sequence, MISRRHLLLLRTFQVAPEGTKPLTDREERMAGHDTNGDTNGVLDK, Run with SignalP
  misc_feature (60)...(160): similar to gi4226166 in the genepept database release 114, Run with FASTXY 3.3t00, default parameters
gaacacacaggcaaacaggttgcatgataagcaggaggcatttgctgcttctcagaactttccaagtagcccctgagggcactaagcctttaactgacagggaagagcggatggcaggacatgatactaacggtgatactaacggtgtcctggacaagaggcagtaaataagaaatcctagttgtgacagtggaatggggtaagggcgactgagattatgagctccagattgcaaattatgcctttaatcttcactagaccagtctctggataaaagagataacatctcatggggaccaagaaagctactgacttaatgtcttcggggatgtgtgacatttctgctttggggacgattccatggagccatcatttcctgtctctcatctcagca

SEQ ID NO: 81936 - DNA, 740 bp, Homo sapiens
  sig_peptide (111)...(246): this location contains the signal peptide sequence, MLSCLLVITLQNFPKFLLLQGLQCRCSGPLKVISSTMKSQAEDLG, Run with SignalP
  misc_feature (302)...(231): similar to gi3550202 in the genepept database release 114, Run with FASTXY 3.3t00, default parameters
aacaaataaaaaagccttgaagataatacttgaaatcagagaaaacataagtacgataatgtccacccctccaaacacccagtcagaatcttgcaaatcagttttttttcatgctttcctgcttgttagtgatcacgttgcaaaatttccccaagtttcttttattacaaggacttcaatgcaggtgtagtggcccacttaaggtcatctcttcaaccatgaaatcacaagctgaggacttaggggagtcatcagagattggtttgtggtaagagtgaaacaaatcacatgagcatatggtattaaaacaatgtggcatacagacaatgacattagcttactttacaagaaaatgtagtagaagctctctttgtatacatctacctggtgataactgtgctcctggacacacatgggtataattttttaggttgcaactgggctcagagggctagatcaaaaattccaagggaaatgagcaagaatattatcaagataataccaaaaagctgttctccattgctcagaaacatgggaaaaggaatgcccacagtaaactgaagagatgcatataaaaatctcagaaggaatctcttcaattctgaaaatgtcttacatttggaatgcaatctgataaaaaggcaaaagacaaagacctgaacaggcaaaagacctgaacagacccctgcccaagaagatacctagattacaaaaaagcttatgaaagatactaaatatcc

SEQ ID NO: 81937 - DNA, 409 bp, Homo sapiens
  sig_peptide (167)...(302): this location contains the signal peptide sequence, MGISRCPILLSFIHTPIGVCFFAAKLQLGWGPLIRHATFACLNCD, Run with SignalP
  misc_feature (174)...(53): similar to gi23905 in the genepept database release 114, Run with FASTXY 3.3t00, default parameters
cctgaataccggttcagaaaatacaattcaccagtattacgggcacattgtctgacaattatgagcgtggtagaagagagtatatgaatttgggattgtcagagaaaatctaggacatagagtcttggctttcattggctcccccctcctccagctcattatttccatgggcatatctcgctgtcctattctcttgagctttatccacaccccaattggtgtttgcttttttgccgcgaagctacaattgggctggggtcctttaattagacatgccacctttgcctgcttgaattgcgacttcttcctttgtcgtttgtatctcgattatttatgtacaagcccatgattttcatgtttgtgaatggactctacccgcttcttttccagaaaacccctctctcgcccg

SEQ ID NO: 81938 - DNA, 4686 bp, Homo sapiens
  sig_peptide (2046)...(2181): this location contains the signal peptide sequence, MTLALAYLLALPQVLDANRCFEKQSPSALSLQLAAYYYSLQIYAR, Run with SignalP
  misc_feature (3398)...(3341): similar to gi509717 in the genepept database release 114, Run with FASTXY 3.3t00, default parameters
gtggactgtgcattgtcacttattcgacttgggatggagcggaatattcctggtttgctggttctctgtgacaatttggttactctggaaacattggtttatgaagccaggtgtgatgtaactctaaccctgaaagaactccagcagatgaaagacattgaaaaactaagattactgatgaatagttgttctgaggataaatatgtgacaagtgcctaccagtggatggttccctttcttcatcgttgtgagaaacagtcgcctggtgtggctaatgagctattaaaagaatatttagtaactttagctaaaggggacttaaaatttcccctgaagatatttcagcattccaaaccagatctgcagcaaaaaattattcctgatcaggaccaactgatggcaatagcactagagtgcatctatacctgtgaacgaaatgatcaactctgtctttgctatgacctactagaatgtctgccagaaagaggatatggtgataagacagaggcaaccacaaagcttcatgacatggtagaccaactggaacaaattctcagtgtgtcagagcttttggaaaaacatggactcgagaaaccaatttcatttgttaaaaacactcaatctagctcagaagaggcacgcaagctgatggttagattgacgaggcacactggccggaagcagcctcctgtcagtgagtctcattggagaacgttgctgcaagacatgttaactatgcagcagaatgtatacacatgtctagattctgatgcctgctatgagatatttacagaaagccttctgtgctctagtcgccttgaaaacatccacctggctggacagatgatgcactgcagtgcttgttcagaaaatcctccagctggtatagcccataaagggaaaccccactacagggtcagctacgaaaagagtattgacttggttttggctgccagcagagagtacttcaattcttctaccaacctcactgatagctgcatggatctagccaggtgctgcttacaactgataacagacagaccccctgccattcaagaggagctagatcttatccaagccgttggatgtcttgaagaatttggggtagagatcctgcctttgcaagtgcgattgtgccctgatcggatcagtctcatcaaggagtgtatttcccagtcccccacatgctataaacaatccaccaagcttctgggccttgctgagctgctgagggttgcaggtgagaacccagaagaaaggcggggacaggttctaatccttttagtggagcaggcacttcgcttccatgactacaaagcagccagtatgcattgtcaggagctgatggccacaggttatcctaaaagttgggatgtttgtagccagttaggacaatcagaaggttaccaggacttggccactcgtcaagagctcatggcttttgctttgacacattgccctcctagcagcattgaacttcttttggcagctagcagctctctgcagacagaaattctttatcaaagagtgaatttccagatccatcatgaaggaggggaaaatatcagtgcttcaccattaactagtaaagcagtacaagaggatgaagtaggtgttccaggtagcaattcagctgacctattgcgctggaccactgctaccaccatgaaagtcctttccaacaccacaaccaccaccaaagcggtgctgcaggccgtcagtgatgggcagtggtggaagaagtctttaacttaccttcgacccccttcaggggcaaaaatgtggtggtgcatatcaaatcggaactacagccaatgaagatctagagaaacaagggtgtcatcctttttatgaatctgtcatctcaaatccttttgtcgctgagtctgaagggacctatgacacctatcagcatgttccagtggaaagctttgcagaagtatttgctgagaactggaaaattggcagaggctaaaaataaaggagaagtatttccaacaactgaagttctcttgcaactagcaagtgaagccttgccaaatgacatgaccttggctcttgcttaccttcttgccttaccacaagtgttagatgctaaccggtgctttgaaaagcagtccccctctgcattatctctccagctggcagcgtattactatagcctccagatctatgcccgattggccccatgtttcagggacaagtgccatcctctttacagggctgatcccaaagaactaatcaagatggtcaccaggcatgtgactcgacatgagcacgaagcctggcctgaagaccttatttcactgaccaagcagttacactgctacaatgaacgtctcctggatttcactcaggcgcagatccttcagggccttcggaagggtgtggacgtgcagcggtttactgcagatgaccagtataaaagggaaactatccttggtctggcagaaactctagaggaaagcgtctacagcattgctatttctctggcacaacgttacagtgtctcccgctgggaagtttttatgacccatttggagttcctcttcacggacagtggtttgtccacactagaaattgaaaatagagcccaagaccttcatctctttgagactttgaagactgatccagaagcctttcaccagcacatggtcaagtatatttaccctactattggtggctttgatcacgaaaggctgcagtattatttcactcttctggaaaactgtggctgtgcagatttggggaactgtgccattaaaccagaaacccacattcgactgctgaagaagtttaaggttgttgcatcaggtcttaattacaaaaagctgacagatgaaaacatgagtcctcttgaagcattggagccagttctttcaagtcaaaatatcttgtctatttccaaacttgttcccaaaatccctgaaaaggatggacagatgctttccccaagctctctgtacaccatctggttacagaagttgttctggactggagaccctcatctcattaaacaagtcccaggctcttcaccggagtggcttcatgcctatgatgtctgcatgaagtactttgatcgtctccacccaggtgacctcatcactgtggtagatgcagttacattttctccaaaagctgtgaccaagctgtctgtggaagcccgtaaagagatgactagaaaggctattaagacagtcaaacattttattgagaagccaaggaaaagaaactcagaagacgaagctcaagaagctaaggattctaaagttacctatgcagatactttgaatcatctggagaaatcacttgcccacctggaaaccctgagccacagcttcatcctttctctgaagaatagtgagcaggaaacactgcaaaaatacagtcacctctatgatctgtcccgatcagaaaaagagaaacttcatgatgaagctgtggctatttgtttagatggtcagcctctagcaatgattcagcagctgctagaggtggcagttggccctcttgacatctcacccaaggatatagtgcagagtgcaatcatgaaaataatttctgcattgagtggtggcagtgctgaccttggtgggccaagggacccactgaaggtcctggaaggtgttgttgcagcagtccacgccagtgtggacaagggtgaggagctggtttcacctgaggacctgctggagtggctgcggcctttctgtgctgatgacgcctggccggtgcggccccgcattcacgtgctgcagattttggggcaatcatttcacctgactgaggaggacagcaagctcctcgtgttctttagaactgaagccattctcaaagcctcctggccccagagacaggtagacatagctgacattgagaatgaagagaaccgctactgtctattcatggaactcctggaatctagtcaccacgaggctgaatttcagcacttggttttacttttgcaagcttggccacctatgaaaagtgaatatgtcataaccaataatccatgggtgagactagctacagtgatgctaaccagatgtacgatggagaacaaggaaggattggggaatgaagttttgaaaatgtgtcgctctttgtataacaccaagcagatgctgcctgcagagggtgtgaaggagctgtgtctgctgctgcttaaccagtccctcctgcttccatctctgaaacttctcctcgagagccgagatgagcatctgcacgagatggcactggagcaaatcacggcagtcactacggtgaatgattccaattgtgaccaagaacttctttccctgctcctggatgccaagctgctggtgaagtgtgtctccactcccttctatccacgtattgttgaccacctcttggctagcctccagcaagggcgctgggatgcagaggagctgggcagacacctgcgggaggccggccatgaagccgaagccgggtctctccttctggccgtgagggggactcaccaggccttcagaaccttcagtacagccctccgcgcagcacagcactgggtgtgagggccacctgtggccctgctccttagcagaaaaagcatctggagttgaatgctgttcccagaagcaacatgtgtatctgccgattgttctccatggttccaacaaattgcaaataaaactgtatggaaacgatgaaaaaaaaaaa

SEQ ID NO: 81939 - DNA, 409 bp, Homo sapiens
  misc_feature (1)...(409): n = a,t,c or g
  sig_peptide (157)...(292): this location contains the signal peptide sequence, MWQFTILIVLCPYWLDLSFCTLTLSLSSCITLGKSLNLTKPRLLC, Run with SignalP
  misc_feature (181)...(281): similar to gi984241 in the genepept database release 114, Run with FASTXY 3.3t00, default parameters
nnaaactctattctgggaactggaatgtagcagaatgaggaaaacttaaagctcaaaaccatggagccttaaggcaggtgcttagcttgccaccacagcaaactgggaacagccactaaggaagggtggctggtgctcacctccctcacctagggcatgtggcagtttacaatactgattgtcttatgtccatattggctggatctatctttttgtaccctaactctgtcacttagtagttgtattactttgggcaaatctcttaaccttaccaagcctaggttgctttgtctaaagcggagattaatattaattgcttcttcaggctggtctgagtaagtgaacaaacatttaacttgggttcgcacactcctccattatggcatttccatctatatgtcaatagcgc

SEQ ID NO: 81940 - DNA, 1150 bp, Homo sapiens
  misc_feature (1)...(1150): n = a,t,c or g
  sig_peptide (272)...(407): this location contains the signal peptide sequence, MFLKFIHLIVVISCSFSLLNTSILFFKYTTVCLLISAESFFFLKA, Run with SignalP
  misc_feature (163)...(90): similar to gi2959423 in the genepept database release 114, Run with FASTXY 3.3t00, default parameters
gatccacgcgtccgcacacatcttaagtgtaccatttaccaagtgttatcaaacacatcatctatactgcttaagcctctgtcaagatactgaacgttaccgtcaattttcttatgctctttcccagtcagtcctactcctgtacttccggaagcaaccattgttctcatttttatttctaccataaatttgttgtgcctgctctagaattttatattagagaaggatacagcatttattcttttgtgtaaggcttcttttgcatagcacgatgtttctgaaatttatccatttgattgtagtaataagttgttccttttcactgctgaatacttctattcttttctttaaatataccacagtttgtttactcatttcagcggagtctttcttttttcttaaagcatatgggactcaggtatctgtggggtctttttaatttttctttttcttttttatctatcactgatatgtatttggagagaagggagtgcatcaaataggctcctaactgtgccgtctttaactaaaatttcctagtttaactggtgtgtattaattttagattattttatgtaaattgagtaaaggagctgctttttaattctattgggaattgaatttaccccctttcattctccttttaattctgttccatgggcattggcagagtttacatttttacatgaaatttaaaagcagaagatatatcacaggagagctttaggtgggggctttaaaaagtccattgtcctgcctgggtaatggggctcacggctggaacccagcacttttgcatgctacgtagncgcgacacctggcgctgcagtcgaaagcagccgctcatacggagaatcccgcttctcttgcctgcagaacctactggcccggtgcatttgtttggatatatctgctgggagcacccccgcatattcgttccccctccggaagttgttaaccgccgcgccctgcctcacgctggagtcaagccttcctcttgccactcggtcgggcgtccagcgcgacgtcaccgcgcgcgagggcgaccccccttagatctcgaagccaccgcgcgtgtccgatccggccaacggagaggaggcctcgtccgcgcacctccactccaactcagacgatgctgtgacacgcg

SEQ ID NO: 81941 - DNA, 392 bp, Homo sapiens
  sig_peptide (181)...(316): this location contains the signal peptide sequence, MHLTLSLLLFSLHFPTYIIRVNFCLVSNLFQRMRSTKLLRLIDLD, Run with SignalP
  misc_feature (181)...(297): similar to gi4731222 in the genepept database release 114, Run with FASTXY 3.3t00, default parameters
cgacccacgcgtccgcacacatgaggttcgtgacacacacacgaggcagtcggggagcagaatcaccaaatgccaaggtcacacaccaggttcccacgactgtctactactcagttatttttaacagctgttaaatatctcagactcaccccagcctgaagctaggtttctgacaataacatgcatttaactctaagtttacttctgttctccctacacttccccacgtatattattcgagttaatttttgtcttgtttccaatttatttcaaaggatgcgaagtacaaaactgcttcggctcattgacttagatttttcatttactttctctctcttggatctaccaccagtaaatgaatatgacatgtatatcagaaactttggaaaaaa

SEQ ID NO: 81942 - DNA, 1048 bp, Homo sapiens
  sig_peptide (569)...(704): this location contains the signal peptide sequence, MWFLLVSVVCLYGIGEGNFFSLASVFSLLSLCLHLLLWKRAFDRT, Run with SignalP
  misc_feature (519)...(655): similar to gi5103910 in the genepept database release 114, Run with FASTXY 3.3t00, default parameters
cccagagttctaggcattggaaagtaggattttctgataaagtaactcttggtgattgctttctgttgcctgtttcagagtccattcttttacgttttagactgacaggagagggcaaggagggaggacagagtttacgagggtggatttgtggacccatgtgtatgtttgtattcatctgattagttgtatcctaaagccaaatgtaagtgaattttcttactttagaataatatattctctcttttaaataataaagagttaaatgttgcgtgaaatattagagaagatgggagcttaatttctactgaaaaatcaggtaagaggaaatagctccacctacagggcaaataatttaaactagatataaagaaattccttgtaggaaatttgttacagacttgaatttactaccaaagctagatttgctatgcctgcctctaccttctcctgggcagagtgcctccatcccgccttagtacttacttttttgtccactcccaacctagcacatatatcagtctttctcactagccttgtgggtcttcatttctctctttctctgtccatgtggttccttcttgtgtctgttgtctgtctgtatgggattggggaagggaatttcttctctctggcctctgtcttctctttgctgtctctgtgccttcatcttttattatggaagagggcatttgacaggactgatgtacttacatctgaatggattttttaaattccctgcagaattgtatagaatgttgaaaaacttaggtggattgttgtttaagtgacagatatatccatcaaagaatggaacatttctttgagagagcggaaaactacctgttcttagccgggcgtgggggctcatgcctatagccctaacactttggcaagccccagagggtccatcgcttgagctcaggagttggaaatcaggccgggcaccctggacgaaataccattttccccgagagaacatacgcaactactcccgccgtggagggaacggcgaccgggagacgttcacttcttgaagggcagtaag

SEQ ID NO: 81943 - DNA, 622 bp, Homo sapiens
  misc_feature (1)...(622): n = a,t,c or g
  sig_peptide (290)...(155): this location contains the signal peptide sequence, MRSEWFYKWFFPPFALHFSLLPPCEEGHVCLPMCHECKFPEASPA, Run with SignalP
  misc_feature (188)...(249): similar to gi2465335 in the genepept database release 114, Run with FASTXY 3.3t00, default parameters
tagcagcgtgctgtgggggcacctggaaggggcatggggcccatatgcactgagggcaagggtatcagttcgtgctcacgttgctagtaaagacttatttgatactgggtaatttataaggaaaagaggtttaattgattcacagttcatggtggctggggaggcctcaggaaacttacattcatggcacatggggaggcaaacatgtccttcttcacatggtggcaggagagagaagtgcagagcaaaaggggggaaaaaccacttataaaaccattcagatctcatgagaactcactcactatcatgagaacagcatgggggaaccacttccataatttatttacctcccatgaggtctcacccatgacatacggggattatgggaactacaattcaagatgagatttgggtgggcgcacagccaaaccatatcataatataagaccatcaggtagaaaaagggatgaaagcaatttctctcctgctcacatggcattgtttccaaccctgtcaaataagcagactttctgccaaatggatgtgatcataagccaagggtgagcctcccnatcagnnnnggnntttcacagcnttcgaaggattcagtttttagcaccct

SEQ ID NO: 81944 - DNA, 667 bp, Homo sapiens
  sig_peptide (458)...(323): this location contains the signal peptide sequence, MEFFSYILTHILSILLVAFLFIVTTFTLKLSTMPSPTLERCPISY, Run with SignalP
  misc_feature (425)...(292): similar to gi727243 in the genepept database release 114, Run with FASTXY 3.3t00, default parameters
gattgtcctaatgtatatggctagtagtagacagagttgaaactcatatgccggaagcttgtcttcaaattcgaaggggttagtcagtatgctagatacattagtatttgtcacatgtccacagattgtgattttgtggataaagcccctgcccttcatagtctcaagacatcacagggtcagatattgccaatttacagacatattcagttgtcattatgggcactgtatcagcatttcagtgttgttctttttgaagttctgtgcatgtagaactctgcactgcatttcatataatcaaagaagatacaaagatgaagcatatgaaatgggacacctttccaaggtaggagatggcattgtagacaacttcagggtaaatgttgtcacaatgaatagaaaggccactaggagaatactcaggatatgagtcagaatgtaagaaaagaactccatggaacctgcagtcacgtagcattgatttccaggacatagaggtatctgctgagtagttgctcatttatgtctacagctcactcttaaaaatcttaagacagatgttgactcgttctagtaagagttaatcttagctatatttttaaaaatcatgaatgttaccgaatatcttaattgccacaaattcattggtgttattttcaaagccgaa

SEQ ID NO: 81945 - DNA, 432 bp, Homo sapiens
  sig_peptide (230)...(365): this location contains the signal peptide sequence, MCRQILWPCLPKTCRIYSLLATSLSHSASGHPVCPCTIAGALARV, Run with SignalP
  misc_feature (303)...(426): similar to gi221564 in the genepept database release 114, Run with FASTXY 3.3t00, default parameters
aattcaactccaaattcctctctctgtctaccctgtacctctatttgaaccactaagaggcatctcagacttaaagtgtcccaaactgagcccctgtgatgcccccagagctgctcctccccaccacctcctcctcagcaatggcagcttgattcttctttgggctttattcagtcccccaactttggagctttcttgacccctctctattgctcacatgccatattcaatgtgtaggcaaatcctttggccctgccttccaaagacatgcagaatctactcacttctcgccacctcgctgtctcactctgcgtcaggccaccctgtgtgtccttgcacaattgcgggagccttggctcgagtcctccagaccttctacctctttgacttcatctagtgctgctccaagccccgtgctcttccttggacaca

SEQ ID NO: 81946 - DNA, 480 bp, Homo sapiens
  misc_feature (1)...(480): n = a,t,c or g
  sig_peptide (158)...(293): this location contains the signal peptide sequence, MGLTPWLLRTHQRLWASHYACLGALGLCCFSECELWVCAGEGEKT, Run with SignalP
  misc_feature (451)...(220): similar to gi62324 in the genepept database release 114, Run with FASTXY 3.3t00, default parameters
gcnagatnncccgatgtccggncaactgagannccaaatnngccagnaanngncgcggaantcgtcaggattttatttttagtttacattatacaatagtttaaaaaatcctttcacggtgtcttctaagtcttaactctcagcaggtacagatcagatgggactcaccccatggctgctcagaacgcaccagcgcctctgggcatctcactatgcatgcttaggcgccttggggctctgttgtttttcagaatgtgaattgtgggtgtgtgctggggagggagaaaagacccaagagagagcaaccctggaaagtggggttgctgtagaggaaaccctggggtggggcatttcctgtgaccctgagcggggaggaggcaggcgagggtcacaggagacaaaggcagccagccaatggaatgacgcatgcccattgctgagccctaggtcagatatgctgaaaggtaaagtacacacaaa

SEQ ID NO: 81947 - DNA, 403 bp, Homo sapiens
  misc_feature (1)...(403): n = a,t,c or g
  sig_peptide (101)...(236): this location contains the signal peptide sequence, MGXXFXFXXWXVCVLPPPQILAGAHLPGWLSSRAFFFPPHLICYT, Run with SignalP
  misc_feature (161)...(192): similar to gi4262035 in the genepept database release 114, Run with FASTXY 3.3t00, default parameters
cagcatttcccccttattttattcatgtaatgctaattagttttggggatatgaatctagaatcgagcatttggttatcagaagaggctagatatatcanatggggnnnttntttgnttttnnnngttggngggtttgtgttttgccccccccacagattttggccggtgctcatcttcctggctggcttagcagcagggccttctttttccctcctcacttgatttgctacacctacactcaccccttctgtctgagcctctgccacctcagtgcaggtgacagccctggcaggataggctggcagctgaggagaaaagagatagaattgatcctcactagagagatgtttcccttcccttcctctgttccttggtctctgccctctggcctcagtccagtt

SEQ ID NO: 81948 - DNA, 3884 bp, Homo sapiens
  sig_peptide (3269)...(3404): this location contains the signal peptide sequence, MWIYFWTLNSVPVIYMSTLMSIPHYFDYCCFIVSDIMLPEITFST, Run with SignalP
  misc_feature (3042)...(3107): similar to gi3834505 in the genepept database release 114, Run with FASTXY 3.3t00, default parameters
ttttttttttttgagacggagtctcgctctgtcgcccaggctggagtgcagtggcgggatctcggctcactgcaagctccgcctcccgggttcacgccattctcctgcctcagcctcccaagtagctgggactacaggcgcccgccactacgcccggctaatttttttgtatttttagtagagacggggtttcaccgtgttagccaggatggtctcgatctcctgacctcgtgatccgcccgcctcggcctcccaaagtgctgggattacaggcgtgagccaccgcgcccggcctatacgcttttttctgttaaaaaatatttttaagtttttaaacttttgttaaaaattgagacagaagcaaacacattacttactaggcctacacagagccaggattatcagtatcaatcccttccgcctccacatcatgtcccactggaaggtcttcggggcagtaacggacatggagctgttatctcctaacatgccttcttctggaatacctcctgaaagacctgcctgaggctatttaacagttaactttttttttatatgtaagtaggagtactctaaaataacaatataaaatgtagtacaataaaataaataagccagtaacgtagttgtttattatcaagtatgtactgtacataattgtatatgctagacttttatacagctggcagcacagtaggtttatttataccagcacctccacaaacatgtgagtaatgctttgcacttgaccttctgtcagctatgacatccctaggttgcaggatttttcagcttcattataatcttatgggaccatcttcatatgtgagtggtctcttgacccaaacattgttatgtagcacatgactgtaaattttggaatcaccttgtcagtatttacaaaatagctttctgagatttagtggcaggatctcagctcactcctacctgcacctcccaggttcaagcgattcttatgcctcagcctcccaagtaactgggattatagacgtgcaccaccaagcatggctaatttttgtatttttagtagagacagggttttgccacattggccaggctggtctcaaactcctggcctcatgtgatctgcccgcctcagcctcccccagagtgctgggattacaggtatgagccactgcgcctggccaaaattgcctaaatttttaaaatcctaaattggtgttgaattttgtcaaatgctttcctgcattgattttgatgatcacttgatttttctccattcttttgttaatgtgctaaattatgttgcttaatttttgaatgaaaaaataatcttacattcctgaaataatttcggtttggttgtgatgttttattcattctatttcgtgctgaattcagtttgctaatattttgtttaggaattttgcatctatgttcatgagacagatcggcctgtaattttacttttttgtaatgtccttgtcaggtttaggcctcaaagttatgttgactttataaaatgaactgtgaagtatttcctcttttttatgctttagtttgagtaagattgattttttttaaaacttatgtcgtccttaaatatttattagaattcactagggaagttatcttggcctgttactttctttcttgagtaaattttgttttcattctttttttatagttaagtatattgagttagaatgcatacacaaacaaatgcacacaacttaaagtccagttctatgaattttgactaatgtataaacctgtttaacttccactgtaagcaaaatatagtgaattttcgtcaactaaaaagtccccttgtacccatttaccttcagtacctatccctaccccagccacaggcaacaaatgattttcatgtgcttatttgccatctgtatacctctttggttagttttctgtttatatcttttgcccatttatttttttaatttttagaaacatgggtcttactatgttgcccaggatagactcaaactcccggactcaaaggacccttccctctcagcctcccgagtagctgggattacaggcacacactactactcttggtttgcctatttttaaatcaggttgtttgttttcttattattgtgttctctacactgtaggatattctacctttcctagaatttcatgtaaatggactcagacatactgttgtgtctggcctcttttgttcagtgtaatgtttttgagcttcatccttgcatgttatgtgtatcagtgattgattcaatttttattgctgcatagtattggattgtatagctataccacaatttgtttattcattctcctgttgatggaatattggttgtttccagtatttagctattattattattattttttttttttgagacggagtctcgctctgtcgcccaggctggagtgcagtggcgcaatctcggctcactgcaagctccgcctcctgggttcacgccattctcctgcctcagcctcccgagtagctgggactacaggcgcccgccaccacgcccggctaatttttttgtatttttagtagagacggggtttcaccgtgttagccaggatggtctcgatctcctgacctcgtgatccacctgcctcggcctcccaaagtgctgggattacaggcgtgagccaccgcgcccggccttgtcttcacttttgtttttttggttttttttttgagacggagtctcgctctgtcgcccaggctggagtgcagtggtgcgatctcggctcactgcaagctccgcctcccgggttcacgccattctcctgcctcagcctcccaagtagctgggactacaggcgcccgccactacgcccggctaattttttgtatttttagtagagacggggtttcaccgtgttagccaggatggtttcgatctcctgacctcgtgatccgcccgccttggcctcccaaagtgctgggattacaggcgtgagccaccgcgcccggccagggatgtcattttttataactagccataaactttagctttgaagtaaaactatttctagcaagtgattcttacctgatattttttgttgttcttgcccatattttaattgggttgtgttattatggttctctatgtattctagatttaagtttttgtatatggtgtgaggcaagtgtcaagtttaattttttttctacaaacatcctgttgttccagtaccttttgatgataagactgtcttttcccccattgaattatcttaacgccctcatgaaaagcaattggccatatgtatgtggatctacttttggactctcaattctgttccagtgatttatatgtccacccttatgtcaataccacattattttgattattgctgctttatagtaagtgacatcatgttgcctgaaatcacgttttccacctttattcttctgttgatggttgctttggcaattaggggtcctttgcattttcgtagacattttagaatcaacttatctattgctactaaaaatgcttgattgggattgtggtaaatctagaaactaatttaggaagaatggtcatattaacagtttcaagtttcagatccatgagcatattttcactctccattaggtcttttaaaatttatcctagcagtgttttatggtttttactgtagaggtcttacacattttgttacatttgttgctatgtgtttgaccttttttgatactagtgtaaatggaaattttttcttttatgttctagttgttcattattacactaaatcatctttgggtgactactaaacattctattgaaaatttgtgaatggcgtgaacccgggaggtggagcttgcagtgagccaagatcgcgccactgcactccagcctgggcgacagagcaagctccgtctc

SEQ ID NO: 81949 - DNA, 394 bp, Homo sapiens
  sig_peptide (355)...(220): this location contains the signal peptide sequence, MILLLSLLKFLHQEGFLYTSHKFFLSCISFPFPPQPQISHWLGGE, Run with SignalP
  misc_feature (299)...(199): similar to gi1683614 in the genepept database release 114, Run with FASTXY 3.3t00, default parameters
gacaggaaattgggtatggatgcaaagtcttattggggagctatctacttcaatggcttcttgctgaacttttctttgctgaacggattacattgtctctgggccccacatcttatagcatatagcagggatagaaagaaagccagtcctaccacctgtccttacaggaagaaactcttttgcttatacttttgctctgccagggcatttcactcttcctttcacctcccaaccaatgtgagatttggggttggggtgggaaggggaaggaaatacaagagaggaagaatttatgactggtgtacaggaagccttcctggtgcaggaatttaagaagagaaaggagaagaatcattgccaactcaccctcatcctcatggccgcctatatatgg

SEQ ID NO: 81950 - DNA, 3505 bp, Homo sapiens
  sig_peptide (849)...(984): this location contains the signal peptide sequence, MVKSVIFLSFWQGMLLAILEKCGAIPKIHSARVSVGEGTVAAGYQ, Run with SignalP
  misc_feature (201)...(1324): similar to gi5596705 in the genepept database release 114, Run with FASTXY 3.3t00, default parameters
gcatcgtccgcagacgccgccaccgccatgggctcctgaggctagcttgtcactttctgcaaaggtttccctcagggagcctcctgctgccaggcaccatgacagtgaggggggatgtgctggccccggatccagcgtcgcccacgaccgcagcagcctcgcccagcgtctccgtgatccccgagggcagccccactgccatggagcagcctgtgttcctgatgacaactgccgctcaggccatctctggcttcttcgtgtggacggccctgctcatcacatgccaccagatctacatgcacctgcgctgctacagctgccccaacgagcagcgctacatcgtgcgcatcctcttcatcgtgcccatctacgcctttgactcctggctcagcctcctcttcttcaccaacgaccagtactacgtgtacttcggcaccgtccgcgactgctatgaggccttggtcatctataatttcctgagcctgtgctatgagtacctaggaggagaaagttccatcatgtcggagatcagaggaaaacccattgagtccagctgtatgtatggcacctgctgcctctggggaaagacttattccatcggatttctgaggttctgcaaacaggccaccctgcagttctgtgtggtgaagccactcatggcggtcagcactgtggtcctccaggccttcggcaagtaccgggatggggactttgacgtcaccagtggctacctctacgtgaccatcatctacaacatctccgtcagcctggccctctacgccctcttcctcttctacttcgccacccgggagctgctcagcccctacagccccgtcctcaagttcttcatggtcaagtccgtcatctttctttccttctggcaaggcatgctcctggccatcctggagaagtgtggggccatccccaaaatccactcggcccgcgtgtcggtgggcgagggcaccgtggctgccggctaccaggacttcatcatctgtggggagatgttctttgcagccctggccctgcggcacgccttcacctacaaggtctatgctgacaagaggctggacgcacaaggccgctgtgcccccatgaagagcatctccagcagcctcaaggagaccatgaacccgcacgacatcgtgcaggacgccatccacaacttctcacctgcctaccagcagtacacgcagcagtccaccctggagcctgggcccacctggcgtggtggcgcccacggcctctcccgctcccacagcctcagtggcgcccgcgacaacgagaagactctcctgctcagctctgatgatgaattctaggtgcgggctgcagtggcggaagtgctggcgccatagccacggtcaggctgtgccccacctccagcctcaccaccaggccaggaggcagctggcacagtgctcacgccgcctttatttattggaccagaaacactcacatgtcacttccagaggaacgggggacagccaggctcgcccatgggccttcaggaatatttatacatggcccagcctgcactgcccgggcgagggcagaggacactgggagcaaggcttatgcccctgctgcccgtcctgtgctgggggcatgctgggaccagccgcacccaggccccaatgcttgtgtgtggaccagcggctgcagccttctagcccctcctccccgcgagactctcaggctgaggtcggcaagccgtggctcccccacacaccgtgcaataccctgtctgacctgggctcttcccgcctgcatccctcccctgtccacctttgtccagtgctagattcacctcaccccgggcaggagtggggatgtgggcgctctgtggtcctcccctcctgacccaggcctctgtggcatgctgcaaggatcagagccagacaccaggagtcacaggccccacccaggaagggcattcagggcccctgggcaccgcttctgttgaagcaggggcttctgggcccctgggtatccccacctgtcgtggccacacctctgcctgcctcatgccccttccccctggcctaccaaggacagcccacagcccgcactgccggctcacttgggtccttcctcgatagctttgggcagagcccttgcttcctggctgcttcagggctcaggggctcccagccctccttcccaggctgatgctgggtcctctctctctttggggcttctccctcccgtttcaggggaaaggtctgagtctccacgtttcagaccagcttctgggggaaggcagtccggcagggagaccgggaggggtggccacacagtggggagctgggaggtggggggaatggtcccagactcctctcggggcccctatccacacagggcctggtgttctaccccatctggcccctggcccatctcttctgtgccttagtcacatatgaaagcgcccctccctggctccccatctgtcccacacgctccctggggctcttagttcagctgctggcactcgcaggatcctgcagtgctgggcccagagcccttggacaggcctcaggagtggtcaggaccaccaagcccctcctctccccctccacacctctagacctggggcctccggaacccccagcaggctgggcttatactagctcctgacttaggaagagcctcgtgtcacaacacgtgtccctacaggcaaagtgtcctggcatttaaaacccagattatccctgggtttgggctgcagtcacctggagaagctggtagggtaagggagagggaccctgccggtgttcactggggattctttcttttggtccttcctggaatgaacaggttccctccctgccacctgtgaggagagttggggcccagccgtcttcctggcctccttcctttcctcgtggcagaggcctgcatgtgggtgccagaggccagctctccccctccatcttgggggggcggagcagttgggcccaagctgcccgggagggtgggtgcagacacaggctgaggaccagccctggccctgccccgccatctgctttcaccaagctgtctctccaccgtggcttcccttctccctccaggccaaagtgctgctgattcccactcccttggttttcgcctgcccagcgttgctgtttgcgtggagggtggggggagctcagtggcagggaatcagcggtccgtggggtcgtggggacgggaacatgtgcccgaccgctccatcccctcctcctccttaggatgcataacctaccttgtctttttttttttaaattttctttccaggttagagtagctctttgtacataaagaatacttgaaaaattaattgtatgatgtatgagcgaagacagaggtctcctagttttgtatcttgttgtatgactgccatgagttccaccagaaagccactctattttggtctctgtgacattttaaatgcgtgacagaagtgagcaaataaacgtgaggaagaaatctatatatgagataatatagattgtattgaaatctc

SEQ ID NO: 81951 - DNA, 464 bp, Homo sapiens
  misc_feature (1)...(464): n = a,t,c or g
  sig_peptide (175)...(310): this location contains the signal peptide sequence, MARQTLFEACLIWPLAGMYSEIFFKWKRKHRTQFSKYLQPSKKSL, Run with SignalP
  misc_feature (300)...(154): similar to gi396318 in the genepept database release 114, Run with FASTXY 3.3t00, default parameters
ctccccatgagatcgtagatatagcacgngcggtggaattctcttatatgtaatccacttttaaaaagaattttgcttagcgttgatatatacacatttaacacagctatagaaactattgtagttactattggcatatgaggaaattcgaccctgggttgccgtagggcgcttatggctaggcaaactctctttgaagcctgcctgatctggccccttgcaggcatgtactccgaaatatttttcaaatggaaaagaaaacacagaacacaattttcaaaatatctacagccctccaagaagtctttgtagagatctataccatctcccggcaatttaaagggaataagacaactttattaataattaattaacatgaaatgttaatgatagccccttgcatagctatattatctttttctgaagaatagaaaaatgttttagaaacactattctctccacat

SEQ ID NO: 81952 - DNA, 478 bp, Homo sapiens
  misc_feature (1)...(478): n = a,t,c or g
  sig_peptide (116)...(251): this location contains the signal peptide sequence, MAGLNCGVSIALLGVLLLGAARLPRGAEAFEIALPRESNITVLIK, Run with SignalP
  misc_feature (273)...(104): similar to gi258915 in the genepept database release 114, Run with FASTXY 3.3t00, default parameters
gaagtccnttcgagaccattttgtagatccttagtccgtgcggtggaattcgggcgcctggggccgccgctccccaccgtcgttttccccaccgaggccgaggcgtcccggagtcatggccggcctgaactgcggggtctctatcgcactgctaggggttctgctgctgggtgcggcgcgcctgccgcgcggggcagaagcttttgagattgctctgccacgagaaagcaacattacagttctcataaagctggggaccccgactctgctggcaaaaccctgttacatcgtcatttctaaaagacatataaccatgttgtccatcaagtctggagaaagaatagtctttacctttagctgccagagtcctgagaatcactttgtcatagagatccagaaaaatattgactgtatgtcaggcccatgtccttttggggaggttcagcttcagccctcgacatcgttgttgcctaccctc

SEQ ID NO: 81953 - DNA, 461 bp, Homo sapiens
  sig_peptide (36)...(171): this location contains the signal peptide sequence, METLSPVPCPTCLAWLWTWPVGGMWVRSPLILAGFLHPCGVERLH, Run with SignalP
  misc_feature (93)...(43): similar to gi1334716 in the genepept database release 114, Run with FASTXY 3.3t00, default parameters
atccctagtcagtgcggtggaattcccaccatggtatggagaccctgtcccctgtcccctgccccacctgcttggcctggctctggacctggcccgtcggaggaatgtgggtcaggagtccacttatccttgctggttttctccacccctgtggtgtagagagattgcatcaattcttgtctatagagatttcccatttccttttcttgtttttgtgctggctatgtgcttataaatacatttgagatctttaaaagtatgtgttggggaagaagagaggttgcaggctgagctcaatccaacatctggaccctgatatctagtgaggaatgtctcaggagaggcatagaagactcaggtgcaatgacagagaagctcctggcttcatctctttagattctgagatagggaggcatgggaaaggaggaataacgtacaggtaaagaggggaggaggaaaag

SEQ ID NO: 81954 - DNA, 4198 bp, Homo sapiens
  sig_peptide (2767)...(2632): this location contains the signal peptide sequence, MIETWLWLLLLNVGGTGQWSGPTFRRENVLPAAHIGPKYGPLLPS, Run with SignalP
  misc_feature (3891)...(3985): similar to gi1345536 in the genepept database release 114, Run with FASTXY 3.3t00, default parameters
cggaggggtccaggccgagtaagcggagcgccgagcccagctgatgcaacctggctggactcgcgtgacagttcccggcacgcggcggcgacggtgacccaggaaggggctctggtgccgggctgagcgggggaagcaggggtagcggagccatgggggacgctcccagccctgaagagaaactgcaccttatcacccggaacctgcaggaggttctgggggaagagaagctgaaggagatactgaaggagcgggaacttaaaatttactggggaacggcaaccacgggcaaaccacatgtggcttactttgtgcccatgtcaaagattgcagacttcttaaaggcagggtgtgaggtaacaattctgtttgcggacctccacgcatacctggataacatgaaagccccatgggaacttctagaactccgagtcagttactatgagaatgtgatcaaagcaatgctggagagcattggtgtgcccttggagaagctcaagttcatcaaaggcactgattaccagctcagcaaagagtacacactagatgtgtacagactctcctccgtggtcacacagcacgattccaagaaggctggagctgaggtggtaaagcaggtggagcaccctttgctgagtggcctcttataccccggactgcaggctttggatgaagagtatttaaaagtagatgcccaatttggaggcattgatcagagaaagattttcacctttgcagagaagtacctccctgcacttggctattcaaaacgggtccatctgatgaatcctatggttccaggattaacaggcagcaaaatgagctcttcagaagaggagtccaagattgatctccttgatcggaaggaggatgtgaagaaaaaactgaagaaggccttctgtgagccaggaaatgtggagaacaatggggttctgtccttcatcaagcatgtcctttttccccttaagtccgagtttgtgatcctacgagatgagaaatggggtggaaacaaaacctacacagcttacgtggacctggaaaaggactttgctgctgaggttgtacatcctggagacctgaagaattctgttgaagtcgcactgaacaagttgctggatccaatccgggaaaagtttaatacccctgccctgaaaaaactggccagcgctgcctacccagatccctcaaagcagaagccaatggccaaaggccctgccaagaattcagaaccagaggaggtcatcccatcccggctggatatccgtgtggggaaaatcatcactgtggagaagcacccagatgcagacagcctgtatgtagagaagattgacgtgggggaagctgaaccacggactgtggtgagcggcctggtacagttcgtgcccaaggaggaactgcaggacaggctggtagtggtgctgtgcaacctgaaaccccagaagatgagaggagtcgagtcccaaggcatgcttctgtgtgcttctatagaagggataaaccgccaggttgaacctctggaccctccggcaggctctgctcctggtgagcacgtgtttgtgaagggctatgaaaagggccaaccagatgaggagctcaagcccaagaagaaagtcttcgagaagttgcaggctgacttcaaaatttctgaggagtgcatcgcacagtggaagcaaaccaacttcatgaccaagctgggctccatttcctgtaaatcgctgaaaggggggaacattagctagccagcccagcatcttccccccttcttccaccactgagtcatctgctgtctcttcagtctgctccatccatcacccatttacccatctctcaggacacggaagcagcgggtttggactctttattcggtgcagaactcggcaaggggcagcttaccctccccagaacccaggatcatcctgtctggctgcagtgagagaccaacccctaacaagggctgggccacagcagggagtccagccctaccttcttcccttggcagctggagaaatctggtttcaatataactcatttaaaaatttatgccacagtccttataattggaaaaatactggtgcccaggttttcttggagttatccaagcagctgcgcccctagctgggatctggtacctggactaggctaattacagcttctccccaacaggaaactgtgggatttgaaaaggaaagggaagggaaaacagagaacctagtggtctaccaagtggttggcaactttcccaatgtctgcttactctgaggcttggcactgggggccagggcctgccccagggctcctggaatttcccttgatccagctaggctgggacactccctaaatcagctgcgtgttgttagcatcaggcagaatgaatggcagagagtgattctgtcttcatagagggtggggtacttctccataaggcatctcagtcaaatccccatcactgtcataaattcaaataaaatgtctgaacaagggtgtctggatgtgagctggaccatctcaggagagaacacaagtgtgaggcagctgctggcccctcacctagtctggggttcctttaccctgtaatggggggtggggggtagaagatggacaagacaccttaacagtccctttggcagtactaggcagaagaggcccatacttgggtccaatgtgtgcagcaggcaaaacattttcccttctaaatgtgggcccagaccactgccctgtccccccaacattaagaagcagtagccacagccaagtttcaatcatttaattaacatctttaaatgaaacacagttttcttcatgtgtctcactcaggcttcagggcagagggaatggatttttagacatatcaaagactcaaaaatttaaagaaatatatatatgtatatatatacttctaacattttatggaaattaaaaatcagaggcttttggtctctccatttactctaggtcaagctcatttaccccagaggacaaagaagggctgcctcttctagaccctcccttctcctttgtcctctgtcccacccagcagggaaaccaagctcagaagatcctaacaggatagagttccagtaatgttggaggagggagagggaaagagaagtcaggttctctcccacctccagccattcccaggttgctgccagggcctggtttcatgcagctttgacccagtcctggatcctagggggtggggtagatcaggagctctgagcagaacagtgctcactgattatcctctttccccaactcagtgggcaggtgcagcgtacacccagcagcactctccactgcccacaggcaagggaagaatattgattgattagctacaaggagaagacagtagtgactagtggaaaacaccctggagagggccagaggaacctggctctcaccacatcccctctgttcccagccttggtgagggggcggggaggtcatgtcaacctctctccttggtggtgaagctaaaagcaaggttccttgccagactcaagcccaagtcactgttaaggaaagaggatcaagaaagaagcggtggccctggggggcagccacgctgctgtggacccacaggggccaatggggaagccagcttgcctagacaggtggcacaggctgaaaatagaaaggttaacattcccggagagtacagtaagagaggctgatacctaggggaccaccacccagcctgccctagaagcactgggtgcccctcattgactagagaagacttgagtaaaatgcacctgtggcttcccatccttgtcactcagcgttagctgcccccagtggaaccacctgtgctgaaaggcagctgcagaaaggacatgcaccgaaatgaggagagagaaaggtcagagaatgaagtgtggagggccaggcctgggcccactgctcaaggaagctccccccctccagatgctcccttccatccacctcctcagtgcttgctcagcccaaaggctcctgcctctgaagtgctgggggcccacccaccccagtgtggtcaaggaggcaaggggcaggtgcttgacactgccaagtgccccgagatgactctactgctcacccatttctttgggccctggcagtctcctacttgtccccagcatggagcacctggcagaactggaaggcaggagggtggttggtgagttgaggcacaggaaggccaatcccctctcgtgcc

SEQ ID NO: 81955 - DNA, 861 bp, Homo sapiens
  sig_peptide (65)...(200): this location contains the signal peptide sequence, MAPRALPGSAVLAAAVFVGGAVSSPLVAPDNGSSRTLHSRTETTP, Run with SignalP
  misc_feature (151)...(4): similar to gi338332 in the genepept database release 114, Run with FASTXY 3.3t00, default parameters
tcgactctttcgtcccgagcgcgggacgcggcgccctgggggaggagggcgaagcgacgcggcgatggctccgcgggcactcccggggtccgccgtcctagccgctgctgtcttcgtgggaggcgccgtgagttcgccgctggtggctccggacaatgggagcagccgcacattgcactccagaacagagacgaccccgtcgcccagcaacgatactgggaatggacacccagaatatattgcatacgcgcttgtccctgtgttctttatcatgggtctctttggcgtcctcatttgccacctgcttaagaagaaaggctatcgttgtacaacagaagcagagcaagatatcgaagaggaaaaggttgaaaagatagaattgaatgacagtgtgaatgaaaacagtgacactgttgggcaaatcgtccactacatcatgaaaaatgaagcgaatgctgatgtcttaaaggcgatggtagcagataacagcctgtatgatcctgaaagccccgtgacccccagcacaccaggggagcccgccagtgagtcctgggcctttgtcaccaggggggacgccagggaagcacgtctgtggccatcatctgcatacggtgggcggtgttgtcgagagggatgtgtgtcatcggtgtaggcacaagcggtggcactttataaagcccactaacaagtccagagagagcagaccacggcgccaaggcgaggtcacggtcctttctgttggcagatttagagttacaaaagtggagcacaagtcaaaccacaaggaacggagaagcctgatgtctgttaatggggctgaaaccgtccatggggaggtgccggcaacaacttgtgagagaa

SEQ ID NO: 81956 - DNA, 775 bp, Homo sapiens
  sig_peptide (539)...(674): this location contains the signal peptide sequence, MQPLHWRRIFICQVAGPLASLILLNPARTYLQGAHFPRRASLEGG, Run with SignalP
  misc_feature (358)...(213): similar to gi1490358 in the genepept database release 114, Run with FASTXY 3.3t00, default parameters
actgtggtggaattcgcagctgtggctgcctgggttattggaagtcatggagcccctgtcatgggaagaaatgctcacgttatcttcagggagtttcaggaggtttttggctcaaggcacccaactgtcaggcacaaagaaagcattgtgtccctaccctcactgctctcctgtgcccaggttattaacacaaattccattattgtcaaggctttggctagaatggcttgttcctgctggggctgaccattagaactgagatggaggaacaaaagctcccccgatcccgatcctaaccttccacccagtcccctcccactccccaggtcccataaagtggcgggagcatcgtagcgtaggaagaagccgccacaccttcctccataacctgggaggatggaagagctcttcgaagctttgctcttcgtgtccccctgaaacaagggttactgtgagtcttgcacacaaggaacatgcgctccaaggttcctagccaggtgggtgctctgcaaagttagggcaaagagagtctggccacatgcagcctctccactggagaaggattttcatctgccaggtggcggggcccttagcctcgttaatcctgcttaatcctgctagaacatacctacagggagcccactttccacgcagagcatcccttgaaggaggggcttcccagaatgctgaggattctgggcttctcagactccgatcagatgcacctcagccctgggatcagtgccccagccctgcctgccagtttcctttttca

SEQ ID NO: 81957 - DNA, 490 bp, Homo sapiens
  misc_feature (1)...(490): n = a,t,c or g
  sig_peptide (35)...(170): this location contains the signal peptide sequence, MLLVXXXXXXXXXXPSFLLPPPCSLSRLSLLAEKWREAETFSFIR, Run with SignalP
  misc_feature (92)...(207): similar to gi233061 in the genepept database release 114, Run with FASTXY 3.3t00, default parameters
tgggctagnaggggggcatgagaccntngaactgatgttgctagtaaanccncnnaannnnttnntgnntgngnggccgtctttcctccttcctcctccctgtagcctttcaagactgtctctgttagcagagaaatggagagaagcagaaaccttctctttcataaggtattttctgaggatgcaatttctccctttgcagccaagtggcatttctgagcaggatgttaatgagcccagtgcagcccttggtaggcagcaactgaccagcagagctggaagtgtgctcttggctttcagagatatctccagtgatgctcggagccaccagttttccagtttggtggtgaagctgtgactcagaattgaagcctatggtaattttatctcatctttcattttggcctcggccctagaagttctgaagaattgatttcagactgtggaaaatcaaagaacaaaatctcattttattctggaaaccatagcn

SEQ ID NO: 81958 - DNA, 848 bp, Homo sapiens
  misc_feature (1)...(848): n = a,t,c or g
  sig_peptide (70)...(205): this location contains the signal peptide sequence, MWSQIAFVRIPFCFSLLSHSNAWFVQKAASQRQASISTACHCPAE, Run with SignalP
  misc_feature (260)...(144): similar to gi769717 in the genepept database release 114, Run with FASTXY 3.3t00, default parameters
aataagggttcttcatgtacatgcctgtgttgtctccatggctaaatactaagccccctgaggccaggcatgtggtcacagattgcatttgtacgcatcccattttgcttctccctcctctcacactccaatgcctggtttgtgcagaaagcagcttctcaaagacaggcatctatcagcacagcctgtcactgtcctgcagaggcaggaggtgagaggatcactgtgagcaccactggggcccaaagaaatgcagcgatggtgccagacctgcagagcccacggagaagctgagcccagagccagatctgtggcaccatcagcgtctgcagctgcacttccttgtcccatttctgaagtggcctctgaataaaatgtgatatactcatttctgtgctgtaacagaatagaaaccaaaatgcattaagcacctctctatgctaggatgtgataggcattattgggtcactgggtcactcagcaatcctttatggtagataatgttgtccctacattgtatacaagaaacaaaggtgtaggcttggtgccgtggctcacgcccataatcccagcactttgggagggcaaggcaggcaaaataactgagggtaggaagtggaaaacaacctgggcacatggaaaaaccccatcctactaaaatacaaaaattaactgaaaacacttgaaccccggagggggggttgccngaacccaaatattgccctgcattccaccctgggcttcaaagggagattctttttaaaaaaaaaaaagggggcccgctttagaagcaactcttccccgggcgggggatttaaattttttaagggaccaaaataaccgagccc

SEQ ID NO: 81959 - DNA, 1621 bp, Homo sapiens
  sig_peptide (1195)...(1060): this location contains the signal peptide sequence, MPSLMMVLEARFVSSCLIFPSRAMPLLSRLLASKGSSVNVLVKVL, Run with SignalP
  misc_feature (477)...(526): similar to gi2961551 in the genepept database release 114, Run with FASTXY 3.3t00, default parameters
gggatctagcgaggatgccccctacaaattccccacatcacgtaggccaggagcctcagcggtgccccttcaggctcatctcggcaagacggtaccagcttgctcagaacaggggctggctattcatcatctcagagcatagagaccctctccttgccacccggcccttcccacctggttggtgacaaatcacaaggtggtagaagttgccagggacagataacatcggcagccagcgggaagaccagcaagtccgaaccgaaccatgttatcttcaagaagatctcccgggacaaatcggtgacccatctacctggggaacagagactacaatagaccatgtcaggccaagtccagcctgtggatggtgtcgtgttggttgatcctgatcttgtgaagggaaagaaagtgtatgtcactctgacctgcgccttccgctatggccaagaggacattgacgtgatcggcttgaccttccgcagggacctgtacttctcccgggtccaggtgtatcctcctgtgggggccgcgagcacccccacaaaactgcaagagagcctgcttaaaaagctggggagcaacacgtacccctttctcctgacgtttcctgactacttgccctgttcagtgatgttgcagccagctccacaagattcagggaagtcctgtggggttgactttgaggtcaaagcattcgccacagacagcaccgatgccgaagaggacaaaatccccaagaagagctccgtgcgattactgatccgcaaagtacagcatgccccacttgagatgggtccccagccccgagctgaggcggcctggcagttcttcatgttttgacaagcccctgcaccttgcggtctctctcaacaaaagagatctatttcccatggggagccccatccctgtgcccgtgtctgtcccccaataacacagagaagcccgtgaagaagattaaagcattccgtggaacaggtggccaatgtggttctctactcggagtgattatttacgtcaagcccgtggctatggaggaagcgcaagaaaaagtgccaccaaacagcactttgaccaagacgttgacgctgctgcccttgctggctaacaatcgagaaaggagaggcattgccctggatgggaaaatcaagcacgaggacacaaaccttgcctccagcaccatcattaaggagggcatagaccggaaacgttcctgggaaatcctggtgtcttacccagatcaaaggtgaagctccacagtgtcaggctttcttgggagagcctcaccttcccagtgaagtcgcccaacttgaaggtcccaattccgcctcaatgcaccctcagccctgaggacccagcctaaggaaagttatcaggatgcaaatttagtttttggaggagtttgctcgcccataaatcttgaaagatgcaggagaagcttgaggaggggaagagagaccaagaatgacattgatgagtgaagatgtcggctcaggatgccggaaaatgacctgtagttaccagtgcaacgagcaaagccccacagtttagtcctttggagttatgctgcgtatgaaaggatgagtcttcttccgagaaataaagcttgtttgttctcccctgg

SEQ ID NO: 81960 - DNA, 391 bp, Homo sapiens
  sig_peptide (71)...(206): this location contains the signal peptide sequence, MFFIFFCACIYMYYVCVKAISKTALINGVNESLNQIFRQKSEKYP, Run with SignalP
  misc_feature (254)...(318): similar to gi5737706 in the genepept database release 114, Run with FASTXY 3.3t00, default parameters
cccacgcgttcgggtttctcttttcacaatggcatcctgtgttcagggttcaatttctgcctcgggatgaatgttttttatcttcttctgcgcatgtatttacatgtattatgtgtgtgtgaaggctatttctaaaacagcattgattaatggggttaatgagagcttaaatcaaatatttcgtcagaaaagtgaaaagtatcctgccttttagttcatgtgacttaaggaaatgtccagaagtaaagactgttttgaagattatcacattaataaaagtatcttccatgacgtaaacatttggcttatattaggcagggcagatattaacattgctaaatgcttgaaggacataaactgcttctttaacttttgaaagctgatcaatttt

SEQ ID NO: 81961 - DNA, 878 bp, Homo sapiens
  sig_peptide (443)...(578): this location contains the signal peptide sequence, MMWVGNFPGICWTLLCCCCLDSLVQRHSAWNFPDKLADGLGIQET, Run with SignalP
  misc_feature (63)...(185): similar to gi3212184 in the genepept database release 114, Run with FASTXY 3.3t00, default parameters
tcgatcagaaacagaaatgtagaggatgcatgaggaacttactggattttatgacttcatcattatgttatttattacttctgataaataggcttgcttcatctgaatgcaaagtaatatataacctggaatttttaaagttttttttgtttttggcacgagagtatcacaggaaattcaaaggattctctaagttacattgccaagaaacatgtttcaaacttgtccaggcatggctgtgagtgaaggaattcctgcatgcaagtcaaaatactggctgacttttaaatgactgtactgttttcctgatcttactgtttaattcgaatcagataagagaaaaataaagaccctgactatctccatctctatcatttaggtttaactgcgtaagaaacaactgcaaaaccagtggctaaaaacaataaagaattattaggtaatgatgtgggttggaaattttcctgggatctgctggaccttgctttgctgctgttgccttgactcacttgtgcagcgccactctgcttggaacttccctgataagctagcagatggcttgggcattcaggaaactgagccatgagtatccaaaagcaatgagaaaggacatctaccaatgagcaatcactgcccaagcctcttcctgtcacatttagaaatctcttattatataagccaaaacaagttacatggtcaagatttgagatggggagctcaactccacttcttgcttggaagagtggaaaagtcatgttacagagagctaaatcctaatgaatagtaaataataatttattaaatggcttttgctcttttaaaaaaaaaaaaaaggggcgcccgttttagagaaaccagcttaagacgggggcatgacg

SEQ ID NO: 81962 - DNA, 413 bp, Homo sapiens
  sig_peptide (258)...(393): this location contains the signal peptide sequence, MSISNNILTLSILRKLFLSTTLCFSISVNKVLVTEIMIVLYIHCV, Run with SignalP
  misc_feature (349)...(242): similar to gi4376987 in the genepept database release 114, Run with FASTXY 3.3t00, default parameters
cctcagtaaaaactgaaaaaatttaaggtgcatgccaattaagaaaaaaatacagttatacagtaactccctctgagttattaattccacgcagctcaaaacaatcaagttttgatttttagtctgtgtgtgtgtgtttactttggttgttcatatgtttctgagtactatcctaaagtgagtgcaaaattatgtctaagtcactattttatcaacatcagggccctttaaagcatacattcaaactgtggaaaaaaatgtcaatttcaaataacatattgactttgtcaattcttagaaagctatttctttccacaactctttgtttttccatatcagttaataaagtattggtcactgaaattatgattgtgctttatatacattgtgtaggactaataaagctactctat

SEQ ID NO: 81963 - DNA, 767 bp, Homo sapiens
  sig_peptide (155)...(290): this location contains the signal peptide sequence, MILFTRAWFELVTLVQFIIGSQMLYPYLHIEEFVIRKLPVLLYRK, Run with SignalP
  misc_feature (117)...(155): similar to gi836667 in the genepept database release 114, Run with FASTXY 3.3t00, default parameters
atggaaaaactgtcttccatgaaagtggtccctggtgccaaaaaggttagggaccactgttacagagtatcaggtcctcaagatgctaaaatctatatgacatttttaacatgtgacattatcatcatcatcatcatcatcatcatcatcactgatgatactatttaccagggcatggtttgaattggtgactttggtgcagttcattattggcagccaaatgctttatccataccttcatattgaagaatttgttatcaggaaactaccagtcctgctttacaggaagtctgttatcagatatcagatggcaagttccccatgtcttcagatgttcaaacaatattgtggatggtctagaaagagtttaagacatgctgttaaatgtagggctagataattctctgattctttgatgtagtctggaaagaaacaatccattgtccagttaataaatatttagtgttttcatttttaagacactcacaatccacaaatgtccctaacaatttattatttttaaagaaaatgactttttattccttgctagtgaaaaatgtacaatttatatgctgcactgagaaaaataacagatatactttcttccattcattttcatcccaaacatataaaaaataatccattgattgttccttgcattgcatatcttattaaaagatatttcctacatgcaactaataagacatgctgactgttgtcagctctaaatttatgtaaagattttttatttttgttaaaatgtttga

SEQ ID NO: 81964 - DNA, 429 bp, Homo sapiens
  misc_feature (1)...(429): n = a,t,c or g
  sig_peptide (102)...(237): this location contains the signal peptide sequence, MMIFLLKVSNSLGLMASLPWADRQDLLMSLCITQLQETQNLTRTR, Run with SignalP
  misc_feature (318)...(402): similar to gi3413825 in the genepept database release 114, Run with FASTXY 3.3t00, default parameters
cccacgcgtncgcccacgcgtncgtggcagtcaccattgtcttgacttgggaaagaatctgacccccgcagatccttcaatcaggggctgctgctgagcttatgatgatttttcttctaaaggtcagcaactcattggggctgatggcgtccctgccctgggcagacaggcaggacttgctcatgagtctctgtatcactcagctccaggagactcagaatctcaccaggacacgtccatcactctctcatagctggtacttggaaatgaaagagactcgcagtgcagtcccaatcaatgtccgtcggccgtctctgtcgataactgccgggctgtccaatctttcccctgatagaaaggcgcctgggggtcagcctgaagaagctctggagggaagaggcggctgtttgattcacagcctcctcgctg

SEQ ID NO: 81965 - DNA, 378 bp, Homo sapiens
  sig_peptide (112)...(247): this location contains the signal peptide sequence, MFSALLHFLLLLPPHQCSSFLSERPGFAGRLNIPLLPFGTVVKFT, Run with SignalP
  misc_feature (168)...(93): similar to gi43495 in the genepept database release 114, Run with FASTXY 3.3t00, default parameters
catcgatgcatttgagtgtatggtgtgcaccaaggtgtgggctaatatcaggcttcaggaaaaggtaagcaaatcaaaggtgggcatagagccagcaggctggccatcttgatgttctctgctctcctgcatttccttctgttgttgccacctcatcagtgttcttcattcctatcagaaagaccgggctttgcaggaaggttgaatattccattactaccttttgggactgtcgtaaagtttacaagccctggacaggccttcattcctgaaagccttcattctcctttattgtttcttctgggggatcccgtgctgcaggtgctgggcagtgacacagaaaactgcagaaaaggggaagagtccctaacataaaaa

SEQ ID NO: 81966 - DNA, 376 bp, Homo sapiens
  sig_peptide (91)...(226): this location contains the signal peptide sequence, MLGCSECQVCMRAVLLLGQALPPCRGQKCWAVSCIEGLSGLLHYR, Run with SignalP
  misc_feature (221)...(94): similar to gi451028 in the genepept database release 114, Run with FASTXY 3.3t00, default parameters
caacatcagtaatacctgaaggtgtctcattggctcaggttataggagtttgtgcagctccttggacaagcttccccactgggggtggggatgctgggctgttctgaatgccaagtgtgcatgagagctgttctattactgggtcaagcgttacctccctgtcggggacagaagtgttgggctgtttcgtgtattgagggtttgtcagggctgctccactaccgggttgggtgtggcttctttgctgatgttcatggtgccagactgtttcacacacaaggatgcatgaggactgctctatctccgggtcagtcatgacctccctggttggcaagattgcctataatttgggggtaaagacatctcataagcttgg

SEQ ID NO: 81967 - DNA, 396 bp, Homo sapiens
  sig_peptide (80)...(215): this location contains the signal peptide sequence, MGKKVTLLLQKCAWLLLVCCLFTGIKYLNKCFITDRELLRDVHNA, Run with SignalP
  misc_feature (86)...(167): similar to gi155550 in the genepept database release 114, Run with FASTXY 3.3t00, default parameters
acacattccacccttgagattgctgtaacagtgatctcaacctctgataaggtaagtttataaacttaatgaggaaaaaatggggaaaaaggtcactcttctgctgcagaagtgcgcttggcttctcttggtttgctgcctattcactggcattaagtacctgaacaaatgttttatcacagacagggaactgttgagggatgttcacaatgcattgaacatccttaggcataatttttatgtgaactgggcatccttaaatacattctgactccatgatcagattaccagaaagtgcaggtcccactcactatcttgattcagcatctcccatctggccaaagttgaattttacattgagttggatggtgataaatatgcttagcaaaagtatat

SEQ ID NO: 81968 - DNA, 468 bp, Homo sapiens
  sig_peptide (70)...(205): this location contains the signal peptide sequence, MEFGLTWVTLVAILKGVQCAVQLVESGGGSVKPGRSLTVSCTASG, Run with SignalP
  misc_feature (70)...(427): similar to gi4512282 in the genepept database release 114, Run with FASTXY 3.3t00, default parameters
aggagccccagccgtgagattcccaggagtttccacttggtgatcagcactgaacacagaccaccaaccatggagtttgggcttacctgggttacccttgttgctattttaaaaggtgtccaatgtgcggtgcaattggtggagtctgggggaggctcggtaaagccagggcggtccctgacagtctcctgtacagcttctggcctcacccttgctgattatcctttgagttggtttcgtcaggctccagggaagggcctggagtgggtcggtttcattaggagtaaatcttttggtgcgacaacagcatatgccgcgtctgtgacaggcagattcaccatctcaagagatgactccaaaaacgtcgcctatctggagatgaacagcctgaaaaccgaggacacaggcgtctatttctgtagtagaccaataacagtggctggtatttggaatgcttttgatgtatgg

SEQ ID NO: 81969 - DNA, 612 bp, Homo sapiens
  sig_peptide (178)...(313): this location contains the signal peptide sequence, MGFPPNRQLRAKFWVEGPWCILHLLFMPMGTSGLSVQPLDFLNSA, Run with SignalP
  misc_feature (344)...(161): similar to gi3859118 in the genepept database release 114, Run with FASTXY 3.3t00, default parameters
agcaagagaaaaggagaatcaaaataaaatgtattagtaaccagatagtaaatgttaagatcaagagattaccaagaacagacaagcccaccctgcctgcctgctcttcagtgtgttattgggtccttccaagggaagtgacagtacatgtctggtgaatgagcttgtgatgagtgaatgggattccctcccaataggcaactgagagcaaagttctgggtggagggtccttggtgcatcctccacttactcttcatgccaatgggtacctcaggcctgtctgtccaacctctggactttcttaactctgccccagtctccatccttaaccactcagggccagcctcttacatgggattccttcttccaatctaaccctcctccagcccctcccctgtgtggctggggtaaggcagagtctgatcccatctggcctggcctgtgcccagaagtgcccaagaggcaagtgtcctcttgcccacaggaccccaggagatgatgggcacactaaagtttgagaactactgcctcaggcacctttataacatgcctttccaattcaggttttgaatccaaaacctcattcccgtaccttattaactgctttataaa

SEQ ID NO: 81970 - DNA, 622 bp, Homo sapiens
  sig_peptide (211)...(346): this location contains the signal peptide sequence, MLKLLLSGVFTIQILVLDVGNTYREELNILCSSFTELRLLQKVST, Run with SignalP
  misc_feature (38)...(192): similar to gi4897 in the genepept database release 114, Run with FASTXY 3.3t00, default parameters
ccctaacagcttctacctggcaaccttcattcaacccaatattcagggcctcaatctcctgtacaattgtgttctacaggataggccaggggctcagatgatactcatagacaagggatggatttatggttggccactcccagattctctagctctgaactctgaatacacacattcagtgcatctgccatatagggtcattctcagagtatgcttaagttattgctatcaggtgtgtttaccatacaaatacttgtgctagatgttgggaatacatatagggaggaacttaatatattatgctctagtttcacagagcttagacttttacagaaagttagtacatggcagaatctattgagcagtataatgggggtcaaggacaatgggattttattctgtccgaacatataggggaaggacttcatgcaaaataggcctgtatgttagcattagtctccatgacttggtctgcaataccattagccaccagggtatggctctctgactcttctggaggacttaactttctccacccccccttttggttacccggggaataaaggggattgccctttccctggttattgaaaaagaaaatttttaggccctttaggaaatt

SEQ ID NO: 81971 - DNA, 612 bp, Homo sapiens
  sig_peptide (249)...(384): this location contains the signal peptide sequence, MVQLFIPILKFQLGYSVLSLCNHVLEFLFPSSLSGIFSSSLPLLL, Run with SignalP
  misc_feature (228)...(348): similar to gi733441 in the genepept database release 114, Run with FASTXY 3.3t00, default parameters
caactatcttatttccttatcatgcacaagttaaatgttagactgaggagtaggtgagttatccccaaggaagtaaaatgatgttaattttcttgaggtcacatgaattgtgagtagctgaatgctactgtgaattctgggcagcccgaccacagagcctgaactcttaaatattatactgtattaacttgacatgtttataaaagtaacaattacatgctacctgaatgccctcagtagttttgaacatggtgcaactgtttatccctatactaaaattccaattaggctattctgttttgagtctttgtaatcatgttttagaatttttgtttccttcctcattgtcaggcatcttttcttcctcccttcccctccttcttcccttccctctttctcttccctctcttcccccttctctttttccttctcttagagtcttgctctgccacccacactggagtgtagcctcaaactcctgggctgtagccatcctcctacctcagcctcctgagtagctgggactgcaagtgtataccactatgcctggctaatttaaaaaaatttaaaatttttttttttttggagaaacaaaagccttactatgttggc

SEQ ID NO: 81972 - DNA, 425 bp, Homo sapiens
  sig_peptide (284)...(149): this location contains the signal peptide sequence, MSIGLSLSLVSQAVYPDLCKVNCALLLYFMFLVIFFYTIFNYIAL, Run with SignalP
  misc_feature (281)...(183): similar to gi2584735 in the genepept database release 114, Run with FASTXY 3.3t00, default parameters
aaatgctattttttactgctaatctaggaagattttattttaaaaactgaatttcattaaattaggtggcatagttgatgtggtacttactcataattaatgtacatttttaattatattggattcaagtcaaagacttgggtaacaccagagctatataattgaatatagtgtaaaagaaaataaccagaaacataaagtataatagcaaagcacagttaactttgcagagatctgggtagactgcctgggaaaccagggacaaagaaagcccaatagacataattcacactggcaaatgtggcagctgctagtaagcgctcttactgattgctttctgggtgccaggagtcttggttcatttggttctcatattatttctggaaggtatttattagtctcaggtgtattgatgaaggttaaat

SEQ ID NO: 81973 - DNA, 383 bp, Homo sapiens
  sig_peptide (41)...(176): this location contains the signal peptide sequence, MAFTAIGSLCIFAFSLNPMPIQYFKVFQTFPLFFLQKQFLKSESY, Run with SignalP
  misc_feature (361)...(311): similar to gi496230 in the genepept database release 114, Run with FASTXY 3.3t00, default parameters
actaaatatgaggtggctactaaagagtaacaaaaagtagatggcatttactgccattggctctctgtgcatttttgcattctcattaaatcccatgccgatccagtattttaaagtatttcaaacatttcctctttttttccttcagaagcagtttttaaaaagtgaaagttacatagaaaatggtccatatgaacaagatagcaatttaaagtatagacttttcacttactgttaagtctgggttgaccaacttcagccatttggaacagcaactctttacttggaattaagcagaaaagacttttgagtagcaaacgactatcatgtagtatatgcgtttttctctgaacctgggagtagcagtagattatgtcccagtt

SEQ ID NO: 81974 - DNA, 852 bp, Homo sapiens
  sig_peptide (53)...(188): this location contains the signal peptide sequence, MLLFLGFFICSLFFSELSTGTTHSLESYQILLSKFFRHPLCTRTF, Run with SignalP
  misc_feature (44)...(152): similar to gi2058399 in the genepept database release 114, Run with FASTXY 3.3t00, default parameters
tgaaaagtgacctggagctttggatccagtcttgccctcagcacctgtcagcatgcttttgtttttaggattcttcatatgttccttgtttttcagtgagctttctacagggaccacacactccttagaatcctatcaaatactgttgtcaaaattctttcgtcatcctctctgcactagaacttttagaattttaccaccattccacttctagtaataaaaaatgggacaagtgtcaggccaacagccatttattgagtatttaataattactggttacctatatttcatatcaaatcctcaaaagaaccctgttgagtaggtgttctctttggcatttgacagtgtgggaaatgagggataaagatattaaaagttttgctcaaggccctgtaataagatagttccagaccaaataccacatgttctcacttataagtgggagctaaatgatgagaacacatggacacaaatcagggaacaacaggcacaggggcctaccagagggtagagggtaggaggagggagaggagcaaaaaaaataactattgggtactagatttagtacctgggtgatgaaataatctgtacatcacacccccatgacacaagtttacctacataacaaacatgcacgtgtacccctgaacctaaaagtttaaaaagaaaaaatgccaatgaaaacattataaacttatgaaaatccagaagggtacccctatattaggaattatgactgggttccttatattggaggggctattttaaggttatatattcaggcccggccttgtggggcctgccctgtaatttcaggcctttggggagggccacaggggagaaacaccttgg

SEQ ID NO: 81975 - DNA, 849 bp, Homo sapiens
  misc_feature (1)...(849): n = a,t,c or g
  sig_peptide (163)...(298): this location contains the signal peptide sequence, MGWPPSLWVLALAYCCKAPQRLCSGSSPCRFSSRMSASPATNRNE, Run with SignalP
  misc_feature (34)...(124): similar to gi5052339 in the genepept database release 114, Run with FASTXY 3.3t00, default parameters
gcatctggagtctgctggctgactgtgaactggagagctgacgcaaggaacgtctgtggggctgcctgccaaccatccgtttttcttggcctagcaacacctccaagggaccactggaaggactcacatggatatggaccattctccattcctgaagttcagatgggctggcccccatccctctgggtcttagccctggcatactgctgcaaagctccgcaacgcctttgctcaggaagctccccgtgcaggttctcatcaaggatgtctgcctcccctgctacaaacaggaacgaaaacactacttcctggattgcgtctttacataaatatgtaatttcccagtaacatcacttcctggagtccagcttctcatcggtctcgggaacctacagtttccctactcagttttgtccttgtcaccaacaggttatttggaagtcatcttgtggctttagtccctgattattgcttcctctgttgtttcacctctgatagcctcttgatggggccacgagaatgaatcattaagactactgcagccgggtgcggtggctcactcctgtgatcccagcactttgggaggctgaggcgggtggatcatttgaggtcaggagtttgagaccagcctggccggcacggtgaaacccgtctctacttagaatacgaaaattaaccgggcggtggggtggggcccttgggatcccagcttactcgggaggctgagggaggagaatctcttggacccttggaggggggagggtccatttaaccaaaattgcccccattgacttccgccctgggcaccagagccggaattccgggtcaaaaaaanaaaaaaaaaaaaac

SEQ ID NO: 81976 - DNA, 859 bp, Homo sapiens
  misc_feature (1)...(859): n = a,t,c or g
  sig_peptide (108)...(243): this location contains the signal peptide sequence, MSTFALGFLCFNLLTPSLLRLRSHVSHSFSELHYLVLLNEQDRKV, Run with SignalP
  misc_feature (388)...(318): similar to gi930075 in the genepept database release 114, Run with FASTXY 3.3t00, default parameters
taaacattgcattccactctgtcatatgtcattgttttcatagaagggtaatttgccaagtcatattaccattcaccctccctaagttaaaccagcgctctaggaagatgtccacatttgcccttgggtttttatgcttcaatctcctcaccccaagcctattgaggttgagaagtcacgttagtcattcattcagtgaattgcattacctagtgctcctaaatgaacaggataggaaagttgtccttttcttaaggggtccttcatactcatcttcttattatcttcatgataggatcacatttgagatgcgcattattgccttggttatgtcttctgatcatcttagtgaatgtaaaatcctgacttatactcttgcatttgaatatagaatgtaattcctaagacaaagaatacttaggcatctggaagtttctgaagcattaggaaatagatttatatcctggattttctttataaaatgaataaatgtaagttcttgatgttatttgtaaacttttagaccatcggaccacaccaaaaaaaaaaaaccaaaaaaaggggggggcctttttaggggttccatttttacttccccgggattgcaaggctatcgtttttttttaggggcccctaatacgattgcgggggccgcgtttttacaccgggggggcggggggaaaagccctntttgccgggccgccggccggcgaaggacaccactgtttggggcgggcgcggggggggagcggactaaatggactggggccgggggtccggataaacaataattgtcgtccccgcccgcccgaggcggccgggcaatgagttcgatcgcgccggcgggggaccgcaaacc

SEQ ID NO: 81977 - DNA, 791 bp, Homo sapiens
  sig_peptide (481)...(616): this location contains the signal peptide sequence, MYLLILLSTKFSCISSLPGLDYRQDSMLCQGISLAPTLLIIHLFM, Run with SignalP
  misc_feature (210)...(362): similar to gi3845415 in the genepept database release 114, Run with FASTXY 3.3t00, default parameters
acatccaacatttgaatgtattttgactaggtaatttttttctcctttgttaataaaaatagatttaattttttaaatgtcatttttcttgcatctcatcaaatatactttcatacactataaaaatgatgttgggtcatatgtatcacatgtctgtaattcagaaatgcaaacctttggacactgactcaacatctggagatattttttctggttcttatggctggtgttctcctacagctctctacgagcagtcttgtgaagcccacaagcaccgagggaacccatccgggctttactatattgatgcagatggaagtggccccctgggaccatttcttgtgtactgcaatatgacaggtatgttgataatcgttagatgcatagatcagaatagaccaaggagaaatttacctagttggcagcattattaaaacatgcagtttgatagtgtgtacttgctaagtagaagcattaaatatgtatttattaattttgttgtcaacaaaattttcttgtatttcttctttgcctgggttggattataggcaagattcaatgctctgccaaggcatctctctagctcctacactcctcataatacatctgttcatgtgcatcatgataaaatacaaacctctgattcggtgatttacatgctttctgtatttagaaaaaacagaggtgtttaaaaatgctaagaaataacatagatatgttaatgttctatgtgcatcttaaataatttagtgatttttatgtcatataattttttcataaccaaagaaact

SEQ ID NO: 81978 - DNA, 405 bp, Homo sapiens
  sig_peptide (207)...(342): this location contains the signal peptide sequence, MVGSLILGLLIVTKQYSLLRNSQFKKFHKMLKLCNTIYSDLFRRK, Run with SignalP
  misc_feature (200)...(41): similar to gi643245 in the genepept database release 114, Run with FASTXY 3.3t00, default parameters
aagagggcacataacactgcaaactctttttatatgtcaaagttggtgattcttaaattagtggagttcttgaattttttactggtctgtgacaaaatgagaaaaataaagacattatagtgcattttgatgaagccaaattgattcagtttgcagaactgtaatttattctgtaatttttgtcctgttttaatgaaataattcttatggtaggaagtcttattttgggtctcctaatcgtgacaaagcagtactctctgttgagaaactctcaatttaaaaaattccataaaatgctaaagctttgcaacacaatctattctgacctcttcagaagaaaataccttgtcttattctgtattatctccctactgcatagcaaagtgtctgtcatattatagcgcg

SEQ ID NO: 81979 - DNA, 414 bp, Homo sapiens
  sig_peptide (148)...(283): this location contains the signal peptide sequence, MCVHPYVCTCACMHVCVCLCAWCLSQPGGLGGFSEEVTSLPRPRA, Run with SignalP
  misc_feature (124)...(214): similar to gi1333929 in the genepept database release 114, Run with FASTXY 3.3t00, default parameters
caggggtaagccaccgcacccagccccgtaaatatttcttgaggatctactgcgtgccaggccttgtgctgggttccaggagctgattcagagagtgcagagatgaaaaaaggagtggggtgtacgtgtgtatccgtgtgtccatgcatgtgtgtgcatccgtatgtgtgcacatgtgcatgcatgcatgtgtgtgtgtgtctgtgtgcttggtgcctctctcagcctggtggcctgggaggcttctcagaagaggtcacatctctgccaagaccaagggcactgtaaggcagccagatgagagggaggggaagagagatgggagggaggctgggctgagggtacacagtgtggctgctgcctggtgccctgtgagggagcagggtcccttctagctgggagcaatggcgcatg

SEQ ID NO: 81980 - DNA, 864 bp, Homo sapiens
  misc_feature (1)...(864): n = a,t,c or g
  sig_peptide (90)...(225): this location contains the signal peptide sequence, MIKPRCFPKIIFLVHLYVCYKVCYMLKIFSFVGRGEFQTALRDVD, Run with SignalP
  misc_feature (299)...(191): similar to gi3478685 in the genepept database release 114, Run with FASTXY 3.3t00, default parameters
agaaattgctacagtgatcgctgcatattttatagcaaaacgttgcagtatttcttatattgagaaagtagaacctatttggggttgaaatgatcaaacccagatgctttcctaaaattatatttttggtgcatttatatgtctgttacaaagtgtgctacatgctaaaaatattttcctttgtaggccgaggggagtttcaaaccgcactgagagacgtagatcagatggttttccgtaagagtgttaccagcatcctggttgttattagccttgactttgcaatatgacattatttatgccagaagacttcacaattcagttcttctttaatttcaccaactttattggcatgaacatgcatggaagggaggccaaagtcaatacatcagaatttgggactcagactccagggcaacaagcaataatgggattcggctggagataacccctccattcctggggtctgtttccctgggacgcagaagctgcctcccacgtcaggcagcgtctcttgccttttgtccaagcgcttcctcttgtttttctctgggggctcccttcttctcccgagccacgcatgctgccacttgtcacattccatgcagccaggtagagacacacttctccttaagatgcttttggattctgtttattgcaaaggcagntgctctacaattctctctgggtattcctcctcaaattgtatttcctagtcactgtcattgttttataattgagaaaatctggcctggttttgcataaatgcctctaatcaataaacttgaaatgggtaaactaagaaaatgaaatggctaactctctttaaatggaggttttacttaaacatccttccctccttcg

SEQ ID NO: 81981 - DNA, 909 bp, Homo sapiens
  sig_peptide (54)...(189): this location contains the signal peptide sequence, MIFWFSVLYKWYLVGLAKQKQDLLPHHHHHHLFPQYLKSHSLPPV, Run with SignalP
  misc_feature (208)...(91): similar to gi1359530 in the genepept database release 114, Run with FASTXY 3.3t00, default parameters
cgacccacgcgtccgaaaaaagaaacatatcatttttctttaacgggctgaatatgatattctggttctcagttttatacaaatggtatctagtaggtttggcaaaacaaaaacaagacttacttcctcatcatcatcatcatcatctttttcctcagtatctgaagagtcactctctgcctcctgttgttccagggctttgtcgaaggcatgaatggggaagttgtatatgtcgccatactgaagaacataaacacagattggctttaactacatttggatattacacttgaagttccactttctgtggagaatattactttttcctcagtgattaaatcagaatacttaatttgatgagtaatatttttaagtgtagagccagcagtgtcttaaaaaagcatgtgcttttgaacatttaaatcatctgcagttagtatcaaataggtaacttctatggagctacattttaaaataatttaaaatgtagtagtctacaaaacccatgcattgggacaaatgtcattttgctgacaaggggaaataataaggaaaaagcatactttactcatgttgcctgtataaacaacactaatttttaaaaagagaataaaaacttatttcaaagagcccttataagactagggtattatgcaggagaagcaaaaccccatggcttttatacagaaatctgcaaatgttgtcttggggaatggagctgaaaataatggcaaaaaggggaaaggcttcttaaagggaaaggagtatcaagggtgaccaaaccatttatgtgcttgccttaattaagccaggaacccagcccgatatggattattttattcccggcataaaaatccgggcggagatcctttattatggtaaaataaatttcccagccgggcccagggg

SEQ ID NO: 81982 - DNA, 858 bp, Homo sapiens
  sig_peptide (154)...(289): this location contains the signal peptide sequence, MLFLKKIQFLKCNKVFRSLDFCVALPLLFSSSAVLQITPVDTFSD, Run with SignalP
  misc_feature (181)...(361): similar to gi2072771 in the genepept database release 114, Run with FASTXY 3.3t00, default parameters
cggacgcgtgggctttaaaaatacaaaaataatagccttgtcttcttaacctgcaaaagtaattttcctgcataatttaatgttttcatgtggaacaaatgagaatgctttagaaagcacattgtacactgtaaacttctatacaacgtggtgatgttatttttaaagaaaatacaattcttaaagtgtaacaaggtgtttagatccctggatttttgcgtagccctacctttattgttctcatcttctgctgttttacagataactcctgtagatacattttctgatccccacttagttctaaccttagttaagctgcttatgaacattttaaatattgcagttattagtctgactttccctggagaatatgaagtttctttagcctttgaaaatattctcatgtatactcatgcattcataatctgtttctgtaacagacagtggctttttaaaagtaatagtgaaagtaatcttagtagcaatgttaatttatttgactcttgctagttttcaggtacgcaaaaggaggagatgatttcctttaaaaactcagctttgaatagttcgtgttatctggtatatctgaaatattcagaaatgttaaaacagtttttgtttgcctttgctgttaagtttgaaacctcttagtgctttcaattgataatcctggaaaccaacctcagtattgtaggaatacatagattatcggagttttatagtcttgaaataaagggctaataatcatgatgatattgctgaaacttaaaatgcaaattgggttaaggaacattcagggattttcaataacttggaaacggaaggaactggggtggacagtttggagggtagattccc

SEQ ID NO: 81983 - DNA, 456 bp, Homo sapiens
  sig_peptide (166)...(301): this location contains the signal peptide sequence, MFQCLVSIVLTLDIICFCLDCNQITVCVKVKYYKRGSNILGESSS, Run with SignalP
  misc_feature (263)...(317): similar to gi2764907 in the genepept database release 114, Run with FASTXY 3.3t00, default parameters
aggcgcccagttttcggggggcgacaccacgcgtgcggaaaattatatgatcgccttccctctagatttataaaaatcagtagacacagcttcctttttgggaattataacacctcttccttgagacaaaaattccttagatacctttcagccttgagttttaagatgtttcagtgccttgtatccatagttctaactttggacatcatttgcttttgtttggattgcaatcaaataactgtttgtgtaaaagtcaaatattataagcgtggctccaacatcttgggtgaaagctcatctcgttcagcccgataaagatgaagcttaaccactaggtagagccagctgaaatcatttggaaaatttcacttagctttaatctagcaggttcctttctgttgaatgataccagtggcgagttccttagaaagcttagtctgacgcaatagtcacact

SEQ ID NO: 81984 - DNA, 906 bp, Homo sapiens
  misc_feature (1)...(906): n = a,t,c or g
  sig_peptide (99)...(234): this location contains the signal peptide sequence, MQLHGKGSQDPSTKGHIKALQTVTSFLLLCAIYFLSMIISVCNFG, Run with SignalP
  misc_feature (171)...(345): similar to gi606439 in the genepept database release 114, Run with FASTXY 3.3t00, default parameters
agcggcccagttttcgggtcgacccacacgtccgcctcactctgaccctgatatcttttctgctgttaatctgttctctgagaaaacatctcaagaagatgcagctccatggcaaaggatctcaagatcccagcaccaagggccacataaaagctttgcaaactgtgacctcctttcttctgttatgtgccatttactttctgtccatgatcatatcagtttgtaattttgggaggctggaaaagcaacctgtcttcatgttctgccaagctattatattcagctatccttcaacccacccattcatcctgattttgggaaacaagaagctaaagcagatttttctttcagttttgcggcatgtgaggtactgggtgaaagacagaagccttcgtctccatagattcacaagaggggcattgtgtgtcttctagcagaaaacaaactggtggtgtatgaaacattttatatttcttactgggttttctgtaatatatgtatatgaataatttccacatgtatacctagaaaagtcttttacctaaagttagtctacaaaagtacatatatatagatggctgtggtgtgaccgtgtgtgcacatatgtgaatgtgtatatatcacgcaacaggagtgtcattcatgctgctggcccctggtgaagtgacaagtacaattaaaggtggctctgatccttttaaacacctaccaaaccctaaatttgattccaaaaggaccattctgcaaagagtttgcaaagatctgggcccacttgtgagcaccaacctttaaacatgatgcgccagtctcccaggaggccctactcattcccctacataactatttgatggccccacccctaccanccccgcttccccccacctgaaaaaagcaggccacagaagc

SEQ ID NO: 81985 - DNA, 634 bp, Homo sapiens
  misc_feature (1)...(634): n = a,t,c or g
  sig_peptide (244)...(379): this location contains the signal peptide sequence, MRDARQMFLIPLWLCPFSFNIIKFPERVLYFLNPLPFLPFTLKGK, Run with SignalP
  misc_feature (283)...(347): similar to gi4049808 in the genepept database release 114, Run with FASTXY 3.3t00, default parameters
aaggcactgtaaagtcatgtccaaaactggacacaaaacaatagagagggaaaaatacagaatatacaatcaaacagatctagggtacaatttgggctgcaccattcagcacagggtgtgaccatgggcaagaatgttaatgtcactgaatcttagtttccttttttatggaaccaaagtaatattgaagaatttgagcattaaatgaaatacatagaaatcatctagtgtactgtggagcatatgagagatgcaaggcaaatgtttctcattcccctctggctgtgccctttctctttcaatataattaaatttcctgaaagagtattgtactttctgaacccacttcctttcttgccatttactcttaagggaaaacaataattatttcagatttaaaataaaacagtagattagtgaaatcaaattgagagttcagataaaaacccatataaccagagaatgttcttttcaaccaatggtgcttgggacaactggatatttccatgaaatgggaccccctacttcacaccatatacaaaagttaactcagactatagatcagtgacttanatgtaagagcttanagctataaagttcttagaagataacatagagaactaaaaaaaaaagg

SEQ ID NO: 81986 - DNA, 1227 bp, Homo sapiens
  sig_peptide (1191)...(1056): this location contains the signal peptide sequence, MAPWAEAEHSALNPLRAVWLTLTAAFLLTLLLQLLPPGLLPGCAI, Run with SignalP
  misc_feature (1194)...(237): similar to gi4836808 in the genepept database release 114, Run with FASTXY 3.3t00, default parameters
tttctgtttttttttttaatctgccattagtaattaattctttgaagatactttggagattcattttcttgagtggcactgccatgctcattcagtgaaaacttgtggggtatagaaatggaatggagagtttcaaacagctttgctgaaactgtactttgggctccagacttcactgtccttaggcattgaaaccatcacctggtttgcattcttcatgactgaggttaacttaaaacaaaaatggtaggaaagctttcctatgcttcgggtaagagacaaatttgcttttgtagaattggtggctgagaaaggcagacagggcctgattaaagaagacatttgtcaccactagccaccaagttaagttgtggaacccaaaggtgacggccatggaaacgtagatcatcagctctgctaagtagttaggggaagaaacatattcaaaccagtctccaaatgggatcctgtggttacagtgaatgaccactcctgctttatttttcctgagattgccgagaataacatggcacttatactgatgggcagatgaccagatgaacatcatcatcccaagaatatggaaccaccgtgcttgcatcaatagatttttccctgttatgtaggcattcctgccatccattggcacttggctcagcacagttaggccaacaaggacataatagacaagtccaaaacagtactgcacgacgtgaatcatgacattggagaagacactgacgtagaggcactcgaagagtcttcgtaagctgtgcagccacagaaatactagcactaagaatgcagacagtgccagctcccctccctggaactgtgccgccccgagaattctgagcaaaccatgaagccagcttggaaaaggtgctcccaggaacagagattgagtaaggcaccaaagcaggaagccattccacagcactgagatgatataaaagtgggaaaaatatctcttggggacatcaaaggctcggcaggcggcggggcgcgacggctccccacacttggttttcccatagcggatcaggtcctggaagatcgcgcagcccgggagcaggccgggcggcaggagctgcagcagtagggtcagcaggaaggcggcggtcagcgtgagccacaccgcgcgcagcgggttcagcgccgagtgctcggcctccgcccagggagccatggcccgcgtgcccgccttccgcgctgctggcgccccca

SEQ ID NO: 81987 - DNA, 1450 bp, Homo sapiens
  sig_peptide (92)...(227): this location contains the signal peptide sequence, MEFGLSWLFLVAILKGVQCEVQLVESGGGLVQPGGSLRLSCAASG, Run with SignalP
  misc_feature (149)...(924): similar to gi3152370 in the genepept database release 114, Run with FASTXY 3.3t00, default parameters
gcccacgcgtccgcccacgcgtccgtttcccagccttgggattttcaggtgttttcatttggtgatcaggactgaacagagagaactcaccatggagtttgggctgagctggctttttcttgtggctattttaaaaggtgtccagtgtgaggtgcagctggtggagtctgggggaggcttggtacagcctggggggtccctgagactctcctgtgcagcctctggattcacctttagcagctatgccatgagctgggtccgccaggctccagggaaggggctggagtgggtctcaggtcttagtggtagtggtggtagtagcacatactacgcagactccgtgaagggccggttcaccatctccagagacaattccaagggcacactgtatctgcaaatgaacagcctgagagccgacgacacggccagatattactgtgcgaaaggtggggttgagctggcatcaacaaaaccatcctctatctggcgactcaacccaatcagatactggtacttcgatctctggggccagggaaccctggtcaccgtctcgagtggcgatgggtccagtggcggtagcgggggcgcgtcgactggcgaaattgtgttgacgcagtctccaggcaccctgtctttgtctccaggggaaagagccaccctctcctgcagggccagtcagagtgttagcagcagctacttagcctggtaccagcagaaacctggccaggctcccaggctcctcatctatggtgcatccagcagggccactggcatcccagacaggttcagtggcagtgggtctgggacagacttcactctcaccatcagcagactggagcctgaagattttgcagtgtattactgtcagcagtatggtagctcaccgacgacgttcggccaagggaccaaagtggatatcaaacgaactgtggctgcaccatctgtcttcatcttcccgccatctgatgagcagttgaaatctggaactgcctctgttgtgtgcctgctgaataacttctatcccagagaggccaaagtacagtggaaggtggataacgccctccaatcgggtaactcccaggagagtgtcacagagcaggacagcaaggacagcacctacagcctcagcagcaccctgacgctgagcaaagcagactacgagaaacacaaagtctacgcctgcgaagtcacccatcagggcctgagctcgcccgtcacaaagagcttcaacaggggagagtgttagagggagaagtgcccccacctgctcctcagttccagcctgaccccctcccatcctttggcctctgaccctttttccacaggggacctacccctattgcggtcctccagctcatctttcacctcacccccctcctcctccttggctttaattatgctaatgttggaggagaatgaataaataaagtgaatctttgcaaaaaaaaaa

SEQ ID NO: 81988 - DNA, 838 bp, Homo sapiens
  sig_peptide (277)...(412): this location contains the signal peptide sequence, MVAVSLLCPWPSSWNRRSCGRSHRNLGLFTAFLSVPEFVIFGACR, Run with SignalP
  misc_feature (296)...(214): similar to gi4808229 in the genepept database release 114, Run with FASTXY 3.3t00, default parameters
tgacaatagagctatttgactgaaagagccactgagagttgtcatgtgcagtctgtttgtgtgttttaggcctctgagggcagctgtaggttgctgaagtcaaatatgaaaaaatctcaagaaatgatcgtgtaatctaaacccttaaaccataagcctgtaaccgttagcatgccttgagatgcacaggtgttcttgtcacttgatgcaggcaacaagtgttgcagcagttgtgtggcacgtggctaggaactgtcagagatcgccacatcactgatggtggccgtatccttgctgtgcccatggccgtcatcctggaataggaggtcctgcggaaggagccacagaaacctcggcctgttcactgcatttctgagtgtccctgagtttgtcatttttggtgcctgcaggtactggtagctcttgcttgtgacctggagctggacactctgccttgctgtgccgagacgcacaagtgggcctggttccggaggaactgcatggcctcccgcattgctgtggaccttgacaaaataacaccattgccgcgactgtttcttgatgaggtatagcgagatatttatgaaacaattttttgaagcaaaaacattgcttagctataatgtaacaggatgtttaatttgttggaccacgattaaattagcttgccatggaatattcaagaactatcacatacgtgtggaatacagcgcggatcccgccttaataactaactttggtgggcccggggggggatcataagaaaggctttaaaacctttggccaacatgagaatcccctctctagagaatagagagttacctccgacgcgccgcgc

SEQ ID NO: 81989 - DNA, 827 bp, Homo sapiens
  sig_peptide (95)...(230): this location contains the signal peptide sequence, MSSNLQVLVYFAWTRLSQRWPFFPLCWLLLGQLHGCHPGLPLAVI, Run with SignalP
  misc_feature (176)...(144): similar to gi3454 in the genepept database release 114, Run with FASTXY 3.3t00, default parameters
acttcctttcattgccgagttttctttgtacctgttgtcaattcttcccacatgatccaattagctctcagtacagttctccacaagggaaaccatgtcaagtaacctacaagttcttgtttattttgcttggacacgtctatcccagagatggcccttcttccctctgtgctggttgctccttggccaattgcatggctgtcatcctggactccccttggctgtcatcctttggatttcctttccttctcttggattgcattctctgattctatgatctcttagttttctgtttctttgctctttctcttatttaggtagatcacatcctccagaagttgctttaggttacaaacacagtacaatgggagaggatagtggttatggcagtcctcaacatgctaggctctgtagtcacaatgctccaatctggattgataagtgcattattttactattgctgctgtaacaaattactacaaagctagtggcttaagactccacaatttattatcagcagttctgcgggccacaagtataaaatgagtttcactgggctgaaaacaaagcattgacattcttttctagaggctgccggagaaaatcaattctcttgcctttccaacttttagagggtactgggatgggggaagctcgccctcagagttcaaaaccgatctatgcacatacgagagccctctctaccgaagacacaaactacccccctgcgttctgcgtactagaagggtgggggagtgatcactgacccagatcaaaacttgacgactaggctcccccatgactctttctagtcacacagccccccc

SEQ ID NO: 81990 - DNA, 856 bp, Homo sapiens
  sig_peptide (490)...(625): this location contains the signal peptide sequence, MKTLFAFFTLVLSRVHSGIFHRLCDVCYHNGLNAEVDTSLQPSSV, Run with SignalP
  misc_feature (113)...(153): similar to gi2896886 in the genepept database release 114, Run with FASTXY 3.3t00, default parameters
caaggtaatacctctgcaaggaagctaattttctggctttatattatattgttactgaaagctcgtcattggcagggtcatatttttttattttcaggtaagcagatgatgtcatcatcatcatcatcatcatccccacagcagctactacatattaagaacttattatgtaccaaagccaggtgccatctgagttcttcgtgcatactaacctacttattcttcatagtagccctgtgaagtaggttactgttactatctccatttgacagagacagaagttgtgacacagtgaggctgaaaatttgtccaaggtcattcagctaaataagtggtgaagccaggagacaaactgctcagtccagacttcttatttggataagtctcttagccaaacagtagcagttctcaaagtgtggtccaggaacccttgtgggtcccaagacgttttcaagcagtcttcaaggtcaatactatattcataatcatatgaagacattatttgcttttttcactctcgttctctcaagagtgcacagtggaattttccacaggctatgtgatgtatgctatcacaatggactcaatgcagaagtggatacaagtctccagccatcttctgttaagccagacgctgcagatatttacaaagatggaaaacaataccattttttccccaaatttttttggttttccaataatattattttcataagtacgttattccacttgacatttaaggggcttattacgggttttaataaaataaatgctttaaaacttttatccgcctaatttttaaaaacttgatcagcaaataaactatacacgttcttgtcaaaagcagtcgagtacc

SEQ ID NO: 81991 - DNA, 854 bp, Homo sapiens
  sig_peptide (120)...(255): this location contains the signal peptide sequence, MVGLHMKGAFLGKAFAICRNCLTLGSAVLSRVSKAPRRQNIRINR, Run with SignalP
  misc_feature (166)...(59): similar to gi1683615 in the genepept database release 114, Run with FASTXY 3.3t00, default parameters
ctctgagcgaaggggctgtctcttgctgcctggtacctggccctggggcaagtagggcaggggaacagtggtatgagtgagagctcaccaagggaggcgggtgtggcgtgggcttcagaatggttggtttgcacatgaaaggggcattccttggcaaggcatttgctatctgcaggaattgtctaaccctgggaagtgcggtcctttctagagttagcaaagccccaagacgtcaaaacatcagaataaacagacatcttcatacaaaaatttgtgtcatctcagagtccattgattgattgccttttctcttgagtatgagttgcatttttctgctcatatatcttgtaatttgggactggattctggaccttgtgaatgatacgttgcagagacttgggattctgttacgctattcagaataatattgagtttttgttttagcagatacttcgctgagttcaaactataaactctgtcttgtctctgctgcagcagaaatctctgtccaggtgtttaggccttaggtgggctgcttacagtctattccatgcaaacataattcagagatcagctggagattgaggcagtttatgcacagactttgggggtctccctctggggctctttcctttttaggaggtccccctttcattttctacttgctgcggcgaaaccccaaactctcctctgattctacccaaaggaagaactccgttttctatccgaggactaagcgctcttggacacttgatgggcccggcttacgcaaaagccttttcaatccacgatacccaccatacagatacagaccaacgggggcgcgcccgtaacagcataccctcccccccccc

SEQ ID NO: 81992 - DNA, 409 bp, Homo sapiens
  sig_peptide (191)...(326): this location contains the signal peptide sequence, MRQVVSNLLLRPFLGTACSHGKEHKITMFSAYRVTGMHADEHPCS, Run with SignalP
  misc_feature (208)...(18): similar to gi1749863 in the genepept database release 114, Run with FASTXY 3.3t00, default parameters
cccacgcgtccgcggacgcgtgggttgtgtttcaagtgcttccctgtgactggtgtgtctgtgtttggctgacgtccttcagggtgtcctttgctcaacccacctccacggaggatgccacacagaaataatgagctgagcctgcactgagtgcagtatatggccttgttgagctgtggatcgctcccagatgaggcaggtggtatccaacttacttctcaggcccttccttggtacagcttgcagtcatgggaaggaacacaagataactatgttctcagcttacagagtgacaggcatgcatgctgatgaacacccctgctctttctcctctattccacagaaactgggggattagatagctaggtagatggatggaatgaagagaaaagaaaaggaagagaaaagg

SEQ ID NO: 81993 - DNA, 408 bp, Homo sapiens
  sig_peptide (63)...(198): this location contains the signal peptide sequence, MFPPYFSLILLLFTFASKFFLSLNLKKSNIVKARIESTKTVISKR, Run with SignalP
  misc_feature (75)...(162): similar to gi4731219 in the genepept database release 114, Run with FASTXY 3.3t00, default parameters
ctatatccctaaactcaaagggacatccagtgctatcaagacacccaattgaacatacacatatgttccccccttacttttctcttattttacttctattcacttttgcttcgaaattctttctgtctctgaacctgaaaaaaagcaacatagttaaagcaagaattgagagtacaaagacagtgatatcaaagagatgttaatcctccacacagtctggctgcattgaggatatttctctttgtgcagtagaaaactggaaatagctaagtctattggaactcttctttctcaaattctattgaactgaagagtaggaaatttagaaacagtaagacgtgggagataatttaactgaattcactacttttgtgacaaggatatccagaggaactcagggacttgccc

SEQ ID NO: 81994 - DNA, 642 bp, Homo sapiens
  sig_peptide (55)...(190): this location contains the signal peptide sequence, MGLSLGLRMVPRLAGLWAPQRYVQVHIGFAAGSKEGLLSVTVDLG, Run with SignalP
  misc_feature (405)...(273): similar to gi42129 in the genepept database release 114, Run with FASTXY 3.3t00, default parameters
aagcagatcaatcctcagggccctggacagtgcactcatgcagtagtgggtaagatgggcctgtccttaggccttaggatggtgcccaggttggctggtctctgggctcctcaaaggtatgtgcaagtgcacattggctttgctgctgggagcaaggaagggctgctgtcagtgacagtggacctaggaagttggctctcaggctctggtgagcacacactttggttctggtcccattgtcccagaggcagcctccccagtacacatcactgcccacttcccaggtgcaggacagtatgtgggctagagtgctgcaaacctgggcatacctgagtctagccggtgcctcaatgctacagccctctgggctgatgttgggggaaatgtcagcagggctccagtgatgtggacattcaggggctattgtgccccagagaagcatatcatttcttgagactgggctctcaaagtgacggcatgctacagctgcttgagtcttgagggatgcgggatgcatcgcagactacctgtctggaacagtgccactgcatggactccgagaaggccctatactagtctcatggtccataacgactgaggggcttgcctgtgactaggactggagcaaacaattttgacctt

SEQ ID NO: 81995 - DNA, 640 bp, Homo sapiens
  sig_peptide (157)...(292): this location contains the signal peptide sequence, MQSVIRKQFTALAGFCFWFCLFTLAVLSLTLLICKLRIMPFKLEG, Run with SignalP
  misc_feature (181)...(275): similar to gi2407297 in the genepept database release 114, Run with FASTXY 3.3t00, default parameters
cacttcttcatcattccatcagaaccttataatgaatttgatgcagattgcttttgaggggtttatctctcagtcctaaacatataggggcatgttagaaaatttgggattctaggtgtgatgcctgaaaagggactgatataactgagcatggctatgcagtctgtgataagaaaacaattcacagctctagctggcttctgcttctggttctgtctctttaccttagcagtcctgagtctcaccttgcttatctgcaaactgaggataatgccatttaaacttgaaggtttgtttcaagaattaaataaatcatggcatatgaagctcttgtcacaagatagggagttaataaatatgctgttgctcttaatgggcaggtcctaagtgatggcttagaaacctaagattggaaggcatcttggagatgttctggctcaacctcctaacaatgcaaaagtttgtcctagaacactcctggaagatggatctttatgctctcattagataacccagggatcccactgtctcagaaggcagtctgtgcatattttttggcaggtctaattcttaatgataataacacacattttatttgtggttacgaaatgcttttacgtcattatattaactgaactgt

SEQ ID NO: 81996 - DNA, 639 bp, Homo sapiens
  sig_peptide (193)...(328): this location contains the signal peptide sequence, MFSLLLGYSRYFSLCCIGLVGHFSKNKPDNDRNFVIISRKTFCTF, Run with SignalP
  misc_feature (314)...(170): similar to gi4154175 in the genepept database release 114, Run with FASTXY 3.3t00, default parameters
agtagtaatagtgtactcttttttatttatagatgagtcgttcatttagttaaataacttttgcttgctagggtaaaggagatagtaaatgatttcttactttttctcattgcttcttcctttcccactatcttgatagcagattaatcagaggagttatgggcttggcaaaaggaatagattttactaagtatgttttcattacttctgggatactcaagatatttttctctctgctgcattggattagtaggccatttttccaaaaataaacctgataatgataggaattttgtaataatttctaggaaaactttctgcacatttctttagccttctctacaaaatattttgcccaaaggtcaaaacctctaggctgacaatagcatggatttcatggttattctacaaaaagaaattgagcacagctaggtgcaacattctctggctctgagatatagaaggtctcccactgaaaggagagcttagtcttggagctcagtaatgattccatagcaacaggatgagggctttgtttcaacttttggatggttggctggtctcctgggagggtggacatcaggtgaccggatcaggcatcatgtatctttatacttagcagatattgactattagcca

SEQ ID NO: 81997 - DNA, 1902 bp, Homo sapiens; identical to SEQ ID NO: 59444
  sig_peptide (1331)...(1466): this location contains the signal peptide sequence, MYRPAPPRQNRQLHPYLLASWPKALNCTLCVCVCVCARVCACVCM, Run with SignalP
  misc_feature (381)...(1386): similar to gi736727 in the genepept database release 114, Run with FASTXY 3.3t00, default parameters

SEQ ID NO: 81998 - DNA, 410 bp, Homo sapiens
  sig_peptide (94)...(229): this location contains the signal peptide sequence, MVSAPTEGAQQKGLFLLRFYLVLVEVLYRRVFGKCLGIKGRSPEE, Run with SignalP
  misc_feature (335)...(234): similar to gi10093 in the genepept database release 114, Run with FASTXY 3.3t00, default parameters
aggagaaccaggagcctggggcaagagggtgggaagaggagattgatggagagaactgaaaagtacatccgggatccctggtgagcacactagatggtttcagccccgacggagggagctcagcaaaaaggtttgttcctattgcgtttttatttggttttggttgaggttttgtatagacgagtctttggaaagtgtttaggcataaaggggagaagcccagaagaagcgagtgtttttgaagtgtggggaagctaggtcacgtggtggagcagggacagctatggcaggctgaggtctggtaccaagcggtagggcagggccacggaccgtgtggcagcagcagtgtgccttagtgggctcacagctctttcatttttctgcaacaccctgcagtacagagggttttt

SEQ ID NO: 81999 - DNA, 636 bp, Homo sapiens
  sig_peptide (75)...(210): this location contains the signal peptide sequence, MYKVFNCSWRFIFLYILLYVHIKIVAPKSSNLAVGITSSITKTQA, Run with SignalP
  misc_feature (315)...(255): similar to gi143726 in the genepept database release 114, Run with FASTXY 3.3t00, default parameters
aaaaggcattctgcataaaccaggtggcaaaatcaaagttagattaagccatcattgatagcaattaagcattaatgtataaggtatttaattgttcctggagattcatatttctttacatcttgctttatgtacatatcaaaatagtggcccctaagtcctcaaacttagctgttggaataacaagttctattacaaaaacacaggctagtaatagatagtggtaaatctctatcagtgacttgcctgtggataacttggccactgagaccacaaggctttgccaaaggcaccccatcacttggtggcagcacatcttcattgcaggcaaagttttcaggaagaagatatgtctggatgttgcattttatgtggtagtttccatgatattgatattgtcaatccaaacctaaactcatacggagatagaaaatgttgaagatgggtaaagatgttttgcaatggggtttgtataccttgagagagagtgatgatttttatagccagaaccctgctttactaatacacattcaagagatgggagtcttcaacccttggaacatcttgtcttaagaacttacgatttttgggcgggcccggggctcacgcctggatccaacacttgggaggccaaat

SEQ ID NO: 82000 - DNA, 2122 bp, Homo sapiens; identical to SEQ ID NO: 60944
  misc_feature (1)...(2122): n = a,t,c or g
  sig_peptide (235)...(370): this location contains the signal peptide sequence, MSHHCAWPKNFLLKMLSTGRVQWLMPIIFLFFQKMGGNMVGSQLK, Run with SignalP
  misc_feature (763)...(812): similar to gi143171 in the genepept database release 114, Run with FASTXY 3.3t00, default parameters

SEQ ID NO: 82001 - DNA, 400 bp, Homo sapiens
  sig_peptide (204)...(339): this location contains the signal peptide sequence, MEFMFLMCVFFFSYDSDIFFISFEVLFQSFVLASVWNIIYKSIVQ, Run with SignalP
  misc_feature (258)...(382): similar to gi4996081 in the genepept database release 114, Run with FASTXY 3.3t00, default parameters
cggacgcgtgggaaagcctttttacatgagaaataacatttatatccattgttttcaggaagagatcatttggggtttgtttcccttctgtcattttatttggggacagttaaaagaggcttctatttcacatgccattagagtttgacaccagaaattatcttctaacctagtgctagccacagtgaggcacagtaaacacaatggagtttatgttcctgatgtgtgtattctttttttcttatgatagtgatatctttttcatctcttttgaagtactttttcagtcttttgtcttagcatctgtgtggaatataatatataaaagtattgtacagtcgaacatacagagtgatgtacccaagatcactcacctgtgcattggtaatgccaagcctaa

SEQ ID NO: 82002 - DNA, 1028 bp, Homo sapiens
  sig_peptide (66)...(201): this location contains the signal peptide sequence, MFFYSYPVVSCLLASLFFFFSSSFLPTQNSSTCNTPDKTHLYCLP, Run with SignalP
  misc_feature (31)...(216): similar to gi333056 in the genepept database release 114, Run with FASTXY 3.3t00, default parameters
aactagattagtcctctgtgatgctgggctactcagaccataaaggtaactcggtgtttactgttatgtttttctattcttatcctgttgtgtcttgcctcctggcttctctctttttctttttttcctcttctttccttccaactcaaaactcatcaacttgcaatacccctgataaaactcatttatactgcttaccaaattttctggcttcagccagctgttcagttttttttattgtggaaggccccaaactcttctcactacttgttctgaagataaattagcgacttctaaataatgcagtgaaccctaattctctttgattagtagcaagttagatgatagtgacccattgaaattggccatcagcataaataatgagtgaatgaactgataaaatgcaaagtcactggccatcataaatcaaatgaaatccactttctctggaagtcactgaaattagaagtccatgctcctattaattattttgccttctgaagacgacagtgttataaatcagccttgaaaggcccttcacttagaaagctgaaggagtacggctgcctgcaaattgctttgtgtacgcacctaattgtttcttaagtaattcacctttgtagcattgcttcaggaaacgaagaaggtcccttcggttgagatccatgacttgtagccttaggaatggccttgagaaggctctctggaaggtccaaattggagtgggcaattccccacccccttctctagaacagatatcctcatgttctttgtcttacaactcagaccccatcaggtgggctggcatttttggagtggtttgctatggcaggatccaaaaaaaggctggcagtaggccctgagccatttcatcatcttggctcaacttaacttccagccaggcctaagaagccaagcttcactagaattcagtgaaaccaagattttaaagtgagaaaaacagagattgaaactctgactttgaggtcatggaaaagtgtgtatctgctatataggtagagcgcccc

SEQ ID NO: 82003 - DNA, 636 bp, Homo sapiens
  sig_peptide (155)...(290): this location contains the signal peptide sequence, MKASFLGPRGHPSWPLQLLLLINASGVLSTPVERLCGLDPCGSNP, Run with SignalP
  misc_feature (518)...(548): similar to gi558075 in the genepept database release 114, Run with FASTXY 3.3t00, default parameters
cggacgcgtggggggagatttgttcttctgaggggtgtctaggcaaaacagttgcctttgatcctgccctgatttggtgctgtctcagtgctgggaagctttgcattttctaggcctggaactctgggtcccattcacacttctcactggagggatgaaagcctccttcttgggccctcgtggccatcccagctggccgctccagctgttgttattaataaatgccagtggtgtcctctcaactccagtggagaggttgtgtgggttggatccttgtgggtccaatcccgtgctgcatatctgggaactgtgaccttgtttgacatgggcatgtgtctgccaagcaggatggggtcggtggcggcaagcacagagaaccatgagacccacgccttttctctagggtcttgatgtgtccgtggggagatgtgatgccttcgtgagaatatggagcatcccatgacctgccccaccgggcaggtgcatcgccgaagtggagggccccagtgctttttcgcccccacggcccgatctatgtgactcccctcacggaggaccctgtttgtatttaggtcttggagggagttcacccggcgggaagggttggaggtactacccttcttctgacccggccct

SEQ ID NO: 82004 - DNA, 555 bp, Homo sapiens
  sig_peptide (402)...(537): this location contains the signal peptide sequence, MNLITLCLLKALLVFLMLWFWWHPQVHSQSASLPLTGCVAFMISA, Run with SignalP
  misc_feature (390)...(507): similar to gi388274 in the genepept database release 114, Run with FASTXY 3.3t00, default parameters
ttttttcaaataacataatttatttttttgagatctgaagcacatctaaacaacacaagctaactaaatagatgatgttcaggcaaggaagaaccaagtgatttctacactatgttttctaacagcagtaggcttggctctggacaatgtacggattggctggggggcagaagaaattgccctggatgtcctctttcctttctggtgcctatcttccccaccagcaaactcggcggcctggacctccaaatgtatcctgactccgagctgcgtgatttctttttcttccgagccacaaccatctccattctggacggcatccatgtgctccgaaagctctcctgcttcctctcagacttcccaaccatctcttccccagggcacccgtgggatccaacggcatgaacctcatcaccttatgcctactgaaggccctgcttgtcttcctaatgctctggttttggtggcatccccaggttcacagccagtctgcctcacttccccttactgggtgcgtggcctttatgatctcagcttctttgggtccgagatctg

SEQ ID NO: 82005 - DNA, 635 bp, Homo sapiens
  sig_peptide (12)...(147): this location contains the signal peptide sequence, MSERHGPSSQSVLLSLWFVLTLTPFLVLTLLSCMEHTAPAPFQSA, Run with SignalP
  misc_feature (407)...(186): similar to gi860727 in the genepept database release 114, Run with FASTXY 3.3t00, default parameters
cccgcacctgcatgagtgagcgccatggtccttcttcacagagcgtcctgctgtcactttggtttgtgttaactttgacgcctttcttggttcttactctgctttcctgcatggagcacacagccccggctccctttcagtctgcatggcagacacctggcctctgcagggccagatcattctgtgtcccctttcggtcgtccctatgttgccgtcaggcgattgagggtgaaggtcggccttggcagcccagtggaaagtcccttgactcctggtcgtcagtggcaggtctccagcctttgggaggaggaaacttctatttaacaaagaaatggaattgactttgccacacacagccagagcgatgatttgtagagccaacctgctgagacattcaaagcatcagtcgtagggtcaggaccgccaggtgaggtgtggctccacctgcagcagcctggggcaggttgcctagcctctggctttagcatccccttctgtgaaatggggaaagtgatgggacctggctttgtagggtggttgtgaggacccacacgcgtttttgcaaaaaactcacccccccgccgcctaaaagatcaaaaacgcttggcatggggcccacacctggatttcaggtt

SEQ ID NO: 82006 - DNA, 637 bp, Homo sapiens
  sig_peptide (97)...(232): this location contains the signal peptide sequence, MNSQLLRMTITLSLLPSSILSLNTVHPQRDKFGDPLAYLFHWDER, Run with SignalP
  misc_feature (251)...(160): similar to gi2995260 in the genepept database release 114, Run with FASTXY 3.3t00, default parameters
ataaatggcatgaatgatcatctgcctttgtaaaacaatctgaaatcatttcatcaattgaacaagctgagcatggtgggagggaagtggcatcccatgaactcacagttgctgaggatgacaatcactctctccttgctgccttcctcaattctttctttaaatacagtgcatcctcaaagggataaatttggggatcccttggcatatttattccactgggatgaaaggggcagaatttacctattgtcagattattatttgttttcagcaaactctgctgctaccagaaatctgcatcacatgagctgagagaagagaagattctttctgcaatatgttttccttattagctgtctgccagggctattacagagagagaaaacggaaaacttcaatctgcgaccatatgtccaatgtgtgtccttctctttgactcccaggaaagttcctctttttaatttccaaactggatgactttgattaatcttaatctcttgaccatcagtactatagcttattaatcccccaagtattataaagtacctgctttggaaataagaggctaaatggtaataatgggggagaagttaattctgaagtcatggaaaactagatttggaacctgactaactcc

SEQ ID NO: 82007 - DNA, 511 bp, Homo sapiens
  sig_peptide (254)...(389): this location contains the signal peptide sequence, MAISWKPTGLPWHSMLQVLLAAWLPGPTPTPHSALPSFSPPPSLP, Run with SignalP
  misc_feature (118)...(254): similar to gi5359739 in the genepept database release 114, Run with FASTXY 3.3t00, default parameters
gcctttcttttatacatcttcctcaacctacagctcatgatcttgcaggtccttcacctttactggggttattacatcttgaagatgctcaacagatgtatattcatgaagagcatccaggatgtgaggagtgatgacgaggattatgaagaggaagaggaagaggaagaagaagaggctaccaaaggcaaagagatggattgtttaaagaacggcctcggggctgagaggcacctcattcccaatggccagcatggccattagctggaagcctacaggactcccatggcacagcatgctgcaagtactgttggcagcctggcttccaggccccacaccgaccccacattctgcccttccctctttctcaccaccgccttccctcccacctaagatgtgtttaccaaaatgttgttaacttgtgttaaaatgttaaatataagcatgcccatggatttttactgcagttaggactcagactggtcaaagatttcaaagatttctccacaaa

SEQ ID NO: 82008 - DNA, 674 bp, Homo sapiens
  sig_peptide (218)...(353): this location contains the signal peptide sequence, MTLFSTFTLMLIPGCPLPVSLTFRQFQQPVIISLLPSELSQCNEQ, Run with SignalP
  misc_feature (232)...(197): similar to gi1857300 in the genepept database release 114, Run with FASTXY 3.3t00, default parameters
agactcctctccttaagttaaaataaaaaaaagtttttgaaggacactgttcatatcttggaggaaaattaagagattataatctcttcttccaggaaataaggtggttgggcaaatgtgtgcaaatcctgcaaacactgttaaattcagttgtttgtcctacgccaatgacttattctctttccttgccttaccatggagatgatagaaatctgtgatgactcttttcagtactttcaccttgatgcttattccaggctgtcctctaccagtttcacttacatttagacagtttcagcaacctgtaattattagccttcttccttcagaattaagccaatgcaatgagcaaatctggaaagttatgttacccaagttcaatgttgtctgcaactttattcttaggaggaaagtccaaatccaaattagggtctctagattggcttggaatgtgaaaaatctgttattcctgctgtctacctttttgaacttcttctttgctcttaaattttgtctttatgctttataaagtgagaatcttggggaagtgagtatctttgtgggtcaactgattctgaagaaaggaagagaggcatcacactgatgactacacattactttgtgatctggttagttctcagaccttcttgactgatatgtgtgtatccagggta

SEQ ID NO: 82009 - DNA, 3967 bp, Homo sapiens
  sig_peptide (50)...(185): this location contains the signal peptide sequence, MDLPRGLVVAWALSLWPGFTDTFNMDTRKPRVIPGSRTAFFGYTV, Run with SignalP
  misc_feature (50)...(3615): similar to gi5915662 in the genepept database release 114, Run with FASTXY 3.3t00, default parameters
cgccccccgccgccgctgcacaccggacccagccgccgtgccgcgggccatggacctgcccaggggcctggtggtggcctgggcgctcagcctgtggccagggttcacggacaccttcaacatggacaccaggaagccccgggtcatccctggctccaggaccgccttctttggctacacagtgcagcagcacgacatcagtggcaataagtggctggtcgtgggcgccccactggaaaccaatggctaccagaagacgggagacgtgtacaagtgtccagtgatccacgggaactgcaccaaactcaacctgggaagggtcaccctgtccaacgtgtccgagcggaaagacaacatgcgcctcggccttagtctcgccaccaaccccaaggacaacagcttcctggcctgcagccccctctggtctcatgagtgtgggagctcctactacaccacagggatgtgttcaagagtcaactccaacttcaggttctccaagaccgtggccccagctctccaaaggtgccagacctacatggacatcgtcattgtcctggatggctccaacagcatctacccctgggtggaggttcagcacttcctcatcaacatcctgaaaaagttttacattggcccagggcagatccaggttggagttgtgcagtatggcgaagatgtggtgcatgagtttcacctcaacgactacaggtctgtaaaagatgtggtggaagctgccagccacattgagcagagaggaggaacagagacccggacggcatttggcattgaatttgcacgctcagaggctttccagaagggtggaaggaaaggagccaagaaggtgatgattgtcatcacagatggggagtcccacgacagcccagacctggagaaggtgatccagcaaagcgaaagagacaacgtaacaagatatgcggtggccgtcctgggctactacaaccgcagggggatcaatccagaaacttttctaaatgaaatcaaatacatcgccagtgaccctgatgacaagcacttcttcaatgtcactgatgaggctgccttgaaggacattgtcgatgccctgggggacagaatcttcagcctggaaggcaccaacaagaacgagacctcctttgggctggagatgtcacagacgggcttttcctcgcacgtggtggaggatggggttctgctgggagccgtcggtgcctatgactggaatggagctgtgctaaaggagacgagtgccgggaaggtcattcctctccgcgagtcctacctgaaagagttccccgaggagctcaagaaccatggtgcatacctggggtacacagtcacatcggtcgtgtcctccaggcaggggcgagtgtacgtggccggagccccccggttcaaccacacgggcaaggtcatcctgttcaccatgcacaacaaccggagcctcaccatccaccaggctatgcggggccagcagataggctcttactttgggagtgaaatcacctcggtggacatcgacggcgacggcgtgactgatgtcctgctggtgggcgcacccatgtacttcaacgagggccgtgagcgaggcaaggtgtacgtctatgagctgagacagaaccggtttgtttataacggaacgctaaaggattcacacagttaccagaatgcccgatttgggtcctccattgcctcagttcgagacctcaaccaggattcctacaatgacgtggtggtgggagcccccctggaggacaaccacgcaggagccatctacatcttccacggcttccgaggcagcatcctgaagacacctaagcagagaatcacagcctcagagctggctaccggcctccagtattttggctgcagcatccacgggcaattggacctcaatgaggatgggctcatcgacctggcagtgggagcccttggcaacgctgtgattctgtggtcccgcccagtggttcagatcaatgccagcctccactttgagccatccaagatcaacatcttccacagagactgcaagcgcagtggcagggatgccacctgcctggccgccttcctctgcttcacgcccatcttcctggcaccccatttccaaacaacaactgttggcatcagatacaacgccaccatggatgagaggcggtatacaccgagggcccacctggacgagggcggggaccgattcaccaacagagccgtactgctctcctccggccaggagctctgtgagcggatcaacttccatgtcctggacactgctgactacgtgaagccagtgaccttctcagtcgagtattccctggaggaccctgaccatggccccatgctggacgacggctggcccaccactctcagagtctcggtgcccttctggaacggctgcaatgaggatgagcactgtgtccctgaccttgtgttggatgcccggagtgacctgcccacggccatggagtactgccagagggtgctgaggaagcctgcgcaggactgctccgcatacacgctgtccttcgacaccacagtcttcatcatagagagcacacgccagcgagtggcggtggaggccacactggagaacaggggcgagaacgcctacagcacggtcctaaatatctcgcagtcagcaaacctgcagtttgccagcttgatccagaaggaggactcagacggtagcattgagtgtgtgaacgaggagaggaggctccagaagcaagtctgcaacgtcagctatcccttcttccgggccaaggccaaggtggctttccgtcttgattttgagttcagcaaatccatcttcctacaccacctggagatcgagctcgctgcaggcagtgacagtaatgagcgggacagcaccaaggaagacaacgtggcccccttacgcttccacctcaaatacgaggttgacgtcctcttcaccaggagcagcagcctgagccactatgaggtcaagcccaacagctcgctggagagatacgatggtatcgggcctcccttcagctgcatcttcaggatccagaacttgggcttgttccccatccacgggatgatgatgaagatcaccattcccatcgccaccaggagcggcaaccgcctactgaagctgagggacttcctcacggacgaggcgaacacgtcctgtaacatctggggcaatagcactgagtaccggcccaccccagtggaggaagacttgcgtcgtgctccacagctgaatcacagcaactctgatgtcgtctccatcaactgcaatatacggctggtccccaaccaggaaatcaatttccatctactggggaacctgtggttgaggtccctaaaagcactcaagtacaaatccatgaaaatcatggtcaacgcagccttgcagaggcagttccacagccccttcatcttccgtgaggaggatcccagccgccagatcgtgtttgagatctccaagcaagaggactggcaggtccccatctggatcattgtaggcagcaccctggggggcctcctactgctggccctgctggtcctggcactgtggaagctcggcttctttagaagtgccaggcgcaggagggagcctggtctggaccccacccccaaagtgctggagtgaggctccagaggagactttgagttgatgggggccaggacaccagtccaggtagtgttgagacccaggcctgtggccccaccgagctggagcggagaggaagccagctggctttgcacttgacctcatctcccgagcaatggcgcctgctccctccagaatggaactcaagctggttttaagtggaactgccctactgggagactgggacacctttaacacagacccctagggatttaaagggacacccctacacacacccaggcccacgccaaggcctccctcaggctctgtggagggcatttgctgccccagctactaaggtgctaggaattcgtaatcatccccattctc

SEQ ID NO: 82010 - DNA, 410 bp, Homo sapiens
  sig_peptide (97)...(232): this location contains the signal peptide sequence, MKMETQLLLAHSIGFLVWDCVFETSFIYKLQPPSARALQARGHSW, Run with SignalP
  misc_feature (187)...(261): similar to gi3219714 in the genepept database release 114, Run with FASTXY 3.3t00, default parameters
cggacgcgtgggcaggcttatctctccttgccagtgacttttaaaacggttgcttctatccaattctgtcggagagaggcagaggccccatgggacatgaagatggagacccagctcctgctggcccatagtataggattccttgtctgggactgtgtgtttgaaacatcctttatatacaaactccagcctccttcagcccgtgcattgcaagccaggggtcacagctggaagcattttcatgggaaattcagagttgtcaaaggcatttatctggtattttattgtaattggttaatttatgctttatttaccttgcggataggatctgagagctaaggctgggtactgctgcctttttctgttccacactgtcagggaaatgtatgtctccttaggcttaaaagcat

SEQ ID NO: 82011 - DNA, 886 bp, Homo sapiens
  misc_feature (1)...(886): n = a,t,c or g
  sig_peptide (259)...(394): this location contains the signal peptide sequence, MGLLIVALSPIRIVLFCDFPTIQGYLISCRAGKPHSLIYCSELMS, Run with SignalP
  misc_feature (23)...(186): similar to gi1731553 in the genepept database release 114, Run with FASTXY 3.3t00, default parameters
cccacgcgtccgtagagctgacccatctgttgagttagagttgagcagaggatgggagaggaaaggagaaaaagacgagcagcaaataggtgaattgggctcaaatttcatgatatctttgagaaccagtgatgacctacagctgtcttgggccccagatctgcagttgggagtagaaactggagtataaactccagtgggatgagcaggtctaaataagaccagcctcaggagggtggcaagtctaactaacagttaatgggcctgcttattgtggcactttcccctattcgtattgtccttttctgtgactttcccaccatccaggggtatttgatctcttgcagggcagggaagccccattctctcatttattgttcagaattaatgtcctggattaggattcagcaagcactcagccctcagtgggcctcacaaaactcatggctatttagtcaggagagcaattaaaggagatgaaaaggaggggtcaaaagaaaatgaaggaggaaacatgagggtttgtagttgatgagggaatgaaatggggacatagaggctgctaatttcagcctcggcatgccttgacctagtcacttcaaacgattaattcactcagcattgaagaatgttgagccaggcacagtggcgtgctcttgtaatcctagctatgtgggaggattgtttgaacccaagagccctgggcaacatagcaagacccccatcttaaaaaaaaaaaaaaggggcggccgttttagaggatacaagttttacttcccggggcttgcaaagtaaaaattttttttaatgggcccctaaattaaatccgcgggcccggggtttaacaccggcgggcaaggtggaaacncctctgtctcttgttgcg

SEQ ID NO: 82012 - DNA, 934 bp, Homo sapiens
  sig_peptide (261)...(396): this location contains the signal peptide sequence, MALNIIINPVWFCHCLTCTIHIDFHILFIKIFKHMFFRSLWSSWL, Run with SignalP
  misc_feature (291)...(379): similar to gi5616206 in the genepept database release 114, Run with FASTXY 3.3t00, default parameters
ctaatttctaattcttctgtagcatttattaagaaaagttaaaataactgcttaatttgagatgaaattaacacatgagaacttcactcattaggtggtatgttctgtgactgttgtttaatgtgtattttatggcagttttgactgccattttgtcatttgagaaaggtgaaatgaagtactattttgggctgcgaaacctgaagttgtagggaaacctgtgtttgaagaccattaagaagttgttttgcatactaagaatggcactgaacatcattatcaatcctgtgtggttttgccactgcttgacttgcacaattcacattgattttcatattttattcattaaaatttttaaacacatgttttttaggtcgctttggtcatcttggcttagccatcaacttgatcacatatgatgatcgcttcaacctgaaaagtattgaggagcagctgggaacagaaattaaacctattccgagcaacattgataagagcctgtatgtggcagaataccacagcgagcctgtagacgatgagaaaccttaacaagcatgtacgtccctgacagaacagctaacaggaacctttaaatgagggaaatcaaaatcttctttcctgggggaaaattggtgccacacccttttctattacccctaaagggtaccacacccccttagcctcaactgaccgctcatacccaccctcctcctcgcggggtctgtcaccctacatatccgcacacccccccaaccgaccttcctttgctggcctcacttcccccgcctatactgtgtccctttcttactacttccactctagtcccggcgtgaccatcaaaacgatcgcaccttcactcacagttcacgccctacccgcacacctcgtgtgactacctctcagagccgcgtgcgcgcctgacactctcgtgccg

SEQ ID NO: 82013 - DNA, 634 bp, Homo sapiens
  sig_peptide (49)...(184): this location contains the signal peptide sequence, MAIFPLWKGVNVLVCIFSSFIMLNIYCTLLIWKFIYSAFFCYITS, Run with SignalP
  misc_feature (61)...(224): similar to gi4062605 in the genepept database release 114, Run with FASTXY 3.3t00, default parameters
agaccagcggccacccacgcgtccggtctgaatcttattcctttgtagatggccatttttcctctttggaagggggtgaatgttttggtatgcatattttcctcattcatcatgctgaatatttactgtacccttttgatctggaaatttatttattcagcttttttctgttatattacttctttgatgattttcccctttagttttttctgttctttctttctagaccttcttaaagtcatagtttatatcttcttcctttatctgtactcctcaagataaatgctagaagttggttaagccaggacttaaacccagcttgtagctttataagctgggttttgaacctcagttttctagttagtaaagtgatcatgagaataacgacctcaaaggatatcatgaggattaaattagatttttttaaagtccttagcactatgcccagtacatacagcattcaataatgttaggaattgttgctgtcatgttcactattaatttatttaacaaatatttattgaatgctaatacaaatgtgccatgctcttctaggtgacccccagtaaggtagaggactaagaagacatgagatttatgtgaaaaagcatttttaaagaagaccattggcaat

SEQ ID NO: 82014 - DNA, 810 bp, Homo sapiens
  sig_peptide (147)...(282): this location contains the signal peptide sequence, MGYLLWLVLSILVCTELGLGRLTFPLDSESPRTSYKVRPWVVLEA, Run with SignalP
  misc_feature (156)...(267): similar to gi4519810 in the genepept database release 114, Run with FASTXY 3.3t00, default parameters
gtacactgcggtggaattcccgctttttgaggcctcagttttcctcatctgcaaaaccagcctaatgatgctatagagttgttatagaaagttgaatctttgtcatctattgaatgcttgaaatttagctaaaagtgtctcaggagatgggctaccttctgtggttagtactgtctatcttggtgtgtacagaattgggacttggcaggttgaccttccctctggattcagaaagccccaggacttcttataaagttaggccatgggtcgtcttggaggcttgggtctggtaaataattgagcctgagctcacaatcctgcccctgggtccaggtggctggtctgctgcccccaaaagcctgaccttcttggtcctgtgggtctgtcagtaaggcaggtagccatagctggagagagacagccaccaggctgggatcttggacagtccctacatttctgtgtaatcctggactaggcagggcatggagtagatggaaaatggcggccatcttggaaatgtgccataacaactcacttttcaagaccgtcccctagaggagaaaagtcccgccctgggtagtcaattaacgaattttcaagaccccgcgcttgcgctcctagccggagattccacgagagattttaatctgacgccagagtggatcacagagcggacggggatacactgaaaaagaccggtcaggagtgacgtcgcgaccccctcttggtagaaaaggacgactgctgcccctggagatcgtggaggccaataaccacgcggacgccatgttgacccgcaagagcgggccc

SEQ ID NO: 82015 - DNA, 456 bp, Homo sapiens
  misc_feature (1)...(456): n = a,t,c or g
  sig_peptide (44)...(179): this location contains the signal peptide sequence, MNPHHTFLCVLTVGSLPLLKIRPQTSSPYLWVVCSSPEDLGQEQW, Run with SignalP
  misc_feature (448)...(382): similar to gi554197 in the genepept database release 114, Run with FASTXY 3.3t00, default parameters
nttcgaaaactgatgaccnctggnannnnctggaattcctgccatgaacccacaccatacttttctctgtgttttgacagtggggtctctgcccctgctcaaaatcaggccacagacctcatctccatacctctgggtagtgtgttcaagtcctgaggacctgggacaagagcagtggatttgtcctcttgcccctcaaggtcaagcactggctgtgacagggggatgaactgctcccaggccaccaacaaaccactcagggggagcaatggaggatatactgtgaccctccacccctactccctccaggagaccaagcaagcagtcttgaaagggaccatcaggcataggggtgtgtgattcaactgtaaccccagtcctgtggcaatggtgatgaggcctatcttgggcatgtgagcatacactcgccctgctctctctcagccagcaaagagc

SEQ ID NO: 82016 - DNA, 354 bp, Homo sapiens
  sig_peptide (96)...(231): this location contains the signal peptide sequence, MCYQYYWIFCFSVPAFLSCVGGQKCTWVAVSREMPTEGSSGLLQT, Run with SignalP
  misc_feature (86)...(173): similar to gi2921368 in the genepept database release 114, Run with FASTXY 3.3t00, default parameters
actatgaagcctttactgaattcgctggttcctgaggtttcttctcaagcttctgtagaagctatcctctgcaccacaacatcagatcctgaatcatgtgctatcaatactactggattttctgtttttctgtgcctgcttttctttcctgtgtaggtggacagaaatgcacatgggttgcagtatctagggaaatgccaactgagggttcttcaggcctattacagactaacataactttgaagagcatagtgaattccaatatctaatcttcatctttgcaagaccaagaattcactcttgtctgagtcctagaaatgattattgattcgaacattaattatattttcctaa

SEQ ID NO: 82017 - DNA, 838 bp, Homo sapiens
  sig_peptide (79)...(214): this location contains the signal peptide sequence, MLLLINYSLQLYFRICIWVHCTLSRRLGNSLLLDHSATILGHLLT, Run with SignalP
  misc_feature (291)...(385): similar to gi5923895 in the genepept database release 114, Run with FASTXY 3.3t00, default parameters
gggttaaataacttgtctaaagccacatcactcctatcctcatacgtactcttataagaataatgagcactcctataaatgctcttactaatcaactactcattgcagctatatttcaggatatgtatatgggtacactgtacgcttagcaggaggttaggtaacagcctcctacttgatcactcagcaactattttggggcacctattaacatgtagacctgttctacaggctaaaagaaatgccaaaaagtaagtgcttgcactataggttagaagaaaagatgctttctgcgtgtctctctttctttctctaggtgtgggtgttttgtggatgtccctgcagctatagacagacctgggatgcaggcactgttctgggggttttgtaagcagcacagcctagtgggtaggagaacagtccccagataccccacgtatgctcataaatgactccattggccgggcatggtggctcaggcctgtaatctcagcactttgggaggctgagatgggcagatcacccgaggtcaggagttcaagaccagcctggccaacctggtgaaaccccatctctactaaaaatacaaaaaattagccgggcatggtagcacatgcctgtaatcgcagctactcgggaggctgaggcaggagaatcatttgaacctgggaggcagaggttgcagtgagccgggatcacgccactggactccaacctgggtgacagagcaagacttcatctcaaaataaatgaataataaattataaataactccattggccccctacccccagacattgggaatctggcttaattttcccggatcccaagttttttc

SEQ ID NO: 82018 - DNA, 836 bp, Homo sapiens
  sig_peptide (659)...(794): this location contains the signal peptide sequence, MFKHPALTIGRKVILVRRWFLLTPAPFLELPLVAKTYLGGLIWDK, Run with SignalP
  misc_feature (239)...(153): similar to gi386721 in the genepept database release 114, Run with FASTXY 3.3t00, default parameters
ggagaaaatgtacagtcctcttattagcataacgaagccatcagcattgcatcaagcgggtcctcgtacccttttccttgtaatggtgtttggtgtagggtcctgaggaagagctgccagcccctacctgatggatcaaaatccccttggcaccaaagagtgactgatagtgttaaccatcacaggagacatgtatgtatgtgtgtggaactctgacgtgtattttaaactttgcaatagcccaaagttaatttgtttctttgccatttgttttcgaatgggtgtggcattgcttataaaatgttgaatgtaagttgcctaggacggcgcctggcatatggtggaaactgaataaaggctgctaggtagtgtagactagatggactagaaaacagtacagatgcagatgctttcagatgttctctctgccacagagagacctttctgtgtgctttgttcaaagttgacagtgtgagtaaactaccatcaacaaggcgttacttttgggtaattttttcaatgtttatcccagttccttcatccgcttttacatagcctcttgtactgcaagctacactcagttttgaagatggggggttagcgttagagtggtgttctgtggccagtggaggaggaagcttgctcactttaatgcaaaatgtttaagcatcctgcgctaaccattggcaggaaggttattttagtgagacgctggttccttcttacccctgcaccctttctggaattacccctggttgctaaaacctatttaggggggctcatttgggacaaaatattggttaaggcgggtttttacaaaaactcccaacttataa

SEQ ID NO: 82019 - DNA, 405 bp, Homo sapiens
  sig_peptide (250)...(385): this location contains the signal peptide sequence, MVPAIHVGLYCPCITMRCLSFLTQGFLCAKWGRARRGIIYLTEVL, Run with SignalP
  misc_feature (138)...(54): similar to gi643486 in the genepept database release 114, Run with FASTXY 3.3t00, default parameters
aaaaaggattatttttattgttggtatttattattattattattggtttaaatatttttgatctgtggttggtgaaatctgaggatgtggaatccatagatattgagggctgactattaataaggtaaaattccagcattgagggatgttgagtgggggccagtggggccaagagcacacactaggtcttcaaggctaggttcaaggctgccttccctggccactccagttagcagtgagtgctttctcatggtgcctgccatacatgttggtttatattgtccctgtatcactatgagatgtctttcttttctgacccaaggttttttatgtgcaaaatggggcagggcaaggaggggaattatctacctcacagaagttttgagagatttaattgagtatgaa

SEQ ID NO: 82020 - DNA, 1074 bp, Homo sapiens
  sig_peptide (30)...(165): this location contains the signal peptide sequence, MSLLLLCSNTCSFLQNVCLVWLRDFTEAIKGGHITLVGVEENQHN, Run with SignalP
  misc_feature (371)...(488): similar to gi3064566 in the genepept database release 114, Run with FASTXY 3.3t00, default parameters
gaccacgccaagcttggcacgaggagaacatgagcctcctgttgctttgtagtaatacatgctcattcttacaaaatgtttgccttgtatggttaagggattttactgaggctataaaaggagggcacattactttggtgggggtagaggagaatcaacacaactattttgctagtgcactactgctaatacatgtcctgcaaatagaagcatgacctgatggggaagctttaagagacaagagtagtagagacattgtcttatgacttgggagtgggaataaggtattcccccatatgtatgtattacttcccctttgctgaaataagcgcaagaaataactaatggttttctccgctatagagacagagataggaaaggatacaaaaaagaccatggccataataaaaatcaggactacacagtcaccacaaattaccagaagatgagagagaaatactctgtcaactatactactgacatacactggaatgtcttcttagaagaaattttaaaggatttagtgaacaaccagttattatttcagaaaataaaaattaataaaaattttcagtgaaaggtagtatacaattggctattataattggctgtttagttctttgtaccctccacaaaattgcaagatattttttaactttttattttaaagtaattaaaatttcacaaaaaacatgcaaagaaatggacgggaaggtcatgtgcacccttcatccagtcctcattctcagtgttaacatcttgcaaaactgcaatattaaaaccaggaaactgacaatagtacaatccatggagcttttcatagaatccatagatatttcaccagctatacatacagttatttttggttgtatgtgtgtatagctctatggcattggatcacatgtgtagcttcgagtaaccactagctcaatccagacacttacctgtaccatcaccataagacttcctagggctaccactttatgcacaccccaccctcttcccttcccctccctaacccctggctaccattaatctttcttcctaatgaacttatttccaggaaggtgggcc

SEQ ID NO: 82021 - DNA, 846 bp, Homo sapiens
  misc_feature (1)...(846): n = a,t,c or g
  sig_peptide (695)...(830): this location contains the signal peptide sequence, MAITGHTLLQMLLHQTLWPQHKLACCIISLLVFWDLVPSLAPXXX, Run with SignalP
  misc_feature (403)...(358): similar to gi3618235 in the genepept database release 114, Run with FASTXY 3.3t00, default parameters
cggtttgacatcgagagccctcgggccgcagttcccgaatcgacccacgcgtccggggggatacctgctggaggctgtgtgctggtgcactaaaggtggtgttggcttggtgcaggatactggccagtaaaggttttgatgccttctctgtgccccccaacaaagagtgattgttcagagtgtgggaggttaccctgttctctgcacagggttagcacaaaggcaggggtggagttttctggctctctgcccaccaaagtttcatctacaatggcaattgctgggggtggcggggcatattgcattcccatttgctggaggggcaagcaaagccaaacctgcctttgcagacatgtgccagcaaaaaaatatcaggagttgccatggtgtcacgtgaagctgcagtatggggaagaaatgtgggctggtgcagtcataggggctgccttgctggagctcattcatgagtcaggcatgtccctccagtgcagatgctctggtatgagcttccagggtacctgagactgccctgtaagcagctgtggccagactgggtccctgggagaggccagcagaccaaggagtgctcagttggaccagcttcttctgatttgcaagaccatcctgcagaaattaggcccaacagttcccgtagggctaaagtctcttatgggagacagttgagcctagagaaatggccatcactggccacactttactacagatgctcttgcaccaaaccctttggccacaacataaactggcttgctgcattatctctttgcttgtcttctgggacctcgtgccaagcttggcgccancnnnncnnaacggtatgaaatcttt

SEQ ID NO: 82022 - DNA, 810 bp, Homo sapiens
  sig_peptide (429)...(294): this location contains the signal peptide sequence, MCLSHLVSLFPAATAFLINKVPLPVDKLAPLPLDNILPFMDPLKL, Run with SignalP
  misc_feature (501)...(357): similar to gi205395 in the genepept database release 114, Run with FASTXY 3.3t00, default parameters
ttttttttttttatgtattcattgctttatttgtccttttcacgggtcactacattttagggcatttgatctataattggtagaacaggtttcaggcagggaggataggagcatcatcttccatccccatccacctccgctctttatcttgatgtcacaccaagtgtgatagcgcctccagcagtttcttcacagcttcagaagcctctggtcccagctcatttacacacttccttagcccctccacaaggtgctcaacagaaatgcccagagttttcagaagaagctttaatggatccataaagggaagaatgttgtccagaggtaaaggtgccaacttgtcaacaggaaggggcactttgttgatgaggaaggcagtagctgcaggaaaaagagaaaccaggtgagacaggcacatctgggcccagactatgacctcatcttctttccctgtgtccatcaatagctccattccagatccactcatcttacttccattgaaaacttctacctctggccctttgcacctgctgttccatctccctagaactttttttccttagctagctacttacctttctttctcacattatttggtctctcttcaaatattacctcctcggagaagcctgcaatggccatagtcactctccgtcatttattttttcttaccattacctaaaaaaagcaactcttcatttgctgtttttattgtctttattttctcattagaatggaggctccatgagaacaaggaatgtgtgttttttcgctaatgcacccatgcctacaactggaattccaccacag

SEQ ID NO: 82023 - DNA, 720 bp, Homo sapiens
  sig_peptide (340)...(475): this location contains the signal peptide sequence, MTVLLRLPSFLFARPQGNLDPLVKKQIQLLLLLLLLLLLLLLLLL, Run with SignalP
  misc_feature (410)...(473): similar to gi1480863 in the genepept database release 114, Run with FASTXY 3.3t00, default parameters
ttcacagttccctgtggctgctttacagaaagcaggaagtggccacttcagccacacggctgcatttccagctcagtccaggcagagctgcaccctgccttgcacctctgcagatcctgaggggagtccttaactgagccagggcgagtcctgggggcactctgcccgtgtggacactgcccctggcaggccatgaatctcctctgctcccacactctagagttcaacgggtctcaggggctctgcctgaggactgtccttcaaccaggtattcgtaatttccccaagacccaggcttgctgagtcactcagttacctgaatgcctttttcacaaaggaatgactgtgctgctccgtcttccttcttttttgtttgcgaggccacagggaaatctggatcctctggtgaaaaagcaaatccagttgctgctgctgctgctgctgctgctgctgctgctgctgctgctgctgctgctgctgctgctgccgccgccgccagttcttgtaaatgtcctcacttggtttctgggcagcaacttccttgacttgcctggggagcggatctgagctgcatttaccaagccatgcccaggggaagtgatcagtgtgggaccgtgaagctggatttccccaggagctccctccaagcttctgggatgatgataagactcgggatgaaccaaggatctggaaccatgcgacaatgcgaagcctaaaccc

SEQ ID NO: 82024 - DNA, 475 bp, Homo sapiens
  misc_feature (1)...(475): n = a,t,c or g
  sig_peptide (262)...(397): this location contains the signal peptide sequence, MLLTVGQWLLSPPSLPQRGNNCTPITDFPQVRMISQWLSGFPSIF, Run with SignalP
  misc_feature (206)...(261): similar to gi2160496 in the genepept database release 114, Run with FASTXY 3.3t00, default parameters
ggggagaggccggnnnnaactgaaactgcagaccagcaagngcgnggaancgnggatagactctcatctctaagccaggctgagatcaccagatcagcaggataaagaactatttggggctatatgtacctaatgaggctggattcatgagatcaacagtatttaaggtccttgggcgtaagtagggcagtagctgagaaggcctctctcggctctggctctcctgcccctactcagaatgccacactcacccaaggcttgatgttgctcactgtgggtcagtggctgttgtctccaccgtctctcccacagagggggaataattgcacccccatcacagactttccacaagtcaggatgatctctcagtggctctcaggtttcccaagtatctttcccccatgggcatttgactgacaatctactaaatctctgtacttccatttgctcatctgttaaaacctgtagctgctca

SEQ ID NO: 82025 - DNA, 444 bp, Homo sapiens
  sig_peptide (241)...(376): this location contains the signal peptide sequence, MKFSPAHYLLPLLPALVLSTRQDYEELEKQLKEVFKERSTILRQL, Run with SignalP
  misc_feature (84)...(270): similar to gi5452941 in the genepept database release 114, Run with FASTXY 3.3t00, default parameters
ccggaattcccgggtcgaggatttcgtggctcgcctcgccggtgacatcactcctgaagatactcctcgctcccagcgcctgccttccccaggcgtccgttcgtgtgcccgtctccgcctttccgcctcggaagagcgctcatcactggctggggacagagccgggcaccaaggagcgacaggatcccgaagagagagagagaaggcagcgagggaaggaggaccccggcaggcagcagcatgaaattcagcccagcgcactacctgctgcctctcctgcctgcgctggtcctcagcaccagacaggactatgaagagctagaaaagcagctgaaagaagtctttaaggagcgaagcaccattcttcgtcagctgacaaagacatcaagagaacttgatggaattaaagtcaatcttcagtccttaaaaaacgatgagcagtct

SEQ ID NO: 82026 - DNA, 4179 bp, Homo sapiens
  sig_peptide (1108)...(1243): this location contains the signal peptide sequence, MVKSKWGLALAAVVTVLSSLLMSVGLCTLFGLTPTLNGGEIFPYL, Run with SignalP
  misc_feature (193)...(4024): similar to gi1228047 in the genepept database release 114, Run with FASTXY 3.3t00, default parameters
cggttcgacccacgcgtccgccctccagcagccctagtgtgcagagccaagtactctttgttaactggcttttctcccttcttaccaggtacctgcacatgttgttctttgtcagtgctgtcaagtgtgtgccagggtgatccatggtcactttccgggatggcagcaaggtgacttcggctgaggatgaccctgactgaaaggctgcgtgagaagatatctcgggccttctacaaccatgggctcctctgtgcatcctatcccatccccatcatcctcttcacagggttctgcatcttagcctgctgctacccactgctgaaactccccttgccaggaacaggacctgtggaattcaccacccctgtgaaggattactcgcccccacctgtggactctgaccgcaaacaaggagagcctactgagcagcctgagtggtatgtgggtgccccggtggcttatgtccagcagatatttgtgaagtcctcagtgtttccctggcacaagaacctcctggcagtagatgtatttcgttcacctttgtcccgggcattccaactggtggaggagatccggaaccacgtgctgagagacagctctgggatcaggagcttggaggagttgtgtctgcaagtgaccgacctgctgccaggccttaggaagctcaggaacctactccctgagcatggatgcctgctgctgtcccctgggaacttctggcagaatgactgggaacgcttccatgctgatcctgacatcattgggaccatccaccagcacgagcctaaaaccctgcagacttcagccacactcaaagacttgttatttggtgttcctgggaagtacagcggggtgagcctctacaccaggaagaggatggtctcctacaccatcaccctggtcttccagcactaccatgccaagttcctgggcagcctgcgtgcccgcctgatgcttctgcaccccagccccaactgcagccttcgggcggagagcctggtccacgtgcacttcaaggaggagattggtgtcgctgagctcatcccccttgtgaccacctacatcatcttgtttgcctacatctacttctccacgcggaagatcgacatggtcaagtccaagtgggggctggccctggctgccgtggtcacagtgctcagctcgctgctcatgtctgtgggactctgcacactcttcggcctgacgcccaccctcaatggcggcgagattttcccctaccttgtggtggttattgggttagagaatgtgttggtgctcaccaagtctgtggtctcaaccccggtagacctggaggtgaagctgcggatcgcccaaggcctaagcagcgagagctggtccatcatgaagaacatggccacggagctgggcatcatcctcatcggctacttcaccctagtgcccgccatccaggagttctgtctctttgctgtcgtggggctggtgtctgacttcttccttcagatgctgtttttcaccactgtcctgtccattgacattcgccggatggagctagcagacctgaacaagcgactgccccctgaggcctgcctgccctcagccaagccagtggggcagccaacgcgctacgagcggcagctggctgtgaggccgtccacaccccacaccatcacgttgcagccgtcttccttccgaaacctgcggctccccaagaggctgcgtgttgtctacttcctggcccgcacccgcctggcacagcgcctcatcatggctggcaccgttgtctggattggcatcctggtatacacagacccagcagggctgcgcaactacctcgctgcccaggtgacggaacagagcccattgggtgagggagccctggctcccatgcccgtgcctagtggcatgctgccccccagccacccggaccctgccttctccatcttcccacctgatgcccctaagctacctgagaaccagacgtcgccaggcgagtcacctgagcgtggaggtccagcagaggttgtccatgacagcccagtcccagaggtaacctgggggcctgaggatgaggaactttggaggaaattgtccttccgccactggccgacgctcttcagctattacaacatcacactggccaagaggtacatcagcctgctgcccgtcatcccagtcacgctccgcctgaacccgagggaggctctggagggccggcaccctcaggacggccgcagtgcctggcccccaccggggcccatacctgctgggcactgggaagcaggacccaagggcccaggtggggtgcaggcccatggagacgtcacgctgtacaaggtggcggcgctgggcctggccaccggcatcgtcttggtgctgctgctgctctgcctctaccgcgtgctatgcccgcgcaactacgggcagctgggtggtgggcccgggcggcggaggcgcggggagctgccctgcgacgactacggctatgcgccacccgagacggagatcgtgccgcttgtgctgcgcggccacctcatggacatcgagtgcctggccagcgacggcatgctgctggtgagctgctgcctggcaggccacgtctgcgtgtgggacgcgcagaccggggattgcctaacgcgcattccgcgcccaggcaggcagcgccgggacagtggcgtgggcagcgggcttgaggctcaggagagctgggaacgactttcagatggtgggaaggctggtccagaggagcctggggacagccctcccctgagacaccgcccccggggccctccgccgccttccctcttcggggaccagcctgacctcacctgcttaattgacaccaacttttcagcgcagcctcggtcctcacagcccactcagcccgagccccggcaccgggcggtctgtggccgctctcgggactccccaggctatgacttcagctgcctggtgcagcgggtgtaccaggaggaggggctggcggccgtctgcacaccagccctgcgcccaccctcgcctgggccggtgctgtcccaggcccctgaggacgagggtggctcccccgagaaaggctccccttccctcgcctgggcccccagtgccgagggttccatctggagcttggagctgcagggcaacctcatcgtggtggggcggagcagcggccggctggaggtgtgggacgccattgaaggggtgctgtgctgcagcagcgaggaggtctcctcaggcattaccgctctggtgttcttggacaaaaggattgtggctgcacggctcaacggttcccttgatttcttctccttggagacccacactgccctcagccccctgcagtttagagggaccccagggcggggcagttcccctgcctctccagtgtacagcagcagcgacacagtggcctgtcacctgacccacacagtgccctgtgcacaccaaaaacccatcacagccctgaaagccgctgctgggcgcttggtgactgggagccaagaccacacactgagagtgttccgtctggaggactcgtgctgcctcttcacccttcagggccactcaggggccatcacgaccgtgtacattgaccagaccatggtgctggccagtggaggacaagatggggccatctgcctgtgggatgtactgactggcagccgggtcagccatgtgtttgctcaccgtggggatgtcacctcccttacctgtaccacctcctgtgtcatcagcagtggcctggatgacctcatcagcatctgggaccgcagcacaggcatcaagttctactccattcagcaggacctgggctgtggtgcaagcttgggtgtcatctcagacaacctgctggtgactggcggccagggctgtgtctccttttgggacctaaactacggggacctgttacagacagtctacctggggaagaacagtgaggcccagcctgcccgccagatcctggtgctggacaacgctgccattgtctgcaactttggcagtgagctcagcctggtgtatgtgccctctgtgctggagaagctggactgagcgcagggcctccttgcccaggcaggaggctggggtgctgtgtgggggccaatgcactgaacctggacttgggggaaagagccgagtatcttccagccgctgcctcctgactgtaataatattaaacttttttaaaaaaccataaaaaaaaaa

SEQ ID NO: 82027 - DNA, 2220 bp, Homo sapiens
  sig_peptide (305)...(440): this location contains the signal peptide sequence, MISSWPFSRVVRFWFLHQMVLDLCLGQGVPQQNLENPRERKSFLL, Run with SignalP
  misc_feature (199)...(586): similar to gi5262755 in the genepept database release 114, Run with FASTXY 3.3t00, default parameters
agattgggggcgggactgacggcggccggcttagcttccacagccaaggccttccgccgagttggtttttgggttgttgatcgcggtggccgggcggtctgcggtcgggctgagacacgcggagcaatggcgacctttgtgagcgagctggaggcggccaagaagaacttaagcgaggccctgggggacaacgtgaaacaatactgggctaacctaaagctgtggttcaagcagaagatcagcaaagaggagtttgaccttgaagctcatagacttctcacacaggataatgtccattctcacaatgatttcctcctggccattctcacgcgttgtcagattttggtttctacaccagatggtgctggatctttgccttggccagggggttccgcagcaaaacctggaaaacccaagggaaagaaaaagctttcttctgttcgtcagaaatttgatcatagattccagcctcaaaatcctctctcaggagcccagcaatttgtggcaaaggatccccaagatgatgacgacttgaaactttgttcccacacaatgatgcttcccactcgaggccagcttgaagggagaatgatagtgactgcttatgagcatgggctggacaatgtcaccgaggaggctgtttcagctgttgtctatgctgtggagaatcaccttaaagatatactgacgtcagttgtgtcaagaaggaaagcttatcggttacgagatggtcattttaaatatgcctttggcagtaacgtgaccccgcagccatacctgaagaatagtgtagtagcttacaacaacttaatagaaagccctccagcttttactgctccctgtgctggtcagaatccagcttctcacccaccccctgatgatgctgagcagcaggctgcactcctgctggcatgctccggagacactctacctgcatctttgcctccggtgaacatgtacgatctttttgaagctttgcaggtgcacagggaagtcatccctacacatactgtctatgctcttaacattgaaaggatcatcacgaaactctggcatccaaatcatgaagagctgcagcaagacaaagttcaccgccagcgcttggcagccaaggaggggcttttgctgtgctaaattaggatttgagggtgtgggaccctcaccaaattcattgattactgaaaattgaatgttttttgggtccacatttcaaggctgaagtgtatagtgtatatataacctttcctatggaaatgtgacattgagtacattttgtgttgctgttgtgaagccattaatataaatctttggtaatgacccatatctctatatgtatgtgttcccagttgtgggagcaggcactaatgaaatcctgtgcctggaatggagatatttaggtacctgaggcttagtgtcctgtggtctgcatgtaagatagatgacatcctagaacaaagaagctgttttaacttaatccccctgatcagcaggatatctgtgtgttcagtgacatcatacattctgtatctagaagtctaaaatttctgcctttctcctaaagaatgtgttcttgcattttggttgaaataacctacacagtgttaaaaatcagatacctcctttagtgaccagttcaaattttaatagcgataggtagcccctgagaaatttatcactataactccacaggaaatatgacttggaagtgctctgtgtactaaacaaaataaagcccctctttgcatttaaaaccaaagtcaaaacaaaactcttgtaatgcaattaattaactttatgtcttcccatgactcaagttttgttaaatatgcccaaaaactttgattggcagtttccctcggggtaaatttattccctataggaatggtattttaaggaaatcctatacaaattgggatatatgcttgggtaattcctcccagtttcctagggagggtaccctatttcctaccgtttccaagtgatgaagtgaaaataatttacattccgatagtgttactgaataacaaacctacttaagagatatgttgctttttacttaagggatagtgttgatagataaattagaatgtatagataggtttgtgaaagtctaaataatggctgtatagatatgtatatatggttcacatatctggatctgtgtatttgattttgtactttaaatgtgacaaataaaccttttgggagaaaaaaaaaaaa

SEQ ID NO: 82028 - DNA, 2095 bp, Homo sapiens; identical to SEQ ID NO: 59706
  sig_peptide (1953)...(1818): this location contains the signal peptide sequence, MLGSRLMTLTVCAGALARGRGTGTCETRQEGKGQNHSTLAWPHEE, Run with SignalP
  misc_feature (5)...(1512): similar to gi30184 in the genepept database release 114, Run with FASTXY 3.3t00, default parameters

SEQ ID NO: 82029 - DNA, 640 bp, Homo sapiens
  sig_peptide (462)...(597): this location contains the signal peptide sequence, MINKAIRFILGRCIAVCLQFFILCVTHAICRVTLLLILPIELEVI, Run with SignalP
  misc_feature (198)...(101): similar to gi4530281 in the genepept database release 114, Run with FASTXY 3.3t00, default parameters
ggaatgatgtactaacctatccatgagaatcctactatatgcggacgaactattacactgcctcgctattagctgctagataattctcatacttacgatgttgagagtttttttgagggtgacgttaccctttatggtggaaaacattagcttatgcttctttagatggaataatgggaaaggagggaaatgggaaatggatggaaatgggaaaggagggaaaataataacccagggagagctgaatgaaaagggactgaatttaaatatttgtaagaactttgtgatgatgagtaattgtcagacgtgggatagataactgagaggctcagaatctttaccaaggatattttttaggataaggtagctgcctgttcatgaatttggataagaatagtaggacaatattcaacacaatttaatttttgtctgccacattagacatttttttaccttataaaatgatcaataaagcaataaggtttattttgggtagatgtattgcagtgtgtctccagttttttatcctttgtgttactcatgccatttgccgtgtgactttgctgctcatcctacccattgagcttgaggttatttacctacccctttaaactaaaggactggccttgtgacttgtttc

SEQ ID NO: 82030 - DNA, 1555 bp, Homo sapiens
  sig_peptide (1225)...(1090): this location contains the signal peptide sequence, MRGSQEVLLMWLLVLAVGGTEHAYRPGRRVCAVRAHGDPVSESFV, Run with SignalP
  misc_feature (1226)...(406): similar to gi6014628 in the genepept database release 114, Run with FASTXY 3.3t00, default parameters
ttttttttttttcacgtttcatttttattgtgctgggggtcaggcagcagcccccactgaggccccacccagcctccgggctgcctggcctgtgccatgggtcccaggctccagcagggagctcgtaccttccctcagctgagggcccacctggccttgggatgccgttggggtagccagggtgggggtagccaggggtggattcacagagaagatcccagcccatcccatgccagggtctggggagcctcccgaggaaggggaggaggaagaggaggaaggccctgcctggccttccgctcagtcaccccgaggtggcttctggacccccagcatgttgggcaggggcatgggggctgcagggcggcgtgaggggctcagtccagcctggggcgctgggcagtcacgagtctttcttgcaggagcaggaccccagctgctcctccaggaaggaaatctgctcgctcagggagtcgatgcggccgagctgctggaaggagtgcaccaggaggctgccggggtccgggagcccatgctccagtgcctgcgaggccaggctgtgcagtggggccagcaccagctgcagcttctcctccagcaggtccaccctggactgcagcctctgcacttcttccttcattgcactgtccactcctgtcgggttgggggccaccctggggggccctcccttgggcacacagagtgtaccgtctgcagacaggctgtgcccctcccaacactggcaccagtaactgccggcggtgttgacgcagcgctggggacagccgcccctcctagcactgcattcatccacatctgactggcaagtgtcaccccgccatcctgcagggcagcggcagcggccaggctggacacagctccctccgttccggcatggcggctggcatattgctgctccacaggccccaggaagcccgctggtcctcttccagccggggcagcacgcgtagcgaggcctggcaggggccagcccagggctgcggcggtaggcggtcctatagatggttcggtaggtgctgcaggcccggtgcccgtcgcaggtggtgaggaagggctggtacacacgctgcacgaacgactcggagacagggtccccgtgagcccggacagcacacaccctacggccgggccggtaggcgtgctctgtgccgcccactgccaacaccagaagccacatcagcagcacctcctgagagcccctcatggcctgtgcctccaggcggggtggccttctcctctgggtggcctggcggaggagaatcagtcatcccccggacaggggcaggagctgctcctccgggtggtgggggccacctgtgcctccccggtcctgggggctgctgatgctgctggagcccaggcgtggccatggtggccgctgctgtgtcctgggactggagatggaccctagcccttgctggggcctcaggcccactggccgcctggaggcacctcctgaggcccacctgcctggcctgtccacaggagcctcccttgcagccgtgcagggccagcttggtgccggacgcgtggg

SEQ ID NO: 82031 - DNA, 2133 bp, Homo sapiens
  sig_peptide (41)...(176): this location contains the signal peptide sequence, MTLFPVLLFLVAGLLPSFPANEDKDPAFTALLTTQTQVQREIVNK, Run with SignalP
  misc_feature (41)...(779): similar to gi1262819 in the genepept database release 114, Run with FASTXY 3.3t00, default parameters
gatgaaacaaatacttcatcctgctctggaaaccactgcaatgacattattcccagtgctgttgttcctggttgctgggctgcttccatcttttccagcaaatgaagataaggatcccgcttttactgctttgttaaccacccaaacacaagtgcaaagggagattgtgaataagcacaatgaactgaggagagcagtatctccccctgccagaaacatgctgaagatggaatggaacaaagaggctgcagcaaatgcccaaaagtgggcaaaccagtgcaattacagacacagtaacccaaaggatcgaatgacaagtctaaaatgtggtgagaatctctacatgtcaagtgcctccagctcatggtcacaagcaatccaaagctggtttgatgagtacaatgattttgactttggtgtagggccaaagactcccaacgcagtggttggacattatacacaggttgtttggtactcttcatacctcgttggatgtggaaatgcctactgtcccaatcaaaaagttctaaaatactactatgtttgccaatattgtcctgctggtaattgggctaatagactatatgtcccttatgaacaaggagcaccttgtgccagttgcccagataactgtgacgatggactatgcaccaatggttgcaagtacgaagatctctatagtaactgtaaaagtttgaagctcacattaacctgtaaacatcagttggtcagggacagttgcaaggcatcctgcaattgttcaaacagcatttattaaatacgcattacacaccgagtagggctatgtagagaggagtcagattatctacttagatttggcatctacttagatttaacatatactagctgagaaattgtaggcatgtttgatacacatttgatttcaaatgtttttcttctggatctgctttttattttacaaaaatatttttcatacaaatggttaaaaagaaacaaaatctataacaacaactttggatttttatatataaactttgtgatttaaatttactgaatttaattagggtgaaaattttgaaagttgtattctcatatgactaagttcactaaaaccctggattgaaagtgaaaattatgttcctagaacaaaatgtacaaaaagaacaatataattttcacatgaacccttggctgtagttgcctttcctagctccactctaaggctaagcatcttcaaagacgttttcccatatgctgtcttaattcttttcactcattcacccttcttcccaatcatctggctggcatcctcacaattgagttgaagctgttcctcctaaaacaatcctgacttttattttgccaaaatcaatacaatcctttgaattttttatctgcataaattttacagtagaatatgatcaaaccttcatttttaaacctctcttctctttgacaaaacttccttaaaaaagaatacaagataatataggtaaataccctccactcaaggaggtagaactcagtcctctcccttgtgagtcttcactaaaatcagtgactcacttccaaagagtggagtatggaaagggaaacatagtaactttacaggggagaaaaatgacaaatgacgtcttcaccaagtgatcaaaattaacgtcaccagtgataagtcattcagatttgttctagataatctttctaaaaattcataatcccaatctaattatgagctaaaacatccagcaaactcaagttgaaggacattctacaaaatatccctggggtattttagagtattcctcaaaactgtaaaaatcatggaaaataagggaatcctgagaaacaatcacagaccacatgagactaaggagacatgtgagccaaatgcaatgtgcttcttggatcagatcctggaacagaaaaagatcagtaatgaaaaaactgatgaagtctgaatagaatctggagtatttttaacagtagtgttgatttcttaatcttgacaaatatagcagggtaatgtaagatgataacgttagagaaactgaaactgggtgagggctatctaggaattctctgtactatcttaccaaattttcggtaagtctaagaaagcaatgcaaaataaaaagtgtctcaaaaaaaaaa

SEQ ID NO: 82032 - DNA, 434 bp, Homo sapiens
  misc_feature (1)...(434): n = a,t,c or g
  sig_peptide (295)...(430): this location contains the signal peptide sequence, MLRALSLLPYLILITACKGLSVLFTDTKLSLETSGSLPVDAAANS, Run with SignalP
  misc_feature (307)...(396): similar to gi2921368 in the genepept database release 114, Run with FASTXY 3.3t00, default parameters
caaccaactaggagaatctttgtagaccctgccgagcactcttatattaaccatgatgcacagaattgctcagaacttttccaacaaccaaacaccgaagagctacagctttaagccagatttaatccatagcgtttttaggtgttcccaacagtgtgcaaactaaccccttcttaaaatggctctggagagcattcacattatccaagcttcaggtggatatctggatgttaatattaaagaaggaataagggcaaaagatctatgacttttaaagtctttttagtatgtgatatgctacgtgctttatcattattaccttatttaatcctcataacagcttgcaaggggttatcagtcctatttacagatacaaaattgagccttgagacatcaggtagtttgcccgtcgacgcggccgcgaattccagatn

SEQ ID NO: 82033 - DNA, 1185 bp, Homo sapiens
  sig_peptide (190)...(325): this location contains the signal peptide sequence, MGLSIFLLLCVLGLSQAATPKIFNGTECGRNSQPWQVGLFEGTSL, Run with SignalP
  misc_feature (229)...(781): similar to gi4589277 in the genepept database release 114, Run with FASTXY 3.3t00, default parameters
ttgagcaacatgacaggtggctgaggagccaggtgcagagtggtagagttggctggcggagtggccagcacatgagacgacaggcaggtaggtggacggagagatagcagcgacgcggacaggccaaacagtgacagccacgtagaggatctggcagacaaagagacaagactttggaagtgacccaccatggggctcagcatctttttgctcctgtgtgttcttgggctcagccaggcagccacaccgaagattttcaatggcactgagtgtgggcgtaactcacagccgtggcaggtggggctgtttgagggcaccagcctgcgctgcgggggtgtccttattgaccacaggtgggtcctcacagcggctcactgcagcggcagcaggtactgggtgcgcctgggggaacacagcctcagccagctcgactggaccgagcagatccggcacagcggcttctctgtgacccatcccggctacctgggagcctcgacgagccacgagcacgacctccggctgctgcggctgcgcctgcccgtccgcgtaaccagcagcgttcaacccctgcccctgcccaatgactgtgcaaccgctggcaccgagtgccacgtctcaggctggggcatcaccaaccacccacggaacccattcccggatctgctccagtgcctcaacctctccatcgtctcccatgccacctgccatggtgtgtatcccgggagaatcacgagcaacatggtgtgtgcaggcggcgtcccggggcaggatgcctgccagggtgattctgggggccccctggtgtgtgggggagtccttcaaggtctggtgtcctgggggtctgtggggccctgtggacaagatggcatccctggagtctacacctatatttgcaagtatgtggactggatccggatgatcatgaggaacaactgacctgtttcctccacctccacccccaccccttaacttgggtacccctctggccctcagagcaccaatatctcctccatcacttcccctagctccactcttgttggcctgggaacttcttggaactttaactcctgccagcccttctaagacccacgagcggggtgagagaagtgtgcaatagtctggaataaatatccctccctgagactgaaccaaacaaaatccttgacaaacactgaaattataaac

SEQ ID NO: 82034 - DNA, 1825 bp, Homo sapiens
  sig_peptide (32)...(167): this location contains the signal peptide sequence, MAWIPLFLGVLAYCTGAVASYELTQPPSVSVSPGQTASITCSGDR, Run with SignalP
  misc_feature (32)...(579): similar to gi998395 in the genepept database release 114, Run with FASTXY 3.3t00, default parameters
ctcaggaagcagcatcggaggtgcctcagccatggcatggatccctctcttcctcggcgtccttgcttactgcacaggggccgtggcctcctatgagctgactcagccaccctcagtgtccgtgtccccaggacagacagccagcatcacctgctctggagatagattgggggataaaattgcttgctggtatcagctgaagccaggccagtcccctttagtggtcatccatcaagataccaagcggccctcagggatccctgagcgattctctggctccaactctgggaacacagccactctgaccatcagcgggacccaggctatggatgaggctgactattactgtcaggcgtgggacagcagctcttatgtggcgttcggcggagggaccaagctgaccgtcctaggtcagcccaaggctgccccctcggtcactctgttcccgccctcctctgaggagcttcaagccaacaaggccacactggtgtgtctcataagtgacttctacccgggagtcgtgacagtggcctggaaggcagatagcagccccgtcaaggcgggagtggagaccaccacaccctccaaacaaagcaacaacaagtacgcggtcagcagctatctgagcctgacgcctgagcagtggaagtcccacagaagctacagctgccaggtcacgcatgaagggagcaccgtggagaagacagtggcccctacagaatatttattgagggtttattgagtgcagggagaagggcttgatgccttggggtgggaggagagacccctcccctgggatcctgcagctctagtctcccgtggtggggggtgagggatgagaacctatgaacattctgtaggggccactgtcttctccacggtgctcccttcatgcgtgacctggcagctgtagcttttgtgggacttccactgctcaggcgtcaggctcaggtagctgctggccgcgtacttgttgttgctttgtttggagggtgtggtggtctccactcccgccttgacggggctgctatctgccttccaggccactgtcacggctcccgggtagaagtcacttatgagacacaccagtgtggccttgttggcttgaagctcctcagaggagggtgggaacagagtgaccgagggggcagccttgggctgaccagagtcactggcttgttgcatagggtcagggatgccatggcagggacctggcatctgaccaagagcggacctatcccctgtcccggaccagcaactctttagcccagagactggagcagacacagaaggcatgcgagaagtgccgtgtgatgcgtggttaggtttctggcagctgtagcttctgtgggacttccactgctcaggcgtcaggctcaggtagctgctggccgcgtacttgttgttgctttgtttggagggtgtggtggtctccactcccgccttgacggggctgctatctgccttccaggccactgtcacggatcccgggtagaagtcacttatgagacacaccagtgtggccttgttggcttgaagctcctcagaggagggcgggaacagagtgaccgagggggcagccttgggctgacttaggacggtcagcttggtccctccgccgaataccacgagagcactgctgtcccacgcctgacagtaatagtcagcctcatccaaaggctgcgtcccgctgatggtcagagtggccgtgttgccagacttggaggcggagaatcggtcagggatccctgagggccgcttccaatcttgatagatgaccatcacaggggactggcctgtcctctgctgataccagccagtagat

SEQ ID NO: 82035 - DNA, 5801 bp, Homo sapiens
  sig_peptide (160)...(295): this location contains the signal peptide sequence, MPGLGRRAQWLCWWWGLLCSCCGPPPLRPPLPAAAAAAAGGQLLG, Run with SignalP
  misc_feature (5349)...(4516): similar to gi181508 in the genepept database release 114, Run with FASTXY 3.3t00, default parameters
cgaccatgagagataaggactgagggccaggaaggggaagcgagcccgccgagaggtggcggggactgctcacgccaagggccacagcggccgcgctccggcctcgctccgccgctccacgcctcgcgggatccgcgggggcagcccggccgggcggggatgccggggctggggcggagggcgcagtggctgtgctggtggtgggggctgctgtgcagctgctgcgggcccccgccgctgcggccgcccttgcccgctgccgcggccgccgccgccggggggcagctgctgggggacggcgggagccccggccgcacggagcagccgccgccgtcgccgcagtcctcctcgggcttcctgtaccggcggctcaagacgcaggagaagcgggagatgcagaaggagatcttgtcggtgctggggctcccgcaccggccccggcccctgcacggcctccaacagccgcagcccccggcgctccggcagcaggaggagcagcagcagcagcagcagctgcctcgcggagagccccctcccgggcgactgaagtccgcgcccctcttcatgctggatctgtacaacgccctgtccgccgacaacgacgaggacggggcgtcggagggggagaggcagcagtcctggccccacgaagcagccagctcgtcccagcgtcggcagccgcccccgggcgccgcgcacccgctcaaccgcaagagccttctggcccccggatctggcagcggcggcgcgtccccactgaccagcgcgcaggacagcgccttcctcaacgacgcggacatggtcatgagctttgtgaacctggtggagtacgacaaggagttctcccctcgtcagcgacaccacaaagagttcaagttcaacttatcccagattcctgagggtgaggtggtgacggctgcagaattccgcatctacaaggactgtgttatggggagttttaaaaaccaaacttttcttatcagcatttatcaagtcttacaggagcatcagcacagagactctgacctgtttttgttggacacccgtgtagtatgggcctcaaaagaaggctggctggaatttgacatcacggccactagcaatctgtgggttgtgactccacagcataacatggggcttcagctgagcgtggtgacaagggatggagtccacgtccacccccgagccgcaggcctggtgggcagagacggcccttacgacaagcagcccttcatggtggctttcttcaaagtgagtgaggtccacgtgcgcaccaccaggtcagcctccagccggcgccgacaacagagtcgtaatcgctctacccagtcccaggacgtggcgcgggtctccagtgcttcagattacaacagcagtgaattgaaaacagcctgcaggaagcatgagctgtatgtgagtttccaagacctgggatggcaggactggatcattgcacccaagggctatgctgccaattactgtgatggagaatgctccttcccactcaacgcacacatgaatgcaaccaaccacgcgattgtgcagaccttggttcaccttatgaaccccgagtatgtccccaaaccgtgctgtgcgccaactaagctaaatgccatctcggttctttactttgatgacaactccaatgtcattctgaaaaaatacaggaatatggttgtaagagcttgtggatgccactaactcgaaaccagatgctggggacacacattctgccttggattcctagattacatctgccttaaaaaaacacggaagcacagttggaggtgggacgatgagactttgaaactatctcatgccagtgccttattacccaggaagattttaaaggacctcattaataatttgctcacttggtaaatgacgtgagtagttgttggtctgtagcaagctgagtttggatgtctgtagcataaggtctggtaactgcagaaacataaccgtgaagctcttcctaccctcctcccccaaaaacccaccaaaattagttttagctgtagatcaagctatttggggtgtttgttagtaaatagggaaaataatctcaaaggagttaaatgtattcttggctaaaggatcagctggttcagtactgtctatcaaaggtagattttacagagaacagaaatcggggaagtggggggaacgcctctgttcagttcattcccagaagtccacaggacgcacagcccaggccacagccagggctccacggggcgcccttgtctcagtcattgctgttgtatgttcgtgctggagttttgttggtgtgaaaatacacttatttcagccaaaacataccatttctacacctcaatcctccatttgctgtactctttgctagtaccaaaagtagactgattacactgaggtgaggctacaaggggtgtgtaaccgtgtaacacgtgaaggcaatgctcacctcttctttaccagaacggttctttgaccagcacattaacttctggactgccggctctagtaccttttcagtaaaggggatctctgcctttttactatacagcataccacgccacagggttagaaccaacgaagaaaataaaatgagggtgcccagcttataagaatggtgttagggggatgagcatgctgtttatgaacggaaatcatgatttcccttgtagaaagtgaggctcagattaaattttagaatattttctaaatgtctttttcacaatcatgtactgggaaggcaatttcatactaaactgattaaataatacatttataatctacaactgtttgcacttacagctttttttgtaaatataaactataatttattgtctattttatatctgttttgctgtaacattgaaggaaagaccagactttttaaaaaaaagagtttatttagaaagtatcatagtgtaaacaaacaaattgtaccactttgattttcttggaatacaagactcgtgatgcaaagctgaagttgtgtgtacaagactcttgacagttgtgcttctctaggaggttgggtttttttaaaaaaagaattatctgtgaaccatacgtgattaataaagatttcctttaaggcagaggctggtcgagatgctgctgttatcttctgcctcagacagacagtataagtggtcttgtttctaagattcctaccaccagttactttgggccaagtatccacatccccttgcgtatgggaggtgggtgaagagtgttggatgcaaagtggttattatgggaagtagctcgatggtaaaaggacaaacacctatctatcttagagcttaagcctgtatgtgcttattcccaagggagatagaggtgtttaatcacaaggacagcatgagttagaggacactggcatcaacagctgccacagccgtgcacaccagggccagagcagcccactgacatctgtctttggtcttgagatcaaatgcatcccattcttcatacattagaaggtcgacctccttgaagcagaccaagtatagcaagcctctaaaaggacttactgagaaacagaatcagaaactctagaactctagttagggcccttcagcagggctgcagagcctccctggatacccaggcctgggaaagcctgtctggtcttgtcaccccaggtgacaaatacaactggaatctttcaatgagttaatgagatactgagaatgagcctcgtggaattttccatgcctaccctttctaaggaagacatccaacagttcatgtgggctctggcttcgtgttaacatgaggaactaaagacatgtttcaccccgtgagaaacagaaggatcccctgaacagtaactgatttgacaagtatcgacacataaagttatggcatcagcattctcttactcaggcacggtcagaagtaacgctgctttcatcacggctaacctctcacactgagagaagtattcacagcaacagaagctccagcagcggccgtgaaggtatcttccagaggtgtgggtttttgcatttcaatctgctccatgctacggaccaacacagtattgagtcaactgtgaccttaagatcagaggaacgtcaatactgccacaaggccacctttccagaactcgtgggcaggtaaactatgctttggatgtgctttctttcaccaaaatcactcaactcaggagccacaaatagtccagcaatttcatttccctcaatgctattttagtctcaaaggaaaccatgtaaatttcatcaagagaaggtcaaaggggatatatcgccactgaaaatgtttacacagtgaccatgagttacacatttacttagagaaacttaacttaataaagaatctgtagagtgtgttggcttggaaaacacacacacaaagaagatacctcacgcttagtatgttctgctttctgaacagccaccactgggaacccagtggcctctgtgggactgaactcctaaacgcagggtgcgggagctgggcaggagaggtgacctccaactgtgttcctaaagttcatctttcgcttggctcaggacaaagcggtgtaacgagtcaaggtctctgcctccactgtgctcactgactttcttccctcctcggaaaagcaataacgtggggtagcctcgtaccgaatacttgctgcagatattccgttcagcagtgcagtctacttcggcgatcttgacccccgccagaccagggaattcctttttagagagttcctcccaagtaggagccagagtcttacaatgaccacaccatggagcataaaacttgatgaaggttattccttctgcaatggtgtcatcgaagttattttcagtgagtgccaacacagtgcccttgtcagcctcgggctcagctgccagcaccggggcctctgagggcgtgacggtctccgtcgctccagtctctgtgcgctgcagctgcgactccacgtactccctcagtgactccaaatcccgctttcccttgtactgatccacctttttcccatctcggaaccagagaagagtgggatagccacgaacctggtttccggagcagagttcatagtgctgtgtacaatcaaccttgccaatcttgacagtttcggaatgttcaaggcccagagccagctgctcccaggttggagccagggctttgcagtgaccacaccacggagcgaagaacttgataaagtggtcgccttgtgcaacgtgcagctcaaagttgcttgctgagagctcatacagcccttgcttgagctcgggggcactgggcggttccacttccggctctggtgtcactggctcctcgttcagtgtctgcagcatccagttttccagtgtctggaagtcccgaggaccctggtacttcacagcttcttggcctggcttgaaaagctttaaggtggggtatcctcgcaccccctgggcggagcacacgtcggagtgggccgtgcagtccactttagccacatagactttggcatcttccatgctgttgtatttgtctcccaggtcattccaagtcggctgcagccgctggcagtgtccacaccagggcgcgaagaacatgacgaagtgcgcggcgctctggatcccgtgcgtgaacatgtcggccgtgtacaggtgcttgctgtgcgggtcctgtccgtcctcgccgtctgccgcggggggcccgtccgccgccgccgccgccgcctcctgggcccgggcgccccagcgcccgccgccgccatggcccagcagcagcagcagcagcgcagtcagggccgccggccgggccagcagcgggaggaggcgtcctgggcgcgcgggcat

SEQ ID NO: 82036 - DNA, 435 bp, Homo sapiens
  sig_peptide (232)...(367): this location contains the signal peptide sequence, MKKCIVCCLFFSFCLKLMHALSSLELVLGWAFRNPELNICNLTAL, Run with SignalP
  misc_feature (281)...(341): similar to gi49185 in the genepept database release 114, Run with FASTXY 3.3t00, default parameters
aaattcaaaatgtaattttctgcgaaaattaaggttattgcagtttttccaacacttttcaattttggaaattagcttcataagaagagaacaaagactgacattgggtttctaattttttgtttcaccaaaacaaaaatacaaacaatgaaagggaaacgatgccaatgaaacagtaggctaactgaaatataataaagaacacttctttaaaaggagaaatttaattttatgaaaaaatgtattgtatgttgcttatttttctcattctgcctcaaactcatgcatgccctatcttccctggaacttgtccttggatgggcctttagaaacccagagttgaatatatgtaacctcacagctcttactaaagaagccagtaattgcagcccacctctactggccaccacccacgcacatccagagtgggctgag

SEQ ID NO: 82037 - DNA, 392 bp, Homo sapiens
  sig_peptide (22)...(157): this location contains the signal peptide sequence, MHLSQKYRQFPCFLCHILSIFLVVSQSLSLVTKLLLVQVWEYQQN, Run with SignalP
  misc_feature (118)...(183): similar to gi1944187 in the genepept database release 114, Run with FASTXY 3.3t00, default parameters
gggggaatttaggaatgtagaatgcatttatctcagaagtataggcaatttccctgtttcttatgtcatatactgagcattttcttagtagtcagccagagcctgtcattagtgacgaagctgctcctggttcaagtatgggaataccagcagaatccacacagtgttgtggagtggaaacacatcctgtttggggctttattacataactatgtttattatatgattattggttagatatgaaagaaaagatttagatgaaaatctaagttaagctctagtgtttgaaactgagaacttgatcatatgaacttggttaagttagaatagagaagtctgagaatagaaaagattgatttcagccaaagaaatttaatcttaccggactttcg

SEQ ID NO: 82038 - DNA, 400 bp, Homo sapiens
  sig_peptide (170)...(305): this location contains the signal peptide sequence, MRQCRALMSVAELSLTWPALEDSWGSSRQAVLRRHASCLVFCGPS, Run with SignalP
  misc_feature (176)...(124): similar to gi5650605 in the genepept database release 114, Run with FASTXY 3.3t00, default parameters
gaagctgggactacagttaggagggctgctggcagggctgtgccaagaaggacatgggcactgctggcgatgtccctgaagcaagacgggagaagacgctggctttaccaccagtgtctcctgttggccatgttgaccaggaaccaggagtgaggggcggggggcctctatgagacagtgcagggcactgatgagtgtggctgagctgtcactcacctggccagcccttgaggacagctggggctcctcacggcaggctgtgttgagaaggcatgccagctgcctggtgttttgtggacctagtaacacgtggccttcatttatcccaggagctggatggcccattctagactggctttctgataggttttaggtctttggacatgtataagacagaacc

SEQ ID NO: 82039 - DNA, 2561 bp, Homo sapiens
  sig_peptide (2113)...(2248): this location contains the signal peptide sequence, MEEAWQKPKRKVWLLSVPVLWYCESSSCPLTPPWLMGGSNCKAAE, Run with SignalP
  misc_feature (648)...(532): similar to gi5105346 in the genepept database release 114, Run with FASTXY 3.3t00, default parameters
ttttattttggaattcagattttttatttttggctcttaggaagtagtcagcaaatactgtataatccctagtagggaaccatgtcataaaatatattgacatttctgcaacaaagaatcacactaaaaggaacacatcataattacccatagcttcctatcagtgtaagttcaggtcaggtttggtttcaaatgggttatgaaaatacttttggttttcagagcattgggactttggaaatgaggacctggatcatcctttattagggagaaatagccccaggagccacgtctcagcaattccatggaaacacaggtttctttgccttcaaaattccgttcctaccttctttgtcttccttcccccaaagaaactggacaaaaaaggtcagaactgtatttgttattcatacatttgcgttgatttaaatacattacgtacaatttctacattggattagaagaacgacacagggggcagcaacactctcgcagcccagcctccattccctgacactggaggcagggcctatggctggcagagggacggtgttccatgagtgccacccagaagcctcccccggcattctgggcccctggctcttccagagtccacattcaaggcaacctgagcacaggcttgagggagagtggagaaaggccaggaaaggatgcccacactcttgcctgccaggcccaggaccagctctctcctacactggacccaatttccttctgatcacagagctggtctggatcaagacaatgtggagatctggtgtggaggctgtggccaggtgaggcagccgggctccctgttagacccccaggctctcttgagcaccagatgggcactttaccaacaggtttgggtaaaaatgtctacagagagctatgcacacctgggtccccttctggctcctacagtcaaggggcaagtgttctctcgaacattgttcccaaggccagtgtccgagtcagctgcatgtgattgtcggggctgggattggggcaggcaggcgagctgtaccttcgtccacagggcatgcacatccagctctcagaaattcttcctgtcagccaggtggaagcccgggacaagtggactcttggtggctggactggaaggggaccggcggggaccagcctggaccagctgaccagagggctgcacatctctgctctgcagccgggcaagcagaggacatgcagccatagtcctcactccctttctttggttgtttttcaaaccttcaagatagttactttctgaggttgactgaccaatcgcaaggtgccagaattgtgaaatgtccagtagcacagggcatgaacacagctgcccctccagacacagatggcaccctttttactccctcctgaggccgtactttgctttggtgtagaaatggctcaaacacctggcaagtgggggtggggagtgaggcagcaggggaaaagacacatggaagcaagaagatacgcactgagctgcgcaggacctgggacagtttgaaggcctctctcctttgggcctcacctttctcagggaagccatagagaaatcggcctaggacaagtcagagagaaaagggaaactgccacttatgaggcagaatccacgtcctgttacttccaccaagcagcagcggtagcacagaaaaaagtccaagaacctaatagcctgtcctcttggaagccaagactcatcccagagcccttgcagagacccactcccgaagacaaactgaactcttacatcaaaagagttggggggaaaaaatttaaaacgagaggaacaaatgagaagattgggaccaaggactcaggaagcaaggtgggatatgttcacccatagaccacttagctcccggcatacactccggctgcgtggatcacttttacatgctgggagtcaacttcctattaaaatataaatgctaagactagctcttcctgcctctgcttgagaaacagacaagctgtaggccagcagagagcagagaggttctctatgattgtgtgcggaagtgctggcgggggtaaagcaaaaacctcccttccaggagaactgtttcgaggcttgcagccagcccacagcactgatgggagatggaggaggcttggcaaaaacccaaaagaaaggtgtggcttctgtctgtcccagtgctgtggtactgcgagtcatccagttgccctctgacaccaccttggctcatgggaggaagcaactgcaaggcagctgaatgtcaggtctatgcaaatttaggcctggattaaaggtttctgacatgagatgacccggggttctgctacaagcatttaaagttgtttttgttttgtttgtttttctgatgcagaatataatagggaattgcaatagagcagggtttcagggaaggaagggactgtcccagcctgctaccagcagatgctggaagggagatgttccttcccaggcatctggactacgtgcatggagctccagcctcccccacatcagaagggcgaggagcactcactgttcctgattgtgcttctccctgtgggtggaaagctct

SEQ ID NO: 82040 - DNA, 444 bp, Homo sapiens
  misc_feature (1)...(444): n = a,t,c or g
  sig_peptide (128)...(263): this location contains the signal peptide sequence, MFVVILRGLLTSRCLMKSPPLISTTGSNCLRESLKLSVLALIGPS, Run with SignalP
  misc_feature (267)...(414): similar to gi2465907 in the genepept database release 114, Run with FASTXY 3.3t00, default parameters
ggcctcagtccagctttcaaattctcccacctcatctcttaggagggtctgatataacgactcttttactcagagaatctgttcgggcacctgtgcgtatgagagggttactgtgatctctgaatctatgtttgtggtaatcctacgtggactgctcacctctagatgtcttatgaaatcacctccccttatttctacaacaggctcaaattgccttcgggaatcattaaagctcagtgttctggctttgattggtccttcgctccctagtccgcctgcactcatgtagggtcatgctgttgcaaaactccacagggtaccatttatgttgtattccatgtggaaggtgtcctctggagtttggcaatatagcagctgtctgtaaaaatgatattgaaagcatcctgagttctggagctgcgccgattctattaggctgagaan

SEQ ID NO: 82041 - DNA, 2872 bp, Homo sapiens; identical to SEQ ID NO: 59261
  sig_peptide (1576)...(1711): this location contains the signal peptide sequence, MLVLQILLCIREFILERSLINVKNVAKSLAVVLALLNIGKFILEK, Run with SignalP
  misc_feature (192)...(2392): similar to gi498723 in the genepept database release 114, Run with FASTXY 3.3t00, default parameters

SEQ ID NO: 82042 - DNA, 971 bp, Homo sapiens
  sig_peptide (44)...(179): this location contains the signal peptide sequence, MGSTAILALLLAVLQGVCAEVQLVQSGAEVKKPGESLKISCKGSG, Run with SignalP
  misc_feature (44)...(430): similar to gi33616 in the genepept database release 114, Run with FASTXY 3.3t00, default parameters
cccacgcgtccgctcagggcttcattttctgtcctccaccatcatggggtcaaccgccatcctcgccctcctcctggctgttctccaaggagtctgtgccgaggtgcagctggtgcagtctggagcagaggtgaaaaagcccggggagtctctgaagatctcctgtaagggttctggatacagctttaccagctactggatcggctgggtgcgccagatgcccgggaaaggcctggagtggatggggatcatctatcctggtgactctgataccagatacagcccgtccttccaaggccaggtcaccatctcagccgacaagtccatcagcaccgcctacctgcagtggagcagcctgaaggcctcggacaccgccatgtattactgtgcgagacacacagtgagagaaaccagccccgagcccgtctaaaaccctccacaccgcaggtgcagaatgagctgctagagactcactccccaggggcctctctattcatccggggaggaaacactggctgtttgtgtcctcaggagcaagaaccagagaacaatgtgggagggttcccagcccctaaggcaactgtataggggacctgaccatgggaggtggattctctgacggggctcttgtgtgttctacaaggttgttcatggtgtatattagatggttaacatcaaaaggctgcctaacaggcacctctccaatatgacagtattttaattagtgaaaattttacacagttcatcattgcttgcttgccttcctccctcctgtccactctcactcactccttcttttattttctacttaattttacaaaatcatttaacccctttttgaactattaataggctatctttgtttggtgattgttttcctttcaataatatgtactgaataattcatctttgtgccaattcataagtattctggtgtaataaagacttctttcataaaaattggataaatt

SEQ ID NO: 82043 - DNA, 713 bp, Homo sapiens
  misc_feature (1)...(713): n = a,t,c or g
  sig_peptide (165)...(300): this location contains the signal peptide sequence, MYCYLKMLPFYVLVGPESEMLSPEFSFFMFLFTYIKFQVPNQDSG, Run with SignalP
  misc_feature (662)...(585): similar to gi1502369 in the genepept database release 114, Run with FASTXY 3.3t00, default parameters
cggcccaatatgagaccttagaccagcgcgcaggaattcggagtctaaaatgaatgcaggaggcaaaatgaaaccacttttctttagttgaaaggtatggagaattggcttgcttaatcagtatgtttgtgcaataaaaatcatataaatacctttgcctataaatgtattgttacctgaaaatgcttcctttttatgttttagtaggcccagaatctgagatgttaagtccagagttttcattcttcatgtttttatttacttatattaaatttcaagtaccaaatcaggactcaggatgagctctctgtcagctaaatattaagcaattccatttaagtactggttcctctaggaactgaaataaagccattttttcataaatatggaagtttctagtcatgaaatttattgggctattttaatgaatttatcgtgtggttaaaatcgatttcgtatgttttagtatgaacaaaatgattatttatctgttccttactaaaaccttattacatttatttaggtccaacaggttgaatcacttgtagggctttttatgataggctaagacaaaagttaaggaaaataggaaatgtttatctttaattcagtgtaatgtttattgttttgggcatgaacaccttccaggcttttccgnaatagtggttatggaggagcagaaaaaaggcccccccaaaaaatgttttaaaaaa

SEQ ID NO: 82044 - DNA, 1105 bp, Homo sapiens
  sig_peptide (7)...(142): this location contains the signal peptide sequence, MGCRLLCCAVLCLLGAVPMETGVTQTPRHLVMGMTNKKSLKCEQH, Run with SignalP
  misc_feature (7)...(941): similar to gi3002925 in the genepept database release 114, Run with FASTXY 3.3t00, default parameters
tttcgtatgggctgcaggctgctctgctgtgcggttctctgtctcctgggagcggtccccatggaaacgggagttacgcagacaccaagacacctggtcatgggaatgacaaataagaagtctttgaaatgtgaacaacatctggggcataacgctatgtattggtacaagcaaagtgctaagaagccactggagctcatgtttgtctacaactttaaagaacagactgaaaacaacagtgtgccaagtcgcttctcacctgaatgccccaacagctctcacttattccttcacctacacaccctgcagccagaagactcggccctgtatctctgtgccagcagccaagttgggggttacaatgagcagttcttcgggccagggacacggctcaccgtgctagaggacctgaaaaacgtgttcccacccgaggtcgctgtgtttgagccatcagaagcagagatctcccacacccaaaaggccacactggtatgcctggccacaggcttctaccccgaccacgtggagctgagctggtgggtgaatgggaaggaggtgcacagtggggtcagcacagacccgcagcccctcaaggagcagcccgccctcaatgactccagatactgcctgagcagccgcctgagggtctcggccaccttctggcagaacccccgcaaccacttccgctgtcaagtccagttctacgggctctcggagaatgacgagtggacccaggatagggccaaacctgtcacccagatcgtcagcgccgaggcctggggtagagcagactgtggcttcacctccgagtcttaccagcaaggggtgctctctgccaccatcctctatgagatcttgctagggaaggccaccttgtatgccgtgctggtcagtgccctcgtgctgatggccatggtcaagagaaaggattccagaggctagctccaaaaccatcccaggtcattcttcatcctcacccaggattctcctgtacctgctcccagatctgtgttcctaaaagtgattctcactctgcttctcatctcctacttacatgaatacttctctcttttttctgtttccctgaagattgagctccaacccc

SEQ ID NO: 82045 - DNA, 1697 bp, Homo sapiens; identical to SEQ ID NO: 59332
  sig_peptide (1355)...(1490): this location contains the signal peptide sequence, MALLCICLCLIFFLIVKARRKQAAGRPEKMDDEDPIMGTITSGSR, Run with SignalP
  misc_feature (17)...(1672): similar to gi2411475 in the genepept database release 114, Run with FASTXY 3.3t00, default parameters

SEQ ID NO: 82046 - DNA, 1568 bp, Homo sapiens
  sig_peptide (785)...(920): this location contains the signal peptide sequence, MILLAFLVCWGPLFGLLLADVFGSNLWAQEYLRGMDWILALAVLN, Run with SignalP
  misc_feature (23)...(1177): similar to gi3805932 in the genepept database release 114, Run with FASTXY 3.3t00, default parameters
gagtcagcccccgggggaggccatgaacgccacggggaccccggtggcccccgagtcctgccaacagctggcggccggcgggcacagccggctcattgttctgcactacaaccactcgggccggctggccgggcgcggggggccggaggatggcggcctgggggccctgcgggggctgtcggtggccgccagctgcctggtggtgctggagaacttgctggtgctggcggccatcaccagccacatgcggtcgcgacgctgggtctactattgcctggtgaacatcacgctgagtgacctgctcacgggcgcggcctacctggccaacgtgctgctgtcgggggcccgcaccttccgtctggcgcccgcccagtggttcctacgggagggcctgctcttcaccgccctggccgcctccaccttcagcctgctcttcactgcaggggagcgctttgccaccatggtgcggccggtggccgagagcggggccaccaagaccagccgcgtctacggcttcatcggcctctgctggctgctggccgcgctgctggggatgctgcctttgctgggctggaactgcctgtgcgcctttgaccgctgctccagccttctgcccctctactccaagcgctacatcctcttctgcctggtgatcttcgccggcgtcctggccaccatcatgggcctctatggggccatcttccgcctggtgcaggccagcgggcagaaggccccacgcccagcggcccgccgcaaggcccgccgcctgctgaagacggtgctgatgatcctgctggccttcctggtgtgctggggcccactcttcgggctgctgctggccgacgtctttggctccaacctctgggcccaggagtacctgcggggcatggactggatcctggccctggccgtcctcaactcggcggtcaaccccatcatctactccttccgcagcagggaggtgtgcagagccgtgctcagcttcctctgctgcgggtgtctccggctgggcatgcgagggcccggggactgcctggcccgggccgtcgaggctcactccggagcttccaccaccgacagctctctgaggccaagggacagctttcgcggctcccgctcgctcagctttcggatgcgggagcccctgtccagcatctccagcgtgcggagcatctgaagttgcagtcttgcgtgtggatggtggaagccaccgggtgcgtgccaggcaggcccctcctggggtacaggaaagctgtgtgcacgcaagcctcgcctgtatggggagcagggaacgggaacaggcccccatggtcttcccggtggcctctcggggcttctgacgccaaatgggcttcccatggtcaccctggacaaggaggtaaccaccccacctccccgtaggagcagagagcaccctggtgtgggggcgagtgggttccccacaaccccgcttctgtgtgattctggggaagtcccggcccctctctgggcctcagtagggctcccaggctgcaaggggtggactgtgggatgcatgccctggcaacattgaagttcgatcatggtaa

SEQ ID NO: 82047 - DNA, 747 bp, Homo sapiens
  sig_peptide (45)...(180): this location contains the signal peptide sequence, MGLGSGVRALLHVVIWRPTLFPSCVSAICRCDFQGLCRMGTSICF, Run with SignalP
  misc_feature (70)...(112): similar to gi554399 in the genepept database release 114, Run with FASTXY 3.3t00, default parameters
cccattaaaggtttattttcttagttcagtgctagtctttggggatggggctggggtcgggggtgcgggctctgctccatgtggtcatttggagacctacgctttttccatcctgtgtttctgccatctgcagatgtgacttccaggggctctgcaggatgggaacatcaatttgctttgttttattttttttccaggccagaaataagtcacttggcccagcctgaatatcaggggaggctgggaaacggagtttagctatgtgtctagaggaaaaattaaactagttgggtaagaggtagcattgtttttgccacagagaaatgggtgctgctgcctcctccttaggcagagagctccttggttccatttgaaaaccttccttccccttttgctggaattgagagactgaggacacaaagtggtgtgctggagaataaactagagcctgtggtgccagactggcaaacttggggattgtgtgagtgagggagagattgtgcagactaatcctaacattgctgatgagtggacagaaaccataggcctcatgaatagtgatttctgaagtcaaagcccagtatgcttaaatatcaacccaagtggtttgggagaggggagcacagcttactgttctgctaaaattctttgaggaattaagtaagaatacgtgtaaggtacgtagcaatggttatttacaaaatggactctgcctgcagattattagtatgtctcagatgtaaaacc

SEQ ID NO: 82048 - DNA, 857 bp, Homo sapiens
  sig_peptide (395)...(530): this location contains the signal peptide sequence, MKFFVFALILALMLSMTGADSHAKRHHGYKRKFHEKHHSHRGYRS, Run with SignalP
  misc_feature (395)...(550): similar to gi184058 in the genepept database release 114, Run with FASTXY 3.3t00, default parameters
gaagggctgacgctgcagtgggctgtgatcccatcactgcactccagcctccggggctcaagtgatcctcccacctcagcctctcaattagctgggactacagccgtagtgccaccatgcccagctaattgttagttttaaattttttgtagagatgagggtctcactatgctgcccaggctggtctcgacctcctggcctcaagtgatcctcctgcctcagcctcccaaagagctgggattacaggcttgagccaccatgcctggcatattcctatttttgagaagaggtagaaacttcagggtctatgcttgtatccacttctctccggacgcgtgggttcagcttcactgacttctggattctcctcttgagtaaaaggactcagccaactatgaagttttttgtttttgctttaatcttggctctcatgctttccatgactggagctgattcacatgcaaagagacatcatgggtataaaagaaaattccatgaaaagcatcattcacatcgaggctatagatcaaattatctgtatgacaattgatatcttcagtaatcatggggcatgattatggaggtttgactggcaaattcgctttggactcgtgtattctcatttgtcataccgcatcacactaccactgctttttgaagaattatcataaggcaatgcagaataaaagaaataccatgatttagtgaattctgtgtttcaggatacttcccttcctaattatcatttgattagatacttgcaatttaaatgttaagctgttttcactgctgtttctgagtaatagaaattcattcctctccaaaagcaataaaattcaagcacattaaaaaaaaaa

SEQ ID NO: 82049 - DNA, 2133 bp, Homo sapiens; identical to SEQ ID NO: 82031
  sig_peptide (41)...(176): this location contains the signal peptide sequence, MTLFPVLLFLVAGLLPSFPANEDKDPAFTALLTTQTQVQREIVNK, Run with SignalP
  misc_feature (41)...(779): similar to gi1262819 in the genepept database release 114, Run with FASTXY 3.3t00, default parameters

SEQ ID NO: 82050 - DNA, 1404 bp, Homo sapiens
  sig_peptide (244)...(379): this location contains the signal peptide sequence, MVLGARAVISFCILSAMPGYMVVPPERTLLAYKSLRMSMSHFMME, Run with SignalP
  misc_feature (1223)...(92): similar to gi219426 in the genepept database release 114, Run with FASTXY 3.3t00, default parameters
ttttttttttttaaggcttgtaggttttaatgtttcatgactggtaacagagtagtctcgaggggatccttggagaacctgttctgactttagaagcacttcctgtggacaatggagggccctgcctcatcatactcaggcttgctgatccacatctgctggaaggtggagagagaggccaggatagagcccccgatccagactgagtacttccgctctgggggagcaataatcttgatcttcatggtgctgggggccagggctgtgatctccttctgcatcctgtcagcaatgccagggtacatggtggtgcccccagagaggacattgttggcatataagtccttacggatgtcaatgtcacacttcatgatggaattgtaggttgtctcatgaattccagcggactccatgccaataaaggaaggctggaagagggtctcagggcagcggaagcgctcattgccaatggtgataacctgcccatctggcagctcatagctcttctccagggaggaagaggaagctgctgtggccatctcattctcaaaatccagggccacatagcacagcttctccttgatgtctcgcacaatttctctctcagctgtggtcacaaaggaatagcctctctctgtgaggatcttcatgaggtagtccgtgaggtcacggccagccaagtccaggcgcatgatggcatggggcagggcatagccttcatagatggggacattgtgggtgacgccatcacctgaatccaggacgatgcctgtcgtgcggccagaggcatagagggagagcacagcttgaatggcgacgtacatggcagggacattgaaggtttcaaacatgatctgggtcatcttttccctgttggccttgggatttaggggagcctctgtgagcagggtggggtgctcttcaggtgctacacgcagctcattgtagaaggagtggtgccagatcttctccatgtcatcccagttggtgatgatgccgtgttcaatggggtatttgagagttaggatccctcgcttgctctgagcctcatcccccacatagctgtctttctggcccattcccaccatcacaccctggtggcgagggcggcccacaatggaggggaagacagcccggggggcatcatctcctgcgaagcctgccttgcacaggccagagccattgtcacacacgagcgcggtggtctcctcttcacacatggtgtatgtggctgagtgagctggggactggagcaccgaggcatggtggcgggcgcctgtagtcccagctactcgggaggctgaggcaggagaatggcgtgaacccgggaggcggagcttgcagtgagccaagatcgagccactgcactccagccgagggtatgagaggttcttctcccagtga

SEQ ID NO: 82051 - DNA, 698 bp, Homo sapiens
  sig_peptide (174)...(309): this location contains the signal peptide sequence, MSARGWPCEAFVLAQVCWCWLCVRGRLCEALTLAQVRRHQVCVPG, Run with SignalP
  misc_feature (208)...(429): similar to gi3135041 in the genepept database release 114, Run with FASTXY 3.3t00, default parameters
gcgggaggcaggagactggggtgtgtggggtcctctgacagtgcacacgtctcggaagtccagcagaccgtttcctgaagtcctgagaaggccagagacctcccttctgcctttcccagcccccacctcgctccttatgaagcaggtgggcagggacaaccagggctggggttatgagtgcacggggatggccatgtgaagccttcgtgcttgcccaggtgtgctggtgttggttgtgtgtgcggggacggctatgtgaagccctcacactcgcccaggtgcgtcggcatcaggtatgtgtgccgggacagccatgtgaagccctcacactcacccaggtgcgtcggcatcagttgtgtgtgtggggacggccatgtgaagccctcacactcgcccaggtgtgctggctttggttgtgtgtgcagggatggccacatgaagccctcactctcgcccaggtgcgtcagcatcaggtgtgtgtgcggggacggccatgtgaagccctctcactcgcccaggtgcgttgatgttgtgtgtgcagggatggccatgtgaagccctcactctcacccaggtgcgttgatgtcagttgtgtgtgcagggtcagccatgtgaagccctcagactagcccaggtgtgtcggtgtcagttgtgtgtgtggggatggccacgtgaagccctcacacttgccccggcgc

SEQ ID NO: 82052 - DNA, 752 bp, Homo sapiens
  sig_peptide (27)...(162): this location contains the signal peptide sequence, MKVSAAALAVILIATALCAPASASPYSSDTTPCCFAYIARPLPRA, Run with SignalP
  misc_feature (689)...(660): similar to gi40227 in the genepept database release 114, Run with FASTXY 3.3t00, default parameters
cctccgacagcctctccacaggtaccatgaaggtctccgcggcagccctcgctgtcatcctcattgctactgccctctgcgctcctgcatctgcctccccatattcctcggacaccacaccctgctgctttgcctacattgcccgcccactgccccgtgcccacatcaaggagtatttctacaccagtggcaagtgctccaacccagcagtcgtctttgtcacccgaaagaaccgccaagtgtgtgccaacccagagaagaaatgggttcgggagtacatcaactctttggagatgagctaggatggagagtccttgaacctgaacttacacaaatttgcctgtttctgcttgctcttgtcctagcttgggaggcttcccctcactatcctaccccacccgctccttgaagggcccagattctgaccacgacgagcagcagttacaaaaaccttccccaggctggacgtggtggctcacgcctgtaatcccagcactttgggaggccaaggtgggtggatcacttgaggtcaggagttcgagaccagcctggccaacatgatgaaaccccatctctactaaaaatacaaaaaattagccgggcgtggtagcgggcgcctgtagtcccagctactcgggaggctgaggcaggagaatggcgtgaacccgggaggcggagcttgcagtgagccgagatcgcgccactgcactccagcctgggcgacagagcgagactccgtctcaaaaaaaaaa

SEQ ID NO: 82053 - DNA, 377 bp, Homo sapiens
  misc_feature (1)...(377): n = a,t,c or g
  sig_peptide (206)...(341): this location contains the signal peptide sequence, MRIPVLLTSLVTDAKVLLCPKVPGRRSQGPVKVGSFLENPWGVFI, Run with SignalP
  misc_feature (314)...(216): similar to gi4809022 in the genepept database release 114, Run with FASTXY 3.3t00, default parameters
gcgccggggcttcccatgggtgctttagcctccagcatccctcttcatttactccagtgataatgctgaaagtgtgccatgatgtgaggtaggttgggaagcctggctctaggcttgctgaccttttcactgaccttttattggaggatcctgggccagtctcatccttctctggggctgcattttctctccttgtaaaacggagatgagaataccagtcctactcacctcattggtcacagatgcaaaagttctcctctgtcctaaagttccagggagaaggagccaagggcctgttaaagtaggaagtttcctggaaaacccctggggtgtttttatcctaacaggttcctagaataacaccagccagccaggcn

SEQ ID NO: 82054 - DNA, 419 bp, Homo sapiens
  misc_feature (1)...(419): n = a,t,c or g
  sig_peptide (113)...(248): this location contains the signal peptide sequence, MQTLFGIKMNFVLALLPLATLFFPSHFFSCVKKRERGPSSHAYEC, Run with SignalP
  misc_feature (141)...(31): similar to gi3288166 in the genepept database release 114, Run with FASTXY 3.3t00, default parameters
ggaggccggaggataccacacgagaattcgtgtgactcggtgaccaatgagaagaaatgggtgcttccacaggtttgaaaataaagagcttgccaaaaattgtaaagtctaaatgcagaccttgtttggaataaagatgaatttcgttttagctctgcttcctttggcaaccctatttttcccctctcattttttttcctgcgtgaaaaagagggaaaggggtccatccagtcatgcatatgaatgtttctataccagagtagtaaatatatgcatcttatgccttcgtgtggtcctttgtaactgtgaattatgattttggaaagctgtgtttttttaatcttgtttctggaaggataaattaatcaaagttaacctctcaaaaaagtcctggttctgtaggggggaaaaaaaacaan

SEQ ID NO: 82055 - DNA, 627 bp, Homo sapiens
  sig_peptide (224)...(359): this location contains the signal peptide sequence, MPYTWCLGLLSCFLTSVANTLSRVFPLLSFRPTLLFSPPLQDHDP, Run with SignalP
  misc_feature (137)...(74): similar to gi1209324 in the genepept database release 114, Run with FASTXY 3.3t00, default parameters
tccaattagatctaggactatttcacctttaggttgggttatagtttttgtaagacccagcctacctctcatttgcttccacttctataccatggccctcctggaatctcagctgaaatcctggtgtttttatgagatccctactcattaatgggttctgaactccaaattttatctgttttgtgtaccatacaactagcacaatcaccactctgccttatggatgccttatacttggtgtcttggcctcttgtcctgcttcctgacaagtgtggcaaataccttgagtagagtatttcctctcctgagtttcaggcctactttattgttttcccctcctcttcaggatcatgaccctcagttctgtctgtcttgacagtcccaaactcgaatttttgtcttaccacccactagagattgcaaaaagttatgttggcttctctgcctcttagtagtagtccattgcccagattctcagcctcttacccgacacaggaatttgcaaataccctagggagaaaacgactttttgaatgtcagtttagctctttaagatcctcttctctctgagaccttctcttgtcaaattttgactaccttgtcagctctctcatcccttctttattt

SEQ ID NO: 82056 - DNA, 650 bp, Homo sapiens
  sig_peptide (562)...(427): this location contains the signal peptide sequence, MFNFCFSSLSLSSFPLMFTLLPFPWFLFEQPLNSISLWRLPLFFL, Run with SignalP
  misc_feature (427)...(570): similar to gi1762843 in the genepept database release 114, Run with FASTXY 3.3t00, default parameters
atggtcaaagagcaggagagtcatctcttgctcagatttcaggtatcttatccagaaacgcagggcattttccctgttctgtcctccatgcccctcttccccatgcactgcgctcatgccactaataatgcagcgtcaacacagttccacagtacggggatttccttgacagcggaagccactgactgcaccccaacgtatactgatgtcatcagcgagaccctgtgcagcatgaagaagcggaaagacaacctcaatcagttgtaccagcatcattgggctgaatggaattattttgccaagcatctaaaggagctgcaagacaacttctccagggaaatgaagaatattgatccaaaagcagcagatacaaaaaaggcaaaccacatgttcatcccaccttcagccgtcaatgaggaatcacctgacaagaaaaataagggaagtctccaaagagaaattgagtttaagggttgttcgaacaaaaaccatgggaaaggtagaagtgtgaacatgaggggaaaggaggagagggaaagagaagagaaacagaagttgaacatttctttccactcacttccaagccctgaggagctccacaacctagaaccaggaagcgcctacagaatccgtgatatttctgctacgag

SEQ ID NO: 82057 - DNA, 408 bp, Homo sapiens
  sig_peptide (16)...(151): this location contains the signal peptide sequence, MPCLFCFFSLSFPIQGFLVNQLCWLLARVFEDHQLTSCSGLWAEA, Run with SignalP
  misc_feature (133)...(175): similar to gi5708115 in the genepept database release 114, Run with FASTXY 3.3t00, default parameters
gacccacgcgtccgcatgccctgtttattttgctttttttctctctcttttcctatacaggggtttcttgtaaaccagctttgctggttgttagccagagtgtttgaagaccatcagttaactagttgttctgggctgtgggcagaggctggggcatgctgttgcccctgctgctgcctcactctgtgactgaactggtttggctcagcctggtattaccacagactctcacctgggacataaattgtactttgagtccttaggattgttagtgatctctgcatttccaaaaacagttcccttgtcagttactactgtgggtgaatactgaagaagccatttagtggtggccaggtgatgtcagagacaacagttagtagtaaaagaatgatacccaagtacagggag

SEQ ID NO: 82058 - DNA, 631 bp, Homo sapiens
  misc_feature (1)...(631): n = a,t,c or g
  sig_peptide (66)...(201): this location contains the signal peptide sequence, MIIAIIVIAFILRSLVVTAGTVFIGHLCCPGTCFPTTLIGSLAFC, Run with SignalP
  misc_feature (276)...(200): similar to gi836600 in the genepept database release 114, Run with FASTXY 3.3t00, default parameters
cttaaaaaaaaagcctatcttataagcaaggacataagatatcaaaattcaaagtcggtcttgaaatgattattgctattattgtcattgcttttatattgaggtctctggttgtcactgctgggacagttttcattggccatctctgctgcccaggcacatgcttccccaccacattgataggatctcttgctttctgctcaaacctcccctcttttctccccagctccttaattcccaatcccttgagttcccattgatttctcgcatggtgcagtttagccatgcatgaactcactgccaaccatctcaacctaaccctctgaaatgtatccagtaaggtgtattacaaaacaagggcagctctctcagtgcagtgagcatgccctgagacagcttgcaattctagacaggggtgagaatatcaggaggagaaattgtgccactcctttgcagaagggaactggggccttactgctttctcaagaggcagncattggaatggggcttctagaaaaggatggggcttgggccccttggggatgggggaaaatgctctctgtctgtgaactctggggctcagccaaagcagggatggataaagagctaacctgccctgcctgccagccgg

SEQ ID NO: 82059 - DNA, 502 bp, Homo sapiens
  sig_peptide (57)...(192): this location contains the signal peptide sequence, MVYSAGCLLTNATVVLFYAHCVVTSILNLYKSGWVPQAGLLENSS, Run with SignalP
  misc_feature (192)...(131): similar to gi1750043 in the genepept database release 114, Run with FASTXY 3.3t00, default parameters
atcacagagaacatgcttcattgtcccacccccagcatatgagaccagttagtagtatggtttactcagcaggctgcttacttacaaatgcaacagttgtcctattttatgctcattgtgttgtcaccagcattttaaatctttacaagtcagggtgggtacctcaggcaggtttgctggaaaattccagtaaacagtttcaaaggagttcaagttgcttgccagactaacttacttttaaaagtaagcagccttccaagttaagagatgattttaaatttcaggtgagttctcaggacattgtgattttttaattatgctgttggtataaatcagctgtgtcagggcctgtcccaccaagagcgttgggtggtaagaaacccaagctttgggtgaccagagagaggagagagaccttgggctttccagccagtaatgcctatgaaacatgtaggtcattggcattttattttatttatttttttgagatggagtctcgctc

SEQ ID NO: 82060 - DNA, 4163 bp, Homo sapiens
  sig_peptide (3461)...(3596): this location contains the signal peptide sequence, MVVGIVAAAALCILILLYAMYKYRNRDEGSYQVDETRNYISNSAQ, Run with SignalP
  misc_feature (2645)...(3388): similar to gi451076 in the genepept database release 114, Run with FASTXY 3.3t00, default parameters
tttcgtacaggactggagggcttgaggaatgtggtggtccctctcttcgttgtttctgccccctgaggttgtgctttctcagggatatgcactctgcacttccattcctgcagtgaaattaactcgagcttggcagctcgagaggagaatgtggccactttccgaggctcagagtatctgtgctacgacctgtctcagaacccgatccagagcagcagtgatgaaatcaccctctcctttaagacctggcagcgtaacggcctcatcctgcacacgggcaagtcggctgactatgtcaacctggctctgaaggatggtgcggtctccttggtcattaacctggggtccggggcctttgaggccattgtggagccagtgaatggaaaattcaacgacaacgcctggcatgatgtcaaagtgacacgcaacctccggcaggtgacaatctctgtggatggcattcttaccacgacgggctacactcaagaggactataccatgctgggctcggacgacttcttctatgtaggaggaagcccaagtaccgctgacttgcctggctcccctgtcagcaacaacttcatgggctgccttaaagaggttgtttataagaataatgacatccgtctggagctgtctcgcctggcccggattgcggacaccaagatgaaaatctatggcgaagttgtgtttaagtgtgagaatgtggccacactggaccccatcaactttgagaccccagaggcttacatcagcttgcccaagtggaacactaaacgtatgggatccatctcctttgacttccgcaccacagagcccaatggcctgatcctcttcactcatggaaagccccaagagaggaaggatgctcggagccagaagaatacaaaagtagacttctttgccgtggaactcctcgatggcaacctgtacttgctgcttgacatgggctctggcaccatcaaagtgaaagccactcagaagaaagccaatgatggggaatggtaccatgtggacattcagcgagatggcagatcaggtactatatcagtgaacagcaggcgcacgccattcaccgccagtggggagagcgagatcctggacctggaaggagacatgtacctgggagggctgccggagaaccgtgctggccttattctccccaccgagctgtggactgccatgctcaactatggctacgtgggctgcatccgcgacctattcattgatgggcgcagcaagaacattcgacagctggcagagatgcagaatgctgcgggtgtcaagtcctcctgttcacggatgagtgccaagcagtgtgacagctacccctgcaagaataatgctgtgtgcaaggacggctggaaccgcttcatctgcgactgcaccggcaccggatactggggaagaacctgcgaaagggaggcatccatcctgagctatgatggtagcatgtacatgaagatcatcatgcccatggtcatgcatactgaggcagaggatgtgtccttccgcttcatgtcccagcgagcttatgggctgctggtggctacgacctccagggactctgccgacaccctgcgtctggagctggatggggggcgtgtcaagctcatggttaacttagactgtatcaggataaactgtaactccagcaaaggaccagagaccttgtatgcagggcagaagctcaatgacaacgagtggcacaccgttcgggtggtgcggagaggaaaaagccttaagttaaccgtggatgatgatgtggctgagggtacaatggtgggagaccatacccgtttggagttccacaacattgaaacgggaatcatgactgagaaacgctacatctccgttgtcccctccagctttattggccatctgcagagcctcatgtttaatggccttctctacattgacttgtgcaaaaatggtgacattgattattgtgaagctgaaggctcgttttggactgaggaacatcatcgctgaccctgtcacctttaagaccaagagcagctacctgagccttgccactcttcaggcttacacctccatgcacctcttcttccagttcaagaccacctcaccagatggcttcattctcttcaatagtggtgatggcaatgacttcattgcagtcgagcttgtcaaggggtatatacactacgtttttgacctcggaaacggtcccaatgtgatcaaaggcaacagtgaccgccccctgaatgacaaccagtggcacaatgtcgtcatcactcgggacaatagtaacactcatagcctgaaagtggacaccaaagtggtcactcaggttatcaatggtgccaaaaatctggatttgaaaggtgatctctatatggctggtctggcccaaggcatgtacagcaacctcccaaagctcgtggcctctcgagatggctttcagggctgtctagcatcaggggacttgaatggacgcctgccagacctcatcaatgatgctcttcatcggagcggacagatcgagcgtggctgtgaaggacccagtaccacctgccaggaagattcatgtgccaaccagggggtctgcatgcaacaatgggagggcttcacctgtgattgttctatgacctcttattctggaaaccagtgcaatgatcctggcgctacgtacatctttgggaaaagtggtgggcttatcctctacacctggccagccaatgacaggcccagcacgcggtctgaccgccttgccgtgggcttcagcaccactgtgaaggatggcatcttggtccgcatcgacagtgctccaggacttggtgacttcctccagcttcacatagaacaggggaaaattggagttgtcttcaacattggcacagttgacatctccatcaaagaggagagaacccctgtaaatgacggcaaataccatgtggtacgcttcaccaggaacggcggcaacgccaccctgcaggtggacaactggccagtgaatgaacattatcctacaggccggcagttaaccatcttcaacactcaggcgcaaatagccattggtggaaaggacaaaggacgcctcttccaaggccaactctctgggctctattatgatggtttgaaagtactgaacatggcggctgagaacaaccccaatattaaaatcaatggaagtgttcggctggttggagaagtcccatcaattttgggaacaacacagacgacctccatgccaccagaaatgtctactactgtcatggaaaccactactacaatggcgactaccacaacccgtaagaatcgctctacagccagcattcagccaacatcagatgatcttgtttcatctgctgaatgttcaagtgatgatgaagactttgttgaatgtgagccgagtacagcaaaccccacggagccgggaatcagacgggttccgggggcctcagaggtgatccgggagtcgagcagcacaacagggatggtcgtcggcattgtggctgctgccgccctctgcatcttgatcctcctgtacgccatgtacaagtacaggaacagggacgaggggtcctatcaagtggacgagacgcggaactacatcagcaactccgcccagagcaacggcacgctcatgaaggagaagcagcagagctcgaagagcggccacaagaaacagaaaaacaaggacagggagtattacgtgtaaacatgcgaacactgctcacacgcgagttttcacagttatttctatccacgcctatgaatctttggacggtgagatctcacagatgtcagaactgctggaactatgaaatggggtatataaccacgactctggtggggaaaaccgttttttaaaggacacacacacacacagcgatgcatctctctcctaaagctcagccacggctgcggcaaggttccagcggtcgctgggagacagaaaggttttgtgccctgctgtatcataaagcacacacttagcgctctggagccggacggtggctccaccacttccgcaggcctggaaacttccttctccggaggaccttttactaaaaggtagaagacttcatggcttacttgttccataactccaagtgagtctgtaatgtttgtgaagcttgactgtaaccatgttttttctgtttaattatgtaaaaaacaaaactacaaaaaaaaaa

SEQ ID NO: 82061 - DNA, 2533 bp, Homo sapiens
  sig_peptide (1179)...(1044): this location contains the signal peptide sequence, MYCWWCWLCTAMVCSGVLCRPLWEPLSPRLSVFWAGRYLGFWCMG, Run with SignalP
  misc_feature (160)...(2330): similar to gi452390 in the genepept database release 114, Run with FASTXY 3.3t00, default parameters
gggagccggaggaggagcggccgccgccgccaccgccgccgccatagagactgtagccgtggagactgttacttaccaacggggaccaacacgcagcagccgctgccgccgccgcgggagccgctgcccgaactcccggcccgaactccagacctgagcatgcagaattccgagggtggagcggattcgccagcgtccgtggctctgcgtccctcggcggcagccccgcctgtgccagcctccccgcagagggtgttggtccaggcagccagctccaatcccaaagggtcccagatgcagccgatctccctccccagagttcagcaggtaccccagcaggtgcagccggtgcagcacgtgtatcctgcccaggtgcagtacgtggaagggggagacgccgtctacaccaatggagccatacgaacagcctacacctacaaccccgagcctcagatgtacgcccccagcagcacggcttcttacttcgaggccccaggcggtgcccaggtgaccgtggcagcctcgtccccgccagcggtcccctcccacagcatggtgggcatcaccatggatgtcggggggagccccatcgtctccagcgcgggagcctatctcatccacggggggatggacagcaccagacactccctggcccacacctcccgctcatcgcccgccacgcttgaaatggcgattgaaaacctccaaaaaagcgaaggaatcacatcacacaaaagcggtttactcaacagccatctccagtggctgttggataattatgaaacagcggaaggtgtgagtctccccagaagttctctttacaaccactaccttcggcactgccaggagcacaagctagacccagtgaacgccgcctccttcgggaaactgatccgttctgtgtttatggggctgagaacgcggcggctgggcaccaggggcaactcgaagtaccattactatgggattcgtctgaagccggactcaccactgaaccggctgcaggaggacacgcagtacatggccatgcggcagcagcccatgcaccagaagcccaggtaccggccagcccagaagacggacagcctcggggacagcggctcccacagcggcctgcacagcactccggaacagaccatggccgtgcagagccagcaccaccagcagtacatagatgtctcccacgtcttccccgagttcccagcgcccgacctgggcagcttcctgctgcaggacggcgtcacactgcacgacgtcaaggccctgcagctggtgtacagacggcactgcgaggcaactgtagatgtggtgatgaacctccagttccactacatcgagaagctgtggctctccttctggaactctaaggcctcctccagcgacggccccacctctcttcctgccagtgacgaagaccccgagggcgccgtcctgcccaaggacaagcttatctccctgtgtcagtgcgaccccatcctcaggtggatgaggagctgcgaccacatcctctaccaggcgctggtggagattctcatccccgacgtgctgaggccggtccccagtaccttgacacaggccatccgtaactttgccaagagcttggaaggctggttgacaaatgccatgagtgacttcccacaacaggtcatccagaccaaggtgggcgtcgtcagtgccttcgcccagacgctgcggcgctacacgtccctcaaccacctggcgcaggcggcccgggcggtgctgcagaacacgtcccagatcaaccagatgctcagcgacctcaaccgcgtggactttgccaacgtgcaggagcaggcctcgtgggtgtgccagtgcgaggagagtgtggtgcagcggctggagcaggatttcaagctgaccctgcagcagcagagctccctggaccagtgggccagctggctggacagtgtggtcacccaggtcctgaagcagcatgccggcagccccagcttccccaaggccgcccggcagttcttgctgaaatggtccttttacagctccatggtgatccgggacctgaccccgcgcagcgctgccagcttcggctccttccacctcatccgcctgctctacgacgagtacatgttctacctggtggagcaccgcgtcgcggaggccaccggagagacgccgatcgctgtgatgggagagttcaacgatctcgcctctctgtcgctgacgctgctcgacaaagatgacatgggcgatgagcagcgtggcagcgaggcgggcccagacgcccgcagcctgggtgagcccctggtaaagcgggagcgcagtgaccccaaccactccctgcagggcatctagcagccccggccggcgcctcctcgaggttccaaaagatgccgcctggtcactctgggaacctggatttcaccggctccaccaaattagtgcctcttagatgatgtgatgtttactttgactcaagcgggggctcccggggtcagtgttcaagaaggaaagcagttgttgaagctacagaagcccaggccagggctcccactgg

SEQ ID NO: 82062 - DNA, 1124 bp, Homo sapiens
  sig_peptide (118)...(253): this location contains the signal peptide sequence, MAKCCYNWGGNGPFRQLNILLFFPFLLPLLSPTLSPFLLEYPEIH, Run with SignalP
  misc_feature (240)...(172): similar to gi1850518 in the genepept database release 114, Run with FASTXY 3.3t00, default parameters
aatagtcctagtggtctcagaatttgaaacatattgaacaaaactccaaactaagcgtaattgtttcttaatctaaatagacttctaaagcacccagagcctatgatggaattgtacatggcaaaatgctgttataattggggagggaacggtccttttaggcaattaaacatccttctcttcttccctttcctcctccccttactctctcctactctttctccttttcttcttgaatacccagagattcacttccctttgtaaatatttgagtctacatagtagaaatgttttatagatctatccatcaagtaggttcaagtaattatggtaagtagttatatggaactacctaaatatctattgctctgatctgtccatgaagatcccttacaatgtatttcagatttcgtggcctaagtaaatgagacttttttttcttttttattaaaaaacagaagcttttttttcccccaagagttaaatgtcattgtaatcttatgaaatattgctttcaaaacataaaaccaaagaaattcagaaataaagcttatcatcctggttgtttttgttatatagaattgtctttactatttttcccctctcattgtcacctcttggttcatggtatgtgattaagagatggtaccattgccctctgattgccttgcttctggtgctccctctcctgcaagtggccctttttagtcagatccttaaagctatttcaacatttctccaccccgtatccccccaccaccctccaccaaatacacatgctttgcactattacagatgttaacttgtcaaagtccagaagctcctgagaagtcagcaggaagacatggtggattgaggcatagccattgacctgaaggaaataattaaaatgcaggagggttgctgtgagggacacactaacttagtacatctttctctgatgaaatctgtcaggctcttagtttaccaaatgtgggaacttttgtgcttgttttgctcttaggcacaggataggtcccaggagagattccattcattcctccaaagagaaacagaagaaaaaagaatgaagtctcactaatagcttggttagaagaattgtggttactctgagatctggactc

SEQ ID NO: 82063 - DNA, 635 bp, Homo sapiens
  sig_peptide (129)...(264): this location contains the signal peptide sequence, MGSLMPLRPLALHTALGAALNFSLPCEWSTLPSASEAGRLWGPPS, Run with SignalP
  misc_feature (123)...(215): similar to gi3093324 in the genepept database release 114, Run with FASTXY 3.3t00, default parameters
ggctgaggcccacgtttttaccccagcttgaggctgaggtgggctctgtgctcctggtgctgccaagcccttgcctgctatccacaggcctgaggtgcaggcctccctcagacagtgacgggttacacatggggtccctgatgccactcagacccctggcactccacactgcccttggggctgctctgaacttctccttgccttgtgagtggtcaacactgcccagtgcaagtgaggctggaaggctttggggacctccaagttttcagtaaccctgtgttaccccaagggaattgttttgcccacagattttagcaggttggagctttcaatctgtcctgttttgggggtttgtggcttagatgctgggatgagagaagccacctaaatccaaaggaaggagtttgcagcgtgttgcatcagccagccagcagacacccagctgtcatttgcattctcagcaacaaaagccttggcccctcatgactatgggtgtcacctgccctgtgtggcccagggccaggtggaagccatccatgactgagtaaaatcagagtagcatcctgctctgctctcctgtttgcaagggtaggagttggctgaaaaccagctgaagagtggcaagtgtgaatgct

SEQ ID NO: 82064 - DNA, 1029 bp, Homo sapiens
  sig_peptide (690)...(825): this location contains the signal peptide sequence, MKATVHLWMCSCIARFWHLCPGPSLTSSCSTSCISSVMSASNNSL, Run with SignalP
  misc_feature (126)...(201): similar to gi930038 in the genepept database release 114, Run with FASTXY 3.3t00, default parameters
cgagggggaccacggcaccctcggaccggagccttcgaggccactcgcttttacaacgtgaagactgggaaaacagctggctcactcgcccctggcactgtgcgctgcttctgcagtgcctgtgctctccagcagggagggagcacctgccctgtgatgtgatggggaaatctatcccatgtctgaggtgtcacttgacgtgtgaggaattgattaggtgctatcacttggcccagccacagcagcatccgatgaggttcaattcattacaccacttcagactcccagcctccgctgccttgtaacacatactctggctgctaatgaatttcagacagcggcgcttttcattttcactacttagtgctgagttgcagcctcctcacgtcacctgagaagcggcaactgcaggctgcaatgcggaggggtctttgtttggtccccaagtgggggtgcgctttgcctttagagtacccggatagctccaggggtctaatcaaaaacctctccccactgacttccaggatagggggaccatttcagaagaatgagctcacctctcattttccacaagaatcacttccaatgtaaatgattaaaatgtaataaaagcaaacaggactgatgagcaagaaagctacagcctgccacgctgagtcgtgctggacgtttccagcagaggcgtgcccatgaaggctacagttcacctatggatgtgcagctgcatcgccagattctggcacttgtgcccagggcccagccttacctccagctgctccaccagctgcatctccagcgtcatgagcgcatcgaacaactcactgatgtcagcactgcattctaggatcatcttctcaatgttgggcagttccaactcctctcgaatggcacttaaactctagaaacaatagactgcactttaggaatcaacaactaagtgtaattagataatggcaggtggcaatttggttttgtgggtaagaatttggactcgagtcagcctgcccaagtgcaagtctcagctttgct

SEQ ID NO: 82065 - DNA, 792 bp, Homo sapiens
  sig_peptide (186)...(321): this location contains the signal peptide sequence, MLLLLLAPIIIKDSQIISDIFKACNRKSNPSPTYPTNDAGYTYNF, Run with SignalP
  misc_feature (241)...(322): similar to gi3643965 in the genepept database release 114, Run with FASTXY 3.3t00, default parameters
ttactgccaagcttggcacgaggattataatctgaagtaataattacccagtcttttggtcaaataccctagggcaccctgcagcgagaaactttcaattacaaactgatttctccatttttaagttctgattttttggggcatgagtcacatggcccatctaaccctctgttgagtctcacttaatgcttctccttctcctagctcctattataatcaaggacagtcaaatcatttctgacatattcaaagcatgtaatcgtaagagtaacccttcacccacgtaccccaccaatgatgctggctacacctacaacttctcctgctctcctatctctttacaaattccttgtttcttattattttgggagtgggcagctacaatcttttaaaaacttctgattactgtctccttcaatcagtctgaaacactcctgacaaaatcttaacactaaatttatactttctttttctcaaaaccttctccccaattgttccacattgttaatcatccaggactttcatctccttagcacctacacccctctggtgttctggtgaactttctggggattataatcttgaggcttggagaaaaactcatcctgtttccccagggcatccttttcatggggaaaaatttaaaattcccataaaccaggcccgggccgccccctttttggagggggtccttattttagggccttctttgggggaaggggattttgggagctttatggcaagaacgggcctttacctcattggggatccccctgcgtaagaagagggcac

SEQ ID NO: 82066 - DNA, 617 bp, Homo sapiens
  sig_peptide (148)...(283): this location contains the signal peptide sequence, MTSTYLGCCSLWDVWNEEGKGDVWRPVAVFIGLGVLISIRVPFLF, Run with SignalP
  misc_feature (281)...(210): similar to gi2621374 in the genepept database release 114, Run with FASTXY 3.3t00, default parameters
cgaccttcagagtatcttcccctctaccagcatgcccctcagttgctttttcaccattagaggaagatgaggatattgttttctctgtgcttgagattgatactctatcacccctcagtctctgtggtttctgttttgttcctttagatgacatctacctacttaggttgctgctccctatgggatgtttggaatgaagaagggaagggagatgtgtggaggccagtagccgtctttattgggttgggtgttctcattagcatcagagtgccctttttgtttacttacttctgttaagtctaccacttctggatctcactgcagattataaggcagggcctctggattgaagttaatgtgtataaatttttataaagctcctcagatgagcctaatttgctcctattagtgagaaccacgattggataattgcaaccagtttgcattcttcctctttgggtgagatgctttgttttttttggttttggtttttggagacagggtctcactgtgacacccaggctggagtacagtggcgtaatcatggctcactgcatcctcgacttcctaggctcaaatgatcctcccacctgagtttcccgaggtcgacgcggccg

SEQ ID NO: 82067 - DNA, 545 bp, Homo sapiens
  sig_peptide (178)...(313): this location contains the signal peptide sequence, MVLRVCFLIFVLYHNLGKYIFIIYVYRCKDRFTKGCITVVQQSGI, Run with SignalP
  misc_feature (150)...(239): similar to gi450746 in the genepept database release 114, Run with FASTXY 3.3t00, default parameters
caataatgcagttatcactggtcccagcgatgtgtgtttctggggaaaaatattaatcagctggagtcaataatcattccagggctttgatctggcatcacatataagtgagatgttaagctactaaggagtgaaaagtgaaaaaactgcttgtatgctgcccccactgtctcagggatggtgctcagagtatgttttcttatatttgtcctgtatcacaatcttgggaagtacatttttattatatatgtctacagatgcaaagacaggttcactaaaggttgcataacagttgtgcagcagagtggaattctcactgagctcaaaggccagggttcttttctctacgtgttgctgtgtcttgatattaccctcctagttaggagtgtattcaaaaatgacaattcaaggtttgacttccaagccaattgaaaaattggttaagcggtggctcactcctgtaatccttgcatcccaaaggaggccgaggcaggcaggtggatcacctgaggtcaggaatttgagaccggcctgaccggcatggg

SEQ ID NO: 82068 - DNA, 423 bp, Homo sapiens
  sig_peptide (252)...(387): this location contains the signal peptide sequence, MKILASFILTRLTDMIFPLSFNTHISISYLWKVFTYNTQYIPLRI, Run with SignalP
  misc_feature (266)...(341): similar to gi4454361 in the genepept database release 114, Run with FASTXY 3.3t00, default parameters
tggaaggaagaacttgtgtgcttagacctgacgctgggaggagatgctgccacctaggttacttgtaggaccctatacggcaacctcctttgccaggaactatttataaacatcctgcaggaaaatggtagctgagaccaatgatgctgacctccctcaaaagctgcatttctgaatttctgaaggcaaactgtctgcctatatttactctgtgatgtcgtaaggataagaaagatcaagggatcaggaaaatgaagattttagcttcattcatcttaacgaggttaacagacatgattttcccactctccttcaacactcacatatcaatttcatatttgtggaaagttttcacttacaacactcagtatataccacttagaattatgaaagtatatcctgtagggcagatccacatgcaga

SEQ ID NO: 82069 - DNA, 434 bp, Homo sapiens
  sig_peptide (265)...(400): this location contains the signal peptide sequence, MFSLFNKSFMFLIHSDLWIQFLVSLQNFSYFLDICKILVNNEIPL, Run with SignalP
  misc_feature (262)...(149): similar to gi58940 in the genepept database release 114, Run with FASTXY 3.3t00, default parameters
taccgcgccggaattcccgggtggaaaacgcgtccgcggacgcgagggtgggtctgtcaactgtccgtgatagggagcccagaccaagagagatgtccaagggtctttcagtctgtacaaatggcaaaaatcctaatattatttctccaaagtagtttcttgtcctcctgcagcagagaaacatgggagaaaaataacaagaagaaacctgggcttgaatatgcactaaagattggagggtaaaggagactcttagaatttaatatgttttctttgtttaacaagagcttcatgtttcttattcattcagatttatggatccagttcctagtttcactccaaaatttcagctattttctagatatatgtaaaatcttagttaataatgagattccccttcccactaccacttgcatttcttttaggctaccctt

SEQ ID NO: 82070 - DNA, 1075 bp, Homo sapiens
  sig_peptide (754)...(889): this location contains the signal peptide sequence, MVMKALFDLAPPLYPCTLPLLTVPRYSGLCAMSQIGCFSRLFPSL, Run with SignalP
  misc_feature (437)...(322): similar to gi5102571 in the genepept database release 114, Run with FASTXY 3.3t00, default parameters
agctctgttgttaggtgcatgcacattaagattgttatgacttcttggagaattgtccactttattgttatgtaatgtccctcaataataataataataataacgataaaattatatttaccttcttgcctccagttgggagggagaggggagagtaagtgcctgccacgggctctaatttcagattgtccccaaatcatcctccacccagtggaaatttcctgaaaggagatcttgaaaacttaatcctctccatttgactcactgatcccttttaatccacaaaatctacatcttaagctctgtgcctgaaagagcaggtttgactcaggcaagagggtggaaggagaaagagtgatgctggccgatggctgggagaggatgaatgacccagaagctgagggctggggctacttggccttggccaggagcaaggctgggtcctcagctctcagcccctgtggccatgagcagaggacactccactcgccctgcactgagggatctgaacacaggttgctcaaagacccctgaaaaccaaagaaagtttccatagcctgatgtgagttgcgaaggccggggtgtaaattcagaggctggagcctggctgggtgctatcttcccaagtagcctcagggacgccatcctgctgcactaggtctgtgcccacatctgtgagatggcaccactctgaggctccagatcctcccagggtctttctttgcacttgtggttcaatcccaagtgctccccatggtcatgaaggctctgtttgatctggccccacccttgtatccctgtaccctccccttactcactgtgcccagatacagtggcctttgtgccatgtctcagataggctgtttctcaaggctctttcccagcttaagacctttgcctggggtgctctggctacctagagcaccttcttctcactccactttgatggacttttgcatccttcagggccttcccagggctcctcctattctctctcgtaagagtctaactcttgcctttaaagcactcgtcacaagttctcaatatataattaattgatgttcacttctttcaa

SEQ ID NO: 82071 - DNA, 1802 bp, Homo sapiens
  sig_peptide (98)...(233): this location contains the signal peptide sequence, MAWASRLGLLLALLLPVVGASTPGTVVRLNKAALSYVSEIGKAPL, Run with SignalP
  misc_feature (296)...(1456): similar to gi57732 in the genepept database release 114, Run with FASTXY 3.3t00, default parameters
cccacgcgtccgcccacgcgtccgctggggctgagagttcacctgtctcaggaaccacctgagcccacagatcctgtgggcagcggccagggcagccatggcttgggcaagtaggctgggcctgctgctggcactgctgctgcccgtggtcggtgcctccacgccaggcaccgtggtccgactcaacaaggcagcattgagctacgtgtctgaaattgggaaagcccctctccagcgggccctgcaggtcactgtccctcatttcctggactggagtggagaggcgcttcagcccaccaggatccggattctgaatgtccatgtgccccgcctccacctgaaattcattgctggtttcggagtgcgcctgctggcagcagctaattttactttcaaggtctttcgcgccccagagcccctggagctgacgctgcctgtggaactgctggctgacacccgcgtgacccagagctccatcaggacccctgtggtcagcatctctgcctgctctttattctcgggccacgccaacgagtttgatggcagtaacagcacctcccacgcgctgctggtcctggtgcagaagcacattaaagctgtcttgagtaacaagctgtgcctgagcatctccaacctggtgcagggtgtcaatgtccacctgggcaccttaattggcctcaaccccgtgggtcctgagtcccagatccgctattccatggtcagtgtgcccactgtcaccagtgactacatttccctggaagtcaatgctgttctcttcctgctgggcaagcccatcatcctgcccacggatgccaccccttttgtgttgccaaggcatgtgggtaccgagggctccatggccaccgtgggcctctcccagcagctgtttgactctgcgctcctgctgctgcagaaggccggtgccctcaacctggacatcacagggcagctgaggtcggatgacaacctgctgaacacctctgctctgggccggctcatcccggaggtggcccgccagtttcccgagcccatgcctgtggtgctcaaggtgcggctgggtgccacacctgtggccatgctccacacaaacaacgccaccctgcggctgcagcccttcgtggaggtcctggccacagcctccaactcggctttccagtccctcttctccctggatgtggtagtgaacttgagactccagctctctgtgtccaaggtgaagcttcaggggaccacgtctgtgctgggggatgtccagctcacggtggcctcctccaacgtgggcttcattgatacagatcaggtgcgcacactgatgggcaccgtttttgagaagcccctgctggaccatctcaatgctctcttggccatgggaattgccctccctggtgtggtcaacctccactatgttgcccctgagatctttgtctatgagggctacgtggtgatatccagtggactcttctaccagagctgaggcaagaccactgggaggcctgagagtgggccagctcgctgctcaggcgaatttctcatttcaagccactggggaaactgaggcaaaaccatacttagtcatcaccaacaagctggactgcttagctgggctgttttatcttccctgagtgcctgggtctccctccctcacttctgccctttcccttcctcctcctcttctcctccctcttccctcatctcccccctccttcctctgccccaccccagcggggagcagactgctcctccaggctgtatagacctgccctcttgcattaaacaacttctcttgagctgcaaaaaaaaaa

SEQ ID NO: 82072 - DNA, 1111 bp, Homo sapiens
  sig_peptide (337)...(472): this location contains the signal peptide sequence, MCLLTFHMFSNHLLSLSSKQVVRLEKGAEVTAGKEHSIPGWLTET, Run with SignalP
  misc_feature (669)...(533): similar to gi854025 in the genepept database release 114, Run with FASTXY 3.3t00, default parameters
tacaaggctttgagtatgatcaaaacgtttaaccaaaactaaagtatgtgcatactttatggtgttgaaagcaatgctactaaaaatagtacaacattttatgggattaagattgcaaattgctgcctaaattcagcttgcagttaaggcctaccttcagtaaactctcgttgtgtagtcagctccccaccaagcttatctcttgctgtttttccacttggctcctctgttgcagtcagtccaagccctaccagattttaaacaactggaggtcagagactgccctttgtaacctgagtggaactggtaaggcactggggcacccaagattttctaatgtgtttactgactttccacatgtttagtaatcaccttctgagcctatcttccaagcaagttgtaagacttgagaaaggagcagaggtcacagctggcaaggagcacagcatccctggatggttgacagagacaagctatcctccagatgaaatatttccaactacagatgagagtattgaaggccttccattcccctttgatatcagaatggtgagaatgtgggagacaccaccagttaaccctgccttcatgagtacagatacccatgaaaatatttaataagcgcagtgaccagacgagacctgtgctaagtatttgataggcatgctttcaatctcgtaactccctatgaggttatgtttttacagatgaaaaagggaaaaggaagatactcatcagtggcctagcttccttcccatcaccgaacccctcaagtcccctgttcccctttttgtctttgtagaagctggtggcagggatatactttctgagctctggtttaaaactctgagttttgggccacagatcccctctagctgactcttcttttttgacatgaatgagataaaaagttgttccctgggagatagtttcagcatggctacagtagtcagagaaacgtgcatcttttccagtgaagggaaccaagctgatttttttgcactggggcatagtgggggtgtgggaagggggggctgagtgatgggaatagggggcactactgagtcatatggcaggaaaaagatgaaaagaatagttacccaaaaaaaaa

SEQ ID NO: 82073 - DNA, 446 bp, Homo sapiens
  sig_peptide (11)...(146): this location contains the signal peptide sequence, MTGPLNVLICTVLYPKLLKLLMTNVFHQTVTYELSKEICDKGVIS, Run with SignalP
  misc_feature (74)...(142): similar to gi335330 in the genepept database release 114, Run with FASTXY 3.3t00, default parameters
atcttgatttatgactggaccacttaatgtattaatttgcactgtgttatatcctaaacttttaaaactactcatgactaatgtctttcaccaaactgttacctacgaactttctaaagaaatatgtgacaaaggcgtgattagtttcatttgctctgccatttttagctgtatatgtgataaaacatgttttaatacatctctttttaacttcgattttatttggaatttttgaatgagctgtttgtttgtttttaagcaaagtaattggagtgaactttctttgattcccaggttttcttttttccccttttttctttttttattgcattggtagatgcagggcaagaaatttattactctaaatttgtgactcagaattttaaaactaaattaacttcataaatgcgctcacttttttcttaatgcattacgtctaaccccca

SEQ ID NO: 82074 - DNA, 372 bp, Homo sapiens
  sig_peptide (324)...(189): this location contains the signal peptide sequence, MSRMILFTVLFRVCIESDILYMLVTCIMTNSLSCPPGSSFSYFLF, Run with SignalP
  misc_feature (273)...(183): similar to gi2632913 in the genepept database release 114, Run with FASTXY 3.3t00, default parameters
cccgatggaacatttaacccagccttctatctcttgaatttaatgtgcccatcaatttatgtttaccataataaacatgaaatcacctcataatttgtaggactatgttggatcggaacatccaaatgtatctgacagaggcaccaaacgagctctacatatgagttaggatgttctaacttagaagaaacaaaaagtaagaaaatgaactacctggaggacaactcaaactgtttgtcattatacatgtaacaagcatgtataaaatgtcagattctatacatactctaaacagtactgtaaacagtatcatcctgctcatagatatgaacctattctttaaaataattttagaattagcatattttattt

SEQ ID NO: 82075 - DNA, 385 bp, Homo sapiens
  sig_peptide (269)...(134): this location contains the signal peptide sequence, MWAGSGPGPLCLLFLLSSSLKVVLVYKFPCFCFLSYSFLYKFLPT, Run with SignalP
  misc_feature (264)...(119): similar to gi2633101 in the genepept database release 114, Run with FASTXY 3.3t00, default parameters
aataatggacaaaggagtggtatagatgcagacccggagtatttcaaatattgaacagaatagatgttgaagggtaagtgtttcaacatggagaaaattggcaaagagatgttagctgaggaacggtagggcaggtaggaagaaatttatataaaaaggaataagaaagaaagcagaagcagggaaacttatagaccagcaccactttgagagaggatgaaagaagaaataacagacacaaaggacctggtcctgagccagcccacattaggggctcaggcagtgcagttggctcttttctcattatgtgcacttctgaggtataattaaaggagtggtgggtccccagcagtcagttcagctgttaaaaggggtgtttgtgccc

SEQ ID NO: 82076 - DNA, 397 bp, Homo sapiens
  sig_peptide (177)...(312): this location contains the signal peptide sequence, MKLVLLRKTSLSVFTTLFSVSSSQYPVLSTSICNTPVFSTLFLEA, Run with SignalP
  misc_feature (177)...(301): similar to gi1101753 in the genepept database release 114, Run with FASTXY 3.3t00, default parameters
cccacgcgtccgcccacgcgttcgcccacgcgtccggttgaactcatgataggtgcagaaatttcagtaaaaataatgtgacatcggcagagctgtcatagatctgggatatggctggaaggacatagagtaaatgatcggtctggttcatcgctaaaggagacttaggaacctagatgaagttggtacttctgagaaagacatctctttctgttttcactactctattctcagtatccagttctcagtacccagttctcagtacctctatttgtaatactcctgtatttagtactttgtttttagaggcctgttctgttaaccctcttcctagtaccgtatttttagtactgctatactcagttgcctgtctgtagtacccctgtacgtagtactc

SEQ ID NO: 82077 - DNA, 408 bp, Homo sapiens
  sig_peptide (240)...(375): this location contains the signal peptide sequence, MVRFNQVEVCFMRLLHLQAKTLFVHLAFLTLGLSNFTKEILPEQG, Run with SignalP
  misc_feature (204)...(99): similar to gi1184784 in the genepept database release 114, Run with FASTXY 3.3t00, default parameters
ctctgagaacattcgggatggatttctttcaccccttctgatcctgtgcatgtaattgatcaagagtccacattctgacattccagctctgaatggatgttaatccttgcactactgtgaaaacataaagcccatgaatcaatttgtgagggtgtggaaaagcatccaataacaaagtgactttttctgtgttttcagtgtgagaaagatatcaagtgtgcttggaatttctgtagacaatggtaagatttaatcaggttgaagtctgctttatgaggttgcttcacttgcaagccaagaccctttttgttcatcttgccttcctaactttggggctttctaactttacaaaagagattctgccagaacaggggagcatatttttaatttacttttatcagtcagcag

SEQ ID NO: 82078 - DNA, 397 bp, Homo sapiens
  sig_peptide (212)...(347): this location contains the signal peptide sequence, MLLYETGLLLFLRSPFLQPPVTFLYCFSNLYQQSSSCCLPPGPKP, Run with SignalP
  misc_feature (204)...(271): similar to gi818165 in the genepept database release 114, Run with FASTXY 3.3t00, default parameters
gcgcccacgcgtacgcccacgcgtccgcttatttatatttcctctgaattctgcttaaaaaggaaccaaacagttcctttttaaattcatgtcactactcctatattttattgtaggcagctaaaaacaagccaggtggcacttttgacattcttcttggaattctccttagttgggtgcatgagttcattaggtaccctttctgttctccatgttactgtatgaaacgggtctgctgctttttcttaggtctccatttcttcagccaccagtaacatttctatactgtttttcaaatctttaccagcagtcttctagctgttgtctaccacctggacccaaaccgtacatattttgagtttttgttatagcagagcctcctttctgataccaaatt

SEQ ID NO: 82079 - DNA, 669 bp, Homo sapiens
  misc_feature (1)...(669): n = a,t,c or g
  sig_peptide (24)...(159): this location contains the signal peptide sequence, MLGLGLCTLHFSFVSWLPLKVPPVRDTRESLKGMGKGKGICCIQF, Run with SignalP
  misc_feature (92)...(167): similar to gi554267 in the genepept database release 114, Run with FASTXY 3.3t00, default parameters
cacttctctccactctgctttggatgctggggctgggactctgcacactacacttttcctttgtcagctggcttcctctgaaggttccaccagtcagggacacaagagagagcctgaaaggcatggggaagggaaaagggatttgctgtatccagtttgcctgtttgttctgtctgtaccaccctggtaacagcccttcatcctggcatcagcagtgtgtttcaacctccagctttctggggacattcacaaaaccagcctcatcacatcccgccaagccccctccttggaggttctagcagcagccaggcagcaccccttcctcagagttctgagttcaactcttcagacctcttccttagcctccaaccctggtaaactcaaccctggtaaactccagcttatccccccctcccttaagagtttccatcctgcttcatttcgttattacatctgtgttagcttagattccctttgaacattttcagtccactgacgcctgtttaagccatggtcttaaatattaaattcttgttataaaaacctaagtgtggaggcctttttttccctgatttattcccttaactggccattatccccaactctttctccccccaacaagntaactgtggaacttgcatttcttaaccataaccatggttcccccct

SEQ ID NO: 82080 - DNA, 942 bp, Homo sapiens
  sig_peptide (111)...(246): this location contains the signal peptide sequence, MCLFVFVPRKVLSFMHARFQLPPFSVALKKLIKILISLLHSPLET, Run with SignalP
  misc_feature (173)...(44): similar to gi671877 in the genepept database release 114, Run with FASTXY 3.3t00, default parameters
cccacgcgtccggagaataagatggtttgaaagaaactgagttaacaggccacaagaaaattgccatctccctcccgttcactctccgtttcttccgcgtctcctgatggatgtgtctcttcgtttttgttccgaggaaagtcctgtctttcatgcatgctaggtttcaactacctccctttagtgtagcacttaagaaattaattaaaatattaatcagtttattgcacagcccattggaaacaggccacttaaaggtctttttcatattttgtgtggtataaattatatggtacaaatgtatagaataatgtattgccattttaaaagcccttgttcagggaatgtaccctaaaattttgaagtccaccttgaagagagaaccccccaaatttgattccattattgctggaatcttaggtacccagcttcagacaaggatctatagaaaagagaaactattaatgatatcaggggaaaggggagataattttttttaatgttttaaatttgcatgcagggttaccatgacctacaaaatatcctttatcaccttattgaaagtatctggttaccccttctgcggctgtcccatccccaggctatatttcacgaattgctacccctaaaaatggtatgggaccttcaaaattggctccttttaccaaaatggttgaactccgaattgaagggaacccccattttttgttgccaaaaagaactccaaaaactcatctgcttctttaatggcacggtactcagattacgcccttcgcccccagtccggtttgaacactacgtcagcctgatcaaccatatttacaagatcagtaaaagcctcgggctggttattagacgacccggactgaggcacaaaccgctctactctacactggaccactctctgacgcaccgctacataccctataaccacctaccccg

SEQ ID NO: 82081 - DNA, 641 bp, Homo sapiens
  sig_peptide (203)...(338): this location contains the signal peptide sequence, MLELTEHLVLLSFTWMSLLLPLRPLHLTLKKLDGGPFLFTQLWQL, Run with SignalP
  misc_feature (350)...(222): similar to gi4499941 in the genepept database release 114, Run with FASTXY 3.3t00, default parameters
gctgtggcacgctgaacttgatacattactgtgtttaaacataatgcgggatcagcaataaaaccctgatctgtgttaatatgcttataaaagttgagctatttgaggggctttggataaacaacagacatcttagcatgtaaaatgattttcttttctcctttttttaggctggtattaccagcctttatgtaaatatttgatgttagagctcactgaacacttggtacttctgagttttacctggatgtcattgttactccccttgagacccctgcacttaactcttaagaagctggatggggggccttttttgttcacgcagttatggcagctgcgtctgcagcctccctccctccttccttacagacaccagcaccatatagggtgtgaatatggtggaaacaaacttaaaagagttctcctctcagagagcataatagtcacgtgaccattcagtcttgatttttaaggaaatactttttaagtttgttatatcatacaggatctaagctaatcttccactgtgtcattttctgctttcaaaacaagaacaaggcacccattttaatgttttacttctttctttttgtttaagaatatttaagcttgtgggtttagaaagccctcagaacttacaa

SEQ ID NO: 82082 - DNA, 2305 bp, Homo sapiens
  sig_peptide (1251)...(1116): this location contains the signal peptide sequence, MLGLHQLCSLLVQLDFYLQYLYGQFQQFSMCLDLNHVHFLMFPSL, Run with SignalP
  misc_feature (645)...(760): similar to gi1247481 in the genepept database release 114, Run with FASTXY 3.3t00, default parameters
cccgtgttttgtaaaaaatatagatgagaccacccggatcttcatcacactcttatagttttgcatatggtaacattgtttttataataagcgagtttaaaaaggcgaagaaaaaagatatcccaggagaattctgacccaaaataacttggtacagctcccttacataagactgtgctcttgaagtactatttgccagtaaaagaaacccaactttcttggtaaaatggctgattccagtcagaaaatgtcacacgacagggacgttaatccattagtctatttttttcacttgtatttgtctttttctttatatgtccttctttctcattttgggcgttggttcatgtctttcctattctctagttccactcataattctttcattctgccatttttatccggaaagcgtaggctgcccagacgccccgagggaccaaagctgaagggaggagccctcgtaagcagacaagagtgcgcgcgtcgagcttgcgcagccgcagtagaagccgcacgctcttcggcaggctgcgcaaccgcagctggaggcctcgtgtgcccggggtggggcacgaaactgggcggagctaggccccctcgcgcgctgacgcgactggtcgcggcggaagggtgtaagcacgcaggcgcgatggtggctcgggggggcagggaggcggggtcgcgcaggcgctgtgagaggcggtagcggcggcggcggcggtggtatcggcggcagctgtgagggggttccgggaagatggtgctgatcaaggaattccgtgtggttttgccatgttctgttcaggagtatcaggttgggcagctttactctgttgcagaagctagtaagaatgagactggtggtggagaaggaattgaagtcttaaagaatgaaccttatgagaaggatggagaaaagggacagtatacgcacaaaatttatcacctaaagagcaaagtgcctgcattcgtgaggatgattgctcccgagggctccttggtgtttcatgagaaagcctggaatgcgtacccctactgtagaacaattgtaacgaatgaatatatgaaagatgatttcttcattaaaatcgaaacatggcacaaaccagacttgggaacattagaaaatgtacatggtttagatccaaacacatggaaaactgttgaaattgtccatatagatattgcagatagaagtcaagttgaaccagcagactacaaagctgatgaagacccagcattattccagtcagtcaagaccaagagaggccctttgggacccaactggaagaaggagctggcaaacagccctgactgtccccagatgtgtgcctataagctggtgaccatcaaattcaagtggtggggactgcaaagcaaagtagaaaacttcattcaaaagcaagaaaaacggatatttacaaacttccatcgccagcttttttgttggattgacaagtggatcgatctcacgatggaagacattaggagaatggaagacgagactcagaaagaactagaaacaatgcgtaagaggggttccgttcgaggcacgtcggctgctgatgtctagatgagtcccctgtaggggtcagagacaatgtcaaactgtttacgtaatcaaggtcaagtgaggggaacaagcgcagccagtgatgagtgaagaagaatctgaccagtatcttgcagtgttgacgtttcccagatgtgtgcttgtgatgatacacacacatgcacaggttctcaaccacgtgtgtatatatgtatgtgtgcatatgtctgtagctgtatataaagcgcatgtagagctacagatccagatacacacacttgtgtatatatgtacatacagacatactgaagggattagtacaatttctccaaagtactgtacctatcttcagcaagaatgcaaaagaaaatattttcaatatatatacctggaacagattttaataattatcagagtaataccattaatggacaaattgactgcaatgtaatactagctggtatgtttcataaatgtcaagctgtggaccaacatatatagccttttattatttttctcttcttttaagtcagtctgttataaatttttttttagtcccataagcagtagactcccacagaaaatttcttcaaaattttttggtgttccaatgaatctgggatgtaaactctgaatgtatttataactatttatttctgggatggtcattatcttgtagccaaatttgacaatataaagtaaggagcaaagttacagggccagtttttacttgtttgccctgagggatgtatt

SEQ ID NO: 82083 - DNA, 1212 bp, Homo sapiens
  sig_peptide (1063)...(1198): this location contains the signal peptide sequence, MRAWEPFFLFPGHFLLFSFITGGKLPGKFGGMPPRTFSTRGCPYS, Run with SignalP
  misc_feature (562)...(694): similar to gi5817590 in the genepept database release 114, Run with FASTXY 3.3t00, default parameters
tttttttttctttctacagtagatctagtcctgaaaccagatgagttagttctttaaaaagcaaaatacaaagcatacttagcatacaatttccaggttctgaagtgcaataaatgtgtaatgtgggaaatacatcaaatgagaatggatttttacaatttgacttcataagaagaatatataaaagtaacatgtcagaaaaagctctaagaacatgacctcgttggaaaacaaccgttttcctcaagtgagtcaagtgccagatgacgcagcagctggtgcttctctcctgtgtgcttccacaggaccggcctctgtggtttgctgtttcccactgtcattagctgaatgcatgtctccttcactacgtggagatactgcaggaacaggcaccctgtgtgaattcatttatgatcccttagcatagagctgtgtcactatgggtgggatgaatactgagagtgttcaaataactgagaataaaacactctaacctatgaaagtcatgaagtatctggtatgcactgctgctgtcaagggttaaccaaattttatatagcccttaggtaccacttgttaacccatttatgcctagtgttccattactggaacgctaagcttgtgggatttatattctactgctcaaggtcattgccaaggcctgatttttcacacaaaaaattcgcaacctctggcacaaacgggttaaaaactggagtattttgaaaaacagtattcttcaacacatatttaaaacactataaaattactgcatatagcatccactttagtagtcaaaaaacaaaaacaaaatcaatcaaaatcttcaataacagaaaaggataaggcacagcgctacaagctttggatctcttggttgtaacataatcaaatggtcgcatgttaggattatattaacagggcactgctggtgctttattactttttaaaaatagctttttggaactgaaaaaatacaacttaaccactaaggaaggtaaaaaatcactcatagtatggggctctctctctctctctctctctctcccaaaatattggataatgagggcgtgggaacctttcttcctatttcctggccacttcctcctgttttcctttatcacgggaggaaaactccccggtaagtttggggggatgccccccagaaccttttcaacaaggggatgtccttattctcatcccaggtagggc

SEQ ID NO: 82084 - DNA, 3771 bp, Homo sapiens
  sig_peptide (402)...(537): this location contains the signal peptide sequence, MAESRGRLYLWMCLAAALASFLMGFMVGWFIKPLKETTTSVRYHQ, Run with SignalP
  misc_feature (402)...(2625): similar to gi4539525 in the genepept database release 114, Run with FASTXY 3.3t00, default parameters
tttcgtagatcaggaaaagcaatacttaaattcacttctgagccgaaactgggcattttgggggatgggcatggcaaacagcagtagagttctttaggaaaaaattagggacgttttcagcagctcccgccacctactatgtccgggctactgcgggatccacagaatggaagctgcccgccaacaggaagaatgtctcctccctctgcagggcttcctttcccccatcgagggcccctggggaccacaggtccccagcgggtagggcggaggcgtggccttgcgaaggtcagcggaggccacccagagctcacagcctcctgccagcgcgctctctgtttctctgcagccccgaagctcgcgaatgtagcaggcgccccaagctcggtcctcaagaagccatggcggaatccaggggccgtctgtacctttggatgtgcttggctgctgcgctggcatctttcctgatgggatttatggtgggctggtttattaagcctctcaaagaaacaaccacttctgtgcgctatcatcaaagtatacggtggaaactggtatccgaaatgaaagctgaaaacatcaaatcatttcttcgttcttttacaaagcttcctcatctggcaggaacagaacaaaatttcttgcttgccaagaaaatccaaacccagtggaagaaatttggactagattcagccaagttggttcattatgatgtcctcttatcttaccccaatgagacaaatgccaactatatatcgattgtggatgaacatgaaactgagattttcaaaacatcataccttgaaccaccaccagatggctatgagaatgttacaaatattgtgccaccatataatgctttctcagcccaaggcatgccagagggagatcttgtatatgtgaactatgctcgcactgaagactttttcaaactagaaagagagatgggcatcaactgtactgggaagattgttattgcaagatatggaaaaatcttcagaggaaataaagttaaaaatgccatgttagcaggagccataggaatcatcttgtactcagatccagctgactactttgctcctgaggtacagccatatcccaaaggatggaatcttcctggaactgcagcccagagaggaaatgtgttaaatttgaatggtgctggtgacccactcactccaggctatccagcaaaagaatacactttcagacttgatgttgaagaaggagtgggaatcccccgaatacctgtacatcccattggatataatgatgcagaaatattattacgctacttgggaggaattgctccaccagataagagttggaagggagcccttaatgtgagttatagtatcggacctggctttacagggagtgattctttcaggaaggttagaatgcatgtttataacatcaataaaattacaaggatttacaatgtagttggaactatcagaggatctgtggaacctgacaggtatgttattctgggaggtcaccgggactcctgggtatttggagctattgacccaaccagtggggttgctgttttgcaagaaattgcccggagttttggaaaactgatgagtaaaggctggagacctagaagaactatcatttttgccagctgggatgcagaagaatttggacttctgggttccacagaatgggctgaggagaatgtcaaaatactccaggagagaagcattgcttatatcaactcggattcatctatagaaggcaattatactctcagagttgactgtactccccttctttaccaattagtgtataaactgacaaaagagatccccagccctgatgatgggtttgagagtaaatttttgtatgaaagctgggtggaaaaagacccttcacctgaaaataaaaatttgcctagaatcaataagctgggatctggaagtgactttgaagcttattttcagagacttggaattgcttcaggcagagcccgttacactaagaataagaaaacagataagtacagcagctacccagtgtaccacacaatttatgagacatttgaattggtagagaaattttatgaccccacatttaaaaaacaactttctgtggctcaattacgaggagcactggtatatgagcttgtggattctaaaatcattccttttaatattcaagactatgcagaagctttgaaaaactatgcagcaagtatctataatctatctaagaaacatgatcaacaattgacagaccatggagtatcatttgactccttattttctgctgtgaaaaacttctcagaggctgcttcagattttcataaacgacttatacaagttgatcttaacaatcccattgcagtgagaatgatgaatgaccaactgatgctcctggaaagagcattcatcgatcctcttggtttaccaggaaagctgttctataggcacatcatatttgctccaagtagccacaacaaatatgctggagaatcatttcctggaatctatgatgctatctttgatattgaaaataaagccaactctcgtttggcctggaaagaagtaaagaaacatatttctattgcagcttttacaattcaagcagcagcaggaactctgaaagaagtattatagaaggtctcaagtggctagccattaaaggtgttgctaaaagtctgaggataaaattcacctttctgataacttatgaagccagggtgttctaaactcttttcatgtcatgttttgattataggctttggtcttttcatctgcaaagccttttttttttgctctttaaaagttaataattatattagcaaagggttaatctaatgaagtaaaaaactcctgtgtggcagaaagtaaaagaaaattccctaaattatagcaaggaacatgaattctcagacattgtgagtgtgggaatgtaaaatggtaaaatcacttttgaaaacagtttggcagtttcctataaagttaaacatacacttttactttaggactccagaattccacttctagttatttattcaagagaaggaaaaacaatgatcacagcaatacttgtatgcatgttcattgcaacttaaaagcgtaaaaaccccaaatgtccatccacagacgaatgtataaactgtggtatccattacacaatagactacttactactcagcaataaaaatgaagtaactttcaataaatgcaatattattggcagacattgttgaaggaaaaaagccagacaaacaacctacataaaatatgtttctatttagatgaagtggcaaactaatctgtagtgttaaaaattagattagtgattgcctgggccaagtggcaggttggggaggatggctgcaaagaagtatgaggaaactttctccaatagatgagaattttccgtatcttgatctgagtggcaaattgtaaacttaaaatatatataaaatttattgtatgaaaattaagcctcaataaacgtgattataaaaaacaagtctgcaaggaaaccagaatcatataccttctcttgtgaaatcaccatgaagtgtgaatggtcaggaaaaagccagtaatattcatacatttaataatttcagctctactgaataaacatataagtctgatgggtgatgaaaatagctactacaatcttcatattctaactcctataaagactgtatatcagaatctgcaaacttttatgcagatcccagtgactcaattacatgttcaactatgattaaagcttcaataaacttggttgttcatctacttc

SEQ ID NO: 82085 - DNA, 908 bp, Homo sapiens
  sig_peptide (28)...(163): this location contains the signal peptide sequence, MLILLHILKNIKLYLVNMLKTKLCFYKDRGSPEEGIDKEEMKLGG, Run with SignalP
  misc_feature (357)...(461): similar to gi930236 in the genepept database release 114, Run with FASTXY 3.3t00, default parameters
tttcgtgggagagatacagaattgtaaatgctcattctcttacatatattaaagaacataaaactatatttagtaaacatgttaaagactaaactttgtttttataaagatagagggagtccagaggaggggatagataaagaggagatgaagttggggggcaggaaatggacttagggaacacagtaatgccattggattcaggaaaacctgtgctaggcatcaggctttcttccctcccctctgcttttaaaatcacttgatggacatttatctccatcagccattcttcttatctacctccagacagatggctctgtatgaaacactgggacaagaacatctgcgtattacctaatgaacacttaactattgtgctcagttgtgtttgttcactgataatccaccaggctggatactttattcgacacatgctattagaaaacctatctcagagtggacaaaattaaactgacaggtaaagagtagaatggcttgggataactaccaaaccaagcagcacctggtacacgtgttaaaaaaagccatttatgagaccctgactgtgaacccccgtgaaccccatcttttgagggccccctgactctgtttctttcccccacttattttggaaggccccaaaagctcttttttcccggcgacgggtattcccccccgtgggggaccccccgcggggaggcgccctctcttttttttggctccagggactcccgcccctggggggagggccgtcaaaaggggggggggaggatttctcccacgggggggctccttttttttttgtgtcgacggccggaacaaaaagaccggccccccttcttgtcctacactgccacgcagtaacacgcccgccccccgcccgccgcgcgacgcgcgcatagcctgcc

SEQ ID NO: 82086 - DNA, 898 bp, Homo sapiens
  sig_peptide (171)...(306): this location contains the signal peptide sequence, MLLWPLLLLLLLLPTLALLRQQRSQDARLSWLAGLQHRVAWGALV, Run with SignalP
  misc_feature (169)...(212): similar to gi1480863 in the genepept database release 114, Run with FASTXY 3.3t00, default parameters
tttcgtctgagacccagagtcacccaggggtctccgtcacgtgccaggagtaggcagaagtgggctgtgacagatcaggaaacagagctcagtgcagcccactaaattgctcagggccctacagctaacaagcggcagaggcaggatctgcactcaggagctgcttggagatgctgctgtggccactgctgctgctgctgctgctgctgccaacattggccctgctcaggcagcagcggtcccaggatgccaggctgtcctggcttgctggcctccagcaccgagtggcatggggggccctggtctgggcagccacctggcagcggcggaggctggagcagagcacgctccatgtgcaccagagacagcagcaggccctgaggtggtgtctacagggagcccagcgcccccactgttccctcagaaggagcacagacataagcaccttccggaatcatctccctctgaccaaggccagccagacccagcaggaagacagtggagagcagccactgcccccgacctcaaaccaggaccttggggaggcctctctgcaggccaccttgctgggtctggcagccctaaacaaggcctacccagaagtgctggctcagggacgcactgcccgtgtgacgcttacatccccttgggcccgacccctgccttggcctgggaataccctgggccaggtgggcacccctgtaaccaaagaccctagggccctgctgctggaacccctgagggcccccaggcttgaggcccctggaggcgtggaacggttgtccaaacttttggaggtttttttgggccccggagaacggagggggaaaaactcaccttgggcgcaaagctggcggggaaccctgggaggggcctttctcgaaaggggcctctttac

SEQ ID NO: 82087 - DNA, 1127 bp, Homo sapiens
  misc_feature (1)...(1127): n = a,t,c or g
  sig_peptide (237)...(372): this location contains the signal peptide sequence, MIFHLVSGLVILQSFKMFNFSCFNSTFIFVGEQVHRGPPVTGGIY, Run with SignalP
  misc_feature (450)...(274): similar to gi1788948 in the genepept database release 114, Run with FASTXY 3.3t00, default parameters
ttccagggagctgcaggttcacacaaaatgttgattgtgctgtagcaaaagtggttttaacagagctccaagaaaacttcagtcctctctgttggctgatactactgcattttcatggctagcctaccactgagctgggtagctaggggatagaaatagaccttccttaaaaataccacagtcccctgtccccgaacccctcatgttactgaagttcagtagtatctattgggtagatgatttttcatcttgttagtggcttggtcattctccagagttttaaaatgtttaactttagttgttttaatagtactttcatttttgtgggagagcaagttcatcgaggtcctcctgttactggtggcatatatctgagttaccagtagtatatctgtatgggtctgcagtaacctcaattcttgcctcctcagaagaaagaattcaactgaggagcataaagaaaaaaagagaccaaggcaagtttcagagcaggagtggaagtttattaaaaaggctttaaaacagggaagaaacacttgaaagaaatccaggtgggcaactgggaaaacaagtgcagtgtttaactctgaccctaggacttcataggcttggccctttcccatgattctttccttagggtgcgccgcccctatgtgtggggccctccttacccttgtaaggtgaacacgggcagtgtgcttaagaaaccgtacacccgtccatctgagggttccctctggttccaaagtagcggcccccgaggccatagctccgcttcttgtactttatggccatgcccgggatatgcgtcccccatggcggtggtggcagggacactctgagtcaccgggctgccccctcggaaagggcgctctactcgacacttccatatcccgttatcagccccgtgctgtggttcgcgaccgtgacatcgagagcaactcggggcgagggcccaagaacgacggntagcttatactcggtactccgctgtgagcggtcacgcccgtggcgggcagaggactactggagtcgcccgcctgacgacggctcagccaacttaagactgtgccggcgcgcggcgatcgacttcggctccaaactctacgtggattcactgttgcacg

SEQ ID NO: 82088 - DNA, 414 bp, Homo sapiens
  sig_peptide (122)...(257): this location contains the signal peptide sequence, MFLVGNCATVLLLSCSLSEGSHCFGSETSLPHTFNWKFSAFLQQK, Run with SignalP
  misc_feature (208)...(85): similar to gi551158 in the genepept database release 114, Run with FASTXY 3.3t00, default parameters
ctcactctagaaaacagtcttttatgtgtagtgccatacaaccccttttgctttatgtaaaagctgtgtctgctacagctactaaaaagtgaaggtgcttgtgattttatgatacttctgaatgtttctggtaggaaactgtgctactgtccttttgttgtcatgcagtctgagtgagggaagccattgctttggctcagaaacctctctcccacacaccttcaactggaaattcagtgcattccttcaacaaaaatacattgaatgcccattaccacctgataagccaagggaatactgtaatggacaagtcatagacaagcctttacccttgtggaacttgcattctaatgggggagagagagtagacatcaaacaattatataatcagttattcaatctttacaacaaagg

SEQ ID NO: 82089 - DNA, 4179 bp, Homo sapiens; identical to SEQ ID NO: 82026
  sig_peptide (1108)...(1243): this location contains the signal peptide sequence, MVKSKWGLALAAVVTVLSSLLMSVGLCTLFGLTPTLNGGEIFPYL, Run with SignalP
  misc_feature (193)...(4024): similar to gi1228047 in the genepept database release 114, Run with FASTXY 3.3t00, default parameters

SEQ ID NO: 82090 - DNA, 1449 bp, Homo sapiens; identical to SEQ ID NO: 81405
  sig_peptide (1245)...(1110): this location contains the signal peptide sequence, MCLLKAAPFFFFYVPQVGKGNPRPPRGCSAFHPPTHLRPGSCSVA, Run with SignalP
  misc_feature (412)...(502): similar to gi3309057 in the genepept database release 114, Run with FASTXY 3.3t00, default parameters

SEQ ID NO: 82091 - DNA, 875 bp, Homo sapiens
  sig_peptide (853)...(718): this location contains the signal peptide sequence, MAWTFLLLGLLSHCTGSVASYVLSQPPSVSVAPGKTATITCGGSN, Run with SignalP
  misc_feature (855)...(508): similar to gi619440 in the genepept database release 114, Run with FASTXY 3.3t00, default parameters
ttttttttttttctggttgtcaatgaggatatttattggggtttcatgagtgcagggagaagggctggatgacttgggatggggagagagacccctcccctgggatcctgcagctccaggctcccgtgggtggggttagagttgggaacctatgaacattctgtaggggccactgtcttctccacggtgctcccttcatgcgtgacctggcagctgtagcttctgtgggacttccactgctcgggcgtcaggctcaggtagctgctggccgcgtacttgttgttgctctgtttggagggtttggtggtctccactcccgccttgacggggctgccatctgccttccaggccactgtcacagctcccgggtagaagtcactgatcagacacactagtgtggccttgttggcttggagctcctcagaggagggcgggaacagagtgacagtggggttggccttgggctgacctaggacggtgaccttggtcccagttccgaagacataaggatgatcattactacgagtccacacctgacaataatactcggcctcatccccggcttcgaccctgctgatggtcagggtggccgtgttcccagagttggagccagaaaatcgctcagggatccctgagggccggtcgctatcataagagatgaccagtacaggggcctggcctggcctctgctggtaccagtgcacacttttacttccaatgttgcttcccccacaggtaatggtggccgtctttcctggggccactgacactgagggtggctgactcaggacataggaggccacagagcctgtgcagtgagagaggaggccgaggaggagaaaggtccaggccatggctgaggcaccaccagtgct

SEQ ID NO: 82092 - DNA, 418 bp, Homo sapiens
  sig_peptide (73)...(208): this location contains the signal peptide sequence, MMLFLVVLSLELAYTLRLRQLFLLMASLICLYFPSQHHCLYPGHS, Run with SignalP
  misc_feature (247)...(195): similar to gi212598 in the genepept database release 114, Run with FASTXY 3.3t00, default parameters
tttcgtcttccaagataccttgttttcgccaatggggtattcacgttgaggctttggttagttagaagcaacatgatgctttttttagtcgttctcagtcttgaattggcctatactctcagacttcgccaactcttcctcctaatggcctctctcatctgtctatatttcccttcccaacaccactgcctgtatcccggccacagtggtgcttgcctggacttctgtgactggcttgccgcccgtctggcttgttccccaaatgcagccaaaggagtctccctcatactctcctgcgcaacagactccagtgaggcccctgggccagcctcggcggcggacacggaaggaccttcccagcccgtccccttgctcccttcttcagtttcacctgtgcccttgccccagctggtgctcg

SEQ ID NO: 82093 - DNA, 437 bp, Homo sapiens
  sig_peptide (273)...(408): this location contains the signal peptide sequence, MCKAYVLCHWFLPLATVLTLGFYPLFSALGGSNHACSIYLPQENI, Run with SignalP
  misc_feature (284)...(355): similar to gi1749756 in the genepept database release 114, Run with FASTXY 3.3t00, default parameters
ggcataaatatctagtacgatcacctaggggaattgtatttcaatatttatctttaaccatcatcttttgaaaaggttttagacatcaggaggcaaaagtgagatagggctactgtatagccacggaatggagggccctgtctcatacattaatttcttggcttttttttggccaatctgttgtccttgtatatgtgtgcagaaaatcccaaacctagtctgaaactctgcaattcagataaaattcaaacataattttctgaacatatactatgtgcaaggcctatgtcctctgccattggtttctcccactggcaactgttctaaccctaggtttctaccctttattctctgctctgggtgggtcaaatcatgcctgtagtatttatctgccccaagagaatattagcagggagtacaatgttttgtatgtatgt

SEQ ID NO: 82094 - DNA, 419 bp, Homo sapiens
  sig_peptide (8)...(143): this location contains the signal peptide sequence, MACVWLYVWDKFLEVILLGQRVLDTSVVDDYHQIAIYRVIPACIS, Run with SignalP
  misc_feature (314)...(397): similar to gi5918759 in the genepept database release 114, Run with FASTXY 3.3t00, default parameters
gggttgtatggcatgtgtgtggttatatgtgtgggataaattcctagaagtaatattgctgggtcagagggttttggacacttctgttgttgatgattatcaccaaattgccatctatagagtgataccagcttgtatttctacaagcactctatgtttgcagacgcatcgataataattctgtgccatgtcccttctggtgacaggggtatggggaggggtaggtaaccacatccccctcactctcatcttttcaaaggtacgtgcatcagagggccttgcaagcagtctctctgggtgagcattttcctttcctgtcacagactctcagctgggcgagttttctccctgcctcccaaagcatgtttctgagcaaatattttccagtgtgtgccagatgttggggagagcagtggacc

SEQ ID NO: 82095 - DNA, 402 bp, Homo sapiens
  sig_peptide (125)...(260): this location contains the signal peptide sequence, MALQWSILWQASFLLLLGHLIFFYLDVKKIPSLSWRFRNFTRMHL, Run with SignalP
  misc_feature (198)...(270): similar to gi3406189 in the genepept database release 114, Run with FASTXY 3.3t00, default parameters
ggtggggttgcaggggcaacctgcctgggtttatatacatgggtcacataaattaaaattcctttgctcaaaattcatggacattgcttcagtgtcttatggcattgaacgtggtcagctgaacatggcattgcagtggtcaattttatggcaggcctcatttttacttcttttaggtcatttgatttttttctacctggatgtcaagaagattccttctttatcctggagatttagaaatttcaccaggatgcatcttgattttatcttaggatgtattttgactttttcaaatgggcgttccaagactttattttcagaagcctttcttctgtgtgttattgaatagatttccgttatatttgatggggttctcctctccaaagaatgaatgaagcgcgg

SEQ ID NO: 82096 - DNA, 460 bp, Homo sapiens
  sig_peptide (238)...(373): this location contains the signal peptide sequence, MNRTMLKFILCFLLMTYSQHSQLSAFKSGSSLQLHQATECFSVLL, Run with SignalP
  misc_feature (109)...(299): similar to gi142569 in the genepept database release 114, Run with FASTXY 3.3t00, default parameters
aacagtctggtggaattcgaaacaatttatctttaaagtttctgaatatgtgcttcataaaataacatctcatgtttatcagcaagtgtcctaaatatttgcgtctaactttatggaatttattcagaaaaagaattgaaaactcttcttatagttaccctttctccttttctcttcagtggttatgttgctggggaagagttgggggaagacctcaaaacacaggaactcagagtgatgaacaggaccatgctcaagtttattctttgttttcttttaatgacatattcacaacattcacaactttctgcctttaaatctggttcctctcttcagcttcaccaagccactgaatgcttttcagttttattaaccctcacattccccatccttctcagcaagagcctctccttatgccatcagcatgtatatacatttcctaggaaatttgatctttctt

SEQ ID NO: 82097 - DNA, 988 bp, Homo sapiens
  sig_peptide (34)...(169): this location contains the signal peptide sequence, MVMRPLWSLLLWEALLPITVTGAQVLSKVGGSVLLVAARPPGFQV, Run with SignalP
  misc_feature (261)...(484): similar to gi1771292 in the genepept database release 114, Run with FASTXY 3.3t00, default parameters
gtcgagggagtttgcctgcctctccagagaaagatggtcatgaggcccctgtggagtctgcttctctgggaagccctacttcccattacagttactggtgcccaagtgctgagcaaagtcgggggctcggtgctgctggtggcagcgcgtccccctggcttccaagtccgtgaggctatctggcgatctctctggccttcagaagagctcctggccacgtttttccgaggctccctggagactctgtaccattcccgcttcctgggccgagcccagctacacagcaacctcagcctggagctcgggccgctggagtctggagacagcggcaacttctccgtgttgatggtggacacaaggggccagccctggacccagaccctccagctcaaggtgtacgatgcagtgcccaggcccgtggtacaagtgttcattgctgtagaaagggatgctcagccctccaagacctgccaggttttcttgtcctgttgggcccccaacatcagcgaaataacctatagctggcgacgggagacaaccatggactttggtatggaaccacacagcctcttcacagacggacaggtgctgagcatttccctgggaccaggagacagagatgtggcctattcctgcattgtctccaaccctgtcagctgggacttggccacagtcacgccctgggatagctgtcatcatgaggcagcaccagggaaggcctcctacaaagatgtgctgctggtggtggtgcctgtctcgctgctcctgatgctggttactctcttctctgcctggcactggtgcccctgctcagggccccacctcagatcaaagcagctctggatgagatgggacctgcagctctccctccacaaggtgactcttagcaacctcatttcgacagtggtttgtagcgtggtgcaccagggccttgttgaacagatccacactgctctaataaagttcccatccttaatgaaaaaaaaaa

SEQ ID NO: 82098 - DNA, 1194 bp, Homo sapiens
  misc_feature (1)...(1194): n = a,t,c or g
  sig_peptide (1119)...(984): this location contains the signal peptide sequence, MILQVSGGPWTVALTALLMVLLISVVQSRATPENSVYQERQECYA, Run with SignalP
  misc_feature (1122)...(759): similar to gi575494 in the genepept database release 114, Run with FASTXY 3.3t00, default parameters
gataggacttttttattgaagattggtaaatggtgcactctaagctatggaaagaaggttacaaataaagggattttatataagaaaggatcttgtatagtaaattcttgtcctaaaaggaaatgactggttgtttaagacaagtcagaaagttgagtacattgtaagagggtctgtgaaagtcatgaaagaatttaataattaagaaatttaataattaaaggaaaggaattgccaagattaacaccaaagttattttagccacccaataacgtttttctcccaatcatatcataagttataaagaatggcctaaaccaaaaattatgccctaatagcaagtcaagggggaaacatgttttctcaaaggaaatgatgcttttatattaacgtttctggtaatgtacagcgacatctagtggagacaaaccagtattacaatccattggtgtaacaggtatcaaactctactgccatagttacagtctataggtggtaatcttaatactcatatggtaaccctatattttaaaccttcttgtaaaatttatctctttttgcctagaagcaatcaaacttcaaatggtgctgcaaacaaagccacacatggacatgccattctttccaggaaagccttagatcaacctcaggaggagccccaactgcagccccccgacacgacgccccttttcagcaggaagtagccagaaagaatcgtcgtccaacaccccctaacagcagttatggttacgtctcctcggcgctgccggatgagtggctccatcagctcgtacttgtgtctgcacaccttgtccacctcggctcgcttccgttccataaagtccttctggctattgaagtactcgcctatgggccgccccagctccatcactgctaggaactcccccactgcgctgtcaaaatgcacgtattcctcccggttgtagatgagcccgtccacaacgcgctgagtcccattgaacgcatagcattcctgccgttcctggtagacggaattctctggagtggccctgctctggaccacagatatgagcagcaccatcagtaatgctgtcagagccactgtccaggggccccctgaaacctgcaggatcatcctccagttggaaaaggttggcagaataaaaaaagctgcagtcaggaaaaccgnnngcgtgggtcgccgctggtctt

SEQ ID NO: 82099 - DNA, 1830 bp, Homo sapiens
  sig_peptide (1631)...(1496): this location contains the signal peptide sequence, MIFVLGQAEGILIMLAMTALTVRRSEPSLSTCQQGEDPLDWTVSL, Run with SignalP
  misc_feature (580)...(1830): similar to gi496528 in the genepept database release 114, Run with FASTXY 3.3t00, default parameters
agtggcattcagcattattgcccgagctccacccactttcagatcagcctgggcatcagattcccataggagcgtgaaccctactgtgagctgcgcacttggatctggattgcgctctggtgagaatctaatgcctgatgaactgaggtggaatagtttcatcccgaaaccttcctccccaacacggaaaaactgtcctccgtgaaacctgtcccaggcgccaaaaaggttaggtacttgctgtagggccacctgatcttttctccagcttctgtgaggttggctggcagtccctgaagactcctgcctgaggcctctgcctgaaccctgtcctcagggggccagaagcaaactccagccctccccgtgtctactgctcgctgaggaagccgcaggtgcacactggatccacaaggcacagaaccatcttggccctcggcaagcccccgcttccgccagggcagacggcctcagggagtggcagccggagtctgaactgtcctgggggaccaagcaggagcttaagatgggcaagacctggggccctgggcagacgcatcaaagcaggcagaagcaggcatggccagcaggaagaccaagaagaaggaagggggtgccctccgggcccagagagcctcatccaatgtcttctccaactttgagcagactcagatccaggagttcaaggaggcattcacactcatggatcagaaccgagatggcttcattgacaaggaggacctgaaggacacctatgcctccctgggcaagacccaaacgtcaaggacggacgaactgggacgccatgctcaaaaggagcctcggggcccatcaactttcaccatgtttctgaacctgtttggggcagaagctgagcggtaccgacgccgaggagaccattcttaacgccttcaagaatgctggacccggacgggaaagggaaaatcaacaaggagtacatcaagcgtctgctgatgtcccaggctgacaagatgacggcggaagaggtggaccagatgttccagttcgcctccatcgatgtggcgggcaacctggactacaaggcgctcagctacgtgatcacccacggggtaggagaaggaggagtgagacccagccgggtcaataaacctggacgcttggaccctgcctgcgagtctgcccgggcgggaagggcgcgtcggtggctgctgggccttgcgcacggggagtcgctcggtggcaggctgggtggggactcccgtggccctcctggggtcctctaagcgaggcccccccttcgccgtgcaactccggaattcgccgtgctgggccccaggaccccagccctttccttgcttccccctcggtccacacccggccctgagtctgcgaccccacggcgttacgggtggaggggggctccccagactcggcctgcaggcgccggtatggggtgtggaagaagaccgccaggatgcagctgaagaaggtgcacaggccggccatcagcagcagagacactgtccagtcaagtggatcctccccctgctggcaggtggacaaggacggctccgagcgtcgcacagtcagtgccgtcattgccagcatgatgagtattccctcggcctgccccagcacaaagatcatgcctgtggcagccccctcccccacggggaaggaacactcgaccgccaactccatggccacggggcccaccgagaagccaaacagcccgagcagcgagcaggtggcagccagggcaagggtctgtccctgcagctgggacaccagggcaaagggcacgcaggccagagagaacaggcacaggccaatcttggtggcctcagt

SEQ ID NO: 82100 - DNA, 431 bp, Homo sapiens
  sig_peptide (25)...(160): this location contains the signal peptide sequence, MGSSFILALLLAVLQGLSAGVLLEQSRAEVKKPGESLKISCKASG, Run with SignalP
  misc_feature (25)...(408): similar to gi33616 in the genepept database release 114, Run with FASTXY 3.3t00, default parameters
cttcattttctgtcctccaccatcatggggtcttctttcatcctcgccctcctcctggctgtgctccaaggactctctgccggggtgctactggagcaatccagagcagaggtgaaaaagcccggggagtctcttaagatctcctgtaaggcctctggatacaggtttaccagtgcctggatcgcctgggtgcgccagatgcccgggaaaggcctggagtggatgggaaccatctatcctgctgactctgaagtcagatacagtccgtccctccaaggccaggtcaccctctcagtcgacgagtccatcagcaccgcctacctacagtggaatagcctgagggcctcggacaccgccacctattattgtgcgagacaaatcataggagcgcttcccactgatccctttgatctcttgggccaagggacaag

SEQ ID NO: 82101 - DNA, 2053 bp, Homo sapiens
  sig_peptide (1670)...(1805): this location contains the signal peptide sequence, MCVTCVVCMWCMCGVCAMYVACVMHVVCEVYVWYVCDVCAFGHTG, Run with SignalP
  misc_feature (1813)...(1653): similar to gi551324 in the genepept database release 114, Run with FASTXY 3.3t00, default parameters
atggacggtgaggcagtccgcttctgcacagataaccagtgtgtctccctgcacccccaagaggtggactctgtggcaatggctcctgcagcccccaagataccgaggctcgttcaggctaccccggcatttatggctgtgaccttggtcttctctcttgtgactctctttgtagtggatcatcaccactttggcagggaggcagaaatgcgagagcttatccagacatttaaaggccacatggagaattccagtgcctgggtagtagaaatccagatgttgaagtgcagagtggacaatgtcaattcgcagctccaggtgctcggtgatcatctgggaaacaccaatgctgacatccagatggtaaaaggagttctaaaggatgccactacattgagtttgcagacacagatgttaaggagttccctggagggaaccaatgctgagatccagaggctcaaggaagaccttgaaaaggcagatgctttaactttccagacgctgaatttcttaaaaagcagtttagaaaacaccagcattgagctccacgtgctaagcagaggcttagaaaatgcaaactctgaaattcagatgttgaatgccagtttggaaacggcaaatacccaggctcagttagccaatagcagtttaaagaacgctaatgctgagatctatgttttgagaggccatctagatagtgtcaatgacttgaggacccagaaccaggttttaagaaatagtttggaaggagccaatgctgagatccagggactaaaggaaaatttgcagaacacaaatgctttaaactcccagacccaggcctttataaaaagcagttttgacaacactagtgctgagatccagttcttaagaggtcatttggaaagagctggtgatgaaattcacgtgttaaaaagggatttgaaaatggtcacagcccagacccaaaaagcaaatggccgtctggaccagacagatactcagattcaggtattcaagtcagagatggaaaatgtgaataccttaaatgcccagattcaggtcttaaatggtcatatgaaaaatgccagcagagagatacagaccctaaaacaaggaatgaagaatgcttcagccttaacttcccagacccagatgttagacagcaatctgcagaaggccagtgccgagatccagaggttaagaggggatctagagaacaccaaagctctaaccatggaaatccagcaggagcagagtcgcctgaagaccctccatgtggtcattacttcacaggaacagctacaaagaacccaaagtcagcttctccagatggtcctgcaaggctggaagttcaatggtggaagcttatattatttttctagtgtcaagaagtcttggcatgaggctgagcagttctgcgtgtcccagggagcccatctggcatctgtggcctccaaggaggagcaggcatttctggtagagttcacaagtaaagtgtactactggatcggtctcactgacaggggcacagagggctcctggcgctggacagatgggacaccattcaacgccgcccagaacaaagcgtgagtctagccaccatctggcgctgtcccaggcactgtctttggtggacctagctacacactgtgtgtcccttcccagtaagtggtagtgttgtgtgtatatgtgtgtgacgtgtgtggtgtgtatgtggtgtatgtgtggtgtgtgtgccatgtatgtggcatgtgtaatgcatgtggtgtgcgaggtgtatgtgtggtatgtgtgtgatgtgtgtgcgtttggacacacaggtgtggtcatcgctctcacctggactcctccacagagggtcattaggaaaggacaggtcctgaggctggcatgcagccagtgagtgggtctttctgtttttttccccctgccctactcaggcctggttccaagggatcctgcccactcagaaagtatattattgtgaattctgggatgggagcttgcagcttcatagacacccctccctgtccctggatcctcagtaactaagagcaacctgagcacagac

SEQ ID NO: 82102 - DNA, 1567 bp, Homo sapiens
  sig_peptide (31)...(166): this location contains the signal peptide sequence, MAPRTLVLLLSGALALTQTWAGSHSMRYFFTSVSRPGRGEPRFIA, Run with SignalP
  misc_feature (22)...(1136): similar to gi403144 in the genepept database release 114, Run with FASTXY 3.3t00, default parameters
aattcccgggtcgacgatttcgtggccgtcatggcgccccgaaccctcgtcctgctactctcgggggctctggccctgacccagacctgggcgggctctcactccatgaggtatttcttcacatccgtgtcccggcccggccgcggggagccccgcttcatcgcagtgggctacgtggacgacacgcagttcgtgcggttcgacagcgacgccgcgagccagaggatggagccgcgggcgccgtggatagagcaggagggtccggagtattgggacggggagacacggaaagtgaaggcccactcacagactcaccgagtggacctggggaccctgcgcggctactacaaccagagcgaggccggttctcacaccgtccagaggatgtatggctgcgacgtggggtcggactggcgcttcctccgcgggtaccaccagtacgcctacgacggcaaggattacatcgccctgaaagaggacctgcgctcttggaccgcggcggacatggcagctcagaccaccaagcacaagtgggaggcggcccatgtggcggagcagttgagagcctacctggagggcacgtgcgtggagtggctccgcagatacctggagaacgggaaggagacgctgcagcgcacggacgcccccaaaacgcatatgacccaccaccccatctctgaccatgaagccaccctgaggtgctgggccctgagcttctaccctgcggagatcacactgacctggcagcgggatggggaggaccagacccaggacacggagctcgtggagaccaggcctgcaggggatggaaccttccagaagtgggcggctgtggtggtgccttctggacaggagcagagatacacctgccatgtgcagcatgagggtttgcccaagcccctcaccctgagatgggagccgtcttcccagcccaccatccccatcgtgggcatcattgctggcctggttctctttggagctgtgatcactggagctgtggtcgctgctgtgatgtggaggaggaagagctcagatagaaaaggggtgaaagatagaaaaggagggagttactctcaggctgcaagcagtgacagtgcccagggctctgatgtgtctctcacagcttgtaaagtgtgagacagctgccttgtgtgggactgagaggcaagagttgttcctgcccttccctttgtgacttgaagaaccctgactttgtttctgcaaaggcacctgcatgtgtctgtgttcgtgtaggcataatgtgaggaggtggggagaccaccccacccccatgtccaccatgaccctcttcccacgctgacctgtgctccctccccaatcatctttcctgttccagagaggtggggctgaggtgtctccatctctgtctcaacttcatggtgcactgagctgtaacttcttccttccctattaaaattagaaccttagtataaatttactttctcaaattcttgccatgagaggttgatgagttaattaaaggagaagattcctaaaatttgagagacaaaataaatggaagacatgagaaccttccaaaaaaaaa

SEQ ID NO: 82103 - DNA, 876 bp, Homo sapiens
  sig_peptide (381)...(516): this location contains the signal peptide sequence, MLLAKRYAKYFIYFIFFNPVLIPILQRRILRLGEIHIAGQCRAGS, Run with SignalP
  misc_feature (393)...(462): similar to gi2224505 in the genepept database release 114, Run with FASTXY 3.3t00, default parameters
cacttttcgcgtcgacacacgcgcgcgcgagcagtagcctatctgtagacagttctcatgaacagctggcaggccatcttctttgaacagatgcgtgtggctgccctgtgggatgattacagcactatggaactaatattctttgaatgatgcgctcttattatttgaaaaatcaggaggcctggtcttcaggattcccctcctcttccactccccatcctccttgagagcagtatatactgggaatgcctgtcaggcgaccttccacttacagcccatggcagctgatagcatttctagtcgattttggtccagaattgaggcacatataagtggggcaggaccttgaagaatgatataattagttagtcgagtgttttatgttgttagctaagcgctatgctaagtatttcatttattttatcttctttaatcctgttttaatccccattctacaaagaaggatcctgagacttggtgagatccatattgctggccagtgcagagctgggtccctccagtctctgcctttacctgccaacctgcatagcatcctggatattcttgcatagccacatagacatttgtttgtacttttagtatgtgttgggtacagtgcatgtttttagctattttctcaagcatctgggaagttctaactctgttttattgatgaggaaactgggtcttgaaatccaggcctatacctgtctgagtgtaacgcccagcaagaaagtgggacattggaaagagcacaaggagggaaaccctaatacctcggattggaaactggctttaccgtgaaccaacccttgggtttttgggcacgcggcttcaaccctgttgggccttaaccttctttatcaagaaagaaac

SEQ ID NO: 82104 - DNA, 2295 bp, Homo sapiens
  sig_peptide (760)...(625): this location contains the signal peptide sequence, MLLCLHLIIICLVFCIISAIPWVLNQCLIFRLYFLCQKKLAMSLE, Run with SignalP
  misc_feature (1040)...(1355): similar to gi57662 in the genepept database release 114, Run with FASTXY 3.3t00, default parameters
ttcaatttggaagtctcagaatttttaaaagatgtgttactaaagctacttataagtcatctaaaatcctaccaccttaggcaaccttttaaatttttgcttatttcatataatatatatttatacatagttgttatagagtaagttcctatttattctgtattttcacatgacgtataatttcataatttccccataatttattagactgctttctacatatctaatagacactcctttaattttggacattttaagttttaaggcttttttcctactccacgatgaatgaatgtaccaatttcattctggcattgccaacattacttggtggtagggttttttcccctttctgctaccttagcaagtataaaaggttactttaatttacatttctttggttatatcaagggtggggaattacttatgaaagtttaattttaaagcagataatatttcaaatattttctttgaaatagaccatttgtcctgccttgaagtatgttagtacattttaagaaagtcagtgggttaaggagtcagtgctgttagtattcatgcttaaaacacttcccttctacctaccctaataaatgaggggctcaagagaaatatttctaattctctagcgacatggctaattttttttggcataaaaaatatagtctgaatattaagcattgatttagtacccatggtatcgcagatattatacagaacacaaggcaaatgataatcaggtgtaagcataaaagcattctcacgttaccccgatattttataaagcaaagctattgtatacccttttacttaggaaattgaagctcaagaaggtgaagatgatacctttctaacagcccaagatggtgaggaagaagaaaatgagaaagaagggagcctagctgaggctgatcacacagctcatgaagagatggaagctcatacgactgtgaaagaagctgaggatgacaacatctcggtcacaatccaggctgaagatgccatcactctggattttgatggtgatgacctcctagaaacaggtaaaaatgtgaaaattacagattctgaagcaagtaagccaaaagatgggcaggacgccattgcacagagcccggagaaggaaagcaaggattatgagatgaatgcgaaccataaagatggtaagaaggaagactgcgtgaagggtgaccctgtcgagaaggaagccagagaaagttctaagaaagcagaatctggagacaaagaaaaggatactttgaagaaagggccctcgtctactggggcctctggtcaagcaaagagctcttcaaaggaatctaaagacagcaagacatcatctaaagatgacaaaggaagtacaagtagtactagtggtagcagtggaagctcaactaaaaatatctgggttagtggactttcatctaataccaaagctgctgatttgaagaacctctttggcaaatatggaaaggttctgagtgcaaaaggtagttacaaatgctcgaagtcctggggcaaaatgctatggcattgtaactatgtcttcaagcacagaggtgtccaggtgtattgcacatcttcatcgcactgagctgcatggacagctgatttctgttgaaaaagtaagcttccctaactgtttatcaaagcaagtctaatttgatggctagttctcaactcatagctgttaacagtagcagggagtagaatttgcagtgatttttaatttttatgtatttgtagtttttactctccttatatttttcctatcgtttccaaattttctgccattagcacacttcttataatcacaaaaatgtaaccatatgtacaaattgtttttctggttcgaacctttcaggtaaaaggtgatccctctaagaaagaaatgaagaaaagaaaatgatgaaaagagtagttcaagaagttctggagataaaaaaaatacgagtgatagaagtagcaagtaaggatttatttttatttatttattttgataagcagatagacttttttggtacattatgaagtactcattctgtttttttgtctggggcggtatggtcaggacacaagcctctgtcaaaaaaagaagagaaaagatcgtctgagaaatctgaaaaaaaagaaagcaaggatactaagaaaatagaaggtaaagatgagaagaatgataatggagcaagtggccaaacatcagaatcgattaaaaaaagtgaagaaaagaagcgaataagtatgctatacatcttttcaatccctttctaatgcattctactacttaatttttac

SEQ ID NO: 82105 - DNA, 868 bp, Homo sapiens
  sig_peptide (372)...(507): this location contains the signal peptide sequence, MRAFCYLVFWLRKLFLALSICKDVITQCTHLMQLFFREKRCRCKS, Run with SignalP
  misc_feature (126)...(187): similar to gi11662 in the genepept database release 114, Run with FASTXY 3.3t00, default parameters
ctgaagtccgtctctagaatggctatcatttagatagcagaaatatttagaatgtatatggcatttctaatatttttacaaaaataattttaaatcatgtaactcgaattttttttaaaaagtctgttttctttttggaaaactggcacaataaaaataacactaatataattccattgtatatgcatgtgcattgaacccagagtgggtatactaaagatagctcatgcaaataacttatgggaagtttggctattttttcatgtatgtttataaatatatttagtcatctactgtgaccttggtagcacagaagcattttgttagctgtatcattaattctaaaaatcaaattcttggcatagtaggctatgagagctttttgttacttggtattttggctaagaaaattatttcttgcactttctatttgtaaagatgttataacacaatgcacccacttaatgcagcttttctttagagaaaaaagatgtaggtgtaaaagtgaaatgtatgttttcaaacctggcaaaaggagggacctcaaaaaaataaatttggcttgccatctacctgagtagggttggggattaatataaaacttatgttgaaagtggctgttgggataagtataactgtgctgtgaattgcaatattgctgggagttgccacctatgtatgggaaaattaattgggggtgtgaacaaaaggattttcctgggggcgaatagacctcggtaaaaattcctacctcccctacagactgagcaattcaaattgctctgggccccttgccaggaaggggattcttaaacctgggtaccccatctttctaactagttacagcccccaccccggaacgcggggg

SEQ ID NO: 82106 - DNA, 829 bp, Homo sapiens
  sig_peptide (234)...(369): this location contains the signal peptide sequence, MNLGLLLFLRQLARCLVLSVEGAGETLRRKEIYLLVPREASVAHG, Run with SignalP
  misc_feature (195)...(265): similar to gi2104842 in the genepept database release 114, Run with FASTXY 3.3t00, default parameters
cggacgcgtgggattaacattaatcataatggagtgaagtggatggagtgaagtagatggattcaataaatacttagaaggtaggacctgtgggacttgatgactggaggaaaaatcaaggatgcctctaggttttgggcttagacaactgatagatgattgtgtgcttgtgtcagttattgatttattgcttctcacctcgaagtatgtccttcattgcttgctctgtgaaaatgaatctgggccttttgcttttccttcgccagctggcacgatgtttagttttgtcagtagagggtgctggagagacattgaggaggaaagagatttacttgctggttccaagagaggccagtgtggcacatgggggttcttcagtgctcaagcatttgcagctcttagtgaccagcaactcttctgctgcccaggtagcagagtacgtccactgagacactcttccacaaacaactttccttggcattctaaaggactgaattttgtcaaatttcacaaagtggattgcctgaagttctgtcaggcatgagcccccctccaccaagggtgggatttcacccttaaaatgggggaaccctttttggggctcttgctaaagcctaagggggggggggttttattcgggtgccaccaataaattaccgtctcttttttgctacatgccggtctctttaagatgagataaaacttatctgatcttgtcaggagcaccttatttgtactatcagtcaagacagcgattcttgtgagcgagtctctcctcgctcgaattcgtgtcttctacacagttgtaggaacctctcttcaaatcttt

SEQ ID NO: 82107 - DNA, 869 bp, Homo sapiens
  sig_peptide (184)...(319): this location contains the signal peptide sequence, MLIGSGYLCFCALQWTELGNVCVCAHICRCTHMQVSGITSPVHVH, Run with SignalP
  misc_feature (208)...(276): similar to gi164730 in the genepept database release 114, Run with FASTXY 3.3t00, default parameters
atgcctgtccagactttgccaataggagcacctttaagctggcatgtggttgtaacagcctaacccgtcttttttagagtgataggccatgctaatcttactctctgctccagccttgaaactggccattttttcaaggagccagggttctttttctttgggaacagttaccagcatctgagtatgctcatcggttcggggtatctctgcttctgtgcccttcagtggactgagctaggaaatgtatgtgtgtgtgcacacatatgccgttgcacacacatgcaggtttcagggatcacaagtccggtccatgtccacatccatagggttctttcttgccttatccatttcacctcttagagcagaggactttcaccatttctattgaacatgagtataatatgtagtccttacctaagaggattctgtggatcttctctggggttctcaggggccatggaacatgtcagagcaaatgttggaatggattacccagaatgtgagtagtgtgagtggggcactgttggactcagtcccaaccccctaacgcgagtttgcatgaaaaattcatatcttacttagggccatcctaactttcttgcttcccaaagggagggtagatcaaaacataggggaaaggaggggtcataaacttgtttgaaggtacccgagggaaccccagactttataggtggtctaatctaaggccgggtgagtcgagcacatatacgaagccttcaacatagggaaaaaggtgcaggactctcttacacatgactagtaaaacggcgttagctatcatggtaccttccaacgaccagccaccatcccgtcttgtactactgaagcctcttcctctagaaaacacg

SEQ ID NO: 82108 - DNA, 862 bp, Homo sapiens
  sig_peptide (140)...(275): this location contains the signal peptide sequence, MHLLVSHAFLPFPLHGYSGRQRGAKQWRCHPARASRERPSEDNLS, Run with SignalP
  misc_feature (254)...(354): similar to gi1688030 in the genepept database release 114, Run with FASTXY 3.3t00, default parameters
catggtaggcactcagtggataccagtggtggaaggtggaggcaaagagcccttttataaaacaacaaggttaggaactcctctggcaggagccaagttcctccgagtttagatcacttcacataatgtgcccttgctaatgcatttgctggtttctcacgccttcctgccttttcctctccatggttactctgggaggcagagaggtgctaagcaatggaggtgtcatccggcccgcgcatctagggaacgtccttcagaggacaacttgtcaccagccgtcaaagaagagagtggctttgtggtctctgaacatctggcagcgctgcacaggaagctgagggggtgtcattaattgtgatgaaataatttaaaccatcaggaataaatgaggctgttaagctaagttcagattccatttgccatgcacatgtgtctagcagcctgtgtgcagttaaaagaaattgaattatattagctcatgagtagaagtgaaacagatactgtaaatgaaacaagttgctgtatagcgatgacatcgtgttgaaccatttcacagagttacagtttgtatgatcactgtatcaaaagtggtatattatttaatgaatttttatattataaaacattcctacggtatggagtatagtaaggaccagtggtttatgggtaggtagagaggatgtgagctggatgggcagaacaaaacaatccacaggttacgggccttgaagggagtgggagggaaatcacgcgtcattggagcccagttgccctgttagagcccgaacggagtccacatcacgccgcctgcacttgggcatacgcgatcacgggaacgctccagtggatccagatcgac

SEQ ID NO: 82109 - DNA, 781 bp, Homo sapiens
  sig_peptide (230)...(365): this location contains the signal peptide sequence, MKIFKCYFKHTLQQKVFILFLTLWLLSLLKLLNVRRLFPQKDIYL, Run with SignalP
  misc_feature (159)...(77): similar to gi6012961 in the genepept database release 114, Run with FASTXY 3.3t00, default parameters
aattcccgggtcgacgatttcgtgattcctgcagggcctgagcctccgcagagcccggcgttcaaggagaaaaaaggagccgcggatggcccatgttctagaactacatcctcggtcactgtcccagtacagccatctgtagcacctcctcagtaactgacggtgatgttcctttccctacgctgtttataccatcagcctggggttttctttggaggtgacacaaagaatgaagatattcaaatgttattttaaacataccctacagcagaaagttttcatcctgtttttaaccctatggctgctctctttgttaaagcttctaaatgtgagacgactctttccgcaaaaagacatttacttggttgagtactccctaagtacctcgccttttgtaagaaacagatacactcatgttaaggatgaagtcaggtatgaagttaactgttcgggtatctatgaacaggagcctttggaaattggaaagagtctggaaataagaagaagggacatcattgacttggaggatgatgatgttgtggcaatgaccagtgattgtgacatttatcagactctaaaaggttatgcttaaaagcttgcctcaaaggaggagaaaaccttcccaatagcctattctttggttgcccaccaagaagcaattatgggtgagaggcttatccatgctatataccaccagcacaatatttactgcatccattatgagcggggggcacctggaaccttcaaagttgcctgaaccaattactaagggctctccccc

SEQ ID NO: 82110 - DNA, 1400 bp, Homo sapiens
  sig_peptide (21)...(156): this location contains the signal peptide sequence, MLLLLLLLGLAGSGLGAVVSQHPSWVICKSGTSVKIECRSLDFQA, Run with SignalP
  misc_feature (21)...(956): similar to gi339010 in the genepept database release 114, Run with FASTXY 3.3t00, default parameters
gtgtgaggccatcacggaagatgctgctgcttctgctgcttctggggctagcaggctccgggcttggtgctgtcgtctctcaacatccgagctgggttatctgtaagagtggaacctctgtgaagatcgagtgccgttccctggactttcaggccacaactatgttttggtatcgtcagttcccgaaacagagtctcatgctgatggcaacttccaatgagggctccaaggccacatacgagcaaggcgtcgagaaggacaagtttctcatcaaccatgcaagcctgaccttgtccactctgacagtgaccagtgcccatcctgaagacagcagcttctacatctgcagtgctggagcggatagcggcacccaagagacccagtacttcgggccaggcacgcggctcacggtgctcgaggacctgaaaaacgtgttcccacccgaggtcgctgtgtttgagccatcagaagcagagatctcccacacccaaaaggccacactggtgtgcctggccacaggcttctaccccgaccacgtggagctgagctggtgggtgaatgggaaggaggtgcacagtggggtcagcacagacccgcagcccctcaaggagcagcccgccctcaatgactccagatactgcctgagcagccgcctgagggtctcggccaccttctggcagaacccccgcaaccacttccgctgtcaagtccagttctacgggctctcggagaatgacgagtggacccaggatagggccaaacctgtcacccagatcgtcagcgccgaggcctggggtagagcagactgtggcttcacctccgagtcttaccagcaaggggtcctgtctgccaccatcctctatgagatcttgctagggaaggccaccttgtatgccgtgctggtcagtgccctcgtgctgatggccatggtcaagagaaaggattccagaggctagctccaaaaccatcccaggtcattcttcatcctcacccaggattctcctgtacctgctcccaatctgtgttcctaaaagtgattctcactctgcttctcatctcctacttacatgaatacttctctcttttttctgtttccctgaagattgagctcccaacccccaagtacgaaataggctaaaccaataaaaaattgtgtgttgggcctggttgcatttcaggagtgtctgtggagttctgctcatcactgacctatcttctgatttagggaaagcagcattcccttggacatctgaagtgacagccctctttctctccacccaatgctgctttctcctgttcatcctgatggaagtcctcaaacaccatttccatacccaggcattctgggtccccactggagggttagtctgaagggcaatggctgggctttggaaaaccag

SEQ ID NO: 82111 - DNA, 590 bp, Homo sapiens
  sig_peptide (577)...(442): this location contains the signal peptide sequence, MFLLKWPLWVLQYVVCSLKDKIHKFFYIERVVGELRVLPQGWMVA, Run with SignalP
  misc_feature (231)...(563): similar to gi3947579 in the genepept database release 114, Run with FASTXY 3.3t00, default parameters
tttcgtctggctgtcaaaatactggactattcagggcatttgcccagcatgtactacacagactaaacatcacacaagaaggacctaaggatggaaaaattcgagtcaccattcttgcacggagcacagaataccggaaaatccttaaccaaaatgagcttgtaaatgcactgaaaacagtatctacatttgaagtccagattgttgattacaagtatagagaacttgggtttttagatcaactaaggatcacacacaacacggacatatttattggaatgcatggagctggtctgacccatttacttttccttccagactgggctgctgtatttgaactgtacaactgtgaagatgaacgctgttacttagacttggccaggctgagaggcgttcactacatcacttggcgacggcagaacaaagtctttcctcaggataagggccaccatccaaccctgggggagcacccgaagttcaccaactactctttcgatgtagaagaatttatgtatcttgtccttcaggctgcagaccacgtattgcaacacccaaagtggccatttaagaagaaacatgatgagctataa

SEQ ID NO: 82112 - DNA, 452 bp, Homo sapiens
  sig_peptide (245)...(110): this location contains the signal peptide sequence, MLPLFHFMVAKIRSTVVLTLEFFLLFKSTEHYIRPLNTNLQVWKR, Run with SignalP
  misc_feature (246)...(142): similar to gi3928080 in the genepept database release 114, Run with FASTXY 3.3t00, default parameters
tcgcttacttcttcaacccactgacctctggatttcaatggtctattttgctagcatttttttctttttcttgacatttcataatgtagccacatgtctcttaatttttatctcttccatacctggagatttgtgttcaggggccttatgtaatgttcagttgacttaaacagaaggaagaactctaaagtcaagactactgtactccgaatttttgctaccatgaagtgaaacaatggtagcatgatctcagatgttgccagctgaaatagtttgggatatatgctcatttgtcttataggtgtcttttctgttttttggcatcctgtgcttaatttctttttttgtaatctaagctttgttccaattcaaaaggagttgttattgtgtaacatgaagcttacatgcatatattgagctgctttatgaattttttttcctatttgaggacc

SEQ ID NO: 82113 - DNA, 836 bp, Homo sapiens
  misc_feature (1)...(836): n = a,t,c or g
  sig_peptide (215)...(350): this location contains the signal peptide sequence, MTWTKCPLPLGPAFFTQCCLIGLLVPLLGWGNQNTQWYPTSKMPD, Run with SignalP
  misc_feature (257)...(316): similar to gi930129 in the genepept database release 114, Run with FASTXY 3.3t00, default parameters
ccaccgccagattttcgcagggttttgttgatttcccctcaactttccacaggtatcttaaaagctttgctcactcatcccttctctgacttaggatttgagcatctttctgttatgctgttgccccactcctattgcaatactccccttcttaagaaagtttttctagactaatgtctagattaaacttcttttctttgacaataatgatgccatgacttggacaaaatgcccattgcctctgggtcctgctttcttcacccagtgctgccttattggactccttgtgcctctccttggctggggaaatcagaatacacagtggtatcccacttctaagatgcctgatctgaaggacagtaaaacaactgacctttgccagcatgtaaaacacatggtttaactagtcctccaggaacaacactgagcaatcctgacctgggactactttactcggccatctcctacttgagatgctccttgtctctctgttcaaggacaccttttctgagcctttcttgaacaagagtggaggaccgatagggcgattaaactgtccttgacacaactttaggttggtttgcctaaactactaggttctcaatctatatgaacctcctccagcattctaatttgtttgctctgtcttagacccagaatcccaccccatgtgcctaaccatagaccaatcttcctgccttaacttctctgctaccaattttgatgtagcccagtaagtttcagcatcatccctcaccaccccacagtncctgaccctgcccccacccccaccacacacacacataccagctcttagcatcaaatccccttccatt

SEQ ID NO: 82114 - DNA, 442 bp, Homo sapiens
  sig_peptide (193)...(328): this location contains the signal peptide sequence, MYGMLEWPISMYFVAFLHCFLCSGGNLGDSFQALPELCANCSSSP, Run with SignalP
  misc_feature (198)...(268): similar to gi3172278 in the genepept database release 114, Run with FASTXY 3.3t00, default parameters
agtggggccgcctctgaaaaaaaatgtgagagcagtcactcatgaaatgttgtttaaggggaaccttctggatccttttcatggcaccatggcaagaagaagctgtatcttatctatggaagataaagcatggagttggctaatggatgctgaactaaatctccatacccacttcatccgtgtttttggcttatgtatgggatgctagaatggcctatctccatgtattttgttgcatttctccattgcttcttgtgttctggcgggaatcttggtgattcttttcaagcactacctgagctctgtgccaattgttcctcttctcccagggtgttgtgctgcgtggtcatgtctccacttccttagccctgtccattgacagaaccttgggttctgtgatggctgcctctaaacccttgtgaaagcggggaatattcctccc

SEQ ID NO: 82115 - DNA, 647 bp, Homo sapiens
  misc_feature (1)...(647): n = a,t,c or g
  sig_peptide (276)...(411): this location contains the signal peptide sequence, MCPPNLFHGRLMRLLCNLIWLNTAHTHTIGLSDQIQATQYNLNFR, Run with SignalP
  misc_feature (343)...(399): similar to gi5832494 in the genepept database release 114, Run with FASTXY 3.3t00, default parameters
ccactcactaatgtttaagtggaccaggttatgttgtgagttattctaaatgtgtaaattgggagcatttgtaacaaggatatatatatgtgctatgcttctttttagataattttgttgtgtaataaagttatggggaaacagccagtttcaaaatccttggaagcttttatccatttggagggaattttatttcaaaatcactttgtaacttaaattgctccaaaaacattttaccctctaatgcccagtgtgtttttaaaatggaatggccaatgtgcccaccaaacctcttccatggaaggttgatgagattactctgtaatctcatctggctaaacactgctcacacacacactattgggttgtcagatcaaatacaggccacccaatacaatttgaatttcagatcaacaacagacaacttttaatataaatattttttaaattgcatggcaaatatttttactaaaaaattaattcatttggtttaatccttggaaacctcaacatttaactggcatcttgtatttttatttgctaaatctgacaactttacccaaagaaaacatcntgaatctctgacagttcctcagcatcactcacccaccctcacccatcttcattccattcctaattttaagccc

SEQ ID NO: 82116 - DNA, 383 bp, Homo sapiens
  sig_peptide (58)...(193): this location contains the signal peptide sequence, MASSYSLLPLQIIVTFTNFGIEMGIYMDSDVVRVFLLFAAMAFMS, Run with SignalP
  misc_feature (55)...(159): similar to gi4104717 in the genepept database release 114, Run with FASTXY 3.3t00, default parameters
caaaacggcaatttagcactttggattctaagctccaagctttactatttatgggatatggctagttcatattcactgcttccattgcaaattattgtgacttttaccaactttggtattgaaatgggtatttatatggactcagacgttgtgagagtatttcttttatttgcagctatggcgttcatgagcaaaaaccaattatccatatcatacaaaacattattattcacagtgactgaaaacaaaataatgatccattgacaaaataatcactcgccgcccatcctgaaagcagggcattcatacaaatttagacgcatgtctaaatagtatatgatctttatacattattatccgatacttatacgtatagcagatag

SEQ ID NO: 82117 - DNA, 391 bp, Homo sapiens
  sig_peptide (120)...(255): this location contains the signal peptide sequence, MLLLLWLDFHLSVHNLFSMFYAFLFFCSSFTTFFCIKYFLAQHLN, Run with SignalP
  misc_feature (107)...(222): similar to gi1184965 in the genepept database release 114, Run with FASTXY 3.3t00, default parameters
tatctttgtttctaaagtatgtatgtctctcacaggcagcatatagtcaaagcttaaagaaaaaatccagtctaacgatctctgccttttgattggcatgttcattctattcccattcaatgttattattgctgtggttggatttccatctatcagttcacaatttgttttctatgttttatgcctttttgttcttctgttcatcttttactaccttcttttgtattaagtattttctagcgcagcatttaaattccctttttctttttaagtgtatattttaaagttattttgttagcgtttgctccagggattacaaaataactttaatttatcaggatctacttcagattaatactaattttagtaaaatacaggaacttgactccag

SEQ ID NO: 82118 - DNA, 901 bp, Homo sapiens
  sig_peptide (497)...(362): this location contains the signal peptide sequence, MWLHENLQFLLQLIFHFYWTVPPWRDWCKVIQQARDRPGPNPLLP, Run with SignalP
  misc_feature (163)...(365): similar to gi3093358 in the genepept database release 114, Run with FASTXY 3.3t00, default parameters
ttaagagttgggtccctgttttggagatgtatataccccacttccctcactggaccagcccgccaggctgaggctccccctgcagtccctgtatgctccttcctatgcagtcggaggccttccctgtggtcctttgccctgcttctctgctgctgtgagggttgctccctgccctccagacccctccctgccctgccacggacacagaccccaggcagcatccctccccctcatgctgggcacagtgtggactgtttctcctctatgtgcaaactcatcacagtgtggactgtttctcctctatgtgcaaactcttcccaacccatcatgccctggaagatgccatgcccccatacgcagtgggagcagcggatttggcccaggtctgtccctggcctgctggatgactttgcaccaatctctccagggtggtactgtccaataaaaatgaaatataagctgaagcaggaattgtaaattttcatgtagccacattaaaagagaatgaagatcgggcgcaatggctcatgcctgtaatccaggcaccttggtaggctgagacggccggatcacttgatgtcgggagtttgagaccatcttgaccaacatgatgagaccccgtctctactaaaaatacacaaaatttaaccgtgcatggtggcacgccccctgttagtcccacccactggttaggataaggcaggaaaatccctggaacctggaaaggcggaggttggaacttacccaaaaacgccccctctgcacttccacctggggcaacagaaccggaacttcttcttgagaaaataaaagtagtgggggcgcgccccttcaaaggaatcccacgtcacagctgccctacaattcccgagccaaaaacatttttaaagagtggagcccc

SEQ ID NO: 82119 - DNA, 717 bp, Homo sapiens
  sig_peptide (30)...(165): this location contains the signal peptide sequence, MCESLAFLLLQFGYFALISFVNSILYSFDRRAYCNKVKIIAQKIL, Run with SignalP
  misc_feature (27)...(123): similar to gi1397318 in the genepept database release 114, Run with FASTXY 3.3t00, default parameters
gttagaccagcaatgtgggggccaccctcatgtgtgagtctctagctttcctcctgcttcagtttggctattttgctttgatcagttttgtaaattccattttgtattctttcgatagaagggcctattgcaataaagtgaaaatcattgctcaaaaaattctccacattttctctaccaatccttattgcttccttccaacaaaggacttatattactcaaagtgtgtctctacgtgcctagccctctatcctcagagaaagaaatgccatcttctctaaaagctaacttttccctggtatcttgatccccagtgtcttcctggttccttaggacttgttcccatagcattcctctccatctgatatgtctcaaacagttacactatagacaaattttgttgagctgattgtttgttttaaaaatcagtacatttcacttactcaaatctgaatttatattttcttctgaaaatttacaggatctgttaaccctgggcccagcattcttgcagggcaacaatccactggagctgtgcctttatagggaatgctcctggcaagttgccccacccctcctttaggcgacacctactgtttattaagactcttccttgcttaacatgggcttggactggacatttacttttgcggcgcaaggtacaactgaaatcaccctgaaaagccaaggggagggaggttggcaaaaatctaaaat

SEQ ID NO: 82120 - DNA, 734 bp, Homo sapiens
  sig_peptide (91)...(226): this location contains the signal peptide sequence, MRANCGVSRSLKLVLATLCLTVIRLQMMEASDLPATPSGLLCMRR, Run with SignalP
  misc_feature (183)...(314): similar to gi2633534 in the genepept database release 114, Run with FASTXY 3.3t00, default parameters
tgagaccaagtctggcccagtgcctgggcctcgttactgattgggaccaagcacccctttcagatccctggttccgtatttctctcctggatgagagctaactgtggggtttcaaggtctttgaaactcgtgctcgccaccctctgtctcactgtgattaggttgcagatgatggaggcctcagaccttccagccacaccttctgggctcctgtgtatgaggagacatggctgcaggcatctcacccccaacagatgcttcacctgaggctcaggaaccccacatcccctcctgtgtccttcctgaagcacagacaggagagaagagacgatactctgtgtggtcgtaccatcccgtggggtctccatgtcattcaagggctcccagctgccaagatagaaagcagaattccaagttcttctctagcagcccttctcaccagggcttccttaatgaaatgcacgttctgattcaagaggtctagggtgaggcccgagtctgcattgctaatcaagaaccggctgccccccatcctgtgacactgacgctgctagtctgtgtgccacacttggagcacggagaggctagagacctagaggcactcaacaatctttcccagttcttctaagatgcggaaaaactcgattaaaaacccggtcttgccttttaaaaaaggggctccccccaaaaaaaagggtttttcccacccaagcctttgagttttaaaaaaaaaa

SEQ ID NO: 82121 - DNA, 417 bp, Homo sapiens
  sig_peptide (160)...(295): this location contains the signal peptide sequence, MCLKQLFAKQVPVTEWPGAKALLSTLLLLNVFGMWEKLVTLGLPS, Run with SignalP
  misc_feature (203)...(140): similar to gi2769725 in the genepept database release 114, Run with FASTXY 3.3t00, default parameters
aataaattagcagaaattatgcatatagtccacgtggcacattctagaaggttaagcatttattttggtccgtggcagatatgctcaaagaactcccctgccatgtcaatttcaagggtctaaaagggaaagaaattgctacaaatacatacacagcaaatgtgcttaaagcagctctttgccaagcaagttcctgttacagagtggcctggtgccaaagctcttctaagcactctactgctacttaatgtatttgggatgtgggagaaactcgtaactctgggactgcccagtgtacggcgtctgtcacgtctgaagtgtgagcattccaaaggctcacagccacccagctcagaactcagcagggaagacaggaacaggggtcagcctgaatagaaagagactaaaagatacttt

SEQ ID NO: 82122 - DNA, 380 bp, Homo sapiens
  sig_peptide (134)...(269): this location contains the signal peptide sequence, MSVGLHLGFLAWFLPFLIPTSPLPLLFQLGALPNESLALYAWLRD, Run with SignalP
  misc_feature (137)...(289): similar to gi3929142 in the genepept database release 114, Run with FASTXY 3.3t00, default parameters
gggagttgaaggccactttcttggttggccctaagtggttgagagttcacaaacaccactccctccctgaggactaacagccattgactactggtctgcttgttaactgactctccagagctccccatgagctatgagtgtgggacttcacctgggatttcttgcttggtttcttccctttctaattcccacttctccccttcccttactatttcaactgggagcacttcctaatgaatcacttgcactttatgcttggctcagggattgcttctgggagaacataacctaaaatgtccaacaataaggaacagttaatgacatccatccaacacaatatcctttggctgttaagaacctatctctgaagaaaacttaac

SEQ ID NO: 82123 - DNA, 748 bp, Homo sapiens
  sig_peptide (58)...(193): this location contains the signal peptide sequence, MSSPCFQCFHLCCTIKVWPLCHHLQKAFPDFSIHVFSESDLSSFC, Run with SignalP
  misc_feature (79)...(236): similar to gi717157 in the genepept database release 114, Run with FASTXY 3.3t00, default parameters
tagtctatctgcagagctacctctacattttaacttaggttagttgtttcccttggaatgtcttctccgtgttttcaatgttttcacctatgttgtaccattaaggtctggcccctgtgccaccacctacagaaagcctttcctgatttctctattcatgtcttctctgaaagtgatctttcttctttctgtgaagtccaacttttaaaaatatgtttacaaaaatacttcttaggatcattaatgcattgttcctaagtcagagttctctgtgaatttattctatacaatcttctagtgctagtatataaactccttaagaacaagaatttgctcatgatagtagtcccctgcagtgtgtagattacataagtgttgagtaaatcttggagatcaggtatcctcattcaagaggaaaatgaataagagatccagttcagagacctacagtgagtgctctccgctgcaggcagggattgatgagctgcttcaactcttaccacccaccactctcaatcctatactctaactaatgaactctgctcaccgttgtccaagtgagttgaccctttggcctttccatgccgtggcctgtgcaccttcctgaacttggaatgcctttactctttgaaaaaaataagcctctgggcaaaaataggcctttgtcctttgggggttcctgggggttggaaaaaaatggttcctttttttttccccggggccggagaaaaaccccaactaagggttc

SEQ ID NO: 82124 - DNA, 732 bp, Homo sapiens
  misc_feature (1)...(732): n = a,t,c or g
  sig_peptide (94)...(229): this location contains the signal peptide sequence, MLYIECKSHKLVAPLAVFFALFFLLIFFWVAFSYPFELLFLQLRS, Run with SignalP
  misc_feature (140)...(230): similar to gi559221 in the genepept database release 114, Run with FASTXY 3.3t00, default parameters
ttctactttaatgtttcctgacaatacttgatttgtggggaggggaattttctgtatctttcctctctctctctagccgggcctttccaccttatgttatatatagaatgtaagtctcataagctggttgctcccttggcagttttctttgctctgtttttcctccttatatttttttgggtggcattctcctatccctttgagttactcttcttgcagctcagatcacgtcaagcagatattggggttcagtgatgtctggtgatgtctggaagtgccccatgtcagaattccagctgttcagcagcacaggaagattgtacacctgcaactgtgcgaatggtcctgttgcctcctgcattttggcctctgttctattaaggaagagtaaagatggagctcctcctgcctccatcacaaaagcacatatcatctgtccctttggattttacttccaagacgtgtgtcatccccaacgtgagttgccttatggggccggcagaacctcaggtatgtgcctgaaaaggaaaatatccttggggaaaatctgggaggaaaatttttttttttttccggggaggttgcggttatccgggagcactacctaaaaaagtagggcagtccacccacccccccccccctnccccccccccccccacgccgccaacctaaaacgnnaaaaagggcgtcccgaaaaaaacccccccccccccctccccccccccttgacta

SEQ ID NO: 82125 - DNA, 711 bp, Homo sapiens
  sig_peptide (677)...(542): this location contains the signal peptide sequence, MIRLCVRRCFQVFVWETTAISLFCFCDYLPVPMASFIVFIPVHSA, Run with SignalP
  misc_feature (378)...(300): similar to gi2624070 in the genepept database release 114, Run with FASTXY 3.3t00, default parameters
cggcacgagagtttacagtttaactaaagagttagacataagtaaaaaggtagatagcagtgtaatatttaagtcaagctagtcaatgcccaatgtcagtttaagtataaaatgggtactaactacaggctatttgctgttggaccaggtgttaagcactctgcgctatttcactttacatagggcaaccctgcgagacaagaattatacaagtgaggaaataagaggagagatatctgtttcgggcgcctttatggagcaggcagcaggaatggcttattctctttcagacacaggagacagagtgcccagaggcccatgatactttaaggagcccatgagaatattttcttttatagtcagaagaaaaaattattatactttcaagtggatttgtctttataccaacaaagttataaaataaatttttaaaaaatgttttaatgacagaaggggcttatgaaggcactcctcaaggggcttatgaaagtcactaaaggaaaggtcataatttggaaaggcaaagaagagggtaagaagctagctgagtgaactgggatgaatactatgaaggaagccatggggacaggaaggtaatcacagaagcaaaacaatgagatagctgtggtttcccaaacaaaaacctggaaacatcttctgacacataatctgatcatagaacagaagatccaaaatcaagaccattctgca

SEQ ID NO: 82126 - DNA, 382 bp, Homo sapiens
  sig_peptide (44)...(179): this location contains the signal peptide sequence, MLLSFPRCLIPAWGRSKRQGWQSCVLGLSRALACVPLWLLSSPAV, Run with SignalP
  misc_feature (211)...(272): similar to gi4163973 in the genepept database release 114, Run with FASTXY 3.3t00, default parameters
aaatgataaaaccaagagcagatcttgccatgatgtcccgtgtatgctgctgtcattcccacgttgcctgatccccgcctggggcaggagcaagcgtcagggctggcagagctgtgtgctgggcctcagcagggccctggcatgcgtgcccttgtggctcctctcaagtccagctgtgtgcatggaggaaacaggtcacgttaagtctctatattcttgaagtacctgaatgattgggagagccatggcgaggatcttccaggtcagcccccgtcgtgtgtgatgttccttgggctctgcggatgctcggtgctttcatcggtgtccacacctctttattccgctcctcctttgcttggctaatcctattttgccagtaagt

SEQ ID NO: 82127 - DNA, 724 bp, Homo sapiens
  sig_peptide (149)...(284): this location contains the signal peptide sequence, MHTKYFLSFHSTQICLALRVCRALLFGDAIMKGIKITAGGPLLPP, Run with SignalP
  misc_feature (425)...(319): similar to gi2467237 in the genepept database release 114, Run with FASTXY 3.3t00, default parameters
atgccatacatgatgagcaccttagagttttcctttctttcatcaactctgggctggactgcagtcttgcttgaggcaaggaatgcataaatagaacaatgggatcatctgagtggccagtaagcctggtgttttatgaacttcaagtatgcacacaaagtattttttatctttccactctactcagatatgccttgctttaagagtgtgccgtgccttactgtttggtgatgccattatgaagggcatcaaaataactgctggtggccctttactaccaccgcacctggcctgaaaattctctccaaattctcagatgcctagtcaactcaacgtaagatgtttgcctgggtttagggcaaactatggcctgtggggccgaatctgtgcctgtgtttataaataaaattttattgaaacacagccacgtccatttatttacctaattgtctatggctactttcatgacgtcaatgtcagagtgacagagatcactatatggcctgcacagcttaaacctttactctctggcccttatggaataactttagcgccctggtatcaataataaaggggaacttttttgtattgtggaaattgagaaagatatgagaaacccgcctttttttaagaagaaaatcgcagcctaacttatagatgtttctttttcaaataacaaaaattcaatggctttggccccccaagggaataatttgcccttccc

SEQ ID NO: 82128 - DNA, 405 bp, Homo sapiens
  sig_peptide (86)...(221): this location contains the signal peptide sequence, MGPWSSYFSFLELIFVICTMRVLERISLWFLDRQCINSHTYLQAH, Run with SignalP
  misc_feature (186)...(255): similar to gi2981449 in the genepept database release 114, Run with FASTXY 3.3t00, default parameters
gactgaagtgtggtccagtgggtagctttctggactggcatttaagagacctgggctccagttcaggctctaaattcacccagttatgggaccttggtcaagttatttctcatttctggaactcatttttgtcatctgtacaatgagagtactagaaagaatttctctgtggtttcttgatagacagtgtattaactcacacacctatttgcaagcccattctctcttgcttgcttctaccatgggggcgaacaggaaaataataaattttcccacttcccttgcagctaggtgtagtcatatgacacaatcttgactagtgagtccacagggaaagcctgaggagtttctagataagcttttgttttcctaatcaggggaactggggcatctaatgcccctttc

SEQ ID NO: 82129 - DNA, 736 bp, Homo sapiens
  sig_peptide (97)...(232): this location contains the signal peptide sequence, MITFKVPGNKSFITLICLLLLSLRDLSRSCCNGFPPCVGTSGVLV, Run with SignalP
  misc_feature (352)...(180): similar to gi5104893 in the genepept database release 114, Run with FASTXY 3.3t00, default parameters
ctcgtgccgaattgagaaaccactgacgaaatctacaaccttaattctataggtgagggaattttacctttggtagggtcacggtgttaggtcattatgataactttcaaggtgcctgggaataaaagttttataactttaatctgtctcctgcttttgagccttcgtgatctctccaggagctgctgtaatggcttcccaccctgcgtgggaacaagtggggtgctggtgggacaagtcgggggctggtgatgtactctatgtgtttgtaggtcagagctggaaaccacagagaacagcccaggtggtttcattagtctaggtgtgaggtcactggggggcggcagtaggattggagatggagggaagctttgaaaggaagagcccttagcattttaaagtatggttaagtttttaagttacagaaactggatatggaaaattaccaagagaacttagtcaaagatgatcctcaaatacccagccaaagtcatagggagaatgtggagactgtctgacttagatagtggaaaatctttctcaggtttcttttgttaaacttcagtaagtccctcttggggaggaatcttcttttggagaaagaaagcaggttgattccctggtgtcttttaagggtggggattcccatctgattgttggagaattttgggaaatggaaacctttttctcggggggggttgggtaaacactggttggtgggtaagatggtcacgcg

SEQ ID NO: 82130 - DNA, 356 bp, Homo sapiens
  sig_peptide (68)...(203): this location contains the signal peptide sequence, MIKLCHQLYNVYVCFFHLIVLGDIAIDYIIVPNISYLSISIPFVV, Run with SignalP
  misc_feature (92)...(244): similar to gi15225 in the genepept database release 114, Run with FASTXY 3.3t00, default parameters
tctttttttcatttttgcttatttatttctattctttgttgatatggaaaaatattttcacacagttatgatcaagttgtgccatcaactttataacgtatatgtgtgctttttccatttaattgttttgggagatattgctatagactacattattgttcccaatatttcctacctctctatatctataccctttgtagttactaacattagaggtagagatattttccacccctgtaatgtggccttggtcatgtgacttggaatgttagtagttctgatgtgcacagaggctgtacatggactttcagcattgggtttactctctcgggtttctgctgtttccatacaaagaa

SEQ ID NO: 82131 - DNA, 564 bp, Homo sapiens
  sig_peptide (290)...(425): this location contains the signal peptide sequence, MFYENKRREYLQDMLLSYRLLVAILVLLKKLTELNTITLICKSII, Run with SignalP
  misc_feature (257)...(374): similar to gi1197353 in the genepept database release 114, Run with FASTXY 3.3t00, default parameters
caatctgaagatatggttggaatatttgtctactccctgaatatttgatatagttcatgtttttaggtgtgataacatatggctatgttttttaaaagacatatttaaaagacatacctatccatactgacataaatatggctgaaaagatatgcttgtgtgatgtaatttaaataatttggagggaggatcaggagttaatgttgaaactcaattggctttgagttggttataatcaagcatgtgagcatttcttatactggaacctttacttttgcagatgtttgtaatgttttatgaaaataaaagaagagaatacctccaagacatgctgctttcttatagattattagttgcaatcttagttttgctgaagaaattaacagaacttaatacaattactcttatttgcaagtctataattttctaaacctaactctgatgcagtcctactcctaatatttacaaggcctagaacaagagtatataaatggcagcccacattctacgggtctaaatatatacaagttataaaccaagtcagcaaaataaaatgccatgtat

SEQ ID NO: 82132 - DNA, 740 bp, Homo sapiens
  sig_peptide (133)...(268): this location contains the signal peptide sequence, MNLINHNKTFIVIRGILGSWRAVLSLICAVFTYPCEGGIGIVNRG, Run with SignalP
  misc_feature (238)...(294): similar to gi2341036 in the genepept database release 114, Run with FASTXY 3.3t00, default parameters
gtgagattgaccaccttccatcggagtgtggaaacaggttttcatcaagatcctttccatgacattgtggcccccaaggacaatggaatggtggggctctagtcttcatctttctcagtaacagcataaaggatgaatctaataaatcacaataaaacttttattgtgattagaggaatattgggctcctggagggctgttctgtcattgatatgtgctgtgttcacttatccatgtgaaggaggaatagggatcgtgaatagaggaatatcgggttcctggagggctgttctgctgtcgatatgtgctatcttcagcaccttattcaacctcaatattttctgccagcaaaactgttgagaaggggaggagagtgccgcaaaggcagtgtgctgacacgacctaagccctggcacagtcattttggtgtttgcatgggtggcagcaacacagtaggaagataaagggctgcacacacaccacagagaccctgcccactcccaccctccggtgccccgaccttgccagctcctctgccatagaaatcctctcaagaaagtggactggatttgccacagcaggtaagggttttctaaacagtgatctgggaactgggattcgctaacattacccgggaaagataacctttaaatggctttgggggaggccaattatggagaaaaattccctttaaaaagaaaaaagaaatttttttaacgcccccgctttctccttttggg

SEQ ID NO: 82133 - DNA, 371 bp, Homo sapiens
  sig_peptide (109)...(244): this location contains the signal peptide sequence, MFGKRMELTNCILFTVCVLQSMDHIFIDLSSKSLKNNFEDYMKFG, Run with SignalP
  misc_feature (145)...(246): similar to gi5814113 in the genepept database release 114, Run with FASTXY 3.3t00, default parameters
gatcttttcatctgagattctctaattgaggagtgatgtttcttgatggtaggactcttcattcctgctatctggcataattcatgggacacattagatattcagtaaatgtttggtaaacgaatggaacttacaaattgtattctttttacagtatgtgttttacaaagcatggatcatatatttattgatctgtcctccaagtcactaaagaataactttgaagactacatgaaatttggcaacctattaatgaaggctattcataatatttctattaggatcctagagaggccagacataaaataatacagtctacttttattttactttttgagacaggatctctctcatcacccaaggtggactgg

SEQ ID NO: 82134 - DNA, 506 bp, Homo sapiens
  sig_peptide (142)...(277): this location contains the signal peptide sequence, MIIAIFLVLVLSQNLATSHQEMGSTALAFESRQDKYNTVEARLLA, Run with SignalP
  misc_feature (99)...(179): similar to gi950409 in the genepept database release 114, Run with FASTXY 3.3t00, default parameters
tgagcttcattatcatcaactgccattctctaagtaacctgatgccaagtaaccaagtagggattcactgtctgctgaatgaataataaatgaacgaatggactgggtacctggaacaactgtggcagattatttccagatatgattatagcaatatttcttgtcctggtgctctcccagaaccttgccacttctcatcaagaaatggggtctactgcccttgcctttgaatccagacaggataaatataatacagtggaagcaagattgctggctccaaggctacttcccttggttccttctcttaagacgctcgcccttggaacccagccaccatatgaggaggaacagccgactacaggaagcggccacagaaaggtgttccaatggagagagccccaactaaagtctactgtcacctagcaccaactgctagatatgggtgagcaagccttcagatctgtgctgtccaatatggtagccactagtgggtatttatatctaaa

SEQ ID NO: 82135 - DNA, 376 bp, Homo sapiens
  sig_peptide (112)...(247): this location contains the signal peptide sequence, MNIVFVILLFKDMQVLEVFVLLNVLTTLTIIAAGILCTSFCCKPF, Run with SignalP
  misc_feature (142)...(248): similar to gi58803 in the genepept database release 114, Run with FASTXY 3.3t00, default parameters
atggcttatttaaaaagtagaatgtttatgtatttaaacagataaaatttagaatgattttaattccagggtaaaatctgctccgaccagagagaaaaaactaattcatatatgaatatagtatttgtaatcctcttgtttaaagacatgcaagttctagaagtatttgtactgcttaatgttttaacaactctaacaataatagcagcgggcatactttgtaccagtttttgctgtaagccttttatatatattaatcctctttaaaaccaccctatcaagtacaagataataatttgatatggttgatgaagcaactgatgggaaaaaagagaggttaaataatttgccccaaatcttattaagtgatgtagcc

SEQ ID NO: 82136 - DNA, 378 bp, Homo sapiens
  sig_peptide (215)...(350): this location contains the signal peptide sequence, MLSYPGLAGSGPWGTELLYPFLTMLWSRALMNVFWTRSGLSTLGW, Run with SignalP
  misc_feature (248)...(338): similar to gi829342 in the genepept database release 114, Run with FASTXY 3.3t00, default parameters
ctttccctctctgggcctcagtttcactgactgtaaatgggaaacaacagtgaaagatctccaagggccctctggcttaaaaagcctggctgccagtgactcccctatcctgccctaggctatacactgggaggccccccagccctgttgatttgtgtctggagctatgggaggcagagggcagtggctgccccagggctcctccagccatgggatgctctcctatcctggcctggcaggctctgggccttggggcactgagctgctctaccctttcctcaccatgctatggtccagagcattgatgaatgtattctggactcgttctggactcagcacactgggttggcagagctgctttgcccatcacagcatagg

SEQ ID NO: 82137 - DNA, 370 bp, Homo sapiens
  sig_peptide (141)...(276): this location contains the signal peptide sequence, MRAGKLVVVWLKSVNLCLKEIREVTNWDRLRVESIRKKEEWPQPR, Run with SignalP
  misc_feature (261)...(352): similar to gi3250866 in the genepept database release 114, Run with FASTXY 3.3t00, default parameters
caacatcttaattcttgatgaacttatcgaggaggcagattgacagctgagagcaaggtccgggaaccttgctctggccttggggaccgagggtttgtaaccgttgggagacaggtggctgcagtttcagtatgaagtagatgagggcagggaaactggtggtggtgtggctgaaatcagtaaatctctgtcttaaggaaataagagaagtcactaactgggaccggctaagggtggaatcgatcaggaaaaaagaggaatggccccaaccaaggcatctgatgttctggccaacagtgcaggctctggggccgactgcctgtgtctggacaccagctctgccccttgctagctgagtgaatgcagtcag

SEQ ID NO: 82138 - DNA, 739 bp, Homo sapiens
  sig_peptide (58)...(193): this location contains the signal peptide sequence, MIRFALPWFSQIWLSKQTWTRLTHLAFLLQECNSMFYPKVSRTTV, Run with SignalP
  misc_feature (46)...(188): similar to gi1762081 in the genepept database release 114, Run with FASTXY 3.3t00, default parameters
ctggtactagaactcacagaactgccacagaaggctgaacagtcctgggcttttcacatgatcaggttcgcacttccatggttctcccaaatatggctttctaaacaaacttggactaggctcactcacttggcatttctcctgcaggaatgcaactcaatgttctatccaaaggtttcaagaacgacagtttttggatgtttatttaatcctctctcaagccgtgtttgttttgaataaatggcaaatgtgattagtaaatggaacattcattttgttagactgcctctaaactccagatataaatgggctggattttacagcttattttaacatttcctttttcctataccctttctctgatcagctcttcaacggtgatataatttcttttaatgcaaatgtacaaaacaatgttagtcctgacttttggcaagcagttcacaagtttgggtgaaaagacattgctcttgaaaaacaggtcatttttagatttgctatggctttccttctcactaggacatattgtgctgatgcagaacaatggagctaaggaggtctttagcttggcttgcatctatcagaactcagcagtacttttctttttgaggttcaaaggtattggcccaaaatttgggaaatgtggggtaaatccactctacagccccccccaaaacaccccctgggtttggggggggggaaaaaaaagggaatttggccgggcgcgggcgttaaaaaa

SEQ ID NO: 82139 - DNA, 378 bp, Homo sapiens
  sig_peptide (101)...(236): this location contains the signal peptide sequence, MSVYLFLSPFPVFFMNEPTFLSTKTCFYCRQSKDHSLRNTDLECA, Run with SignalP
  misc_feature (161)...(245): similar to gi808726 in the genepept database release 114, Run with FASTXY 3.3t00, default parameters
agagtttgttcccaaacttgggtgtctgtcagaatcgtgggtaacagatttttaagacctcatttccagctttttatgtagtaggtctgggttggggttcatgagcgtgtatttgtttttatccccctttcccgtatttttcatgaatgaacctacattcttaagcaccaaaacttgcttctattgcaggcagtccaaggaccactctttgagaaatactgacctagagtgtgctccttgccagttttcctcatttagtggggaaaaagaagttagatataaaaacctccctgactgcgacttcaaacagtggaggtgatggggttgctctgatttagaaagacagagtttgtgatctacggggaattgactagaacc

SEQ ID NO: 82140 - DNA, 742 bp, Homo sapiens
  sig_peptide (534)...(669): this location contains the signal peptide sequence, MLALFFHRFGSLLSFPLLSNFESWTTVYLSKPSGLLKFFYLPLTL, Run with SignalP
  misc_feature (146)...(13): similar to gi3065495 in the genepept database release 114, Run with FASTXY 3.3t00, default parameters
ccacgctgtgctgacatagcagggactgccgactggagccctgagctgtgctgccatttgactctctggcctgatgaggtgcgacagagatgtcaattttctggaacattgcacagatcacatatttatgcaaatgcttttctgtatctacaatcaaaaatggtcatctcagagaaggaaatttactaagccaacagaaacctcaatttttacaagttaaatgtggctctttccctctctgacaccaaaatagtttcaaaagctaggaagtcattaagaatggcttgtctgtcattcctacttagacaaggtgtgggattgataaggacacagaacaaaagaattcactgaacaggaaaaggaccctcagactaacaagactgttcttgaatccgcatcgaccccctttcctgccgtgaccgacgccgcatccctcccgtttcttttgttcattcaagtgctatcatcatacctgttctgcagctctgttgacactagcattctttgagtataacagtggtgactgatttcatatgcttgctttatttttccaccgatttggctctctcctgagcttccctttactgtccaattttgaatcctggactacggtttatctttctaagccttctgggttgcttaaattcttttacttgcctttaaccttaaattttcccatgggggaaggcttttcctgggtgggggggagataaaacttttaaaccttcctttttttggaaaa

SEQ ID NO: 82141 - DNA, 744 bp, Homo sapiens; identical to SEQ ID NO: 81348
  sig_peptide (233)...(368): this location contains the signal peptide sequence, MRQIAVFQRFMFPFLLPWLSCIFSSSQNSIYYVSTFIKCLALKSI, Run with SignalP
  misc_feature (278)...(338): similar to gi4096227 in the genepept database release 114, Run with FASTXY 3.3t00, default parameters

SEQ ID NO: 82142 - DNA, 790 bp, Homo sapiens
  sig_peptide (95)...(230): this location contains the signal peptide sequence, MLTPLLCSFAISKSFGLIPFSRISLVKSSDHLICCFYSFDTNIPS, Run with SignalP
  misc_feature (394)...(273): similar to gi4261807 in the genepept database release 114, Run with FASTXY 3.3t00, default parameters
taatttttctttttgatttaactactttggctaaggtaattaaaccactttgaggaagcattggcactttgagaagaatttttcaggagagaacatgctaactcctcttctttgttcatttgctattagtaagtcatttggtctgataccctttagtagaatatctttggttaagtcctcagatcacttgatctgttgtttttattcatttgacacaaacataccgagtacctgctatgcacggagcacttaggcagtggacaggtagagaggggcaaacctggcaggtgaggggcttggccaggcccaggtgtgatctccagccctgctttgggacctctggccattctgtccccacactgggcccagtattttcctctgcaaatgagcagggtgaccagacgagggctaagaaaccctcagactccaaacatgagtttggattcaaagagctacaggatccttgaaataaaatgaaatctcacagagatagtggttcctgggtatttttaaatctcggagtggattagcttcagatgtagttttcgggaggacttattggcttctgtttacctctcatatttatgagaacggtttaggattgaaccaagtctaagccaaactgtgatgtagaaggcttcggccttctgtactctccctcctcttttccccctccccgctttattttgtttttctctctttcctccgctctggattccttccgaaatcccttaaacaacgcccttgcgttctagttccctcttcgccttcaacagaacgccggctcgcc

SEQ ID NO: 82143 - DNA, 744 bp, Homo sapiens
  misc_feature (1)...(744): n = a,t,c or g
  sig_peptide (10)...(145): this location contains the signal peptide sequence, MLILYPLSLLQNFLFLSILPFFCHKVRIVLSLDHSAVKRDALVIQ, Run with SignalP
  misc_feature (237)...(120): similar to gi1698424 in the genepept database release 114, Run with FASTXY 3.3t00, default parameters
agggagcttatgttaattctctatcccttgtctttacttcagaacttcctgtttttatctattctccctttcttctgtcataaagttagaattgttctttctctggaccactcagctgtaaaaagggatgcacttgtgatacaacagggaagaatctcagaagtgctgagggagagaagccagacagactagaaaacatgctggctgattccatttccgtgggattctgtagcaggccagatatatcggtcatgacagaaaatagatcagatgtcacctgggtctggaaatgaatgagtggaattgattgcaggggaacacgagggaactttctggatagtagaatgtggcacttagctgtataccttgacacaactttgtactgtatgcttaagatgggcgtatttcattgcatgtatattatacctcaataaagctgatttaaaccataaaagatgatagagagttcctttgtatgctgatatgaatggtcaggtagagagggagtaattgatgctggaatcactgttggcaaatgggcaacactggaggagagggattggaatccagagtggatactcatccactgtccacaggcgggaatgganaaaatgtgatcccgatactggtgaaactgttaacttctggtggaaaagccccccaaggggtattaccggctcgccccccccaaaaaagaaattccctttttttggaaaaaaaacctggcgtcaaggcccctttttg

SEQ ID NO: 82144 - DNA, 394 bp, Homo sapiens
  sig_peptide (207)...(342): this location contains the signal peptide sequence, MLSLVGSSRGLGITGCLVLSLVGRLGRSGWAYNSTQGSDITGVYM, Run with SignalP
  misc_feature (290)...(70): similar to gi2792416 in the genepept database release 114, Run with FASTXY 3.3t00, default parameters
ggtcttttgagtctcttagggcaaatgcaggctgagaaaaatgatgtggagcagttctgagtgaagacttgttatgagacgaagagagcaggtgaacggtggggtccagctggtgtggatgaagcacctgctgtgtttgagacggagtggaagcagtactctgcttggcccattcatcccgtggcctaggcataactgagcatctcatgctttctttagtgggttcatcccgtggcctaggcataactgggtgtctggtgctttctttagtgggtaggttggggaggagtggatgggcttataattctacccagggctctgatatcacaggagtttacatggcatttggcttgttttgttaaatcatcctaccctgattaaatacctcttgagg

SEQ ID NO: 82145 - DNA, 736 bp, Homo sapiens
  sig_peptide (50)...(185): this location contains the signal peptide sequence, MLFQRHLAAACSSIFFFEITSSKFTSLLDLHVLYSIVLQVTILPN, Run with SignalP
  misc_feature (282)...(397): similar to gi5924126 in the genepept database release 114, Run with FASTXY 3.3t00, default parameters
ctattctgtttgtaacccaggcagttcattttgagctcaccactttcttatgctttttcaaaggcacctggcagcagcctgctcttcaatattcttctttgaaatcacctcatccaaattcacaagtttactagatctgcatgttctgtattccatagtattgcaggtgacaattttaccaaatgttttgccactgcataatactgttgtcattattccagcctcctataacaattacatgactacctgctgcccattcccaaagccagtgccacatattttgggttttagttatggcagcactgtactttatacatcaaattctgaatcagcccaatttttctgactttcaaaacacccaaagtcctagtgccatacaacaatatacgcatatttcctactcatgcatttttgggttagctggagattggctggtcttggcgagactcagctgctctctgaggattaggtcaggtcctgggctgttccacatatctctcatcctctttaaaccagaggctagctgagtcatgttctcgttgcaaaaagagatcaagagacaagcctaactatgcaagacctcaattaatatcccggaaggacctttcttttttaagaaaaggggaaggggttatcttttgctggaaaattctctaaaaaaccgggttgccccccaagataaaacccggggcactttggggggaaccggttaggaacccttgagaaaggggcccca

SEQ ID NO: 82146 - DNA, 688 bp, Homo sapiens
  sig_peptide (126)...(261): this location contains the signal peptide sequence, MLGLIPCVIGSLVFLDYKQDNLTPFCVWGSLYLRSLCERESDLHH, Run with SignalP
  misc_feature (349)...(207): similar to gi5881848 in the genepept database release 114, Run with FASTXY 3.3t00, default parameters
tattatccgtgtttacctccagataataaaaagcctaaacagttaagtgccgtaaagttgaacatttagagaaaaagaagagtttctgtaacccattaactgaagaaatagataaaagttctggcatgctgggattgataccttgtgttattggttcattagtttttttggattataaacaagataatctaacacctttctgtgtttggggaagtctttatcttaggagtctttgtgagagggagagcgatctccaccattaagaaagctaattgttcactttccccaccgcttttgcagttaggatgcaatcctgtggcctccatgactggcagtgcttgcctacctcagaggccagtgatctgcagaggcaggcggtaatactaatagaaataaagtgcacaataaatgtagtgcgcttgaatcatcccaaaaccatctctccacccccaacccccaccctgtcctttgaaaaattgtcttccacgaaactggtccccggtgccaaaaaggtcagagaccgctgctgtagagcaatacttgtcagactttctcacgtcggggccttcatggacgaaattgaagacaccgttttgggtattctgagggttttaggggatctttgcacatctaaaacatctgtggtgctgtgtgccacacacaacagttggcaagctctgccctatag

SEQ ID NO: 82147 - DNA, 379 bp, Homo sapiens
  sig_peptide (30)...(165): this location contains the signal peptide sequence, MTNFFHLLLPLLPSLFSPSSKTHSFNIHKIIIIILFFNSIFLYPR, Run with SignalP
  misc_feature (30)...(214): similar to gi1619813 in the genepept database release 114, Run with FASTXY 3.3t00, default parameters
ctattttgagttctagattccagtcttagatgaccaacttctttcatcttttactaccacttctaccatctctcttttccccctcctcaaaaacgcatagcttcaatattcataagatcatcatcatcatccttttcttcaacagcattttcttgtatcctagagattaccttaaaataaggaattggctacaaagtaataccttggaaagagaaatagaatggatcacctctataaggtgcttatgtaactctggaactacgtttatatttccattaaccacaaagtccacatgagtcatacttatttttctgtctcaggctactaaaatagaacatgttctctagaggagaacatcaaggagttcttttatttgtcg

SEQ ID NO: 82148 - DNA, 378 bp, Homo sapiens
  sig_peptide (220)...(85): this location contains the signal peptide sequence, MGFRFLLCFVFQVTTGCTILVASRNISAWNEYFLCKSNLQTYNYH, Run with SignalP
  misc_feature (202)...(127): similar to gi1813528 in the genepept database release 114, Run with FASTXY 3.3t00, default parameters
catttgttttagatgccggaacaatctgttcatacgtgtttaatgctcaagcagaggccacaagtctgtggaacccacataataatggtaattataagtctgcaggttgcttttgcataaaaaatactcattccatgctgagatgtttctgcttgctacaagaatggtacacccagtcgtgacttggaaaacaaagcaaagcaaaaaccgaaagcccatagctccaaatgccacatggaactcgtgaacagctatgttccatcacttctgaaagaatacttaggcctattctgagaattcccatgaccgattttatggattttgtgtgaggcgttttttttccctggaagtcaaggcctcattcaatgaagtctgtca

SEQ ID NO: 82149 - DNA, 403 bp, Homo sapiens
  misc_feature (1)...(403): n = a,t,c or g
  sig_peptide (111)...(246): this location contains the signal peptide sequence, MREHAAVTACTALRSPCFRTGQRPRPWRAAPLLLTSLLAATQALR, Run with SignalP
  misc_feature (271)...(156): similar to gi825541 in the genepept database release 114, Run with FASTXY 3.3t00, default parameters
aatacatggcctggaagcaaaaatacaaatttatgtcacacaaggacagagtgacgggagcctccaaggacccacttagaacttcctgagggtgaccgcctggctaggcaatgcgggagcatgctgccgtaactgcctgcacagctctgaggtcaccatgctttaggactggacagagacctcgaccttggagagccgcgccccttctcctcacttccctcctggccgccacccaggctctgagagaccgtctgacatttacgggaaggcccgttacggcatcatttcttcccactcttaagctttattttggattctaaaacttggaatgaaaacaaattgagcaagaaccatgaagttatcattctttgaagagctcaagacagagaggaacactggaaan

SEQ ID NO: 82150 - DNA, 395 bp, Homo sapiens
  misc_feature (1)...(395): n = a,t,c or g
  sig_peptide (55)...(190): this location contains the signal peptide sequence, MCKTLWVWPVMVCVAMISGVGVCFGVCDTAVGLQDSALSPSCGKR, Run with SignalP
  misc_feature (155)...(69): similar to gi156990 in the genepept database release 114, Run with FASTXY 3.3t00, default parameters
aatacaatggggcttaagaactcagggccctgtggcaggggacagtaggtgcttatgtgcaagaccctgtgggtatggcctgtgatggtatgtgtggctatgatatctggtgtgggggtctgctttggggtgtgtgacactgctgtggggctgcaagactctgcattatctccatcttgtggcaaaaggtcttgatgtgactgctgcagatcactgtgtgatgggatatgagtgtgaatgaatcacaccctcaaccctcagccccaggccaggatagaaaagaactaagcggctgcaggaggtgatggttaatgcaggcctgggatatggcccctagagcccagagtccagagcccaaattcctgctgggaggccccattcactctcctgcctcn

SEQ ID NO: 82151 - DNA, 398 bp, Homo sapiens
  sig_peptide (26)...(161): this location contains the signal peptide sequence, MNRLICLCVSCCASDAKIQIASVCLSAFSSRERFFLSFCACFTLE, Run with SignalP
  misc_feature (151)...(44): similar to gi1850906 in the genepept database release 114, Run with FASTXY 3.3t00, default parameters
aatacatctcttctggcatttagaaatgaacaggttgatatgcttgtgtgttagctgctgtgcttcggacgcaaagatacaaatagcgtctgtctgtctgtctgcattctcctccagggagaggtttttcctttccttttgtgcttgcttcactcttgaatgcagcacctattttttgtttcctatcttccttggtgggatgtaagcttcctcaggatggggactcttctatgataatagctgtatccttagcacctagaatggtgcttggcacataatacgcattcaagaaatagtctagtgcagatcaatctcccagtggaaagagatcaacttctcccgctgtgctttttcctctcaatcagtgtggctgtcacagggactgttcccaaggctct

SEQ ID NO: 82152 - DNA, 411 bp, Homo sapiens
  sig_peptide (117)...(252): this location contains the signal peptide sequence, MSSSRVGLRLAACLLNVSEAGRKYIVENIAKAALLDKNGKKHPQV, Run with SignalP
  misc_feature (322)...(397): similar to gi37498 in the genepept database release 114, Run with FASTXY 3.3t00, default parameters
tttcgtgggaatcccagcagcggggttctggccccagcacgcgttgcggcagcctggcgagcgtccttgcggcctccaagtgccggtggggtgcgtgcgcagggggcaaaaaaatcatgtcttcttccagagtggggctccgtttggctgcctgtttactaaacgtttcagaagccggaagaaaatacattgttgagaacatagcaaaagcagctcttcttgacaaaaatggaaagaaacatcctcaagtttcagtgctcaatatattttccgatcaagactacaagagatcagtcattacaatagcaacttctgttgataagttggagacgaggtctcactatgttgccctggctagtctccaattcttgctgtctcgcgagcctcccatcttggcctcccaaagtcctg

SEQ ID NO: 82153 - DNA, 441 bp, Homo sapiens
  sig_peptide (230)...(365): this location contains the signal peptide sequence, MAPTWRCRMAVGILPVFLHGRKGKYAPMETRITDDHMAYILKLGF, Run with SignalP
  misc_feature (145)...(13): similar to gi1666185 in the genepept database release 114, Run with FASTXY 3.3t00, default parameters
gaattcccgggtcgacgatttcgtctcggcgccggaagacgcgaacgacccgggccgcggtggcgagacggggccgcgcgccgcctggggggctggtgtgagacccgaggctccgatgggaggaggtctggtctgtccacggggccagcaaaacaccttcatcccaatttcatcgcattccttctaagtatccgaatttgaagaaaaagcaaaactgttgagtggtcagatggcccccacctggcgttgccgaatggctgttggtatcctcccggtcttcctccatggccgaaaaggaaaatatgctcccatggaaaccaggataacagatgaccacatggcttacattctcaagctaggcttttgttcgtttttcagtcatcaagcctaactgagcatccaccctgttgctgaaatgctgctggggatacaaagacaaat

SEQ ID NO: 82154 - DNA, 366 bp, Homo sapiens
  misc_feature (1)...(366): n = a,t,c or g
  sig_peptide (132)...(267): this location contains the signal peptide sequence, MYQCESGIQVFNFFLILFHYTTLFHFTIPPILLHYIILSYWNLDV, Run with SignalP
  misc_feature (161)...(287): similar to gi4379163 in the genepept database release 114, Run with FASTXY 3.3t00, default parameters
antacaccccccgacaggatgatggtgctgttaaaggcctatgaatcatccatctcaacccttcgttttacagataaggaaagtgaggcctacagatgttaaatggcttgtccaaagtcacataggcacggatgtaccagtgtgaatcagggatacaggtcttcaacttctttttaattctatttcactataccaccttatttcattttactataccaccaattttacttcactatatcatcctatcttactggaatctagacgtccctttttctcctctgctatgcattaatactctgttcgactaaatataaagtgtgtacctctgggctcacagtcatttaaacatagaggcacacaaaactc

SEQ ID NO: 82155 - DNA, 422 bp, Homo sapiens
  sig_peptide (79)...(214): this location contains the signal peptide sequence, MNICNFLNLWIVCIAYLIEQIWGHGWSEMGCPSVTPPLGSGAQWG, Run with SignalP
  misc_feature (97)...(243): similar to gi3979955 in the genepept database release 114, Run with FASTXY 3.3t00, default parameters
aatacattgcccttcttaaaaaatattttctaatgaacttttgaaaagctagaggaaaaggaagtgctataaatatccatgaatatatgtaattttttaaatctctggatcgtgtgcattgcttatctgatagagcagatctggggacatggctggagtgagatgggatgcccgtcagtcacccctcctcttgggagtggggcacagtggggtggagtgggtggtcagcatgagtctggccaggaacatttccatggaggcccacgtgacacatgtgagccccaggacttggggaactctgacctcccctcttctgcgtcagcctttccccctcccctcatgagcacaaagcccccagaccttgggaggcatgaatacaaacatgcactagaccagcattgtgccagagacaaagacaactc

SEQ ID NO: 82156 - DNA, 2038 bp, Homo sapiens
  sig_peptide (1091)...(956): this location contains the signal peptide sequence, MLYLLLFPGVSYLRSLFLGRPIGPGITSDFTLILFSNLLDSWPLS, Run with SignalP
  misc_feature (605)...(1902): similar to gi5931821 in the genepept database release 114, Run with FASTXY 3.3t00, default parameters
tttcgtcttggccgcgcagtgccggaacccggctgcagcggtgggaaggcgggggcgtgccggcccagcggggagaggcatctgcaggggctgctgagagtaaatacttggcgcctccagctgctggccaaggagacagatggagctcaagttgggagatacgccctgagagccgatgatagacacaagtccagatctcggattttgatactgtatgttccctgggttcctgagagaggacattgaggagtaggagtcggcgattaaggagatcggtacaattgggaagcctcctgtcagagcttccagcaatttcctcatcagaggtggacaagccctatgggctaagacagagggtcctcagaaaggagtgcggacgccgtcatgctgcagcagctcctgatcaccctgcccaccgaggccagcacctgggtgaagttgcgtcatccaaaggcggccacggagcgggtggccctgtgggaggatgtgactaagatgtttaaagcagaaggaactgttaaccttcaaggacgtatctgtggacttcactcaggaggagtgggggcagctggcccctgctcaccggaatctgtaccgggaggtgatgctggagaactatgggaacctggtctcagtgggatgtcagctttccaaacctggcgtgatttcccagttggagaaaggagaagaaccatggctgatggagagagatatttcaggagttccaagttcagacttgaagagcaaaacaaaaaccaaagagtcagccttacagaatgatatttcgtgggaagaactacattgtggcctaatgatggaaagatttacaaaaggaagcagcatgtattccaccttgggaagaatctccaaatgtaataagctagaaagccaacaagagaaccaaagaatgggtaaggggcaaatccccctgatgtgcaagaaaacattcactcaggagagaggccaagagtctaatagatttgagaaaagaattaatgtgaagtcagaagttatgccaggaccaataggtcttccaagaaaaagagatcgtaaatatgacacacctggaaagagaagcagatacaacatagatttagttaatcattcaaggagttatacaaaaatgaaaacctttgagtgtaatatttgtgaaaaaatcttcaaacagcttattcaccttactgaacacatgagaattcataccggggagaaacctttcagatgtaaggaatgtggaaaagcctttagccaaagttcatctcttattccgcatcagagaattcatactggtgagaaaccctatgaatgtaaggagtgtgggaaaaccttcagacatccttcatcgcttactcaacatgttagaattcataccggggaaaagccctatgaatgtagggtatgtgagaaagccttcagccagagcattggactgatccagcatttgagaactcatgttagagagaaaccttttacatgcaaagactgtggaaaagcgtttttccagattagacaccttaggcaacatgagattattcatactggtgtgaaaccctatatttgtaatgtatgtagtaaaaccttcagccatagtacatacctaactcaacaccagagaactcatactggagaaagaccatataaatgtaaggaatgtgggaaagcctttagccagagaatacatctttctatccatcagagagtccatactggagtaaaaccttatgaatgcagtcattgtgggaaagcctttaggcatgattcatcctttgctaaacatcagagaattcatactggagaaaaaccttatgattgtaatgagtgtggaaaagccttcagctgtagttcatcccttattagacactgcaaaacacatttaagaaataccttcagcaatgttgtgtgaaatatactaaacatcaaagaatttatgttggagcacaagattttaaatcagtggttccctgatccctcaaaaatccatttgtttttggatttccaaaaacgaacattaaaaaaaaatggtttggcaaaaaaaaaa

SEQ ID NO: 82157 - DNA, 1233 bp, Homo sapiens
  sig_peptide (859)...(994): this location contains the signal peptide sequence, MRMQLCAAFLALLAPRLVQEIFVELSLCQVYILSVLDHQRKSTLY, Run with SignalP
  misc_feature (728)...(842): similar to gi1911416 in the genepept database release 114, Run with FASTXY 3.3t00, default parameters
gccctgcacaaaagactcgtgcgctgcccggacacgggctccccattgccgcccttctcctagcctcctgtacaccgagaggcggcttccgggacggccccgagggtccgcaggatccgtcagtcggtcagtggattgcctttgtggtcccactatgggccaagccctgggacttaaattctgcagaaagcaaggtagttggatcgaggtccattccaggactaagagcctactgcgtgtcaaccaagttgatttatagagaaaaaaacctgaggcataccgtctcagagtcacacagttatgaaaacccaatccactcaacatatccttacccacattctaccccatctcctccaacaaggacactcaactacaatgccaaagaaagagtcaatgattttgagctggatgggggcctgtattcatctaggtattatcaagaagtactgcccctggctgagcccaccaggactgtcaggacaaccccaaggctgtgctccaagagcctgctcgggcctgtaacaaattgtaaaagagcaaagctgcttcctactgaggcccctgggattaagccccgccagataaaccacagtgagggcaacacctccaacacagggaaaaggatgacctggcagcacaagccagggccacagaaagtcctggataaacatttacagaatgaatgtgcattttgctgtgaactcatcatgaacatgacacagagccctattcccctgagggaagacacagctggatggtcccagaaggacccagcacggggagccctcaaggtggggcagctcagggaaaggctggtctgctatggggaaaagctgggactctgggtacccccaggcaatgaggatgcagctttgtgccgcattcctggcactcctagcaccacgcctggtacaggaaatatttgtggagttgagcctgtgccaggtctacattctttctgttctagaccatcaacggaaatcaacactttaccagcatgtcccaaaccaggtgtggtccttgggatgcttctacatgtttagagagaaaaagggctccgttatcagcaaagggtcttaccctcaggctcgatctcatttcaccgaacgctcgctcactggatgtcccatgcaaggccgtgtacgacgtgacttatacccgtcagagacgccctcagaacacctgcaatccttcatattcacccttgacagtgactacagaaacagaaaccag

SEQ ID NO: 82158 - DNA, 1030 bp, Homo sapiens
  sig_peptide (141)...(276): this location contains the signal peptide sequence, MLWLFKKPLLVGLIRFKLTMYLGDTQAWQNLSEFRAKFIASTSPF, Run with SignalP
  misc_feature (806)...(634): similar to gi3322398 in the genepept database release 114, Run with FASTXY 3.3t00, default parameters
ggtacgacccacgcgtccgcccacgcgtccgggtttcctgtgatggggtgaaggggtggatagtaaagccagagaggggaattggaaactcagtaattgcagtttgccgaggaacaagagctgaggggaaaaaagaagagatgctttggctttttaagaagccacttttggttggactaattaggttcaaactcaccatgtatcttggtgacacacaggcatggcagaacttgagtgagtttagagctaaatttatagcttcaacctccccctttactattccccactctgctcttttctctcttaagaaaaatggtgaaggtagtccacatgaagtagagatctctctcagtctctctctcttcatgttctctgtggaaagatgacctccttttcacaagattaggggtggctggttatggaagagctgcttattagcagtgggcctggtataattgcttttcaaaaatctttctaagaaaatctttaaaggagttgtttttcacaaattgtaacagttccttgtaattggagtctgtaggcttgtcagatcttcagaaaaggtattgggaaagggccaagggatgtttattactaatccatggtaagaggtttttgattttctgtcagtcttcaggaaagcccggaataaaacggggcttgcctgcttccagctggctgggagcaggttgttctgttggctggaccaattccagcgacacagattttcttctggtcctaaccctctgtgagcctgccatgaatccgcagctcgggaaaccttaaacttcacaacagagccgctcttggccaagggacgcaaagggatgggaaaacatgacttcacctctcagtacggcctaatgcctgccccaatgtatagtgtcgcggtggaggccaccaagcggagactggggataactacacatggggaccgcacgcctatagctacccaggcccggcgtgagctagcatcatttggatacacctcgccgcgcgcgttgagttgtcggagcaattcgtctccggg

SEQ ID NO: 82159 - DNA, 389 bp, Homo sapiens
  misc_feature (1)...(389): n = a,t,c or g
  sig_peptide (203)...(338): this location contains the signal peptide sequence, MFLQFYLLSLGFFIPIKRMKCPIETKHYARFLLLILQKSLFFCIE, Run with SignalP
  misc_feature (185)...(63): similar to gi396221 in the genepept database release 114, Run with FASTXY 3.3t00, default parameters
agtcgaactttgcacttataagngccttcttagatgaaagccactacatgactagaatcccatatatgtttgcccttgtctactgaacacaatttggaatgactcatatagcttaaaaaaaaatggcagactagagggaaattgaaaattcaaaaattctggatgtttagaaaaccagtgacaagccacaggccttcttgacatgtttctccaattctatttactctcattgggtttttttataccaatcaaaaggatgaaatgccccattgaaacaaaacattatgctagatttctgcttctcattctacaaaagtctttatttttctgcattgaactttgaagtaacatttcatttcctccacaaaaagagtaggattacttcatct

SEQ ID NO: 82160 - DNA, 408 bp, Homo sapiens
  sig_peptide (56)...(191): this location contains the signal peptide sequence, MCIFIRTTFWQVTVKWLFLIISIHHTVFYRVKIKMLRKGCLHYSC, Run with SignalP
  misc_feature (285)...(198): similar to gi4154623 in the genepept database release 114, Run with FASTXY 3.3t00, default parameters
ctttattttgatttttttcatattttattattactattgattctaaagattagtgatgtgtatatttattagaacaactttctggcaggtaacagtaaagtggctttttctaataatatcaatacatcatacagttttctatcgggtcaaaataaagatgctgagaaagggatgccttcactattcttgtaaaggcatgatgaaagtggcctggagagctcccaccagatgaatgaggggtggaggcttttgtgagtagatggctagccagcttctttccaggtgtggaccatcagaatgggcactgggtgattcattctaattgaacaatcaattaccaaccacttgttgtgtgagaagacctctgtctaggctatgagaaagacaaggtcccatcatccttgagga

SEQ ID NO: 82161 - DNA, 868 bp, Homo sapiens
  sig_peptide (500)...(635): this location contains the signal peptide sequence, MPCSVPETLFSLLWLAPSHHSGFSSNEASLRTDLLFATAILYSLW, Run with SignalP
  misc_feature (500)...(579): similar to gi4056498 in the genepept database release 114, Run with FASTXY 3.3t00, default parameters
agttgttacaccatctaccctaattcctgaattccaaaaccttggagtcttctttgatttctttctcatgttctccacgttagtaggccctgctgctttccctcctcagtgtatgctaaactcatttaactttctccatttttactgacaatgcacaccatcatactctgtcatctatgccactgtaacacattcttaaatggtccctctgttcaactgttgcccctgcaattcattctatatgtagtggtgaaagtgaatacatataaacacaaatcaagttttgttacttgatggaaaccctccaataatcattcactatgaataaaatccagaccttttgctatgaccctcaagaccccatgtgacctggtccttgcctacctctctggccttggctctcacaattctgtctgtactgatattcaccagtcatattggttgtctcttttttcctaaattaagcactctaaactcatttctgcttcagagactgcagatgccatgctctgtgccggaaactctcttttcccttctctggttagctccttcccatcattcaggtttcagttcaaatgaggcttctctgaggactgatctattatttgccacagccattctttattctctatggcatcctccatattattttctttataatacttcttaatgtgtgaataattactgtgtggatgacttccttacatagttatttatttgttaatgttcttgcttacatttcattgtcagcttctagaagaagagctctttaagagcagtgaccctgtctgtcttgatcatggaacaaagactggtatatccagatgttcaataaatattttcctgtatgaatacatgactatgtttt

SEQ ID NO: 82162 - DNA, 1001 bp, Homo sapiens
  sig_peptide (84)...(219): this location contains the signal peptide sequence, MLFTSFVYGLIFILFDFYFLSFVERDVKIFNCNGEIVLFPFNSVH, Run with SignalP
  misc_feature (36)...(224): similar to gi463181 in the genepept database release 114, Run with FASTXY 3.3t00, default parameters
cccacgcgtccgaccaagtgaacttgtaaagaacatgtgttctgcagtttttaggtgttctttatatattaagggggttgataatgttgttcacatcatttgtgtatgggctgatttttattttgtttgatttttattttctatcatttgttgaaagggatgttaaaatcttcaactgtaatggtgaaatagtattgtttccatttaattctgttcatttttgcctgatatgtctttatatacacatttaagattatgtcttcctgatgagttgtgaattataacattatgaaatgttattctccggaatattattctctccttacagtctattttactcaatattgatatagcaactccatcctttatatacttactgtttacatggtgtgccttttcagaagcatttactttcaattatagatagcatatagatgagacttgtttttttttaaatctattctgaaaatttctgattttattattaggaatatttaggggaaatgtttaataaattaatattttgggtttttttttctgccatttttcatatttatccctcctcctcccccatgaaaaataaaacatcttttcttaaaactagtacgaaggataaaaatacgcttcccctctcctcgtgggctcctttctcagctctgtcttctaacaactctcaaacccccgtttcataatttcctctagacccttcactcttatgggctccaattcccgacaatagtctacatccctgccattacccttcctactgcagcctcactgaagcctaccttcacatcacttttgctatatcacctgctctaaccctacctactatcagtccagctactctttcattagatagattcttcataatatacccctcgctaaacctacaccctagcgccctgactactctccccgcatcccatccacactccgcacacatcgtcccacgactaatacgcatgactacctgcataacctcactctctcttaatttc

SEQ ID NO: 82163 - DNA, 1301 bp, Homo sapiens
  misc_feature (1)...(1301): n = a,t,c or g
  sig_peptide (99)...(234): this location contains the signal peptide sequence, MILNLSSLTLVFAWNYPLHLMISLNVSCSCYSDDISGIYRSVLRQ, Run with SignalP
  misc_feature (93)...(236): similar to gi4894225 in the genepept database release 114, Run with FASTXY 3.3t00, default parameters
cacgagagaaattgttggcaaattgtgaaatttattgttgtataatgctaatagatcagttgtcctgatgtctttgctgtaatgatttctttataaaaatgatcttaaatctgagctccctaactttagtttttgcctggaattacccattacatttgatgatatctctaaatgtcagttgtagctgttactctgatgatataagtggaatatacagaagcgtacttagacaaaagttaggttaatatctgaactacttcctccttgtgtatttaagagaatattgacttaagtttctagaatcctcaactaatcctaagtttattttctttgtctagaatactatgctgtttttgtttttggaaggaagagatataggcatagtttcctgctctcaaggagcttcaaaggctgtaccagtggggatgccattggtatttttagctggatagttgttattcagaaaagcaggacaagtaattatgattcctggtccgtacctggtaatgccagtaatgttaactctagctgggtgttgacatctggtcatttacttggcaatctttcttttttttttttggcgtttggggaaagggtttaggacttcaaagacggcccgggtaagtcaacgcagggcccgcacaggggtgggttcgctccggggttcccgcgctgagcgggcacaacaccgatttgtggcgcgacggggatggacccgcggcaaggtgaggattgcatcggggcgccccggaccggggggcactacaccctccgctgccgtccaagaccgcgagcatcgccccgcggacgaacggagcccgggcgcatggggcccccccgccaggagccgccccaccacaccggggcgcgacgtctcggcgcgggcggacgccgagcacgggcagggcgatgtcgttattcggcgcgtgcccgccccgcgagggcgctgcctccactccgggcgaccgcatccgcggcgactcctcccgctcgctccccctctcgcgtacaacgactcggcgacaggccgggacgcgggcacctgatagtcgcgcacggcgtgcactcggcgcacaccgactccgcgcgggtggataaagggaaactcggccaacgacctgctgtgcccggcgggcgcgctagagcgcggtcagggggatcaccgtcgcggcgcgtgcacgtatgagcggcgcggagacgcgcgcggcgttcgccgcgcgacccgctcactacgtgtcgtggcgagagaatatncgtgcataggccggcgggcgcctaccccatcggcaacaactatggct

SEQ ID NO: 82164 - DNA, 375 bp, Homo sapiens
  sig_peptide (82)...(217): this location contains the signal peptide sequence, MCLILVIWKIHYAELIMLNKRVVNKCRSCLIQKCLSTCHSTVIVL, Run with SignalP
  misc_feature (112)...(187): similar to gi2351907 in the genepept database release 114, Run with FASTXY 3.3t00, default parameters
cccacgcgtccgaagaatggtttccttactaaatgagaaaagttgagccctttccactaaaatggttaaaataaaaacttcatgtgtttaattctggttatctggaaaattcactatgcagaacttataatgttaaataaacgagttgttaataaatgtagatcatgtcttatccaaaaatgcctatctacatgtcatagtacagtcattgttttatatcaatgcagagaggaagaagctgtgatgttaataaagttgaattttaaaatgaaaatccaaagaactatatgtatataggccaaataaaaagttacttgattacttaataatatggattaaaatgagtaatcactgtaattcatatattcaagaagg

SEQ ID NO: 82165 - DNA, 441 bp, Homo sapiens
  sig_peptide (269)...(404): this location contains the signal peptide sequence, MLAPCPILMALVISGMVVTIEKESYSFYAQLFRIFLKTEGFTVVL, Run with SignalP
  misc_feature (330)...(270): similar to gi836667 in the genepept database release 114, Run with FASTXY 3.3t00, default parameters
tcttccgattccaataaccggcccgacccacgcgtccgaaagatttatatctttggttaaaaaggttagatgagcagttgttagagaaacgttagtaatggattgacatcaaagcaagactcttctcttaaagcaattggaaggaccgaaagaaaactacaaaaggaataaccttctcactcttctattcagtgttatttagggagggatactcgtgccacctagaggaggtctctaccaggtatcggtgaagaattccacttagaggatgcttgccccctgccctattttgatggccctggtgatatctgggatggtggtgaccattgagaaagagagctacagcttttatgctcagctttttagaatattcttgaaaactgaaggtttcacggtagttttaggtatgtcttaaacaaatccttaacttcagctttagaa

SEQ ID NO: 82166 - DNA, 410 bp, Homo sapiens
  sig_peptide (26)...(161): this location contains the signal peptide sequence, MLMICFVVFNVSNSCHSIYLSTVKKRDQLRTISDLISSCYPIFWS, Run with SignalP
  misc_feature (179)...(340): similar to gi5163356 in the genepept database release 114, Run with FASTXY 3.3t00, default parameters
acgcggaaccatcacgactgcgctgatgcttatgatttgcttcgttgtatttaatgtgagcaactcgtgccacagcatttacctaagtacggtgaagaaaagggatcagttgcggaccatctcagatttgatttcctcatgttaccccattttttggtccatttttgctcattggtagagaaagtcttatcctgaattcaaaatctatgaagtagagaaagtcgtcttatcccatagatatgtcaaagtaaactttcaccaatataaactttttccaaaacaacattctataaagagttggtattctgaagaaatgatgggatttaggtctgaaaaatgagatatttctcagttcactgcatgaaatataatctaatgacctttaccttcagtaaagacaatattgcatg

SEQ ID NO: 82167 - DNA, 435 bp, Homo sapiens
  misc_feature (1)...(435): n = a,t,c or g
  sig_peptide (151)...(286): this location contains the signal peptide sequence, MFALSFIFAFSHCVVIYLSICLAPLIDYRSLQDKVSVLVSLSIKG, Run with SignalP
  misc_feature (160)...(388): similar to gi60981 in the genepept database release 114, Run with FASTXY 3.3t00, default parameters
nnnnnatttttcaggtaaattattttgataatacaggaatgtaaagaatacaattactttgaaaagcccattagatctttccaatatcaattataaaattttcctcttataaagaacaaccctctcctcatccccaagtctgtggtttctatgtttgcactcagttttatttttgctttttctcactgtgttgtaatttatttgtctatatgcttagctcccctaatagactacaggagccttcaggacaaggtctctgttttagttagtctttcaataaaaggttacttaatcactgttattggatatgcagtggtttttcatgtagtttcattttttatgaatctgtgggtattagtgtttacaattacaatgatggagactatgtctcagccttttaaaaagaaagatctgctcttatgaggatgtgcacat

SEQ ID NO: 82168 - DNA, 1170 bp, Homo sapiens
  misc_feature (1)...(1170): n = a,t,c or g
  sig_peptide (167)...(302): this location contains the signal peptide sequence, MSWLMPETKLISHLFWILSICTLFHLKYRIRNVGHPRLSDLTTAN, Run with SignalP
  misc_feature (316)...(106): similar to gi5360847 in the genepept database release 114, Run with FASTXY 3.3t00, default parameters
cagaaaccctcctcactgggcagacctgtccttctgtgcctcacagtgtgaggaagattcctgtttgaagagagaagttccagtgacctctagaatctcagagtagttgccaagctttctgtcagtgagatttaaaggccatttacttgtgtttattttatatttaatgagttggttaatgccagagacaaagctgatatcccatttattttggatactgagcatttgcacactattccacttgaaatatagaatcaggaatgtaggccatcccagactttcagatcttacaacagcaaatgacagatgtttgagatcaggccaaaatatccaccctcggtgggcatctcctctgtgtggcaacttatgctgcagccacagtggggagtcacaaactcagagctggaggtcttgaaaaggacaatgtgggccaggctccggaggggctgcctaaaggcttgcttttgtgactctcctgcagaaaatgttagaaacttccaaccgaaagacgagggcagcaacttatacacacgaaggcagaaagaaattggggaaggggaggctgttggaattcangccgttgtcctatagggagaaatactcctcctctccttctccctttactgataacggggcatggtgaggagatgagcttgtgagggttgccagtttggtaagagtgcatggggaggttgggtaaatagactagccaaatgggacttcggaaaccctttatgagggctggcccaacagtgatgggaggctgaaaatcccaggaagtgcttccaacatttcccagaatgtttcaaattaaagccacccatgatgggggaaaacgatactttaaagtccttgaaatgaaaaaaaaaaaagggcgcgcgttttaagatcaagttaatcaccggggtggaaagttttatttttttatgggcctaattatttccgggcggggttaacaggtgtctggaaaaaaccgtgagcgtggcgcagtgacggttccagaggatattgtggtgtcgcgttggctcggacgggcttgcccccgttgcgattggacggagagaaggacgtttttttgttgccgttaaaaggtagatgcggcggcggaggtgtgtcacgggtctttttttgttgcgagaaggtctcgacgcgggcttagggattgctagc

SEQ ID NO: 82169 - DNA, 398 bp, Homo sapiens
  sig_peptide (36)...(171): this location contains the signal peptide sequence, MNLKRLLLFLAKMFSAIFSLPTHPSHFPISIYDNIGHWPQSPKVR, Run with SignalP
  misc_feature (27)...(146): similar to gi335394 in the genepept database release 114, Run with FASTXY 3.3t00, default parameters
cttacatcagtttaaaatgagttaccatgaacaatatgaacttaaagagacttttactatttttggctaaaatgtttagcgcaatcttttccttacctactcatccttctcatttccccatttccatttatgacaacattggtcattggcctcagtcaccgaaagtcaggaggaaggaaggaaatgaatatttattgaaccccaatatgtgccagaccctggatttaacacttttagggataggagattatttaacctcaataacctctccctgagggcaggaagtggatttatagatgcggaaacagaggttctgcaaagtcaattgactttgcctggtaagaggcaaaaccagcatcctttatttaggcaatccaagtgatgttcatgtcctctgg

SEQ ID NO: 82170 - DNA, 1138 bp, Homo sapiens
  sig_peptide (116)...(251): this location contains the signal peptide sequence, MHLRRFRMSLTISYFLWESVWVPAWNARSVILQGSDCRPCHWVPS, Run with SignalP
  misc_feature (142)...(203): similar to gi297912 in the genepept database release 114, Run with FASTXY 3.3t00, default parameters
taaacacagaatgtaagataaatttgttgtgcagtacttggatagttagaacacatttccccagatagaaacattaaaactagaggttattcactcccatattcacacaacctttatgcacctgaggaggttccgaatgtccctgaccatctcttatttcttatgggaaagtgtttgggtaccagcttggaatgccaggagtgtaattctccagggcagcgactgccgcccgtgccattgggtccctagccctttttcatgctctgctttctgatgagcttacacacacaggcatggtgtactgtgggtgcttagtattgctgtaggacttcttgtgtcctgagttcaccactaccctttaattctaaacatttataaactattgaagttagattcaaaactttcttttccctaagcttttactttctgcttattctgcttataaattaataaatgttggccgggccggggggcacacatctgtaatcccaacactttgggaggccgaggcatgtggatcacttgagcccaaggaagtaagactaacctgggcaacatggcgaaaccctggctttacaaaaaaaaaaaaaaggggcggccgttctagaggacccagtcttaaggccccgggcgggcgaggggaatggtttttttttgggggcccccactctgattcattgggcggggttttaaaacggggggagggggaaaaacttgcgtatgtgcacgtccctgggggggcgcgggacgggctctcactgtgagcagagtggcccgggtgcccgcggggtgggctcaggttgaagtcgggcttttccgggggcgcttatggggtcgcgccccccgaaaggtccgtgtgcaacagagggaccgcggtgtgaggcggggacaagcggacccgttcgtttcggtagcacaaggatcgtcgacggggcaagttagaactacgggatcgaaccgtagttccggatagggcgtgaagcatgcggccccgggcgagcgtctgactcctgggatcggcgttttcatgtaggtggagagcatcgctgggattgagccggcgtgcacggtggaacgggaagcgtccttaggacgcttctcgtgcggtatggcgcagatgttcgggtgggagggagcg

SEQ ID NO: 82171 - DNA, 1170 bp, Homo sapiens
  sig_peptide (132)...(267): this location contains the signal peptide sequence, MIMLQLFFFHPLQHFYLTQSLLFPSSTSCSKPCQQYRILSISSSL, Run with SignalP
  misc_feature (595)...(649): similar to gi607228 in the genepept database release 114, Run with FASTXY 3.3t00, default parameters
gcgcccacgcgtccgatctgattgtgtaaatgatccttaatagtaaaatcaattttaatatcttataaaacagaagcacagcaaagcattttgcagaatttaccataaagtaaataataaccattcctagtatgataatgctgcaactatttttctttcatcctctgcaacatttttatctgacacagtctctgctgtttccaagttcaacgtcctgcagcaagccttgccagcaatacagaatactttcaattagtagttctctacttctctggtcgctaagcaactgacctgtggtgaagaatacataatgatctgcatagacaccttagagcaatagaaagtataagcttcacaagtttcatttgctctcttgtgttgatgttacaataaccagttaaatgcatggaaatatttgatagtagtttgctataataaactttaataaagattaaaagaagccttggagaaaggtagaaataaacacaacataaaatattgtatttgtcatttgttcatgtatgtcattttactgtttatggggagggcaagcaatcaggttaatattttattaaatgtttatattctagctactgtttaagacagaattcatcaagtagcagaagtgatggaagggccaaggggaagaaagatggacaaaacctgaaaattgaaagtacaataaaatgaaaattacaaatgaaaaccagtatgcctgagttatacatgactgtttaataaaatgtcttcatgtggggtaaagagaaaaggaaaaacagctgggatcagcagaacagaattacattgaccttgggaacttttaattcattatcaacatattttatggttgggatccatgacaacatatgcccgccctcagcaattattcataaagagaaagatattcttcacggataatgaaccggctagaacattttccgctttggagtatttgccaattgacaatgatttagaacgcgttaaaagagaaaacttccttatgggataaccttgaattccaaaaattttaaatgagaaaaaaaaaggcggcctctaaaaccattttatcgcggtggcagctacttttttgggccgaaaatcaggcgggggaaccggaaggaaaaggaactgcaggggtcacgagcggcgcgacctcgagtgcaaccgacg

SEQ ID NO: 82172 - DNA, 1127 bp, Homo sapiens
  sig_peptide (389)...(524): this location contains the signal peptide sequence, MAGSGPGRSCFAGMCCLLPGLPIRFALPFFLTPMFPQYHPHNMLG, Run with SignalP
  misc_feature (254)...(325): similar to gi1552498 in the genepept database release 114, Run with FASTXY 3.3t00, default parameters
gtgcctccttcagctgatgcatcatggcttggctcttgcattgctgcattgtcatcacctattctggttcatctgtcgccccagcctttactgtggagctctgcccacctgaggtgatgttgtcatctagtgggtgtagatgccaagcccttctaaaccagaagggaggaactagtattgtcactgtcctaccattgagggtgctgaggtcatagtgaggaccactcatactcttactagcatggcagtggactcagccattcttggcttgacttctgtgacctggagccagtctctcccctctctgggcctcagtttccttgttttaggccagtgcattcctgacgcccttggaggtggatcagtttctccctctagtgacagcatcatggcgggctcaggcccaggacgcagctgctttgcaggcatgtgttgcctgctgcctgggctccccatccgctttgctctgcccttcttcctcacacccatgttccctcagtaccaccctcacaacatgctggggtgtaaaggctggttgatgacaagcatgtccataaacctaggggattccttgggtgtcctaaaatggacctaagataattatcggggaacatgccccgatattcacgtaagttcttttaattttcttaaaaggcgggcacttgagaaataaagggacagaggaccaaagagaaaattttaaggctgggcttccggggagacatacatgtcggtagggttcgtgatgcccacaagcgtctaatcctcttaagggtaaaaaaatttcccgcccactgaacaacgtgtggtaaaccctgggtgacggccttcgtggaagcgatctttctgattcattcgacttatctactcaaaaggacattatggcgtgcaaatagggaaggggtggatgatgttaaaggacggttgcgtatatgctcccgggtgggttgagtgtaacgatgcgatcttacttgttcaatagattgactgttcgagaagtcgtgcgggtaaatcacattgaatggccgcacgtaggggatcgccagcagaaatcgctacgttaaatctggctggaatcgggtgagatcgatcgaaccacatgtaggaggcgatgttgatgaaacgac

SEQ ID NO: 82173 - DNA, 1121 bp, Homo sapiens
  sig_peptide (165)...(300): this location contains the signal peptide sequence, MAPLPSLTLRPWCVLMLLDLWAAFGTITPSLKHFHHLPSGTQHSL, Run with SignalP
  misc_feature (174)...(284): similar to gi1663754 in the genepept database release 114, Run with FASTXY 3.3t00, default parameters
cccacgcgtccgatttgatggagaaaagctgctattataaagcctgatgtggacttttttcatcagtgtcactcaagcaagttggcctttaaagacagttttttactgcttaatatataggagttttcttgttttatttgttcattttcctaattgaacaaattatggctcctcttcctagcctcactctaagaccttggtgtgtcctcatgttactggacctgtgggctgcatttggcacaattactccctccttgaagcactttcatcacctgccttccgggacacagcactccctggtttttgtcctgtctctgactcttcattctcagttgtctttgctgatgggcacctcagctgtctgtctttctgcctgtttttcttctctcagcactttccctgggtggttgcttatcatctgcacactgatgatttaaacatagagtttttgcctgtatctctccccctaagtctaggcttatatatctaactgcctgctcagtacctctatttggatgtttaataggcatttcaaattggaatccaaccttttgttcctacctctgcagccctggtccaaaacaccatcatctcttgcccagcttattacacctgtagttaccttgcatctgggctttccactttcatccttgcccctccagtctgttattatagttgtgatagggattgtatcaaaacttgtcactggctactggttctgatgagtaaacttaaaccctctcagggtccccatacccccccagctggggcccttcctccttggcctcccctgaccacttgtggattgggcatctggtcgctcattcaggcaaagggtcattctcagacctgagggcctcccctagaggcgacctgctggtccctcctagagcgttcgcacaagccactggttcttagttccatatagtagcctctgggcctctcaagggtacccccgtgagcatccccccgatctgacccctcctcgggatattgccctaaggaacgaaagaagctgcttgccccaaaggagtgttggctcgatttggtgggcctgtcttgaatcgctcccatcttagtggaagaatggacaagtgggtgcaggcgatcgggatggcggc

SEQ ID NO: 82174 - DNA, 774 bp, Homo sapiens
  sig_peptide (322)...(457): this location contains the signal peptide sequence, MFLLDLCLGSLSVFIDTHPCMHGGFKCSQDWCSPAKLLLSAFTKT, Run with SignalP
  misc_feature (439)...(376): similar to gi5441593 in the genepept database release 114, Run with FASTXY 3.3t00, default parameters
cctcccgggtcgacccacgcgtccggtaagcatgccccacactaagtataactaatatatagtaaaacttgcaatatagttagcataactagatatttatccctgttgggatttcacagttgcaccttgcctgttatttatattttcctaaattattagaagattttagaaaaagattctgtgttatgaatgcccaggtgagagttaattactgtatgcattttgacacctatgctgttaaaaagctgttgttgatagctgaaccaagaattggtctttgaccttctgggcacagttaatgagctactaatcttgtagggcatgtttctgttggacctctgcctgggctcattgtcagtatttattgacactcatccatgtatgcatggagggtttaaatgcagtcaagactggtgttctccagccaagctgttgctttcagcattcacaaaaacaaggtagaaaggagacctggacaacaagcacaggcacttggacttttaaaaattattttattttctgttttcccctgatatgataaatagtggtctaaagacctcagatttcctttattcatatatggttttcctttttaaaaatattattttcagtggatttgcttatggacacatttattaccaggtttattcaaaaattaaacatttgttcagcatttgtgtcctaagctgacagtctttaaatcttatttttcacagttatattggaagttatattagaagatgaagcggcttcctaagcccagtacaaatctgc

SEQ ID NO: 82175 - DNA, 2127 bp, Homo sapiens
  sig_peptide (1064)...(1199): this location contains the signal peptide sequence, MALNSIYLVFETWCTCMYLYKHLLHLKSTTGKQSVLSFVYKFGVY, Run with SignalP
  misc_feature (584)...(467): similar to gi1353424 in the genepept database release 114, Run with FASTXY 3.3t00, default parameters
gatgacctgcgcttgaaaagcatgcatagtaatgtgccacagaacagtgatttggttcactatagaccacatatatgccagtggtcccataagattataatggagctgaaaaattcctatcaccagtgacattgtagctgtcataatgtcatagtgcactgcattactcacgtgtttgtggtgatgctggtgtaaacaatttatgctgccagatgtataaaagtgcacagtaatgtcccaggccttcacattgactcaccactcacctgcccaaagcagcttccagtcctgcaagctccattcataataagtgccctatagaggggcaccttttatctttgatactgtatttttactctaccttttctatgtttaggtatatttacaaacacaaataccgctgttacaactgcctacagtattcagtcagggacatgttcttacggatttgtggcttatgagcaacagactgtatcatatagcctaggtacataataggctgtaccatctaggtttgtgtaagaatagtctataatatctgcacaatgatgaaactgcctaacaacacatttctcagcacatatccccatcattacgtgatgcatgactatactaagcatgcgattctgaggctctctgtacacaaagctttacatttccattttgttttggtgatttagtaaattttttgagaaaatgaattttgacataagaggccaatgagtgagttgtggaatagttcagatttgtaaactgctgctctcatttttgcttccatatcaggatggggcaaaacaaaccacacaggtaaggtgatagatgttaggttaacaacagctaacacggtcctgtaacaaggacttacgcccaattataaaaggagtttcaaagagcacactgttgatgtttctcactctattaacaaaatacagcccaaaggatctgaaggccgttccaagcgagggtgcttctgaggacactgagaagagttttgccattctgaagaggcgagcctgtggaactgtttaaggtcctgttcccagaagaataaaagtttctcattatggcattaaactctatttatttagtatttgaaacatggtgtacatgtatgtatttgtataaacatttgttacatctaaaatccacaacaggtaaacaatctgtgctttcttttgtgtacaagtttggggtttacatctggatattttggtgttgtggagactcagtctgtgaagctaatcagattgcctcatattaccataataactgtgacagaagtgatttgctccttaaaggggctgttccttgcccagaaaaggtgtcacacttttgaactaataaaccgggtgtcacggaatcaagagaaacacagctgacacgatggagaaggtatgtgcaggggactcctggagatccaagtcaatgcgtagcaggcaacacaagccatggggtgacgctgggaattgagctctcccttttcaaactgttggatgtgaatatcaagtctccccaaccccacctggaggggtttcatccagcaagagcttgccttctgctcagcacactcctgggagtaacctatgagtgtcacagctgcaactccgaggtgccaaccaagcccagggctctggcttcttctggggtcaggccgctcttcagggttcttcgcaaagatttccggttggcccgggatcgtttcctctccctcggcaccactcgctgactgggcacttgggtggctgacttgacgatgcggtccatgatctcatcagctgcatcatctgtgacattgggcgagtcatcagttcccatagtccaggaactagtggatcctcggcttgctcggctgcgtgtgcggacgcccagcgcgggggtggcgtcctccacggagggggacgaggttttcagcacagccttcatgttctcgtgctcagccgcgtcctccgcatagctcagaccctgcggctggcttgggggcgccggagaactgccggagaacttgccagaatcggtgatcatcttccctctggtcttatttctctctctgtggttggcccgtttctgtttctgctgcaaaaccctttccctggttgtgcgatactctagtgcaaatcggacgcgtgg

SEQ ID NO: 82176 - DNA, 389 bp, Homo sapiens
  sig_peptide (204)...(339): this location contains the signal peptide sequence, MWVAFVFMTTHFHWSIAWDLEHITCQSLTFLFTNNAVDNSTSQRF, Run with SignalP
  misc_feature (149)...(108): similar to gi913399 in the genepept database release 114, Run with FASTXY 3.3t00, default parameters
cggacgcgtgggttccagtattttttgagagagtccaggtagatttcatgacccctggtgtgcacaggtgcccactgggtttcagagaggccgatgaccccaagtgacacagctagaaggagaggaatcatgaacatggaccatatcttttatctccagctcctgggtgaggaccccaacattccagaggactctgcggctatatgtgggttgcttttgtgttcatgactactcatttccattggtcgatagcttgggatcttgagcacattacttgtcagagcctcacgttcctcttcacaaataatgctgttgataatagcacctctcaaaggttcgcgctgctgactaaatgacttattgtacgcaaagagcctgacacatgccgg

SEQ ID NO: 82177 - DNA, 1152 bp, Homo sapiens
  misc_feature (1)...(1152): n = a,t,c or g
  sig_peptide (925)...(1060): this location contains the signal peptide sequence, MADRGRLGWSGLLRVAPXFFXWSXWVGGRGRWGGGXXXCYARVGR, Run with SignalP
  misc_feature (206)...(167): similar to gi1491801 in the genepept database release 114, Run with FASTXY 3.3t00, default parameters
aacagtatatgttgtgtacctgttgtattctggccctgatgctggaccctgggattgaattgctaagacatagcaccagtattgatggtgctcccagtctagccggggagaaaaaagatcaacgtatctctactgtagtttgagaaatgcttgaaaggaaatagaggatagaggagccagattctgaagttattaattctgcagaaagtggggggaaccagtgattcagagaaagcagtaaagagggatgactgtttaagggagaggcattaaaatgaggaagtccccagacagtcagtgggagaaagtgccttaaggctgaggaaacagaatgaaggtacaccagtagcaacgaggagcattagtgcctgtcccatggggaaatggactgcggcccattcaaaggagggaagcacatatacatacacccagctctgggatccattgttaagtgatagactgtcgcgagatgctgtgtttattanggatgctgaggaggctgcagaatagtgactcatgacttctgctctcaaggttgctacagccaagttaagaggacaaaagtgactcgcatggaacaatagcagataatacaagttagtgtatccggggagggttggggtaaaaagagtccaaaaaanaaaaaattgtaaaaggataaatatgggggcggggtcttaagggagacccattttaatccgggggttgggaggaatattcttttttttggggccctaatttctatcgggggggggttttaaaagggggggagggaaaaaannttgggatggttcgttcggggcgtatgtttgggtgtgttgcgagggttctgtgtggtctattgattggatgttcactgagcgcatggatgaggtctgacgtctctgggtgatcggccggttggaatgggtacgtagatgcttgatggcagatcgcggccgactcggctggtcgggtttgctccgtgtcgctccctcnttctttntttggtccanttgggtgggagggcgggggagatgggggggaggancagnngnatgctatgctcgggttgggcgcgatggctgggaggcggcggtgctgtagcgctagggagggcgcggtttcggatggttaggatctggatggagtggatgggtgttttggaatgcc

SEQ ID NO: 82178 - DNA, 1145 bp, Homo sapiens
  misc_feature (1)...(1145): n = a,t,c or g
  sig_peptide (182)...(317): this location contains the signal peptide sequence, MLSLVKLLLLCIIHDHSINFCIAIQVGLLPSAYRVPGIVLSLENT, Run with SignalP
  misc_feature (176)...(274): similar to gi1262592 in the genepept database release 114, Run with FASTXY 3.3t00, default parameters
cccacgcgtccgcccacgcgtccgcccacgcgttcggggtttttataaaaatggattcagggtctgctgaaataaattttttttaaaaatttcagtccataaaccaaacaaaaatatctgtcctggaatgtgatcaggaacaaaccagaaaactgtgaacatctgatcttgatactggcttatgttgtctcttgttaagcttttgcttctttgcattattcatgaccattcaattaatttttgtatagccatacaggtaggattattaccaagtgcctaccgtgtaccaggaatagttctaagccttgagaatacagcactaataaggcagactccctgctcaaatagagccaactaatgaaaaatcgataaaatagagactaaagagagatccttagttgcgtttaaaatcttagtttttaacttccaggctggcacagtttgttaacaaaaaaaaaaaaaaggggcggccgttctaaagaaccaaagtttactaacgcgggcttgcaaggtaaaactttttttatggggcccccaaaatcaattccaggggccggggtttaacaagggtggaacgtggaaaaacanntttntttttgcgctttcgctcggtgagaactgatgatttctcggaatggatgacggcgcggatcgcttaccggaatgcacggttggtattgatcgatagatcgtcgggaacatttactagatggattggcggatactatgcgatagaccgatggtagcggtctgccgacgtgtccgtcgggtgatatcgtcgttcggtttggtgtgtctgattgttgggatcggtgccagctaacgaacgggttgacgaaagagaggacagcattgtctggtctcgatcgtctaaccgtcgttctggagggaaacgaccggattatagacaggcttcgtcagcgcgggagcgcatggtggcttagggaacaggggacgcgtgagagaggacgcgtgggtgcacatacatgtttaatatggcaatgaattatccgatctctattagatggcacacgcgggtcgattgtaagcggacttggctggacgctcgtgatttaatcgccatgtgcggagtagttcggcgataattattgtattcatcacgatgagatgtgacggcagaggcg

SEQ ID NO: 82179 - DNA, 512 bp, Homo sapiens
  sig_peptide (69)...(204): this location contains the signal peptide sequence, MFKALMSLMFSFFGILLNVSDQVEAEAEGKVVKVQSTKECILRKR, Run with SignalP
  misc_feature (236)...(138): similar to gi3152967 in the genepept database release 114, Run with FASTXY 3.3t00, default parameters
attggatgagtacttgcagtctgctaagtaacatgctggatcctgaaccaaattaggacattaacaagatgtttaaggctctgatgtcattaatgttctcattttttggcatacttttaaatgtatctgatcaagtagaggcagaagctgaagggaaggtagtaaaagttcaatccacaaaagaatgcatcctaagaaaaaggaaaggtcattgacaaattcataaatgggcctggggattttggggaaacagcttgccttttctccttgatattcccaggctaagtttaaagcagactgtcaggaaacagtttgtgtgtgtgtgttttgtcctttgtttcatttaaaaataatccatagtagcagttcttaaggtgttcatcagaaatacctcggctgtaatcccagctactcaggaggccgaggcaggagaatcacttgagcatgcaaagcgggaaagggggaaggtgcaatggtcccaaacaaggaaactccgtctcataaaaaaaaaa

SEQ ID NO: 82180 - DNA, 546 bp, Homo sapiens
  sig_peptide (378)...(513): this location contains the signal peptide sequence, MHLFAFISYVFKVIRHSFYKTSYLLLFFLTALIHLQRITEMGKGE, Run with SignalP
  misc_feature (329)...(143): similar to gi2547197 in the genepept database release 114, Run with FASTXY 3.3t00, default parameters
gatgagtgagactgcagacatgggagtcttcaggacttggccattgactgatagggatctagaaaaacagaagattccagatgtgtaagcagtttcaaacatggatgatctgggtggtagtcatagtaataagaaacttaataaaatgatatatcatgaaaaggtgataaatttggttttagagttgaagtatgagttgatatcttaaggagaaagatgaaaatgctggtcttggcttcagggggtagaatggaactgtgatacagatttaggaccattttaagttctatccaagtaatagaacttaaaaacagatgagacaccaaaggagacaatatccttggcagattgattatttttatatatttaattatttgatgcatttatttgcttttatttcttatgtatttaaagtgattagacattctttttataagacatcatatcttttgttattttttcttactgccttaatacatcttcagagaataacagagatgggaaaaggagaatgataaaataaggagagtaaaaaaaaaaaaaagg

SEQ ID NO: 82181 - DNA, 1634 bp, Homo sapiens
  sig_peptide (1031)...(1166): this location contains the signal peptide sequence, MVNTWLAACCTVVTWFPKMSMLPLPPSKPSARSSLWIGAPLASRL, Run with SignalP
  misc_feature (137)...(280): similar to gi9462 in the genepept database release 114, Run with FASTXY 3.3t00, default parameters
cccacgcgtccgcccacgcgtccgctcgactcttagcttgtcggggacggtaaccgggacccggtgtctgctcctgtcgccttcgcctcctaatccctagccactatgcgtgagtgcatctccatccacgttggccaggctggtgtccagattggcaatgcctgctgggagctctactgcctggaacacggcatccagcccgatggccagatgccaagtgacaagaccattgggggaggagatgactccttcaacaccttcttcagtgagacgggcgctggcaagcacgtgccccgggctgtgtttgtagacttggaacccacagtcattgatgaagttcgcactggcacctaccgccagctcttccaccctgagcagctcatcacaggcaaggaagatgctgccaataactatgcccgagggcactacaccattggcaaggagatcattgaccttgtgttggaccgaattcgcaagctggctgaccagtgcacccgtcttcagggcttcttggttttccacagctttggtgggggaactggttctgggttcacctccctgctcatggaacgcctgtcagttgattatggcaagaaatccaagctggagttctccatttacccggcaccccaggtttccacagctgtagttgagccctacaactccatcctcaccacccacaccaccctggagcactctgattgtgccttcatggtagacaatgaggccatctatgacatctgtcgtagaaacctcgatatcgagcgcccaacctacactaaccttaaccgccttattagccagattgtgtcctccatcactgcttccctgagatttgatggagccctgaatgttgacctgacagaattccagaccaacctggtcccctacccccgcatccacttccctctggccacatatgcccctgtcatctctgctgagaaagcctaccatgaacagctttctgtagcagacatcaccaatgcttgctttgagccagccaaccagatggtgaaatgtgaccctggccatggtaaatacatggcttgctgcctgttgtaccgtggtgacgtggttcccaaagatgtcaatgctgccattgccaccatcaaaaccaagcgcacgatccagtttgtggattggtgccccactggcttcaaggttggcatcaactaccagcctcccactgtggtgcctggtggagacctggccaaggtacagagagctgtgtgcatgctgagcaacaccacagccattgctgaggcctgggctcgcctggaccacaagtttgacctgatgtatgccaagcgtgcctttgttcactggtacgtgggtgaggggatggaggaaggcgagttttcagaggcccgtgaagatatggctgcccttgagaaggattatgaggaggttggtgtggattctgttgaaggagagggtgaggaagaaggagaggaatactaattatccattccttttggccctgcagcatgtcatgctcccagaatttcagcttcagcttaactgacagatgttaaagctttctggttagattgttttcacttggtgatcatgtcttttccatgtgtacctgtaatatttttccatcatatctcaaagtaaagtcattaacatca

SEQ ID NO: 82182 - DNA, 423 bp, Homo sapiens
  sig_peptide (212)...(347): this location contains the signal peptide sequence, MRSRVQSTWHQLGTQMLILLSSSQLVALHPSHMYLGCPVADAEMI, Run with SignalP
  misc_feature (142)...(46): similar to gi5103931 in the genepept database release 114, Run with FASTXY 3.3t00, default parameters
gagaggaaaaatgtctggtcacagtcatatttaggattgtggtggccagtgggggtggcagggagaatcaggggtcctatggtgctcctcagaagggcttctagctggctgaccaccatggtccctgtggaatgcttgctggccaagccctggcccaaggggcatcagggaaggggtccacttgacatttgtggagtgaatgaatgattgcatgaggtcacgtgtgcaaagcacatggcatcagctgggaacccagatgctcattctgctctcttcctcccagcttgtggctcttcatccatcccacatgtatttagggtgtcctgtggcagatgcagagatgattaagaatgccccctgctctcaagggactttcagtctaatcggttgagagggaaactcttcccttctctgaggacatgt

SEQ ID NO: 82183 - DNA, 1089 bp, Homo sapiens
  sig_peptide (85)...(220): this location contains the signal peptide sequence, MRALALVLRPVCSHLLPPSLSFSLLLKGWTPLYSFKASLITTAPH, Run with SignalP
  misc_feature (203)...(395): similar to gi4029202 in the genepept database release 114, Run with FASTXY 3.3t00, default parameters
cacccggcgaggggaagggggcccgggcgtgatgtcacccgcgccctctctcttctctctccacaccgccaggacaccccccaaatgcgcgccctggcactcgtgctgcgacctgtctgctcccatcttctcccacccagcctctctttctcactcttgctcaagggctggactcccctttattcttttaaggcttctctgattaccaccgccccccatccttggctccccatctccttgttttacattttccccaagccaaccccgaaactccctctcgcgggatgatgcctttggaagttcagggtttttttctccaccggactcgtctgccctcggggccaaatccgcgaagcgaggaggagctcccactacccagcctgctgtccctatgggccactttataaaagacacaaaaacaaagaccccaggcttggagcctggtctctaacgtgccgcttttccttgagctacaaagtgtctctgtccctgcttcattttcagaggcccatgctagtaaaagttatttgggctcctttctcgaacatccagtccttggtcatctgcgtcattttaatatatccaacctggacatggaacttaaaaaaggagttctcggggggaaacacaggaagaaaaagaatgaaaagaaagcccctgtgacattccaacatcccctctttctggttaagccgggtccacccaaccagaagtgccccggagctccgggtgcttgtgggcgttgccgccaggggctggactgaagaaaatgtgggggataaagatgacctttagaatctgaaagcatttgaaacccccgctccacgagaatcttcacgaaagaaggggaatattgtcggttctggaccctttttgccatggctggccgggcactgcgactagggtaatctcaacctagaccaccgcgcggaagaatgtcgctcgtccgggtgctctcccctctcgccagcttccatcgtcatcgaccggcggcctgccccagtgcacgaccccactgagctgcacatatggagccgtacaccaccccgtaccggctcgagtccgcgtcgggctgtgcattgtgatggc

SEQ ID NO: 82184 - DNA, 1192 bp, Homo sapiens
  sig_peptide (98)...(233): this location contains the signal peptide sequence, MRPLAGGLLKVVFVVFASLCAWYSGYLLAELIPDAPLSSAAYSIR, Run with SignalP
  misc_feature (116)...(801): similar to gi1507674 in the genepept database release 114, Run with FASTXY 3.3t00, default parameters
cccacgcgtccgccttgccttcctgacccaggggctccgctggctgcggtcgcctgggagctgccgccagggccaggaggggagcggcacctggaagatgcgcccattggctggtggcctgctcaaggtggtgttcgtggtcttcgcctccttgtgtgcctggtattcggggtacctgctcgcagagctcattccagatgcacccctgtccagtgctgcctatagcatccgcagcatcggggagaggcctgtcctcaaagctccagtccccaaaaggcaaaaatgtgaccactggactccctgcccatctgacacctatgcctacaggttactcagcggaggtggcagaagcaagtacgccaaaatctgctttgaggataacctacttatgggagaacagctgggaaatgttgccagaggaataaacattgccattgtcaactatgtaactgggaatgtgacagcaacacgatgttttgatatgtatgaaggcgataactctggaccgatgacaaagtttattcagagtgctgctccaaaatccctgctcttcatggtgacctatgacgacggaagcacaagactgaataacgatgccaagaatgccatagaagcacttggaagtaaagaaatcaggaacatgaaattcaggtctagctgggtatttattgcagcaaaaggcttggaactcccttccgaaattcagagagaaaagatcaaccactctgatgctaagaacaacagatattctggctggcctgcagagatccagatagaaggctgcatacccaaagaacgaagctgacactgcagggtcctgagtaaatgtgttctgtataaacaaatgcagctggaatcgctcaagaatcttatttttctaaatccaacagcccatatttgatgagtattttgggtttgttgtaaaccaatgaacatttgctagttgtatcaaatcttggtacgcagtatttttataccagtattttatgtagtgaagatgtcaattagcaggaaactaaaatgaatggaaattcttaaagggaatgatgtgattcaagctggaaagagggttgggagaaacagcttgtccaggtggagctatgttatgatcagatcgaagtgtgacccctgtgtggtccagacagccctgcagagagaaaacctttattcgattatcaccaagcacctcctg

SEQ ID NO: 82185 - DNA, 1897 bp, Homo sapiens
  sig_peptide (1608)...(1743): this location contains the signal peptide sequence, MLPFCHLWVPVTLVAAGAAQPAASMVMFPHLPALHHHCPHSHRTS, Run with SignalP
  misc_feature (534)...(1807): similar to gi5639731 in the genepept database release 114, Run with FASTXY 3.3t00, default parameters
cggcatctgcgtgctggggaccgacagtgtgggtgtgttaggaggatctgtatttagcacatttttgcctctggctaggacagggtggaaagggtggcgtggctacagcctgacccatgggcaccgtcctaccctttgttctgtgcttccgagtgtcatacatgtgctggggtctgtgggcccatgactcagacggtgagctctgaccttcctgagccagggctttgctgtagttgtgcctggctcaagagctctaggacaaggggaccgctccaggtctgcatctacggtgtggcagggcccttcggcactcttgtgcactagtgtcatctttcccattgaaatgactgtgaggaccagaatgtgcacatgcagatgggcagctacttgtctgccttggccctttattacacaacttgctgggggtggagatgccaccccccggcagtcagagcccctttatgatgtcatggggctggttacatgactgccaaggggtgctgctggccacactgcactagcaagtttgccagatggaggacaagcgatcattgagtatggctcgctgtgaagaaagaaattcgagaggacaggatcatggcttggaaagggtgcctttccctccccagttgcagtcagagacctaccttcacccagcagatccttcccctgcctgggacgacccggggtccactgggagccctaacttgaggctgctgacagaagaaatcgctttccaacctctggccgaggaagcttcgttcagaaggccgcaccctgacggtgacgtcccgccccagggagaagataatctcctctccctcccctttccacagaaactgtggagactggtcagcagcaaccagttttcgtccatctggtgggatgacagtggggcttgtagagtgatcaatcaaaaactctttgaaaaggagattctcaaaagggacgtcgcacacaaagtgtttgccacaacttcgataaagagcttcttccgccagctaaacttgtatggcttccgaaaacggcgtcaatgcactttcaggaccttcacccgcattttctccgcaaaaaggctggtctccatcttgaataagttagagttctactgccatccttactttcaaagagactcccctcacctcctcgtgaggatgaagagaagagtgggtgtcaagtctgcaccaagacatcaggaggaggacaagccagaagctgctggatcctgtctggcaccagcagacactgagcaacaagatcacacgtctccgaatgagaatgaccaggtcacaccgcaacaccgggaaccggccggtcccaacacccaaatcaggagtggctctgctccaccagcaactcctgtgatggtgcctgattccgccgtggcgagtgacaacagtccagtgacccagccggccggcgagtggtcagagggcagccaggctcacgtcactccggtggccgctgtccctgggcctgcagcgctgcccttcctctatgtccctggatctcccactcagatgaattcttacgggcctgtggtggcccttcccacagcgtcccgtagtacccttgccatggacaccacaggacttcctgcacctggcatgctgcccttttgccatctctgggtaccggtgaccctagtggctgctggggctgcacagcctgctgcctccatggtcatgttcccccatctcccagctctgcaccaccattgcccccacagccaccgcacgtcacagtacatgccagctagcgatgggccccaggcgtacccagactacgcagaccagagcacatagagggcagcatttgggcagaatatgtgctggtcaataaatgtgtcagaaaatgagtaattttctgactgcacaaaaagtcttcatggtctcca

SEQ ID NO: 82186 - DNA, 1100 bp, Homo sapiens
  sig_peptide (204)...(339): this location contains the signal peptide sequence, MRQKFLKPLLILLHRLKLGSLYTPSSVARYDSSVNENRSVNSSAY, Run with SignalP
  misc_feature (267)...(356): similar to gi1526491 in the genepept database release 114, Run with FASTXY 3.3t00, default parameters
tggagatttaatataaagtaatacagtataaaacataaagtaatataaaatctgtaaggtaattcattacttatactttcaagtaaatactaaactttttaaaatcttttggtgtgaggtgataattttgtttgatacattatcctttcttatttagtgacatgtgccagttctctctcacttgctttcaaatactgcaagtgatgaggcaaaaattcttaaagcctctcttaatactgctgcacagattaaaactggggtctttgtacactccttcaagtgtagcaaggtatgattcttcagtaaatgaaaacagatctgttaactctagtgcatatgaagaagcaaaagaattgatgctttccatgaactaattttggaaagacacagttttagtagccagttgctttcttatatgaacagacatatagaatattgtccttttcctgcagattaacatttgggtgggagtctgaggtggaatattgatttaaaaaaaactagtagtttggtcaaggagaacaacaggaagggaaaggctttcccagcaaaggctggcattgttggggaaattgtggtaggtccccatttgctgcagatggaggggcctgaaaaaacagtaaggctagatcgggcttggtggctcacgcctgtaatcccaacacttttggaagccaaggcgggcaaaacacgaggtcaggaattcgagaccagcctggctaactggtgaaaccctggcttactaaaataccaaacgtactgggggcaccggtggcacctgaagcctcccactggcgaacggaggcggatatatgctgcaccccaaagcataagcgccattaccttatctgccctgtctccccccttggactactatatctctctcacccccctgcggcccgacacgccgcgcgcctcgcccgcgcttatcgccattaacccctccggccgaaccgctccactatgcctatacttcttcatgctcgtctcatcactggcctccgtacgatgccgcttcccgcccgcgcgccgcgacaacgttcgtccgctcaatacgcatccgcccggcttcgtccctcgcgcccaccctccgaacggct

SEQ ID NO: 82187 - DNA, 594 bp, Homo sapiens
  sig_peptide (386)...(521): this location contains the signal peptide sequence, MNPCFCGFLVLLSCCLSLLDSQLHNLIALQITCFKDVEIPNFFCD, Run with SignalP
  misc_feature (150)...(596): similar to gi2792016 in the genepept database release 114, Run with FASTXY 3.3t00, default parameters
atgtctcaatattcctcgtcctagaactctcagaggatccagaactacagccggtcctcgctgggctgttcctgtccatgtgcctggtcatggtgctggggaacctgctcatcatcctggccgtcagccctgactcccacctccacacccccatgtacttcttcctctccaacctgtccttgcctgacatggtttcacctccaccatggtccccaagatgattgtggacatccaatctcacagcagtcatctcctatgcgggctgcctgactcagatgtctctttttgccatttttggaggcatggaagaaagacatgctcctgagtgtgatggccctatgaccggtttgtagccatctgtcaccctctatattattcagccatcatgaacccatgtttctgtggctttctagttctgttgtcttgttgtctcagtcttttagactcccagctgcacaatttgattgccttgcaaattacctgcttcaaggatgtggaaattcctaatttcttctgtgacccttctcaactcccccaccatgcgtgttgtgacaccttcaccaataacatagtcatgtatttccctgctgcaaa

SEQ ID NO: 82188 - DNA, 422 bp, Homo sapiens
  sig_peptide (83)...(218): this location contains the signal peptide sequence, MLAGSLLLAFERGAAVSSVCRVKKRGQSSEEMNPSRKGCLTSRRE, Run with SignalP
  misc_feature (270)...(377): similar to gi3273880 in the genepept database release 114, Run with FASTXY 3.3t00, default parameters
aattgtccaggctctagaacgtttcacttctctgcaaggatctgtccgtgtgtcatggagcacctggagtgttctgtctggaatgctggctgggagccttctcctggcatttgaacgaggggcagctgtgtcctctgtttgccgtgtaaagaaaagaggacagagctcagaggagatgaaccccagcagaaaggggtgcttgaccagcaggagagaagataaccaagagggtctgtgggtgtctcttctgagctacaccagtttccaggttacctgggaccatggataactctcagatcagcaacttgtcagttgatttccaagctgctgttggctggactcagactcagcagggagcacctgggcgagccctgtgctgcgggctggactccggcccatctcgctgattactcttgcttttg

SEQ ID NO: 82189 - DNA, 388 bp, Homo sapiens
  misc_feature (1)...(388): n = a,t,c or g
  sig_peptide (113)...(248): this location contains the signal peptide sequence, MCILWAITCTCVRLGMICTNQKTMNFCFMSLKFYRNNKRKGHLYW, Run with SignalP
  misc_feature (115)...(191): similar to gi2764843 in the genepept database release 114, Run with FASTXY 3.3t00, default parameters
atttttctttttcagtgctactttattttaatgtcagcttggctttacctaccaaaggaagcctgctcatttggttaggaccagcttcccattattggagtaaggaatttaaatgtgtattttatgggctataacatgtacgtgtgtgaggctgggaatgatatgtacaaatcaaaagacaatgaatttctgcttcatgagcctaaaattttataggaacaataaacgtaaaggccatttatattggagatataaatttaaaactggtaagatttcatttctacatgattaatcatgtagagttgccctgttatcaaaggactgttttgacaatagagacaaagttttgttaaaagcaggatttgcagtactgctacctgattagctn

SEQ ID NO: 82190 - DNA, 420 bp, Homo sapiens
  sig_peptide (130)...(265): this location contains the signal peptide sequence, MRSILFLSSSVLLAKALAQGPITFCPFLYLVHEDTMRDFVSCLAK, Run with SignalP
  misc_feature (26)...(71): similar to gi897626 in the genepept database release 114, Run with FASTXY 3.3t00, default parameters
tttggtctctttgaggactccgggtgctgctgtgggtcaccttcatctttttagctgccccacccccagtgcccagtgcccagtggggtctggtatataatagctcttcagtacatatttgatgaatgaatgagaagcatccttttcctgtcttcctctgtgctgctagcaaaagcattggctcagggtcccatcactttctgtccatttctctaccttgtccacgaagataccatgagagattttgtcagctgtcttgctaaaatctatatttgctctgctattattttcttgactaatcagtctaaaaattgctttaaaagagaaatgagtctagcttgactatgatttgtttttcacaaatgtgtgctgttcagatgctcacagtcgattggtttaattctgtgtaccagaattttt

SEQ ID NO: 82191 - DNA, 417 bp, Homo sapiens
  sig_peptide (78)...(213): this location contains the signal peptide sequence, MGSTPAATLVTFSCVALSLWLHPSGLASSPLKGSKIYVYWRLSSK, Run with SignalP
  misc_feature (379)...(217): similar to gi552078 in the genepept database release 114, Run with FASTXY 3.3t00, default parameters
tttcgtgaacgtctctgcctgacactcttgctggcatctgtgggctctctctgtcccgtggacaggacaatcagaagatgggctccactccagctgcaactctggtgacatttagctgtgtggccttgagcctgtggcttcacccctctggacttgcgtcctcacccctaaaggggagcaagatctatgtatattggagactgagttccaagggctgctgggggtgacgcggacagcagtgttttgggagatctgagacttggagggtggtaggcactgacaccacagcccaggagctctgcaccagctgtagtgagctgaggagagaaggggcacgtcgctgagctcacacatcttggtggaggcagagtaagatctcaaataatctgagaaaacagcttttgtactttctaccaa

SEQ ID NO: 82192 - DNA, 939 bp, Homo sapiens
  sig_peptide (216)...(351): this location contains the signal peptide sequence, MSCVLGGVIPLGLLFLVCGSQGYLLPNVTLLEELLSKYQHNESHS, Run with SignalP
  misc_feature (396)...(939): similar to gi4324682 in the genepept database release 114, Run with FASTXY 3.3t00, default parameters
tttcgtgcgtctccggctgctcccattgagctgtctgctcgctgtgcccgctgtgcctgctgtgcccgcgctgtcgccgctgctaccgcgtctgctggacgcgggagacgccagcgagctggtgattggagccctgcggagagctcaagcgcccagctctgcccgaggagcccaggctgccccgtgagtcccatagttgctgcaggagtggagccatgagctgcgtcctgggtggtgtcatccccttggggctgctgttcctggtctgcggatcccaaggctacctcctgcccaacgtcactctcttagaggagctgctcagcaaataccagcacaacgagtctcactcccgggtccgcagagccatccccagggaggacaaggaggagatcctcatgctgcacaacaagcttcggggccaggtgcagcctcaggcctccaacatggagtacatgacctgggatgacgaactggagaagtctgctgcagcgtgggccagtcagtgcatctgggagcacgggcccaccagtctgctggtgtccatcgggcagaacctgggcgctcactggggcaggtatcgctctccggggttccatgtgcagtcctggtatgacgaggtgaaggactacacctacccctacccgagcgagtgcaacccctggtgtccagagaggtgctcggggcctatgtgcacgcactacacacagatagtttgggccaccaccaacaagatcggttgtgctgtgaacacctgccggaagatgactgtctggggagaagtttgggagaacgcggtctactttgtctgcaattattctccaaaggggaactggattggagaagccccctacaagaatggccggccctgctctgagtgcccacccagctatggaggcagctgcaggaacaacttgtgttaccgagaagaaacctacactc

SEQ ID NO: 82193 - DNA, 1164 bp, Homo sapiens
  misc_feature (1)...(1164): n = a,t,c or g
  sig_peptide (152)...(287): this location contains the signal peptide sequence, MVITRAPAASISPLPRLGCCLPALSVVPAPLLLQHLWLHTEMATS, Run with SignalP
  misc_feature (198)...(282): similar to gi37498 in the genepept database release 114, Run with FASTXY 3.3t00, default parameters
tttcgtggccaacccagccccttcctccttctcaggctcctcgctccatctgagtttatctctctctcccatgttcagtctccgcctctctaccatcctgtcagctcttagacatgctcaagtaaagccttgcgtggcctgagcggaggcgatggtgattactcgggcacctgcagcttccatctctcccctgccccgcctgggttgctgccttcccgcattgtccgttgttcctgcccctctcctgctgcagcacttatggctccacactgaaatggccacttcttgcctgtatctgtcccccacctggccctcgaacaactgcaagggtagggaccagggctctctgcttcactgttgtattcccagggaagtgtatgtccagtgaaagggaagtgttagttgaaaatactcagaaagtgcctgacaagtgcacaagtcacattagtgactgtcccgtgaactagaagcataagctccaaatacttggcatctgtccagtgatgagtagcattagttcaaggtactcggtatctgtccagtgaaggagcagcattgagtactcactatggcctcgtgcagaaccagcaacattattctttttcagcatgggccagaactgcttttggatttccgggttatgattcaagtgaaatcaaccatgaatttcctgcaggtcaactttccaacctttgtatgacttttcaattttgataacanaacggaaataatggggtcccatgtgaggaaaataatttccaggagatattccaggcccccgggaagagaaattatcaacatccctgggtaagtcagagacaaaaacctttgtcctggatttaggaaggggggatacccccgtttagagaggggcacagaaaaaacccacggcttttttggacgttttaggtcccacccacgagaacgtggtcaagaaaacataaaacaggggagctggggctcttactgccgatggaggtcgcccctttttctatgtcaacgatgaggcacttgaacaatccgcgaggctgacgcccaaaccatttcgcgcgagcaccgtacccacgttagaagacgaatgtcgtccccgacatggcctatctcaggttaacttacccatccacaccgtcgcggactctccatcgctcacgcagctcgagtacc

SEQ ID NO: 82194 - DNA, 2898 bp, Homo sapiens
  sig_peptide (1074)...(1209): this location contains the signal peptide sequence, MLLLLLLLPLLWGTKGMEGDRQYGDGYLLQVQELVTVQEGLCVHV, Run with SignalP
  misc_feature (1077)...(2229): similar to gi5541872 in the genepept database release 114, Run with FASTXY 3.3t00, default parameters
agcacaccttccacagcactggtctctcctctcagaactgtgtttcccacacaggctcacgggctcccaaggggatacggctgcttgcggtgactgagctccctcctcacagcagagctgaggtctgggctccaggtccccagtggagtccctcgcagacagaaatagccgagaccatacaaccaaccaaatacacccctaacaagcttaagcgacaaatactcaaaaacataaaacccagtaaagaggaaacaccaccacctacacagacaccaaacgacggccacttccagttttcctgtgaagtctctgtgatgctcccctggagcagctgcagcacggagagaacaatccgccggacagctcgcaaaccccgacagcgcataaaccgcatcctgggctcgtggtcaaaacatcctgtagcaaggagggtcaatgcttacatgatgaagatgatgcagaaggacaggaaggccagggctgtggctccagctcccccgactgctgccagtgtcacttgtgatacagacctgccccccggggccccacagtgctcagttgaagggggtcccggggaccgcagcctccgcttccgctgctcgtggcccggcggggcccctgctgcctccctgcagttccagggtctccccgaaggcatccgcgccgggccagtgtcctctgtgctgctggcggccgtccccgcccacccccggctcagcggcgtccccatcacctgccttgctcgccacctggtggccacgcgtacctgcacagtcacgccggggaggcccctggctccaggaggcgggagtcgcctgcggctcagtcaagatgggcggaaactccacatcggcaacttcagcctggattgggacctgggaaattactccgtgctgtgcagtgggccgatgggtgctggcggtgaccagatcacctgcattgtgagaagggtctctagagtgcgattgcagcactattcttgcgccgaaaagagtcttgagacctcagtttctgagagaagaaccctgaggaacagacgttccctggcggccctggcgccttcaaacccagacatgctgctgctgctgctgctgctgcccctgctctgggggacaaaggggatggagggagacagacaatatggggatggttacttgctgcaagtgcaggagctggtgacggtgcaggagggcctgtgtgtccatgtgccctgctccttctcctacccccaggatggctggactgactctgacccagttcatggctactggttccgggcaggagacagaccataccaagacgctccagtggccacaaacaacccagacagagaagtgcaggcagagacccagggccgattccaactccttggggacatttggagcaacgactgctccctgagcatcagagacgccaggaagagggataaggggtcatatttctttcggctagagagaggaagcatgaaatggagttacaaatcacagttgaattacaaaactaagcagctgtctgtgtttgtgacagaccctccttggaacttgaccatgactgtcttccaaggagatgccacagcatccacagccctgggaaatggctcatctctttcagtccttgagggccagtctctgcgcctggtctgtgctgtcaacagcaatccccctgccaggctgagctggacccgggggagcctgaccctgtgcccctcacggtcctcaaaccctgggctgctggagctgcctcgagtgcacgtgagggatgaaggggaattcacctgccgagctcagaacgctcagggctcccagcacatttccctgagcctctccctgcagaatgagggcacaggcacctcaagacctgtatcacaagtgacactggcagcagtcgggggagctggagccacagccctggccttcctgtccttctgcatcatcttcatcatagtgaggtcctgcaggaagaaatcggcaaggccagcagcgggcgtgggggatacaggcatggaagatgcaaaggccatcaggggctcggcctctcagggacccctgactgaatcctggaaagatggcaaccccctgaagaagcctcccccagctgttgccccctcgtcaggggaggaaggagagctccattatgcaaccctcagcttccataaagtgaagcctcaggacccgcagggacaggaggccactgacagtgaatactcggagatcaagatccacaagcgagaaactgcagagactcaggcctgtttgaggaatcacaacccctccagcaaagaagtcagaggctgattctcacagaacaagaaccctctagagccccatgctatgcagtaggtcaccagggctccctcctcctgtctaaccaaaacttggaccaatgtctcccctttccccggctaccagggacccatccctgcctctagcttctactacccaccattctcctctcgacctctctgaggttgactattttagattccacatagagatgaggtcatgtggtacttgcctctctgtgtgtggctcattttacacaaaaaaatatcccctaggttcatccatgttctctcaaatgacagaatcaagcactgaatatttttttttctttgagagatggagtttcgctctgttgcccaggctggagtgcagtggttcaatctctgctcactgcaacctccacctcctgggttcaaacgattctcctgcctcagcttcccaagtagctggtactacaggcgtgtgtcaccacgcccagctaatttttgtattttttagtagagacggggtttcactataagtgggccaggctagtctcaaactcctgacctcaagtgatctgcctgccttggcctcccaaagtgctgggatttcaggcatgagccaccgcacccag

SEQ ID NO: 82195 - DNA, 7418 bp, Homo sapiens; identical to SEQ ID NO: 81761
  sig_peptide (209)...(344): this location contains the signal peptide sequence, MWSLHIVLMRCSFRLTKSLATGPWSLILILFSVQYVYGSGKKYIG, Run with SignalP
  misc_feature (209)...(5281): similar to gi4160232 in the genepept database release 114, Run with FASTXY 3.3t00, default parameters

SEQ ID NO: 82196 - DNA, 438 bp, Homo sapiens
  sig_peptide (265)...(400): this location contains the signal peptide sequence, MRSSQSHLASYFLPLTLLQPSWPPCSLSDMRISLRPLHCLSLCLM, Run with SignalP
  misc_feature (272)...(353): similar to gi395330 in the genepept database release 114, Run with FASTXY 3.3t00, default parameters
acttaagcaagatggagtggcattaccagttttactatctggctctttaaatgtttctatctggtggctctttagatgtttttatctgttgaaattcaagattacaagattacattagagggaagctctatgtggaagggtgtaccttgagagaatcaaaatgatttagagtttggtcatattactctcttgcttaaaatcctccacgggtttccagttgtgcttagaataaaactcaaatcccttctatggcctgcaaggcccatgcgcagctctcagtctcatcttgcatcatactttctacctctcaccttgctccagccatcctggccaccctgtagtctgtctgacatgcggatctcactccgacctttgcactgtctgtccttgtgcctaatgcatccttctctagagtctcataactggctcctcatgtca

SEQ ID NO: 82197 - DNA, 405 bp, Homo sapiens
  sig_peptide (237)...(372): this location contains the signal peptide sequence, MSVWSDPCNLSLCSWHTVLLLPWPSLCCVNTLRFNPSRCLGGENS, Run with SignalP
  misc_feature (97)...(217): similar to gi5104324 in the genepept database release 114, Run with FASTXY 3.3t00, default parameters
taccttagaaatcattgactttgcccaactgccccattttacagttgtggaaaccgaggtcatagaattggtaaattacgaagaaaactgtgtttcctagtaggtctccctgccttcactctgcctccaccaccaggagtctctgcacccagtcatctttctaaggggtgtgccatccatcactccccacgcaaaacctctctgtgccctccaatgcagctagactgaagcctgtgatgtcagtgtggtcagatccctgcaacctcagcttgtgttcatggcacactgtgcttctgctaccctggccttctctctgctgtgtgaacacactaaggtttaacccttcccgttgtcttggaggggaaaattctcccagatattcaggcttctttgtgtcattcagtc

SEQ ID NO: 82198 - DNA, 401 bp, Homo sapiens
  sig_peptide (42)...(177): this location contains the signal peptide sequence, MTFTVSVLLRIVLYSNCKRAGSFPEVIRERRGRKLVGVWQWFWSS, Run with SignalP
  misc_feature (181)...(264): similar to gi579142 in the genepept database release 114, Run with FASTXY 3.3t00, default parameters
ggcccttttcccaacaggtccctgggcaggaaactccagagatgacatttacagtctctgttcttctaaggattgtgctgtattctaattgtaaaagggctggaagtttcccagaggtcatcagggaaaggagaggcagaaaattggtgggggtgtggcagtggttctggtcttcagacagacaggcatcatctctgccctggattacagcaggacaagccttcaatagaattgggctttttgatctaccaattatacggttcttacacaactttgataattacattcaaaaattcccagccttcataaaatatcatcacagatgttcctgtatccatgctatctatgtagctacttttctacatggccaagagctcccttgtgctgaggagggcagggag

SEQ ID NO: 82199 - DNA, 756 bp, Homo sapiens
  sig_peptide (515)...(650): this location contains the signal peptide sequence, MAALLPALLPHLLSTAKPSAKTDTWGFCLPHSRGLLHMSGTSDHW, Run with SignalP
  misc_feature (237)...(156): similar to gi437270 in the genepept database release 114, Run with FASTXY 3.3t00, default parameters
tccggacttcccgggtcgaggcacacggcggggcagagcttggaagcggccgaggtgggggtccctgggtgtggatgtagtgaccccggagccacgtggagccaccttcagacccagagctgaagcaggagggtgaccggtagagcaaggccgtgcacacccccgttgcagaattgaaaacgcgcctcaaaataaaaccccgtgtttcacaagaatgcactaattcccgaagatatccgggcgcacgggatgcagtggggattggagatgcaggggccatgcaagtgagaaggaccctgctcagcgtgaggctctgatggtcttgaattcctttgccatgctcggacaaggggcctgcgctgtcacgttgctttggaccctgaaaattcgggagcccgtcctgagcccacgctgacatatttgccaggtatccagcatatgcacaaaacacctccacgccggtgctttgccctgccctgctctggagacccacatccaaggacaggtctctcctatggcagccctgctccctgcccttcttccccacctgctcagtactgcaaagccttcggccaagactgacacctgggggttctgtctcccacactctaggggccttctccacatgtcggggacctctgaccactggttcagacccacagctcctgggtgcactcagcattggggcccttatgggattagagaggttccaggccctgggggcacttgcactcacttgcagaactgggcctggaa

SEQ ID NO: 82200 - DNA, 404 bp, Homo sapiens
  sig_peptide (8)...(143): this location contains the signal peptide sequence, MGSWLKRGSWAELPLLIGPLHLAHRREPGPVASDSPLPLWQHFQA, Run with SignalP
  misc_feature (65)...(9): similar to gi1519303 in the genepept database release 114, Run with FASTXY 3.3t00, default parameters
attctccatggggtcatggttaaagagaggaagctgggctgagctccctttactaattgggcctctacatcttgcgcacagaagggaacctggcccagtggccagtgactctcctctccctttatggcagcatttccaagcacctgccctgtgacagatactggctaggtactggggataacaaagacgaataaaataacagcttaccatccagtagtagacatggagacatccgtttcctctgactagcattgggatggtgctgaaaccctggaactatacattcagtttagaactatacattcagtttagaactctcagttatggacggtctgccttctgtttttttgggttttgattttgggcaccagaaaacaatttgctaggaaactgccttactgtgt

SEQ ID NO: 82201 - DNA, 717 bp, Homo sapiens
  sig_peptide (251)...(386): this location contains the signal peptide sequence, MDCGWLVEKVPWCAFLCPLWILPELSTSEACFTFRLPGQDMQLLQ, Run with SignalP
  misc_feature (301)...(163): similar to gi897 in the genepept database release 114, Run with FASTXY 3.3t00, default parameters
agctctttttccttccatcttcacactggttggaagatttttctgattctagtttgtctggcactctgaaagctaaggaactgtattgtcatggcagaagaaacaattctctgtgtgcatctgttttagaatgaaaccgtacttttcttagtatcttaacatcacatgcattttgtagtttatggtctccagtctccagctgtttttggagcaccttctaactttgagagggtgagctctagcctgtaaaatggactgtgggtggctcgtggagaaggtgccctggtgtgcttttctgtgtcctctctggattctccctgagctgtccacctctgaagcctgcttcaccttcagactgccagggcaagacatgcagcttctgcagaactcatggcagccgttttccacttggccgagctgggtctgtgaagcagagaggaatcagtaataggaaagaaatgtagttgtttttttcccccttagaatacctaccatactgcatttcagcttggagtgcgcagcatgaggcatttgtggttcagaaaagaggtcttcctttttcctcctcctgttttcttttccttccttctccccaactccccaaaggcttactgcctttttttttaagccacgggtgtaaataaccctttgaggaaaaaatggtttcccgggctgggatatttggatattaacctaaaggggcaagaatgagcccct

SEQ ID NO: 82202 - DNA, 724 bp, Homo sapiens
  sig_peptide (143)...(278): this location contains the signal peptide sequence, MLVLSVPGVVIAAILRCGSIVPSFPFLPDVGTTVRSAARCHHLGA, Run with SignalP
  misc_feature (157)...(272): similar to gi4688962 in the genepept database release 114, Run with FASTXY 3.3t00, default parameters
ggtcttcattgagtgtttagagagagacagactgatagaattccaggaggactcctatcccctgtctttttttggccctaaataaagccatccactgtagggttgcccctacaatccacaaagtccttgtccctaaggagccatgttggtcttgtctgtgccgggggtagtcatagctgctattcttcgctgtggctccattgtcccttctttcccatttctgccggatgtggggaccacagtcaggtcagcagccaggtgccatcatttgggagcatgtgagcttggatgctctggccaggttttcatagccacccagaatggtcctgacttttcccgttggagaccatggaatgggtctccatcttgaccatctctgggagcagggtggatgggaaatccacttgagggtggacttcaagcagacacagagggaagcagccttggtcagcaccacagacctcgacagagccatgcctctgttccagaggcctctctgttccaggttcaggcccctgcaggttttaggggtaggtgaaggctcccgggagaggggggccatgtgcctgcaagcctgggcacgtgcccgcgggaggggtgagtactgaacgtgctttgagtcactcactgagtcatggctcggccgccacagaacattgttataataacagacatagagaagaaaaacctggcccaagaagaagggaaattctggcttcactcc

SEQ ID NO: 82203 - DNA, 440 bp, Homo sapiens
  sig_peptide (100)...(235): this location contains the signal peptide sequence, MYYTLCNFVFFTLHMILFPKSLNILLSNQIRSAIVHLKQRTSCIK, Run with SignalP
  misc_feature (118)...(237): similar to gi488336 in the genepept database release 114, Run with FASTXY 3.3t00, default parameters
tactactcagaagaaatcagagttaatattttagtgtaaattttttatctatgaagtaaacaattttaaaagctaaatatagagtctcatttagaaaatatgtattataccttgtgtaattttgtattctttacacttcacatgatattgtttcccaagtcattaaatattcttctaagtaaccagattagatcagcaatagttcacttaaaacagcgaacaagctgcattaaaaaccagccagagccttaccaaagagctgatgctatgaataccaatcatagcttagttgctgttccatatgttaatttaatttgacagagtaagagtctttgaagtcctaattctcttttgcatccaataaaccagtttttatagtgcgtgaacttttagacatcagcctgcagctaaactcatgtcgggaagttgccatgaggtca

SEQ ID NO: 82204 - DNA, 376 bp, Homo sapiens
  sig_peptide (19)...(154): this location contains the signal peptide sequence, MGSIITCLTGTCLETQLCFWGSLTGTCLETQLCFWDSYDCGHHWA, Run with SignalP
  misc_feature (195)...(307): similar to gi456778 in the genepept database release 114, Run with FASTXY 3.3t00, default parameters
ctcagaagccactttaacatgggcagcattataacatgtttgactggaacgtgtttggaaactcagctctgtttctggggtagtttgaccggaacgtgtttggaaactcagctctgtttctgggatagttatgattgtggtcatcactgggcgagatgccctgtttcttcctttgacagctactgcatggaagatgtcctgtgaggtcttttcacctaggacaaggcagggcttgggcgtatttaagtgatagctcaaagatgtgtgactgccccaaccagcactcattttgcacagagcaggggaatgatatttgtcttgtgattttgacactgacccaggaaaggggctagtggatttagaggaggtttatctt

SEQ ID NO: 82205 - DNA, 1053 bp, Homo sapiens
  sig_peptide (280)...(415): this location contains the signal peptide sequence, MLTSSGCEKHLSLASVSSLSLFCVCCSSCQLLWENECERGSQRGW, Run with SignalP
  misc_feature (245)...(158): similar to gi5104694 in the genepept database release 114, Run with FASTXY 3.3t00, default parameters
ttagccaagatggtctccaactcctgacctcgtgatcgcccgcctcagcctcccaagtgctgggattacaggcttgagcaactgcgcacaacccagaactattttaagcaggccaatctttgtattgtttgggccacacacacgattcagccagagggtgggggccctttcacgtctcttctcgtggcccgggccctgtcagcggcattcacctgtgtggtaggagccatcggctgtgggaactctgtggaagtggctagccttgcacatcctctgatcatgttgacttcatcagggtgcgagaagcacttgagcttggcgtcggtgagttccctaagcctcttttgcgtgtgttgcagctcatgccagttactatgggagaatgaatgtgagagaggttctcagagaggatggccacctcagtgtaaatggggaagcgctgtgtaagtatggcttcgttttcctgtgggcgtcggtcgtggaagttggtcccccacgctgtcatgttgggtactagcagtagagaatgatcggcccgtgtgacatggtggtcctcactgatgacgacgggctgttggagctgctgcttaagccctcatcacagaagctcatagccaccagatcgcatttgctttgattgttgactgtctcgtgtgtaattgagtttcccagtttctacagactgccattgctatgcacggctgagatggacagagtttgcttgtgaatccgccacactcactgcctgtcaccacacctgcaggcgacgactgtaagggcaagaggcacctcgacgcgcacacagccgcccactcgcagtcgccacgggctgcccggtcgggcagggaccctctggcacatctgggcatgtgcaggttgtctctcgccccgtctccgtctcatctcgccctgtcaccatgctatttgtgtcttgtgtggtttgtgcttggaattcaagtgctttaaagtcttgctgtaaaaactgacaggaatagtattaactttggtttaaaacagggtgaatctctctcgaaaagcttcctttggaaattt

SEQ ID NO: 82206 - DNA, 715 bp, Homo sapiens
  sig_peptide (197)...(332): this location contains the signal peptide sequence, MYGWTMTSTISCVFWACPQRKKGLCKREGVGSSILIHSLAAFVMF, Run with SignalP
  misc_feature (268)...(314): similar to gi1653003 in the genepept database release 114, Run with FASTXY 3.3t00, default parameters
cccattcacatataagatggggaggcctttatccacttccctaagagggttgttgtgacaattcagagcagtgttagagtccaaagtcgggtgaatgcccctggggagtgtacaggaccatcctttatagtgtgagtagaaagtcttagcatttttattttttactcaacaagaaattaggctttacaaatatttgatgtatggatggaccatgacatccacaatcagctgcgtgttctgggcatgtcctcaaagaaagaagggactttgcaaacgggaaggggttgggagctctatcctcattcattcccttgcagcctttgtgatgtttgattgcaatttgccacttctggtgaggcgggtacgcagaatacattatccagcttaaactcaacaaaccctgtttcaacaaactgaagaagtggcttaaaaagttttcatgaattaaaagctaattaaaatctataatgaacaatatccacataaaccaaaaaatggcagagttaacacttcactgggaagaagtttttgttgtcgtcgttgttgaatcagccccagtaagatgtgaaaaaaaaaacagactaatgatatctgacaagaagtcggcccaagaagttcaaaattatcaaggtcaggtgcaggggctcatgcttgtaatcccagctctttgggaggccaaggtgggaggatcacttgggggccaggaatttgcacc

SEQ ID NO: 82207 - DNA, 812 bp, Homo sapiens
  misc_feature (1)...(812): n = a,t,c or g
  sig_peptide (223)...(88): this location contains the signal peptide sequence, MSRPMMTSASWTSVWSVFVMIYLYFERKYVLPLLGVVFYTIISND, Run with SignalP
  misc_feature (296)...(334): similar to gi2090 in the genepept database release 114, Run with FASTXY 3.3t00, default parameters
tattatatgtactataatatacacataagctctttacagaagaaagctgatgtgctgatacctgacaaaagagattctaaagcaaaggcatcattagagataatggtgtagaacaccacaccgagcaacggcagcacatattttctttcaaagtacaaatatatcattacaaaaactgaccatacgcttgtccatgatgcagatgtcatcataggtcgagacatttatgttttataagttcagcttctagattcgggggtgcctgtgcaggtttgtcactgggtgtactgcagggcgccgatgtttgcggtacaggcggtcctgtcgcccagctcatgagcacagtccccaacagttagtttttcagcccgtgtccctccccagtcgtcctagtatctcatgtcaccatctttatgtccacttcacagaaatcagccaccgcatcctgtgctcatacaacaccaacattgaagagctctttgcagaaatcgatcagtgcttggccataaatcgaagtgttcttcagcagttggaagaaaaatgtggccatgagatcacagaagaggaatgggagaaaatccaagtgcaggtaggtttggctggcagcctggcaaccagcagactcagctgcagctgcagaggctgtggggagtggcatgtggggggaggtcgaggactcactttggggaagccttaggagtgttcaggcccggggttgcagccctgggaggttttggggggttggcatnttcggggggangttcnaggattcacttttggggaagcntagggattttcaggccccgggttaa

SEQ ID NO: 82208 - DNA, 1327 bp, Homo sapiens
  misc_feature (1)...(1327): n = a,t,c or g
  sig_peptide (328)...(463): this location contains the signal peptide sequence, MFWMVKILTPKASTFQVTTSVSVPLTSATGAACSGSCFHSTGCAG, Run with SignalP
  misc_feature (352)...(452): similar to gi2558467 in the genepept database release 114, Run with FASTXY 3.3t00, default parameters
aacagtcgacgatatcgttctgtgtgtcagccttcctggaaggcacttaaatgagttcacagaaggcaaagtgaaggacatacgtaggtgactcgagtgtccaccatcgacctgttctgcaacccagctgtcaaaatcctgccccaagctctttgacataagggtacttctggtagaatttttttaaaacttaattacttcctgcaggcttcagaatgtttgagcatgaaaacaaatggaagcaggcttactttcgatgtcttattaaggtctttaccatgatcaatgttacctttatgacaagcttcatatgccttgttaggcagaatgttttggatggtaaaaatcctgactcccaaagcatcaacattccaagtaactacttcagtttcagttccgctcaccagtgctacaggagcagcgtgcagcgggtcctgcttccattcgactggctgtgcaggacggccacaaacacacgcaggtgcaccctgcgcttctgagcagaactctcggaatgaagtaatgcagacgtccacaaatgagatgtgatttcactgagggaggctgatttttagcagttgttccttttttaacagatagtctataagtggaaactgacctgaaacattcagctctaaagaaataatcacaaagcacctcggtgcctgatttttgcaaggcagtccttgccggaggatcgggcattcgtgcacattcacccggagaccgtgctgtccacttccagaaggggaggaagggcagcgctcagaagcacgcccagactgtctccagccctgctgccccctgctgaggccatctcgcctgctcagcccccaagttcccccacagtccatgtccctgggttatgaatgtcacctggtgtctgtcagatccccaccccattgttcttgtcaatgagcaggagtggggtggacctgccatcctgcgaatcctttacagcctgcaagcgctgcctgccaactcttcacaaccattagcacccactaacaatccatttcccctggagctcttcactctaaagatagaagaccaaaaaatagaagtgtcctcatttctcacagtactacaggaggaggtgagaaccgattgcatccgtgcatcttaggagaatctcatttcagacctcggctttgagtgcgcctcctgctcagtcagcccttttccctcgctggcaggttgacgtgggtcaggacagtgcgcagttcaggcagccttgattttcggttctggggtttggtccaaggattgaccgggttccnttttgttcattgccccttcntgttgcaacccctgggtttgttttggc

SEQ ID NO: 82209 - DNA, 578 bp, Homo sapiens
  sig_peptide (79)...(214): this location contains the signal peptide sequence, MQTHLGASCLSLVIRIALLFLVQRDGHLHSRREIYAIFTKGSLCP, Run with SignalP
  misc_feature (102)...(167): similar to gi288481 in the genepept database release 114, Run with FASTXY 3.3t00, default parameters
ataaactgtgggaaagtgactgtgaaatatatgagtgaaactaatggaagataagggttatttcagtaaggtttgtttatgcagactcatcttggtgccagctgtctgtctctggtgataagaattgctctcctcttcctggtacagagagatggacaccttcattcacgaagggaaatttatgctatcttcacaaagggaagtttatgtcctgcttttaagtgggcaagggtgggcagagaactcttcctgcatctattgctttccaactgccatcagctcaaaataattcttatcccaaagtgtcatattttggggtggcatatcctgatccccttcaccagtaaaatctgggattcctacttcattgtccagtgtttctcccattttactacactggcaaatgtgtttatggaggaagataatccggtaagtgagttacaagttttccagtgacatagaacgatatgaaaaaaattatgagtttagaaaagttgaacatggtagatagagttcaatgttggaaacaaggaaaactagatccccccccccccttggtgaagagtagaggccaccac

SEQ ID NO: 82210 - DNA, 462 bp, Homo sapiens
  sig_peptide (99)...(234): this location contains the signal peptide sequence, MQLWITTPGPVLAHSWAPSAFAVCMGSTFLAKPCGEMSEAGASLP, Run with SignalP
  misc_feature (179)...(104): similar to gi3256609 in the genepept database release 114, Run with FASTXY 3.3t00, default parameters
ttatatttttgggtcgaggtgagtgtggccggaacccagctggcccacagtcccaggcacttgtgttctgtgtccctggactgggcagcggttcttgaatgcagctgtggatcacgaccccggggcctgttcttgcacattcctgggccccatctgcctttgcagtctgcatgggatccacatttttagcaaaaccttgcggggagatgtctgaggcaggggcatcactgcccatgtttggagaaggtgtgtgggttcatagcttccatagcctccaactaaggaatgttttcgaggttctgagagctgggtcgggggggcactgatgatgccagggacagcctgctgggcacagccccaagacagtccttgctgtgcttccctcgcccccttccaagggaggcctccgagacccttctggggccccctgcctccgctggccagagctcttcatccttctag

SEQ ID NO: 82211 - DNA, 428 bp, Homo sapiens
  sig_peptide (24)...(159): this location contains the signal peptide sequence, MKGSIFTLFLFSVLFAISEVRSKESVRLCGLEYIRTVIYICASSR, Run with SignalP
  misc_feature (24)...(431): similar to gi4768935 in the genepept database release 114, Run with FASTXY 3.3t00, default parameters
attcacattcagtcctcagcaaaatgaagggctccattttcactctgtttttattctctgtcctatttgccatctcagaagtgcggagcaaggagtctgtgagactctgtgggctagaatacatacggacagtcatctatatctgtgctagctccaggtggagaaggcatctggaggggatccctcaagctcagcaagctgagacaggaaactccttccagctcccacataaacgtgagttttctgaggaaaatccagcgcaaaaccttccgaaggtggatgcctcaggggaagaccgtctttggggtggacagatgcccactgaagagctttggaagtcaaagaagcattcagtgatgtcaagacaagatttacaaactttgtgttgcactgatggctgttccatgactgatttgagtgctctttgc

SEQ ID NO: 82212 - DNA, 576 bp, Homo sapiens
  sig_peptide (85)...(220): this location contains the signal peptide sequence, MVCWAWVASGALLSVVRELRRKLSYKMIGRGTWRAQVHMNGHSVK, Run with SignalP
  misc_feature (270)...(39): similar to gi699306 in the genepept database release 114, Run with FASTXY 3.3t00, default parameters
ccaagaatgatagacttcctgtgtgactggactgaggcacccatttgatgtgagggagaacaaaaggaaaggaggaaaaatgatatggtgtgttgggcctgggtggccagtggagcattgctctcagttgtgagggagttgaggaggaagctgtcatataaaatgatcggacgtggcacatggagagctcaagtgcacatgaacggacattccgtgaaatgtgtccagcagcagttggatgtgtgaccattaggctgaccagagccgggagctgcagagtggattgagactgacctgcagaggccaggcgggctgccctaagcccggggaggggtgaggtcatcaggccaaaatcaccagcaaggcaaggcggggaccaggtgcagaaagccttggggtctgtgcttgtggaacagagggaccaggggatggaaagggagctttctgggtagcacagtgtcaggggagccaagcaggatggggctggaggaggaaaaggcagaaagagctgactgaagtttgagttggggagtgggttcttcccagactggctgcctcactgcccgcccgccaggt

SEQ ID NO: 82213 - DNA, 573 bp, Homo sapiens
  sig_peptide (442)...(307): this location contains the signal peptide sequence, MFDLAMWNWLLGIFHIVCVSVCCTYDMQGKHPIQNSSTLWPSVSP, Run with SignalP
  misc_feature (433)...(310): similar to gi3878285 in the genepept database release 114, Run with FASTXY 3.3t00, default parameters
tgaggacaatgctggcatttccaggatggaagagcgagatggaacaaaagtatggaatgaggcctaaaacctccatacctaaggacttttgtaagagaatatattttcctatttatttacgagagaatgtattctctttattgtttgagtttcgttgggtttttggttacctgcagatacaagcatcctcgtattgatacatggagatgtaacataaagcagagaagttctttagccatgtttaacccatttgttcttgagctgcaactcagttgtcctgctgtgttgctatgctcagtatgtatgaggggaaacactaggccagagagttgatgaattttgtatggggtgttttccttgcatatcatacgtgcaacacacagacacacacacgatgtgaaaaatgccaagaagccaattccacatagccaaatcaaacatgggagggaggctagaaagtttcttattaatgcaaatcaataagaattgggtaggtgtactttgcaaagggaaaatggctatccctttgaagccatacaatttctagagataccaagactccgttcaaatgcg

SEQ ID NO: 82214 - DNA, 445 bp, Homo sapiens
  sig_peptide (4)...(139): this location contains the signal peptide sequence, MCHKLFGYTQIVWIASYFLLLSTIENIGCEHVQVFLECKILEVQV, Run with SignalP
  misc_feature (209)...(291): similar to gi312456 in the genepept database release 114, Run with FASTXY 3.3t00, default parameters
agaatgtgccacaaattatttggctacacccaaattgtatggattgcttcttattttttactgctatcaacaatagagaacattgggtgtgagcatgtccaagtctttctggagtgtaaaattttagaagtacaggtgctgtccaagaagagtacacattgacaattttgccaagttttgagtgcccttgaaagaattatagcatcttctgattccaccacgtataacagtgtctttgtcttcacatcctcatcaaccatgggtattattcatctttgtaatctttgccaatatgatgagagaaaatgcatatttgtactttattttttggagaagagtgttctttatcaccaggtggaagcatggggctgattggtaatgtaacttggcttcagagaaagaatccctggttaacccccagtatgggattaacggtctaccaccg

SEQ ID NO: 82215 - DNA, 615 bp, Homo sapiens
  misc_feature (1)...(615): n = a,t,c or g
  sig_peptide (278)...(143): this location contains the signal peptide sequence, MWVCGRPWVMCLFLLTSFVLLNNVACFPHLGAWLRPSSHKALKEL, Run with SignalP
  misc_feature (52)...(244): similar to gi1055010 in the genepept database release 114, Run with FASTXY 3.3t00, default parameters
cacatagtgcctcatgtagacccccacttcccctctccagactctcaggctcgggaagtgatgggtttcctgggaatccacaccatgatgactcgtaccttctacatctgtgcccagctgtggctgcctctgggatggtggatgagttccttcagggctttgtgtgaactgggcctgagccaagcccctagatggggaaaacaggccacattgttcaggagcacaaaggatgttagcaagaaaagacacatgacccatggccgcccacacacccacatctctccacgccccgtgccatttctgcccgccgctgcgtgctgggcggtttcctctgcacagagtttcccttgagctgctactctgaggtcgtgtgcctgttgtcatcttttaaagcctcagttttgtcgccatttcccaggtgacctctagcacactcaagtttgagaagcgctggtgtggttcaggagcagggccccttcattctccagcacactctccccagtcctctaagtcgagcgtgagctctgtccagagaaggcctccaaccagaccatgtggaccgnggtgnaggctggtgacactggctcctccccgccccggacagactgcttcccc

SEQ ID NO: 82216 - DNA, 369 bp, Homo sapiens
  sig_peptide (113)...(248): this location contains the signal peptide sequence, MLMKLVGRAAFLKLFHLVTVIVICLLLGGDCLGVTVCALSTGSQP, Run with SignalP
  misc_feature (47)...(110): similar to gi2781356 in the genepept database release 114, Run with FASTXY 3.3t00, default parameters
aaagaatccagcatctgggggaggtgttagggaattgaatgttgctaaagcaccaaagagagaggagtttgactattttgagcttgtctgtgacacctgttttgtttggaaaatgctaatgaaactagttggcagagctgcatttttgaagttgtttcatttagtcacagtgatagtcatctgtcttcttttaggaggtgattgtctaggagtaactgtatgtgcgctcagcaccgggtcacaaccaccgtgggatccacttacagagaagatttgtggagagcttcagcctgtttatggtgttactgagaaaggaattgtggccatttgatataattctggatggaagacctcttatttgtattacat

SEQ ID NO: 82217 - DNA, 623 bp, Homo sapiens
  sig_peptide (565)...(430): this location contains the signal peptide sequence, MAPLFFPSEPQTILTKFYLNTLIFLLSPAHVLLSSAMLLFPSSVQ, Run with SignalP
  misc_feature (285)...(127): similar to gi5870747 in the genepept database release 114, Run with FASTXY 3.3t00, default parameters
ttttttcttgtgtcacacaagtgtcagaaccagggggcattttagacattattcaactgaaactccttgtgttataaatagtaagaagactgagaggatcagagtgatgactgagttcaatgcacggttactgagtgctcctgtgagctagccatgtgcctggcactatgaagacagagaagcacggaaggacctgattcctgtcccacgagtttaccgtctagttgggaagactggatgctcttactggatgaaagagttaaatagcaaaacaaggtagtacacgatttagaacccttatgagtgatactatgaaacagttaatgctaaaggaggttaggatttgtacggcaaggttcgtaaatgtgatcctgagctaactcatatgggcaagatgagttctaaaggatggatattatttgatggaggacttgcacggaagagggaaacagaagcatagctgaagagagcaaaacatgtgctggagacaaaaggaaaatcagggtattaagatagaatttggttagaatagtttgtggttcggagggaaaaaaaaggggggccattccttacggaaaggggccaaaattggaacgcaaggtggaagtagggaaaaggctttt

SEQ ID NO: 82218 - DNA, 424 bp, Homo sapiens
  misc_feature (1)...(424): n = a,t,c or g
  sig_peptide (135)...(270): this location contains the signal peptide sequence, MQVSYETNQFLLLVCMWNFPVRFAFWHYNVLCSHKQSLLRLSYQK, Run with SignalP
  misc_feature (102)...(247): similar to gi1839229 in the genepept database release 114, Run with FASTXY 3.3t00, default parameters
ggctcctaatgggtttatgcctttttttcagaggctgacgctcttaaccttttcttggtactaggttaggataggtcttcttaaggtgatgcggttatggcatttattgtccttgtcctgaattattcctcaagatgcaggttagttacgaaacaaaccagttcttattgcttgtctgtatgtggaattttcctgtgagatttgccttttggcattacaacgtattgtgcagtcataaacagtctttattgagattgtcatatcaaaaggatttttctctaagcctagagtttccctttcaggtgtcataacacaaggtaagatactatagacaggagttcaaactctgcgctggtagcctagtcatttaacctcttagaaccccccacatcaatctctgattaagtgtagcactcttctcaan

SEQ ID NO: 82219 - DNA, 609 bp, Homo sapiens
  sig_peptide (162)...(297): this location contains the signal peptide sequence, MHCRQLKEVLQLPLTCSSCCVCTMTVAFPSVQQVWMETVLTLGGL, Run with SignalP
  misc_feature (147)...(234): similar to gi4455102 in the genepept database release 114, Run with FASTXY 3.3t00, default parameters
tccacccgaggggtcctgagccctatcctggtttgttgccggacccccaagagcattccaagcaaatcaacactgacacattcatgatctaatgctcagattcattcagctttctctgactctccgctgatgcccttcatgcctaagcatgctcccggtccatgcactgcagacagttaaaggaagtgctgcagcttcctttaacctgcagcagctgctgtgtctgtaccatgaccgtggcatttcccagcgtccagcaggtgtggatggagactgtgctgactctgggtgggcttgatgctgctcaggatgagatccaggcggtgaggctcattctcctccctgagtcctctcctcaggggccacatgggaacctggctccctgttctgcaaagcccttcttccttccccaagtcatgcccttgggcacagccccttagggctaggggccttcaccctcaggcaggctgacccacccctgcaggccaggatggctgagtccctgctggggtggagcacgcctggccctgcctctacgaaccggagcacagtttagaccttcgcccgaagaggacagcagttaccccggcccaaaccaaaggacgcccc

SEQ ID NO: 82220 - DNA, 449 bp, Homo sapiens
  misc_feature (1)...(449): n = a,t,c or g
  sig_peptide (265)...(400): this location contains the signal peptide sequence, MREARLPQGALPFCQLSPGRIFLRGFWILFLSHSLSVGRVPNTMP, Run with SignalP
  misc_feature (160)...(110): similar to gi5410324 in the genepept database release 114, Run with FASTXY 3.3t00, default parameters
gggtcgactccacgcgtccgggcaagctcaggcagggtccttcacagacgtctgtttcactcttttgtgacccaagcacctgggcccttagacagtaacaccactcacaccgagcacagaccagctcgcgcccacaacacgagcctgtgacacgcaagtctctgtttctgagctgatgccgtctggctttggccatgagaccctcgtgtgaccaggtgcgtgcctaagttagaatcgcccaggctaagttcgtgaaccccctggatgagggaggcccgactcccgcaaggagccctgcccttctgccagctctcaccgggccggattttcctgcggggcttttggattttgtttttgagtcactcattgagtgttggtcgcgtgccaaacaccatgccacactgcaaaccatgtgcaacgttgtttagcanagcttgctcagtaaatgg

SEQ ID NO: 82221 - DNA, 849 bp, Homo sapiens
  sig_peptide (90)...(225): this location contains the signal peptide sequence, MELWGAYLLLCLFSLLTQVTTEPPTQKPKKIVNAKKDVVNTKMFE, Run with SignalP
  misc_feature (90)...(699): similar to gi825722 in the genepept database release 114, Run with FASTXY 3.3t00, default parameters
gacccaatgatccggcctgggccgtggctgtcactgcgttcggacccagacccgctgcaggcagcagcagcccccgcccgcgcagcagcatggagctctggggggcctacctcctcctctgcctcttctccctcctgacccaggtcaccaccgagccaccaacccagaagcccaagaagattgtaaatgccaagaaagatgttgtgaacacaaagatgtttgaggagctcaagagccgtctggacaccctggcccaggaggtggccctgctgaaggagcagcaggccctgcagacggtctgcctgaaggggaccaaggtgcacatgaaatgctttctggccttcacccagacgaagaccttccacgaggccagcgaggactgcatctcgcgcgggggcaccctgagcacccctcagactggctcggagaacgacgccctgtatgagtacctgcgccagagcgtgggcaacgaggccgagatctggctgggcctcaacgacatggcggccgagggcacctgggtggacatgaccggcgcccgcatcgcctacaagaactgggagactgagatcaccgcgcaacccgatggcggcaagaccgagaactgcgcggtcctgtcaggcgcggccaacggcaagtggttcgacaagcgctgccgcgatcagctgccctacatctgccagttcgggatcgtgtagccggcggggcgggggccgtggggggcctggaggagggcaggagccgcgggaggccgggaggagggtggggaccttgcagcccccatcctctccgtgcgcttggagcctctttttgcaaataaagttggtgcagcttcgcggaaaaaaaaaa

SEQ ID NO: 82222 - DNA, 757 bp, Homo sapiens
  sig_peptide (230)...(365): this location contains the signal peptide sequence, MSPSEILVFNSFLILLPAAFLLSLSDQDKDQSGTQSSISSPLRVP, Run with SignalP
  misc_feature (352)...(297): similar to gi2661819 in the genepept database release 114, Run with FASTXY 3.3t00, default parameters
ctcccagtcactttattccatttggtatcacaataaagaagtatcttgcttccatgaataacacacaatgacaaatataaaacaaactgaagagtctaccaagtcatggagtgtgacaagattccagataaacatacagaatggatgtctcagttgactggtaactgaatacgctggcttttttcatgcttaagaattaaattcaacctagatccagggcaacggaaagatgtcaccttcggaaatattggtattcaattccttcctgatactattaccagctgcattcttgttgtccctctctgaccaggacaaagatcagagtgggacgcagtcttccatttcatcacccctccgggtcccctgggggtggggacccaggtgagaaacgtgcaaggatgctattgccttgcttggactatgattaggacacttgttgtggtcgcacccccctgctcacccaaaaaacagtgggacgcagtcttccattctctcacccctcaaaatagttttttagagaactacccaggacgaaaaaatggccgcgtgcccaagtaaaatctggtttgagcccaatgaaccgggctcgaagaaaccaccccctctacgtaaaccgcaaatttatggagacgtcaccacacctgctttttttggattaagaactacaaagatgggaaatggccccttccccccaccacctaatctatcccttttaccggttcaacaaacaaccactatccctcctctcattatgagc

SEQ ID NO: 82223 - DNA, 450 bp, Homo sapiens
  sig_peptide (280)...(415): this location contains the signal peptide sequence, MLIGKPGLLKLGVPFLVGLQTPSVPLPVPSLPPALLAQAPSSWVC, Run with SignalP
  misc_feature (213)...(285): similar to gi595273 in the genepept database release 114, Run with FASTXY 3.3t00, default parameters
cgcccgaatttctgtggacgacccacgcgtccggaagtggctagttgaaaagaattaaacgtttctgacacaggaacaattctataaacattctaagtcaacccaaggcacccggggacatccttatcgtcagtgttgagtcatcatcccggcccaattccaggatcctgtgtgtataggaagtgcgcacggtgccggatctccgagtaaggttaggggtatacgcttcctgcttcctaaggcaggataggaggggagtagctggcaacactgaagattatgttgattggaaagccaggcttgttgaaacttggtgttcctttcttggtgggcctccagaccccaagtgtaccacttcctgtcccctcccttcctcctgccctcctggcacaagccccttcttcatgggtgtgcacaggctgtggcctggggctcgctcccccttgagag

SEQ ID NO: 82224 - DNA, 839 bp, Homo sapiens
  sig_peptide (39)...(174): this location contains the signal peptide sequence, MVCLRLPGGSCMAVLTVTLMVLSSPLALAGDTRPRFLEYSTSECH, Run with SignalP
  misc_feature (39)...(839): similar to gi386915 in the genepept database release 114, Run with FASTXY 3.3t00, default parameters
ctgctgctctggcccctggtcctgtcctgttctccagcatggtgtgtctgaggctccctggaggctcctgcatggcagttctgacagtgacactgatggtgctgagctccccactggctttggctggggacaccagaccacgtttcttggagtactctacgtctgagtgtcatttcttcaatgggacggagcgggtgcggttcctggacagatacttctataaccaagaggagtacgtgcgcttcgacagcgacgtgggggagttccgggcggtgacggagctggggcggcctgatgaggagtactggaacagccagaaggacttcctggaagacaggcgggccgcggtggacacctactgcagacacaactacggggttgtggagagcttcacagtgcagcggcgagtccatcctaaggtgactgtgtatccttcaaagacccagcccctgcagcaccacaacctcctggtctgttctgtgagtggtttctatccaggcagcattgaagtcaggtggttccggaatggccaggaagagaagactggggtggtgtccacaggcctgatccacaatggagactggaccttccagaccctggtgatgctggaaacagttcctcggagtggagaggtttacacctgccaagtggagcacccaagcgtgacaagccctctcacagtggaatggagagcacggtctgaatctgcacagagcaagatgctgagtggagtcgggggctttgtgctgggcctgctcttccttggggccgggctgttcatctacttcaggaatcagaaaggacactctggacttcagccaagaggattcctgagctga

SEQ ID NO: 82225 - DNA, 790 bp, Homo sapiens
  sig_peptide (131)...(266): this location contains the signal peptide sequence, MSLSCAFLTKLLLHAKACYANSTQYSKHFINNYINRVYKLFTYLL, Run with SignalP
  misc_feature (158)...(321): similar to gi5231261 in the genepept database release 114, Run with FASTXY 3.3t00, default parameters
tggaattcccagcttagaggtaaaaaggagtgaacaaataagtaacactcaatagttttaccaaattttcaaacatacttttactacatctttttcaagtaacatgctcttaagggcagttaccatcgatatgtcactatcatgtgcgtttctcaccaagctccttttacatgcaaaagcctgttatgcaaactccacccaatatagtaaacatttcattaataattacatcaatagagtttacaaacttttcacctatttacttgcatttttaatctttcttcttaagacttcatttcttttcttttaccttgtcgaatgtcttgccaaactgactaatgtttttagtgtttcaatatgtttcgtttcttcaccagcttcaaaagaattctgtcatctcaaatttcaggggcttttccacattactaaaaacagatttttctcatttagaccagaacttctagtctaagttcttcattgttaggaatttaactggccttctggctcaggtctttggcacctgtgacatgaaacgggctccaaaatgtaatttatgtaactctcaatcttgtatataaaatgaaatccatgaaggaaaaaaatataattaaaacatcaaaagtttaaaatttaaaaaatcctttactttgaatttgtaaaccaaattaatgagtcactttaaacaatatcttttaagaaaattttataaggttcagtcagaactctcacattctaaaaagacgtgaggtagaatttttccctgtgtacactaggtccttttcttgtcacc

SEQ ID NO: 82226 - DNA, 1648 bp, Homo sapiens
  sig_peptide (54)...(189): this location contains the signal peptide sequence, MMSPSQASLLFLNVCIFICGEVVQGNCVHHSTDSSVVNIVEDGSN, Run with SignalP
  misc_feature (495)...(1018): similar to gi1181678 in the genepept database release 114, Run with FASTXY 3.3t00, default parameters
ggtcgacccacgcgtccgatttgaagaagtgttttcatctatccaagaaaaatatgatgtctccatcccaagcctcactcttattcttaaatgtatgtatttttatttgtggagaagttgtacaaggtaactgtgtacatcattctacggactcttcagtagttaacattgtagaagatggatctaatgcaaaagatgaaagtaaaagtaatgatactgtttgtaaggaagactgtgaggaatcatgtgatgttaaaactaaaattacacgagaagaaaaacatttcatgtgtagaaatttgcaaaattctattgtttcctacacaagaagtaccaaaaaactactaaggaatatgatggatgagcaacaagcttccttggattatttatctaatcaggttaacgagctcatgaatagagttctccttttgactacagaagtttttagaaaacagctggatccttttcctcacagacctgttcagtcacatggtttagattgcactgatattaaggataccattggctctgtcaccaaaacaccgagtggtttatacataattcacccagaaggatctagctacccatttgaggtaatgtgtgacatggattacagaggaggtggatggactgtgatacagaaaagaattgatgggataattgatttccagaggttgtggtgtgattatctggatggatttggagatcttctaggtgatgcattccggggtctcaaaaaagaagataatcaaaatgcaatgccttttagcacatcagatgttgataatgatgggtgtcgccctgcatgcctggtcaatggtcagtctgtgaagagctgcagtcacctccataacaagaccggctggtggtttaacgagtgtggtctagcaaatctaaatggcattcatcacttctctggaaaattgcttgcaactggaattcaatggggcacgtggaccaaaaacaactcacctgtcaagattaaatctgtttcaatgaaaattagaagaatgtacaatccatattttaaataatctcatttaacattgtaatgcaagttctacaatgataatatattaaagatttttaaaagtttatcttttcacttagtgtttcaaacatattaggcaaaatttaactgtagatggcatttagatgttatgagtttaattagaaaacttcaattttgtagtattctataaaagaaaacatggcttattgtatgtttttacttctgactatattaacaatatacaatgaaatttgtttcaagtgaactacaacttgtcttcctaaaatttatagtgattttaaaggattttgccttttctttgaagcatttttaaaccataatatgttgtaaggaaaattgaagggaatattttacttatttttatactttatatgattatataatctacagataatttctactgaagacagttacaataaataactttatgcagattaatatataagctacacatgatgtaaaaaccttactatttctaggtgatgccataccattttaaaagtagtaagagtttgctgcccaaatagtttttcttgttttcatatctaatcatggttaactattttgttattgtttgtaataaatatatgtacttttatatcctgaaaaaaaaaa

SEQ ID NO: 82227 - DNA, 739 bp, Homo sapiens
  sig_peptide (124)...(259): this location contains the signal peptide sequence, MRTWSKVIPSLWLKFSRGFIILRFHFLMIIWPDIPSSMYICMSFI, Run with SignalP
  misc_feature (121)...(302): similar to gi2313577 in the genepept database release 114, Run with FASTXY 3.3t00, default parameters
agcgtggtggaattcctcagccaagatgaagcatgccttttcaaaaagaacaccccaaaataagtattttaccattatctaaaagactacttttgctgggttttattttttaatctattgaacatgagaacatggtcaaaagtcataccttccttatggttgaaattttctagaggttttataatattgagatttcattttttaatgataatttggcctgacataccttccagtatgtacatttgtatgagttttatcacagcatttaaaaatctctttatgtttggaattaataggattaaaaaaatctcagtagtttctagaaatactttatagtgacagttttgttttttagtcttccagattgttgatattaatgcaaacaatattaagcttatatcacaaaaatattttcagtaaagcgtattttttataaactgtgttaggcactgggaataatacaaaaatgataaataaagcctgtcccttgcctgatgtcacagtcgggctacagctgccagaaacaaggccagcaaaattaggatacagcttgcgaatgtagtgtgaagaaaggccttcggaataccaaagaaaattctagggtcagggaaagctttgaagagaaggtgatgtttcagctatgtttgaagaatggggagggctcatcagcgatagaacatttctagataggcttggaagcatgagagcatggagcaattgggaacacccaatatgcccg

SEQ ID NO: 82228 - DNA, 1066 bp, Homo sapiens
  sig_peptide (159)...(294): this location contains the signal peptide sequence, MGLCVPFAVTTSFLSLGLEWDLNVRLHGQHLVQQLVLRTVRGYLE, Run with SignalP
  misc_feature (210)...(1024): similar to gi2358279 in the genepept database release 114, Run with FASTXY 3.3t00, default parameters
cggacgcgtgggaaaaaaagaaagtagtccttgaatcctttctgctacaaagtctgccctctggcttcttattctaaggccaaacaggaggagtaactgattccacccgagagagattcagagttgcttggtttcttggctgttggctgttgtggtggatgggcctgtgtgtgccttttgctgtgactacctctttcctgtccttaggcttagagtgggacctgaatgtgcggctgcatggccagcatttggtccagcagctggtcctaagaacagtgaggggctacttagagacgccccagccagaaaaggcccttgctctgtcgttccacggctggtctggcacaggcaagaacttcgtggcacggatgctggtggagaacctgtatcgggacgggctgatgagtgactgtgtcaggatgttcatcgccacgttccactttcctcaccccaaatatgtggacctgtacaaggagcagctgatgagccagatccgggagacgcagcagctctgccaccagaccctgttcatcttcgatgaagcggagaagctgcacccagggctgctggaggtccttgggccacacttagaacgccgggcccctgagggccacagggctgagtctccatggactatctttctgtttctcagtaatctcaggggcgatataatcaatgaggtggtcctaaagttgctcaaggctggatggtcccgggaagaaattacgatggaacacctggagccccacctccaggcggagattgtggagaccatagacaatggctttggccacagccgtcttgtgaaggaaaacctgattgactacttcatccccttcctgcctttggagtaccgtcacgtgaggctgtgtgcacgggatgccttcctgagccaggagctcctgtataaagaagagacactggatgaaatagcccagatgatggtgtatgtccccaaggaggaacaactcttttcttcccagggctgcaagtctatttcccagaggattaactacttcctgtcatgaaggctagaggaagacttcctggaactgcctttcttcca

SEQ ID NO: 82229 - DNA, 604 bp, Homo sapiens
  sig_peptide (116)...(251): this location contains the signal peptide sequence, MGQSLIPSPFFSHFKFFKMARFSFKFCFKFCLFLFLKTESIYTQT, Run with SignalP
  misc_feature (240)...(125): similar to gi1334479 in the genepept database release 114, Run with FASTXY 3.3t00, default parameters
gattatttttaaaaatataaatttcctaagcttcagtatcatctggaatatgggtataataatatctgtcttataggattgctataaaaattaacttcttttaaggaactttagcatggggcaaagcttgatcccttcccctttcttttcccatttcaaattcttcaaaatggcccgattcagcttcaaattctgtttcaaattttgtctatttctattcttgaaaactgaaagcatatacacccagacagcttactgtctatattaacacaatttaacttttcaacctgtgcattaacctgacttaattattccaggaaatccttgcccaggaagatggagttgcaaataactgcttatttcagaatcttcaaaatttatttatctgaaaaatcaattcattctctttaagtaaatagcctcttctcgaaacaatagaatattaagctgggccccccaaatgattatttactcttaaagactcttcagtgcactccctttactggggccattaattataccttattatattataacatctttcaggaccaattagaacactttactgaaagacctgcccccaagggtcacacccatcttttcc

SEQ ID NO: 82230 - DNA, 713 bp, Homo sapiens
  sig_peptide (113)...(248): this location contains the signal peptide sequence, MKFSNVLCTCLLILQKVKLFYKTVHENSSFLPCFSHLIPSPQRNL, Run with SignalP
  misc_feature (414)...(295): similar to gi46718 in the genepept database release 114, Run with FASTXY 3.3t00, default parameters
cccacgcgtccgggctggaggattgcttgaggccatgaattcaagaccagtctgggcaacctagcaagaccctttctgtacaaaaaaataaaaattacaaaaaattatttaaatgaaatttagcaatgttttatgtacgtgtcttctcatacttcaaaaagtcaagttgttctacaaaaccgtccatgaaaacagtagctttctgccctgcttttcccacctgattccctctcctcagaggaatctctcatctatcttctgatgttgaaccataagaaaatgctgatatttgactgctttagatctgtgaaaatgactgtatcttgagaaagcatgcttatcatgtcatttcttgatttttttaaattcaattttggatatttactttcctcacactgtggaagatgaagatataactcttatgacttcccccaacacgtctcttctcccactgtaatattaatatgatttttgtttgattaatatataatggttatagtattatttagactggaaataattcacagccaagacatgtaatttaaatatttccttcctcatacagcttttgcccacccagagttaatcattgttttgagtgcttgttttaagtacctgtcactgactcattccccaactgaagcctaaccttccttttttgtggggaggcacacctcaggggtagctgccattcatcctttcttcctgaggcg

SEQ ID NO: 82231 - DNA, 924 bp, Homo sapiens
  sig_peptide (274)...(409): this location contains the signal peptide sequence, MFRAALSAALQLFFPWKGNCRYELYPASLCDIKAFYHSVMACSSE, Run with SignalP
  misc_feature (158)...(221): similar to gi1685338 in the genepept database release 114, Run with FASTXY 3.3t00, default parameters
cggacgcgtgggatgagaacacattcagacaaaatccaggcatgaaaagtgttaggataaagtttcagatttcaaggccttaactaaataactgccacagaggctttttatacagacaaacacgtgatcacatgcaccagtgccccattgagggacctgtgtcagttacacacctcagtccttgaaccttgaccatttcactctaggccctgggttctctaatgaatagtttcaacaggcacttcatgcctgtctgtatcctggaatgtagaaatgttcagggctgctttgtcagctgctttgcagctgttctttccctggaaagggaattgcagatatgagctataccctgccagcctttgtgatataaaagcattctatcattctgtaatggcttgctcttcagagaaacagaatgagtggtctttttgtggaagaggcagtaagtcacactttcacagcagtttggcatgattaatataaagtatatggaatttgtttatttagcaaagatgtattgattatatttcaaagttgggtaaagtttttaatatacataaagttgacaaagtagcatgatttgtatctgatctttcacatttaacagttgcttggaaaagatgctaattaatgaagaggagcaactactattggtgtatttttcacagattggggctttctaaataaaaattgaaagtaactcctaacattgaatggggttgctactgaaaaagtaatgatcttctggtgcaaacagttgcttgtggacttaaaccttggcactggtggggaatttggtcagattttacaacccctggccaagaatagaacagctgaacttacaaccacacccaggttaataaaaagtccccgggaaaaagaaaggccccccccaaaagggaagggaccctgcgcccaaaagga

SEQ ID NO: 82232 - DNA, 436 bp, Homo sapiens
  sig_peptide (182)...(317): this location contains the signal peptide sequence, MKSSNIFSLFLFLVTFIFLTSIASILFSSWCPFSLIKCNQDLYYS, Run with SignalP
  misc_feature (270)...(170): similar to gi1002346 in the genepept database release 114, Run with FASTXY 3.3t00, default parameters
ggaaattaaaagatttaattgttaaatgtaagttgggaaattaaaagtctgtgtaattagtcctgtttttgccacctgtgataaaataataaggcttctatttatctaagaagacccgggcatacacaacagtggtttttaaaaatttaccgtcaacttgaagtattttcctttctcttccatgaagagcagtaacattttttctcttttcttatttttagtaacttttatcttcctgacttccatagccagcatcttattttcttcttggtgtcctttttcccttatcaaatgtaaccaggatctttattatagtggaaatggggccagttgatgaagtctaatatgaaacgaatattttaactttcaaatgcagaagagctaagttgcaaagatagcagaactgtccaatctgtctaccttcacagcagtgctg

SEQ ID NO: 82233 - DNA, 787 bp, Homo sapiens
  misc_feature (1)...(787): n = a,t,c or g
  sig_peptide (35)...(170): this location contains the signal peptide sequence, MLCSLFHILIVTLLLAISFGMSSRNTLNMVNSKIKEHSLHRKLEI, Run with SignalP
  misc_feature (44)...(162): similar to gi3929713 in the genepept database release 114, Run with FASTXY 3.3t00, default parameters
gaatcttgttaagggttggctgggatacatttatatgctttgcagtctcttccatatattaatagttacattattgctggccatctcatttgggatgtcttctaggaatactctgaatatggtcaattcaaagattaaagagcattcactccatagaaaacttgaaatatgaaatcttatagctcagatatgaaggaaacttagcagtttccccagatttgacaattctaaaaattacatggtgctactaatacatagttgaggatgtaaaagaagcctctataaactgccaaaaagaaaaataaaaagggattttccattaaaaatgtatgtgctatgtaattttaaatgagatcatgccattatatagattttttttttttggacggagttttgctcctgttgcccaggctggagtgtaatggggccatctcggcttgctgcaacctccacctcctgggttcaagcgattctccagcctcagcctcccaagtggctgagattgcaggcaccgccaccacccccgcaaaattttggaattttaagaagatagggggttcaacattttggcccggctgggcttaaacttctgatccacccacttaacctnccaaaggggctgaattacagggtgagccaccgccctgccagtatatgaatttaaaagggtggtttgaggcacactacattttcctagaactactccgatatattttacggggaacctaaattttacccttgtaaataaaaaaaaaatattttattccaaaaaaggatggccctcccc

SEQ ID NO: 82234 - DNA, 1603 bp, Homo sapiens
  sig_peptide (408)...(543): this location contains the signal peptide sequence, MWIQISALFLLCYLGKSQKPQISSIPNKDKLGINYIIHIKILAYC, Run with SignalP
  misc_feature (730)...(642): similar to gi5702177 in the genepept database release 114, Run with FASTXY 3.3t00, default parameters
agtccggacgagacttttcagcttaaggagtgttcctttgttttcagggccaattggaaaactcccaggcaccagggacatgagttaaccaatagggaatgagaggctcagaaagccagaggtgaaaggagcagagggtgtcaatatacacagatgtgatgcagaattaccaatgaaatcaagtaaaagggatttatccaaaagaagtaagagaatagtgtaaagattctactcacatgcaaggatgtttgtctcagtggcattaaatatatgaataactgaaaataaactaaatgttccatgacagggaagtaattaaatgatgtatgatccattactgtgatacaatgtaccataattgaggacaatggaaacaatgatcacacacagacttcgcagtcagaaagatgtggatccaaatctcagctttgttcttgctgtgttaccttgggaaatcacagaaacctcaaatttctagcataccaaataaggacaaattaggaataaattatataattcacataaagatcctagcttactgcttggctcatcagtatatcaataaccagcagctatcactattgtgatatgatgatggaatatcatgcaatcattttattttgaaaactttaattaaatgggaaaagacataaactatagtagtattttaaaactaggataggtttccaaattattataatctcacatttaaataaatatgagactatctgtaatacactaagatattgagtgataaatcctcggtaaatgaaatatttattcattgtgtgtttccatgttttcattttaccacaagcatttataatttataacattgagaaaagttcatgtaaatgaaatgcagagcaagaaaaactcacaggctttagaatttggggagcttacaggcctgtgaagaaaagccttttcatcttagctttaataaataaagttttcactgaacatattatatttacagtaaatgattaaattgaaagcaaaaagaaaatactgtatcatctcacattatcataactgagtgcattcatgtgcttttggtcttaaaattttactttaacgcacttaggatttgtcgtcagtaatttgttatgcactatctagactaagaataggtattaatttactagaattgtcaaatgaaatatttcaagcaaagtttgcataatgaatgcaagtttaaaccaattaaatgtgttcactttttagcaagctaagctgctccttatttctcctgtagtagacacaatcacagttaatctttgcacaatgcatcgcattctccatgcaacctaacagagcggtctgggatagagcctgaactttgggtcccttggggcccaacaggcaaggttcagatctgggctctaccacaaaccatctgtgtaacctgaacctccctagtcttcagtttcctcatctgctttaaaaaattgcctagaacatagttcctatgtaaatgttcggtgttaaaatttatttggtatctactgtatgtaagatatggcctctgctctcaaaaatatgtagtcccagaagtgatataatatgttcacggagatgtactattaaaaagtgccacaaa

SEQ ID NO: 82235 - DNA, 836 bp, Homo sapiens
  sig_peptide (233)...(368): this location contains the signal peptide sequence, MERLRGKCLLIIALMTPLCTTTISSSCIEGSANFFCKEPGSNCVF, Run with SignalP
  misc_feature (211)...(318): similar to gi579151 in the genepept database release 114, Run with FASTXY 3.3t00, default parameters
aactcccgtttcgacccacgcgtccgcccacgcgtccggtgctgcatttttgtttcctcatcagtgtctgcctatggtaggttcccagcaaagaaatgatttacaaaaagtgactgaatcaataaatgtttagcgcgagatagtccagtgtaaccatgaattcaaaattgggtgaaatgagaaggcaaatagcatgtcaggcagtcaggttatctcagagtgggggacattgatggagagactcaggggcaagtgcttattaataatagcccttatgacacctctgtgtactaccactataagttcttcatgcatagaggggtcagcaaacttcttctgtaaagaaccaggtagtaactgtgtatttgaggccttgtgggccatatggtctgtggggcaactgctcagctcctctgtggtagcacataaacaaccatagacaatatgtaaatgaatgaacatggctgtgttctaataaaactttatttacaaaacatgtgatgggccaacccctgatgtatatagtattgacgcatttattcttaatacgttctatgcgcgacctactgttattaccaccattctattttgtcttttgatatatttttcttttttttgaattgtgataagtcctacttttttatttttatgggtgtgtattaggtgtatattggctacatgagatattttgatatgggcatacaatgcataataatcacatcagggtaaatggggtatccattatctcaagcatgtatcatttctttgtgttacaatcatcccaattcttttagttatttgtagatgtacaataaattattgttgactatagtcac

SEQ ID NO: 82236 - DNA, 1987 bp, Homo sapiens
  sig_peptide (956)...(1091): this location contains the signal peptide sequence, MQGMKTQLIQLSTLLRLLDSGFCSYLESQDSGYLYFCFRWLLIRF, Run with SignalP
  misc_feature (342)...(311): similar to gi556320 in the genepept database release 114, Run with FASTXY 3.3t00, default parameters
ggaattcaaaaagtaaaactaacactttttcttatttttaagtgagggatctgactccttaattttctagtttttcttttaatcaagggctctattactgtcaccattgagaaattgtaataatatcaagagacatgtaggtaagtggtcactttaggtacaaaatattgattgggttaagcccagttgctggcattggttgggtgtagagagtaacaaaaaaagaaagaaggacgtagatatgactatttaaaagaggctcttaattttgtaactcctgttatgtgaatctaaaggtctgattgttaaagcagttgaacccaaagttcttgttttatgtggcttactcatggtagtttggcattgctaaccactctgggcttgcaactttcttgttaatttttgcaacattattctcgcttgatttttttctttacttctctgactggtctttcttaaacctgtctttgagtgtatactcttacatttgatgttcctctggattatctcttcacccctcttctttctcatgatgctcttgcacattatttttaaaaatattacccactcttgatagtgtatctgcactgagacatgtactggaagctatatattgtttgacatctcaatctaaaacaactcatctttcttacttatgactagagttcctcctcttcatttatattcttttcttggtgaacatcagtgtctaccaatttctaaatgcaaaggagaaagatacaattttaagcgaaatggtggcgatatgcacaacttgcagaaggttacataaaacttgggttttcagagatgattttttcttttctttttaggatatgttcagggaatgagtgatttactttcccctcttttatatgtgatggaaaatgaagtggatgccttttggtgctttgcctcttacatggaccaaatgcatcagaattttgaagaacaaatgcaaggcatgaagacccagctaattcagctgagtaccttacttcgattgttagacagtggattttgcagttacttagaatctcaggactctggatacctttatttttgcttcaggtggcttttaatcagattcaaaagggaatttagttttctagatattcttcgattatgggaggtaatgtggaccgaactaccatgtacaaatttccatcttcttctctgttgtgctattctggaatcagaaaagcagcaaataatggaaaagcattatggcttcaatgaaatacttaagcatatcaatgaattgtccatgaaaattgatgtggaagatatactctgcaaggcagaagcaatttctctacagatggtaaaatgcaaggaattgccacaagcagtctgtgagatccttgggcttcaaggcagtgaagttacaacaccagattcagacgttggtgaagacgaaaatgttgtcatgactccttgtcctacatctgcatttcaaagtaatgccttgcctacactctctgccagtggagccagaaatgacagcccaacacagataccagtgtcctcagatgtctgcagattaacacctgcatgatcactgttcttgcttttttgggaagagacactttgttgcaaccctttttcaagtacttgaaagttgaaaatttgaaatcttggtattgatcatgctttaaggtttatgtaaagaaagtgtactgatgttcttacattaaagctttacaaagatttaaactaattatttttgtagttacttctaccaaatagcctttccttttcgataacattcctcagtatttttatagccaagtacattttattttcttgctgatgaactggaattggataaatattgcaagtggatgagttggaaattatgcactttgaaaaacattcactttgtttaagcttattgggtttcagatttgattaaattaaatgtggaggctttctatagcattctaagctgagaagtagattgttacccagtaatgaaataaaaaat

SEQ ID NO: 82237 - DNA, 1765 bp, Homo sapiens
  sig_peptide (830)...(965): this location contains the signal peptide sequence, MQRLGKAPGTWQAISKCWLLLLLSLPFSQSIIISLRAGTMSYLPL, Run with SignalP
  misc_feature (1547)...(1566): similar to gi1150657 in the genepept database release 114, Run with FASTXY 3.3t00, default parameters
tgtccaacccttttcgagagtaaaagggtgccattagtaattacatcaggaaaacatatcccaggcaaaccaggatatatggtcagcctacttgatgcattatgaaatgcggtgattgccgagttctgtcattctcacctctaagatatctctcatgtccatatcctcttttccattctgactaattaagcctcaactgctattaccagtgaccttctaactgcttttcctacctttaagctattctcaccccctccatccttgtgatgcattattgccatcgtgatcttcccgaagcatagctctgactatggcccatctcagaaaacctacagtggctcaccattgcctgatggtggagttcagagcccttgagctagcatttcattatgaccgtgattttttccccgcaccactttccagccttgtggtccacaattccactgggccttaagtatgtactgaactttcctgcctccctcattttgctctgcttgtgcaattttttccaccctccatctctgtcaaacgtaagccttcctgacctctaagacctacctttgtcatgtacctttaccctcaggcaaggagcaatctcttctcttcctcttctaccttgctgtagcttctccccaaggatttatcacattctgccttgaatcatagggaacagcatgtgtagtggaatgaacacaggcctctgaatccaagatacgagtttaaatcccagctttggaggtggttacttaaagtctcagtgccttcattcttcttcctatataaagtagatattacaatatctaacttacagagtcattgggagctatacatgcagcgattgggtaaagcacctggcacatggcaagcgattagcaaatgctggttacttctacttctttctcttcccttttcccagtctatcataatttccttgagagcaggcaccatgtcttatttacccttgtatttcccacagtacttcccatagtgagttacccttagtaaatactcagtaagttgaattgaatttaaattacctgtaagtcttaaaatgtgggattaaattaagaatatattgtcctggaaatacccaaatgtctattgatggatgaatggataaacaaaatgtggtatacacataatggaatattattcagccttaaaaaggaatgaaattctgacatgtgctacaatatgatgaacctggaagacattatatgtgaaataagccagacagaaaaggacaaatactatatgattccacttatatgaagtacctagagtagtgtaattcatagaaacagaaagtacaggttgacatccaaaatctgaaatgagaaatgctccaaaaactgaaactttttcaatgccgacacgatgctcaaagaaaatgctaattggagcatttcagattttggatttttggatttgggatgctcaactggcataatgtgaatattccaaactctgaaaaaatctgaagtctaaaacacttctggtctcaaggattttggataaaggatactcaatgtgcaacatgtagaatggtggttgcaaggtgggaggagagaatggaaaggtacttgtttaatggtacaatgtttccgtttgggaagatggaaagttttggagatgtgtgatggttatggttgcgcaacaatgggaaggtacttagtactgcttaactgtgcccacttaaaaatggtaaaaatgataaattttgtgtatgtcttaaaacaataaaagaagttttttaaaaaaaaaa

SEQ ID NO: 82238 - DNA, 1044 bp, Homo sapiens
  sig_peptide (336)...(471): this location contains the signal peptide sequence, MPRRGLILHTRTHWLLLGLALLCSLVLFMYLLECAPQTDGNASLP, Run with SignalP
  misc_feature (483)...(645): similar to gi2764924 in the genepept database release 114, Run with FASTXY 3.3t00, default parameters
tttcgtcgggcccaaggcgtgaggcgccgcccgggtgtccccgcggcgcaggaggcggtggagcgcagagcgggcgagcgcgaaaaatcactaccaatataatggattttatatatcagattgctttattctggatatcatggtaacaatacagaaagtatacataatttcccatttctgcaagtagtcatgactgctgaagaaagaaaaacttaaagctacggcagaattattttatggaaattctgattttgtttttaatttttgataactttttactaaaggtatgaacacacaaagagcttattttgttaggcaaatacacattaataagaatgcctagaagaggactgattcttcacacccggacccactggttgctgttgggccttgctttgctctgcagtttggtattatttatgtacctcctggaatgtgccccccagactgatggaaatgcatctcttcctggtgttgttggggaaaattatggtaaagagtattatcaagccctcctacaggaacaagaagaacattatcagaccagggcaaccagtctgaaacgccaaattgcccaactaaaacaagaattacaagaaatgagtgagaagatgcggtcactgcaagaaagaaggaatgtaggggctaatggcataggctatcagagcaacaaagagcaagcacctagtgatcttttagagtttcttcattcccaaattgacaaagctgaagttagcataggggccaaactacccagtgagtatggggtcattccctttgaaagttttaccttaatgaaagtatttcaattggaaatgggtctcactcgccatcctgaagaaaagccagttagaaaagacaaacgagatgaattggtggaagttattgaagcgggcttggaggtcattaataatcctgatgaagatgatgaacaagaagatgaggagggtccccttggagagaaactgatatttaatgaaaatgacttcgtagaaggttattatcgcactgagagagataagggcacacagtatgaactctttt

SEQ ID NO: 82239 - DNA, 1372 bp, Homo sapiens
  sig_peptide (384)...(519): this location contains the signal peptide sequence, MTAGIMPLGLCPCSCLCLHSRTGAFSAVHWSPVEGTPDPSLREVI, Run with SignalP
  misc_feature (234)...(143): similar to gi1511637 in the genepept database release 114, Run with FASTXY 3.3t00, default parameters
tctgacttggatttcggttttctggcatgaggtaatcccaggcactagatttatatgctgaatgggaagccagcaatggtggctaatcatgctggtttgcagatctgcacctctggagccttgggatggaattagagggccacatggcaagtagcaaatcataggcgttttgagcaggagaggaattagccagacctggaagcaggggccatagatggggtgttgtctgagccaggaagtttgactgaagcagagactcacctgcagacgcctgtaggtgccttccacgttgctcagatgaacagtagagaagggtcaggcctgccctaggattctacccctctcctcaaggccctttctagtcaccatgccacatcctgctcatgactgcagggatcatgcctctgggcctctgtccatgcagctgcctctgcctgcactccaggacaggggccttctctgctgtccactggagccctgtggaagggactcctgaccctagccttagggaagtcatctctaaaggctgttttattacagtgtttcctcagaatgaccctatagacacagtgttttctcagtgtcctctcacctttgaacatatccgggaataattgaaaaaaccaggcaatcaaatgtgcctctcataaatcaccatcacttcagagcagaacttaagagtttggtttgcaagccacaccaaatagtttgagcttggccctctaccatttcctcctgctctgagcccagaggttcacctagtggactgtagcaatggattcccttgcccctggcttcctgttgggttcagccagagagcagcaccagtgggagcctacagagggaggaaagtgaggtcaaggtgtctgctgcctcctccctgcctgccaggccactgtgggtagactacacctcaggtggccctccccatgtgtagccatgcttgccaggttctgggttctggaaacctccacctcctcttgccccttcagtcatagggtggtagcccccttcattgctattagctgttatgcactcaattgtgttccaaccccaaattcgtaggttgaggccccaatccccaggacctcagaatgcaactgtatttggagatagggtctttaaagaagtaattaaattaaaatgaggccattaagccctaattcaatgtgactggtgttcttgtaagaaaaggaagagataccatggagatgtgcacccagaggaaaggccacgcaaggacacagcaagaaggcaactgtttacaagccaagggaagaggcctcaggagaaccaaacgtgtccacaccttgatcttgcacttcccaacctccagaactgtgagcaaataaatgatgttgtttaatcaaaa

SEQ ID NO: 82240 - DNA, 1818 bp, Homo sapiens
  sig_peptide (437)...(572): this location contains the signal peptide sequence, MLIGLLAWLQTVPAHGCQFLPITSVTATVYHLPVHQLKGRSRVQK, Run with SignalP
  misc_feature (181)...(268): similar to gi577460 in the genepept database release 114, Run with FASTXY 3.3t00, default parameters
gaaatatcagcatctggggtcctggcaagcaaggaagcttccaagtaaaaaccagagagaagggcacacttttctttcttcattaggaaatcttattgcacaggaaccacccccacccccaccccccacaccttcccaaggcagcatcccagtgcagatagagtgggaaaggtcccagaagggggctcactcacctctaggcccagagaggctttctcctcactttatacactgcaaaaacagaagaattgtgtcaataacaccctctgtagtggagaaacttaaaaagctggttaggaagctctcgtgtatatttagagacaattacaagaaagctggacttgccgctgtggtctcaggagaaatgagtgttcttgatgacaggcaaagggacatcttagttgtccagaagcggcactcttccctggaagccgccatgttaataggattactagcctggctccagacagtgcctgctcatggctgccagttcttaccgatcacatctgtcactgccaccgtatatcatctgccagtgcatcagcttaaggggaggtcacgagtgcaaaagaacctgacccttgacaatgagggagaagggacatggaccacctgtctggaattcctggaatcactggcagggtggaggctgggctggggagttagccgcggtgtgcgtgaatggctctgtctccagcaagtctctctccatcaaaccccaggtctgccccataagcaagatctttaacagatggatgtctccatgagaaaacccaaggcgagaagcccagagccatggcggggttgcttgacgtcctcatggagtcactctgccccacatgctcaaatcttccctctggccccacatccctaggagggcctgacccctgtaaagatacaggaggcagctccctggcctccaaatggcccatggagatggcagtcgggagacagggttctgtgtttgctgcggtgaagggaggagaaggcaggaggaaaaaggatggcttctagccctgaagaggactccagcatcccaggcaccgggtgcttctggctgcagttttccctatggaggcccctcagcctccagccctaacataaatgtcggttaaattcagttttcaagcctctctcccttttcagtgtcagagcagtagatggtccagggcattggaggcctcgaccactctgcattgcagattacagtgacttcctcggggttgccccatcttggtctcctgtggtttcttcatcagctttttttttaccagcatctctcaaataacaatgaagatagatatgcccattagtgtctgattaaggagcaaaggctggatttctggccacagcgagctgcactctccctcctgcctcagccggggtccgtcttagcagtttggaaaggggaaaaagatgccggtcctcactgcttaagttttgtgtccaggtgccactagacttgcatgcacactaactccttacaatcaccacacagcatcatcgccccagtgcacagatgaggaaccagaggctcagaggagtgaagttgccttcctgaggtcacacagcatgaaagtgatgagctaggatttgaatctgggaagttgggctctagagccagactgtactgccttctgccacactgtactgccttctgtgactgggtggcacctccagggcacatttacacaaggccctgaatctgcagaggctgtttctcaagatgcccgtcatggtgtggcctgggccagctctggcttccacaggtccctgactgtcctcagagtggaacatgctcaacctcccgcccactgc

SEQ ID NO: 82241 - DNA, 409 bp, Homo sapiens
  sig_peptide (86)...(221): this location contains the signal peptide sequence, MAVSVRLLTVLIAPGFCWMGNLYVNSRYEPDILQQLCGKGKVVVA, Run with SignalP
  misc_feature (249)...(161): similar to gi451950 in the genepept database release 114, Run with FASTXY 3.3t00, default parameters
tcacagttagcctaaatgtcaaatctgaatctggaccagggtgtacaatactgtgaagctcagtaagattcaaaggttacttagaatggctgtttctgttaggctactaacggtgcttatagcaccaggattctgctggatgggaaatctgtatgtaaacagcaggtatgagccagatatcttgcagcagctatgtggcaagggaaaggtggtggtggctataatctgcatggctggagaataaacaaatattgatgtgggactttaaactatggcaatgctaggacattctaggaagaagcaacagtagaagtggattgtactttctagttagggtatctttctgactgcttcgaataataaggccgtatacagtcaaacttgcccgaaaaaggaaaaaaaagtcttt

SEQ ID NO: 82242 - DNA, 1839 bp, Homo sapiens
  sig_peptide (1295)...(1160): this location contains the signal peptide sequence, MVVNTMIYFFIFTYTLAKRARVHINKNGNKALAEKNMHLTNHVNS, Run with SignalP
  misc_feature (89)...(329): similar to gi2897102 in the genepept database release 114, Run with FASTXY 3.3t00, default parameters
tttcgtggatctgataaatgcctgtagtcattatggcttaatttatccatgggttcacgtcgtaatatcatctgattctttagctgataaaaattatacagaagatctttcaaaattacagtctcttatatgtggtccttcatttgacatagcttccattattccgttcttggagccactttcagaagacactattgccggcctcagtgtccatgttctgtgtcgtacacgcttgaaagagtatgaacagtgcatagacatactgttagagagatgcccggaggcagtcattccatatgctaatcatgaactgaaagaagagaaccggactctgtggtggaaaaaactgttgcctgaactttgtcagagaataaaatgtggtggagagaagtatcaactctacctgtcatcattaaaagaaacattgtcaattgttgctgtggaactagaactgaaggatttcatgaatgttctcccagaagatggtactgcaacatttttcttgccatatcttctctattgcagtcgaaagaaaccattgacttaaaggtatcatttgaaaaataccataatggcatttgagactgaatttctaaaaattgaatgccaaagtacaagtagaggagttttttattttatatatcacacacacacacacacacacacacacacacacacacatatatgatacaaatgctttcaggctgcttaccttaccgtgtagtggtaactattcacttcttaatttatgacctcaatcaatttaattgtctagaatgtaaaaagtctttaagacataagaattcctcaaagaagccatacattttttaaggtggggattgacttttattccaaggaacaacatcagttcactgttgttggagacatgacaatcattttcatcccaagaacactttaaggaaacattttacaagtatgcttgaaagaatgtcactaactggtccagaattttatcttcttgatttttccagatttctctatgtttttgagaaagatgttaatgttttgccatggtaaaagatttcaaaccctcattttttttgttcccttttccttgttactttttaggaaaaactcatgctctgtttctctgaatcaaatgaagtagaagtttacaaagctaactttcttcttgtctagctattaacatgatttgtcaaatgcatgtttttttcagccaaagccttgtttccatttttgttgatgtgtactcttgctcttttagctagagtgtatgtgaaaataaagaaatatatcattgtattcacaaccatgtgtcttcatttataactttttgtttaaaaaatttttagttcaagtttagttcattgatattatcctctgaatgcagttaaggctgggcagaaattctactcatgtgacatctgccacaggtctattttgaagcttttcttctaatggcaatgtttgtccttaccaggatttaatctatagaattgtctctcaactctgcttttctccagttccagataacgtccttaagaccatctgttcaggggttcacaaaactcaaatttgtgtcattctattttatttattttattttttatttccttccctcataccttgcccattccctttgaatattaggtgtgatgtcaacagcatgttagaaggatcaatgggaaggcaatgattgaaaacatttcaatgaaccttaatagtgttcctttgaggagcacccaggagaatatctggtcatagatctttttttaaatgcagttttataaaaccctaacagcggtgatatcattagactgtatgaatcagttttattacctagtgtacaagtgtcat

SEQ ID NO: 82243 - DNA, 4616 bp, Homo sapiens
  sig_peptide (2618)...(2483): this location contains the signal peptide sequence, MVGFDLLPLLFFPFFFPSLIFFPFFSSPSPSFQFLPHQEKSQHVF, Run with SignalP
  misc_feature (4249)...(4290): similar to gi2621454 in the genepept database release 114, Run with FASTXY 3.3t00, default parameters
gcgccggggcggagaaatgttttgtaactttactggcctgcttcctggccaagcagcagaacaaatacaaatatgaagagtgcaaagacctcataaaatctatgctgaggaatgagctacagttcaaggaggagaagcttgcagagcagctgaagcaagctgaggagctcaggcaatataaagtcctggttcactctcaggaacgagagctgacccagttaagggagaagttacgggaagggagagatgcctcccgctcattgaatgagcatctccaggccctcctcactccggatgagccggacaagtcccaggggcaggacctccaagaacagctggctgaggggtgtagactggcacaacaccttgtccaaaagctcagcccagaaaatgataacgatgacgatgaagatgttcaagttgaggtggctgagaaagtgcagaaatcgtctgcccccagggagatgcagaaggctgaagaaaaggaagtccctgaggactcactggaggaatgtgccatcacttgttcaaatagccatggcccttatgactccaaccagccacataagaaaaccaaaatcacatttgaggaagacaaagtcgactcaactctcattggctcatcctctcatgttgaatgggaggatgctgtacacattattccagaaaatgaaagtgatgatgaggaagaggaagaaaaaggaccagtgtctcccaggaatctgcaggagtctgaagaggaggaagtcccccaggagtcctgggatgaaggttattcgactctctcaattcctcctgaaatgttggcctcgtacaagtcttacagcagcacatttcactcattagaggaacagcaagtctgcatggctgttgacataggcagacatcggtgggatcaagtgaaaaaggaggaccacgaggcaacaggtcccaggctcagcagagagctgctggatgagaaagggcctgaagtcttgcaggactcactggatagatgttattcaactccttcaggttgtcttgaactgactgactcatgccagccctacagaagtgccttttacgtattggagcaacagcgtgttggcttggctgttgacatggatgaaattgaaaagtaccaagaagtggaagaagaccaagacccatcatgccccaggctcagcagggagctgctggatgagaaagagcctgaagtcttgcaggactcactggatagatggtattcgactccttcaggttatcttgaactgcctgacttaggccagccctacagaagtgctgtttactcattggaggaacagtaccttggcttggctcttgacgtggacagaattaaaaaggaccaagaagaggaagaagaccaaggcccaccatgccccaggctcagcagggagctgctggaggtagtagagcctgaagtcttgcaggactcactggatagatgttattcaactccttccagttgtcttgaacagcctgactcctgccagccctatggaagttccttttatgcattggaggaaaagcatgttggcttttctcttgacgtgggagaaattgaaaagaaggggaaggggaagaaaagaaggggaagaagatcaaagaaggaaagaagaaggggaagaaaagaaggggaagaagatcaaaacccaccatgccccaggctcagcagggagctgctggatgagaaagggcctgaagtcttgcaggactcactggatagatgttattcaactccttcaggttgtcttgaactgactgactcatgccagccctacagaagtgccttttacatattggagcaacagcgtgttggcttggctgttgacatggatgaaattgaaaagtaccaagaaggggaagaagatcaaaacccaccatgccccaggctcagcagggagctgctggatgagaaagggcctgaagtcttgcaggactcactggatagatgttattcaactccttcaggttgtcttgaactgactgactcatgccagccctacagaagtgccttttatgtattggagcaacagcatgttggcttggctgttgacatggatgaaattgaaaagtaccaagaagtggaagaagaccaagacccatcatgccccaggctcagcagggagctgctggatgagaaagagcctgaagtcttgcaggactcactggatagatgttattcgactccttcaggttatcttgaactgcctgacttaggccagccctacagcagtgctgtttactcattggaggaacagtaccttggcttggctcttgacgtggacagaattaaaaaggacgaagaagaggaagaagaccaagacccaccatgccccaggctcagcagggagctgctggaggtagtagagcctgaagtcttgcaggactcactggatagatgttattcaactccttccagttgtcttgaacagcctgactcctgccagccctatggaagttcctttttatgcatttggaggaaaaacatgttggcttttctcttgatgtgggagaaattgaaaagaaggggaaggggaagaaaagaaggggaagaagatcaaagaaggaaagaagaaggggaagaaaagaaggggaagaagatcaaaacccaccatgccccaggctcaacagcatgctgatggaagtggaagagcctgaagtcttgcaggactcactggatatatgttattcgactccgtcaatgtactttgaactacctgactcattccagcactacagaagtgtgttttactcatttgaggaagagcatatcagcttcgccctttacgtggacaataggttttttactttgacggtgacaagtctctatctggtgttccagatgggagtcatattcccacaataagcagcccttactaagccgagaggtgtcattcctgcaggcaggacctataggcgcctgaagatttgaatgaaactatagttccatttggaagcccagacataggatgggtcagtgggcatggctctattcctattctcagagcatgccagtggcaacctgtgctcagtctgaagacaatggacccacgttaggtgtgacacgttcacataactgtccagcacatgccgggagtgatcagtcggacattttaatttgaaccacgtatctctgggtagctacaaaattcctcagggatttcattttgcaggcatgtctctgagcttctatacctgctcaaggtcattgtcatctttgtgtttagctcatccaaaggtgttaccctggtttcaatgaacctaacctcattctttgtgtcttcagtgttggcttgttttagctgatccatctgtaacacaggagggatccttggctgaggattgtatttcagaaccaccaactgctcttgacaattgttaacccgctaggctcctttggttagagaagccacagtccttcagcctccaattggtgtcagtacttaggaagaccacagctagatggacaaacagcattgggaggccttagccctgctcctctcaattccatcctgtagagaacaggagtcaggagtcgctggcaggagacagcatgtcacccaggactctgccggtgcagaatatgaacaatgccatgttcttgcagaaaacgcttagcctgagtttcataggaggtaatcaccagacaactgcagagtgtagaacactgagcaggacagctgacctgtctccttcacatagtccatatcaccacaaatcacacaacaaaaaggagaagatatattttgggttcaaaaaaagtaaaaagataatgtagctgcatttctttagttattttgagccccaaatatttcctcatctttttgttgttgtcatggatggtggtgacatggacttgtttatagaggacaggtcagctgtctggctcagtgatctacattctgaagttgtctgaaaatgtcttcatgattaaattcagcctaaacattttgccgggaacactgcagagacaatgctgtgagtttccaacctcagcccatctgcgggcagagaaggtctagtttgtccatcaccattatgatatcaggactggttacttggttaaggaggggtctaggagatctgtcccttttagagacaccttacttataatgaagtacttgggaaagcggttttcaagagtataaatatcctgtattctaatgatcatcctctaaacattttatcatttattaatcctccctgcctgtgtctattattatattcatatctctacactgcaaattttgggtctcaatttttactgtgcctttgtttttactagtgtctgctgttgcaaaaagaagaaaacattctctgcctgagttttaatttttgtccaaagttaattttaatctatacaattaaaaccttttgcctatcactctggacttttggattgttttttacattcagtgttataatatttgattatgctgattggttttggtgggtactgatgtgaattaataaaaacatttcatttccatgtttattttctaatctcttccacattgtaggctatgtttaccatacgtagcagaatgtatttacatttcttggttctagtcatttgtattcttcgtgagtgtgtgtgtgtgtgtgtctgtgtg

SEQ ID NO: 82244 - DNA, 611 bp, Homo sapiens
  sig_peptide (416)...(551): this location contains the signal peptide sequence, MTLFLRWWGSVCCVSFVGKVQCAIIKQLVLLEDSFRRYRLNCLGT, Run with SignalP
  misc_feature (210)...(115): similar to gi215370 in the genepept database release 114, Run with FASTXY 3.3t00, default parameters
ttacatcttaatgactggcaaaatgggggcaccaatgaaacagaaagagagaggcatggggaagaacctgaactcctttcttagctgccactaggaggttaagaacttataataaaggatgggcttattttgaaaaagtcattttttaaaaagacttctacagaaagacattctgtgtagctaaaactcactattttgattgcatatgtttatttgtgttaaaattatcaagtattttccatttagcctttgacagttactaatgaatacatcttccaaaagtcacatgggaagtactgataaaatgcttgtgttcccattgatcatggaatgggcttatctctttgagagaacaaaactatgaagttagatctttgataaagtctttgttccatattgacacaagcttcttataatgactttgtttttaaggtggtgggggagcgtatgttgtgtttcttttgttggaaaagtacaatgtgcaattattaaacagctggtgctattggaagactcatttaggaggtatagattaaactgcctggggacataaaggcccagtcttctttgtgtatttaaatttagccatgcccagagagggaaggcaggag

SEQ ID NO: 82245 - DNA, 660 bp, Homo sapiens
  sig_peptide (528)...(393): this location contains the signal peptide sequence, MSKPILLTMTLFLLPNDLSFKNWDRDAEAVTSQRLVRNSGTGLGG, Run with SignalP
  misc_feature (177)...(291): similar to gi2626750 in the genepept database release 114, Run with FASTXY 3.3t00, default parameters
gcgccttgtgcaaaggatttgaaggttgaattgaaaataccattgtaatacttctcttttaaagcttataaaatgccctgtatcagggcctgggggcaaaagtactgatgaaatttatgaagatagcaaatgatgctcgagtctttgttataaaaagaatggtaaataggttcaagaagcctgcagccaggctttgtaaagtgaatggcaaatttgcatttgtcatagaatttctccttggaatgggcctggctatgtcaggcctgggtgggctgaggaacacaggcccaccacaagtccagcttggagtctttcttccctgttgtcattttaaagttgctttttccagaacataggctggctgtagttcatgcttcctaattaaggtgcttcctcccaggccagtccctgaatttctcactaacctttgacttgtgacagcttctgcatctcggtcccaatttttaaagcttagatcatttgggagtaggaagagtgtcatggttaagagtatgggctttgacataaaagtctcttgtgcaaatcctgccgctgccacttcactgctgtgtggccttgggcaaattacttggcctactgaggcccagtttcttcctccttgtaaacggataacattagtgccttgctcacagagttgtg

SEQ ID NO: 82246 - DNA, 404 bp, Homo sapiens
  sig_peptide (115)...(250): this location contains the signal peptide sequence, MSIVSRLWSSWLPYPGIESPSYKQAGLRTVGPRIFTLLYLCRASA, Run with SignalP
  misc_feature (100)...(210): similar to gi416194 in the genepept database release 114, Run with FASTXY 3.3t00, default parameters
aattccgtaacgacccccgcgtccgcggacgcgtgggtgccactgctctgaagctgtgggtcacgatggaagcttgcttctcttggaggaacaccctgctccacccttggggtgatgagcatagtcagtagactctggtcttcttggcttccctatcctggcattgaatctccatcctataagcaagctggtttgaggacagttgggcccagaattttcaccctgctgtacctgtgtagagcttctgccctatgaatggggttgggtggaagaagagatcccaagagttctcagccacatttgccagaattagagattcttcaacacagagctgaagtgggggaatgagaaatgttggtgtcttgcctctcctagcgaataaattataattctagatcaaaaag

SEQ ID NO: 82247 - DNA, 3041 bp, Homo sapiens
  sig_peptide (1328)...(1193): this location contains the signal peptide sequence, MYLWVVRWKWCLQKLGRRILLHSLHDVFIANMDDKGLCYRGLRAP, Run with SignalP
  misc_feature (2115)...(1993): similar to gi186223 in the genepept database release 114, Run with FASTXY 3.3t00, default parameters
ttttttttttttaacctgaaagtatcactgtttatttcacatttaaaaaaatcatccggcagaaactaggtacgctgtgaaaatagaatagtccactggtagagtttcaattgtgcaaacagacgtttggtcccatcatttttcttctctgaacatttcttcatctgcaaatgggggagtgccctgtgcaggtgacaacagggtggtgaagggccacccttaaacctgctgcagcccttacctttcacatctgaacaggcagactcaaacttcattggggtggcccacaaagacttgggaagctcaaaatttggaaacatcaaaattaaacacagacccaatttctttgcatttttagtcctgtattctatgtttgacaaaatcactgtaaaataaagcagcagtaagaaaagaagcagattcagaggactaaaagcaggaacagatgggaaaaaaaggctggaaatccattcgtttatttactgagcctggtccaatgtcaacagaactaggattaactaggttaagagttggcaaaggacaggaaagcaaagtaataaaatttaaaagctgaattggtacagtgttatgaagaagtgtttatttagtatttatagtaccagattacagtcacttgttgatttagatatgaattttcatatgttagaagactcagggaaatacacaggatcccaaggagtgagactgagattctgggtcttattagctgtactttgggtaatttacttaaccctctctcagcttcagtttcctcaaatctaaattagggcttaactaatcattatgtcctttgtaagactggaaatgtggattagcagttagacagtatgtatgtacccagttttgtagatatgctgggacatagtaggtgttcaataaattatacatatacctgaataaacaaactatacataaatattttataaattatacatataatcgaacatcatttaggtaaactctttaatgaaagacatttattgtcagattataaaatcagtgttgatgataagccctcctacccacaaaacaaaaatcgtatgtatgaaattccctttcccgtaagttatgtgcctgtcagccatcccacttcagtccatctttggatgctgaggctctggttgccagtccttatctctacacctgtccctggtctagaggagaaacgaaggtgctctgaggcccctgtaacagagacccttgtcatccatatttgcaataaagacatcatggaggctgtgcaaaagtatccttctccccaacttctgcaggcaccatttccatctcactacccagaggtacatcagagagcaggagccaggcaggtgacaaagatgtggaaggcttctaagtggttggctttgccgtctcagaagtgcgaagaaatgaaaatccatcaaaacagaatgccattccatgtttcaggcttttacctcacctcaaatcaaatgtctgttctttatttattggtcccataagtagacacgcacttggacttctggttttagaacattctattgttatcctttctccttttaataaacacacactagtttcgaggaatctccctaataatcctggcctgacatgctgcagaacttcaatttcataattttactaacaacagaggaatttcatcttattattaccaactaccacattaaaggatctgaaacagtaattcatgcataattctatttaataatggttttcaaagtactttgctgtttgaaaatgcttcccagatgattctgatcggagagttgggaaccactgccctagactgtaaccactcaattgaactttactcagtgctgcttccctgcccacttcaagtaaacaatgcttaactttttcgtttctaaaacaactgagattactttctcccccttagtttctacaatgattgttgaaaatttgtgggaaaagtttatccttacaaatgaaaacatgaaatctgaagtggataaactaacttttaagaaatacatatccttactcagtaagctgaggcaggaggaccacttgagcccaggagtgcgaggcttcaatgagctatgattgcaccactgcactccagcctgggcaacagagcaaaactcctgtctctagaaaaaataaatacctatctttcaaaacttgcataaaaagcccttgtcttcacttgtacagcctcttctgtttcatgaatgagcatgctgaagggctatttactctcctatgaaaaaatgttgttacagtaaatgacaagtgttatgaacacaatgaacctggtgtgttagatgttaagtgtgctgccaccccatgtgaacctcaaagtgaaactgctcacataactgtttttttgctgcatgcaaacctgctaatacaaagcgggctcctgacttaaggacagccaatccctactctagacaatgacccaaccagacctagtataaaaaggtagtctggcccagttaaattcccttggcaattggagactagcagcaggagctgaaggtcatcatgtagaaaagaacctcaaaggtgcaagttaaagttattacaaaggaacagaaactgtaagtatgcaaaagctgtgtagagaagttggtgaatagagagaatggagttaacaatgcaaaaagaagcaagtcacatgcatgcagagcccaagcctaaacatccaccttcccctgctgaggagcaccacccaatttctactcttcctgaggctgggaggtgatttctgagtgggagatggggttggtgaggtggttcctgaattccccggcacatatccttgaaataatgtcacattgcttgagctaacttgtagcttttgagtctttttatgtttgtcccacttgagattccttgcaactaaaagagcataactgaaacaactagttaagccaataccatttgttaaaaataatgcaccattctaaatttctgtttccctaaccaaatctggcaaagtctgatccattaagttttaaaacttttctaagtttaatgttgtcactgtatgtttacgt

SEQ ID NO: 82248 - DNA, 853 bp, Homo sapiens
  sig_peptide (383)...(518): this location contains the signal peptide sequence, MRSLLLIQVFAFSGLFFFYEIFTAEVLKFKQAQWGEGLHARISAS, Run with SignalP
  misc_feature (394)...(279): similar to gi160805 in the genepept database release 114, Run with FASTXY 3.3t00, default parameters
cggacgcgtgggtaaaaatgcaagttcctggatccaggacaggcctagcaaattaaactttctggataggaggtctgggaatgtgcatttccaacaatcccgctggaggagtcttttcttactaaaaatcgaagttactgtcctgttggtatcacttttcatatgccttatacccatacgacctctccaatttaaattctataatgttttaaatctctttggtttgaattctctaaaattaaagatgaagctgtcatcagacttctgtattcactgtgattgaaagctagcttcttagggtgagctctgtattgttctggaagagcccagcactggctgaaaggtttcttacatccgtgatgtatatcgggttttctctgggatgagatccctgctgttaattcaggtatttgctttcagtggtctattttttttctatgagatcttcacagctgaagttctgaagttcaaacaggcccagtggggagagggccttcacgcaagaatttcagcctcacggtgagggtttctacccacaggcaaaggtatcctcagatcacgagccccatgaagtcatggcccagagcactccactggagggctgtgagaggaagcccagtatgtacatgtgcccacctcccccaaccccaagctggcctcctaacctttggtggcctgacctgggctgaagccttctgagggagcaatcaggagggggggcagaagggcccgggttgcaaagcctggcttttatggcttccgggtgggggaacctcacttgctgggagcccccattttctcctttgcgcggcgcgcccgagggataggaggggacggtggccctctaacggct

SEQ ID NO: 82249 - DNA, 417 bp, Homo sapiens
  sig_peptide (6)...(141): this location contains the signal peptide sequence, MFWTLVQGMSLLCLTDVFQALPSICIANSEIYYTVLTLMQFNCLW, Run with SignalP
  misc_feature (12)...(132): similar to gi1354871 in the genepept database release 114, Run with FASTXY 3.3t00, default parameters
ggattatgttttggaccctggttcaggggatgtccttactgtgtctaactgatgtgtttcaggctcttccttcaatatgtattgcgaatagtgagatttattacacagtcctaacattgatgcagtttaattgcttgtggatggtgttgtcaggaaaaaaggtaatattttcttctgaactcatggttagaaagggcaggagaagctggaagtaagatatcctccatcctccttagacatatttacatcacctcttccaggtttgcatattgcttacaatcaatacagagaagagaaaacaaaggaaatatgtgataagttgataaattactgctacaaaatttaaattctggccctaaagcaataacaaagtagaacatagtgaaacaagtacacaaaagatttaaaactggggat

SEQ ID NO: 82250 - DNA, 2169 bp, Homo sapiens
  sig_peptide (1054)...(919): this location contains the signal peptide sequence, MSSGRNFGFCFQWLPWALVATWASVTVLMSSHSSSVGSGLCPMDF, Run with SignalP
  misc_feature (700)...(793): similar to gi507288 in the genepept database release 114, Run with FASTXY 3.3t00, default parameters
cggcggggatcaactttgcatgaataatgtgagtgcgcttggaaaagagacctcctgctccgcgggctcggggcaagagcccgcaggctaccttccccgggcaggggcgctcaacccaaccggctccagggcactggtaatttggctagaggaccgcgcggaggcagcgggatctgcgatttccttctggttggctgtcctgcgtgggtgccaagttccacacatgatttaatgaataagaaggagatgtcagtgaaaaaagggatccagaatgattactaacctatgactcccaacagtatgacagaaaatggccttacagcctgggacaaaccgaagcactgtccagaccgagaacacgactggaagctagtaggaatgtctgaagcctgcctacataggaagagccattcagagaggcgcagcacgttgaaaaatgaacagtcgtcgccacatctcatccagaccacttggactagctcaatattccatctggaccatgatgatgtgaacgaccagagtgtctcaagtgcccagaccttccaaacggaggagaagaaatgtaaagggtacatccccagttacttagacaaggacgagctctgtgtagtgtgtggtgacaaagccaccgggtatcactaccgctgtatcacgtgtgaaggctgcaagggtttctttagaagaaccattcagaaaaatctccatccatcctattcctgtaaatatgaaggaaaatgtgtcatagacaaagtcacgcgaaatcagtgccaggaatgtcgctttaagaaatgcatctatgttggcatggcaacagatttggtgctggatgacagcaagaggctggccaagaggaagctgatagaggagaaccgggagaaaagacggcgggaagagctgcagaagtccatcgggcacaagccagagcccacagacgaggaatgggagctcatcaaaactgtcaccgaagcccatgtggcgaccaacgcccaaggcagccactggaagcaaaaaccgaaatttctgccagaagacattggacaagcaccaatagtcaatgccccagaaggtggaaaggttgacttggaagccttcagccattttacaaaaatcatcacaccagcaattaccagagtggtggattttgccaaaaagttgcctatgttttgtgagctgccatgtgaagaccagatcatcctcctcaaaggctgctgcatggagatcatgtcccttcgcgctgctgtggcgctatgacccagaaagtgagactttaaccttgaatggggaaatggcagtgacacggggccagctgaaaaatgggggtcttggggtggtgtcagacgccatctttgacctaggcatgtgctctgtcttctttcaacctggatgacactgaagtagccctccttcaggccgtcctgctgatgtcttcagatcgcccggggcttgcctgtgttgagagaatagaaaagtaccaagatagtttcctgctggcctttgaacactatatcaattaccgaaaacaccacgtgacacacttttggccaaaactcctgatgaaggtgacagatctgcggatgataggagcctgccatgccagccgcttcctgcacatgaaggtggaatgccccacagaactcctcccccctttgttcctggaagtgttcgaggattagactgactggattcattctcataattcctacagcactactgggtgtcatttcattccattgcctagctcttttttgtttgtttctttgtgttgggagggattatttgggagggaaaagggaagtagtccttggcatagacatggatgaaattgccccttgaatgcgggtacttgaaactattgcatttcgttctccggtcctgtgatgtgaatgctctgaaggttttatggttgtggaggtggggtgggggacaatcattaactcaccagcaccaagcatcaccagctcccacccgtccctggtccaagacttgagtcagcaaaatggcgccacaggacactaaagaagccttaaaaccaagataatacgaccacctccacccaatcctgatgttcgcagggctgaagttaacagagcacagaccacctttagttagatgtgggctttcagccttttaagggaaagactcgaacaaattttcatctattcaagagca

SEQ ID NO: 82251 - DNA, 429 bp, Homo sapiens
  sig_peptide (264)...(399): this location contains the signal peptide sequence, MNQISLLFVECFLFMARRVLTTAFQGKYCIIINRMFQRKKQKLST, Run with SignalP
  misc_feature (273)...(162): similar to gi552795 in the genepept database release 114, Run with FASTXY 3.3t00, default parameters
gacccacgcgtccgaggtactggagtcggttgtgaatgtacatgatggggatcggatgaggtcatgcatgtcgtgacgggtctcgtgcgtaacacatagtaggatcccagtcagcgagcattagtattctgtccacacagtactgagtacaggcacggcgtggagggagtccctggagggttaaagagtattttgtgagtaaagtcaggggaaaaggagagggtgcctttccctttttgagttcttctgggcttaggaaggagatgaaccagataagcctactgtttgttgagtgcttccttttcatggctagaagagtcctcacaacagccttccagggtaagtactgtattattattaaccgcatgttccagaggaagaagcaaaaactgagcacctaaataaacctgtctgggaccacccagctaa

SEQ ID NO: 82252 - DNA, 452 bp, Homo sapiens
  sig_peptide (301)...(166): this location contains the signal peptide sequence, MQFSCHCFLLISFCCCFVILLPDSSTFCVSLLPHLYCLSSPVHRL, Run with SignalP
  misc_feature (264)...(127): similar to gi12209 in the genepept database release 114, Run with FASTXY 3.3t00, default parameters
cggacgcgtgggtcagaatatagacttcttaagggtaaagtgccagttcttgaaatgtttgccttactttgccacatcccacaggctaggagctatctatcttttcttgctgcagtccgtattttctctaatgataacagcagcagcaacagcaagcagctggggagaagtctatgtacaggggaagaaagacaatagagatggggaaggagagagacacaaaatgttgatgagtctggcaaaaggataacaaaacaacagcaaaaggaaattaacaagaaacagtgacatgagaattgcataaactaattacataatctcaaaaaacaggtttctgaagggaaatagaaatagtggaaggcgcaagaactttggagcaaagagaattctaggctcatagtatggacacctactataaaaaatagacatttgggtaaagaagaacagacaag

SEQ ID NO: 82253 - DNA, 414 bp, Homo sapiens
  sig_peptide (87)...(222): this location contains the signal peptide sequence, MVTGKSPNTHTCLLIALYPLLPNSCKWVMRSSYQHSLSYCKVLTL, Run with SignalP
  misc_feature (325)...(376): similar to gi2231232 in the genepept database release 114, Run with FASTXY 3.3t00, default parameters
ctgacactgacatacagttgtgcagacagaacccacttatatatttttaaagtttggacgctaaatgtatagaaaaatgcttctgaatggtgactggaaaatcccctaacacacatacttgtttgctgattgctctctaccctttgctacccaatagttgtaaatgggtaatgagaagttcttaccaacattcactttcatactgtaaggtactcacactttattttttatttaaaaaaccttcattgctattttagttcagattactagggcaaaggaggcttgtcaaatccaaatgcttttttaatatagcttaaagtgccaaaatcaaaaatccaaactttttcaagtataaaatcactggatttttctcattcccgcagaaatgttacattaaaaattactacttttgat

SEQ ID NO: 82254 - DNA, 3320 bp, Homo sapiens
  sig_peptide (147)...(282): this location contains the signal peptide sequence, MGLGARGAWAALLLGTLQVLALLGAAHESAAMAASANIENSGLPH, Run with SignalP
  misc_feature (282)...(623): similar to gi2642220 in the genepept database release 114, Run with FASTXY 3.3t00, default parameters
ggcacgagcggcacgaggcggcgggaggggaaacgtgcgcggccgaaggggaggcggagcccgcgccggctgcgcagaggagccgctctcgccgccgccacctcggctgggagcccacgaggctgccgcatcctgccctcggaacaatgggactcggcgcgcgaggtgcttgggccgcgctgctcctggggacgctgcaggtgctagcgctgctgggggccgcccatgaaagcgcagccatggcggcatctgcaaacatagagaattctgggcttccacacaactccagtgctaactcaacagagactctccaacatgtgccttctgaccatacaaatgaaacttccaacagtactgtgaaaccaccaacttcagttgcctcagactccagtaatacaacggtcaccaccatgaaacctacagcggcatctaatacaacaacaccagggatggtctcaacaaatatgacttctaccaccttaaagtctacacccaaaacaacaagtgtttcacagaacacatctcagatatcaacatccacaatgaccgtaacccacaatagttcagtgacatctgctgcttcatcagtaacaatcacaacaactatgcattctgaagcaaagaaaggatcaaaatttgatactgggagctttgttggtggtattgtattaacgctgggagttttatctattctttacattggatgcaaaatgtattactcaagaagaggcattcggtatcgaaccatagatgaacatgatgccatcatttaaggaaatccatggaccaaggatggaatacagattgatgctgccctatcaattaattttggtttattaatagtttaaaacaatattctctttttgaaaatagtataaacaggccatgcatataatgtacagtgtattacgtaaatatgtaaagattcttcaaggtaacaagggtttgggttttgaaataaacatctggatcttatagaccgttcatacaatggttttagcaagttcatagtaagacaaacaagtcctatctttttttttttggctggggtgggggcattggtcacatatgaccagtaattgaagcacgtcatcactgaaagacagaatgccatctgggcatacaaataagaagtttgtcacagcactcaggattttgggtatcttttgtagctcacataaagaacttcagtgcttttcagagctggatatatcttaattactaatgccacacagaaattatacaatcaaactagatctgaagcataatttaagaaaaacatcaacattttttgtgctttaaactgtagtagttggtctagaaacaaaatactccaaaaaaaaaaaaatttttcaaataaaacccaaaattaatagctttgcttaggccctgttagggatccattgggagcattaagggagcacatatttttattaacttcttttgagcttttcaatgttgatgtaatttttgttctctgtgtaatttagggtaaactgcagtgtttaacataataatgttttaaagacttagttgtcagtattaaataatcctggcattatagggaaaaaacctcctagaagttagattatttgctactgtgagaatattgtcaccactggaagttactttagttcatttaattttaattttatattttgtgaatattttaagaactgtagagctgctttcaatatctagaaatttttaattgagtgtaaacacacctaactttaagaaaaagaaccgcttgtatgattttcaaaagaacatttagaattctatagagtcaaaactatagcgtaatgctgtgtttattaagccagggattgtgggacttcccccaggcaactaaacctgcaggatgaaaatgctatattttctttcatgcactgtcgatattactcagatttggggaaatgacatttttatactaaaacaaacaccaaaatattttagaataaattcttagaaagttttgagaggaatttttagagaggacatttcctccttcctgatttggatattccctcaaatccctcctcttactccatgctgaaggagaagtactctcagatgcattatgttaatggagagaaaaagcacagtattgtagagacaccaatattagctaatgtattttggagtgttttccattttacagtttatattccagcactcaaaactcagggtcaagttttaacaaaagaggtatgtagtcacagtaaatactaagatggcatttctatctcagagggccaaagtgaatcacaccagtttctgaaggtcctaaaaatagctcagatgtcctaatgaacatgcacctacatttaataggagtacaataaaactgttgtcagcttttgttttacagagaacgctagatattaagaattttgaaatggatcatttctacttgctgtgcattttaaccaataatctgatgaatatagaaaaaaatgatccaaaatatggatatgattggatgtatgtaacacatacatggagtatggaggaaattttctgaaaaatacatttagattagtttagtttgaaggagaggtgggctgatggctgagttgtatgttactaacttggccctgactggttgtgcaaccattgcttcatttctttgcaaaatgtagttaagatatactttattctaatgaaggccttttaaatttgtccactgcattcttggtatttcactacttcaagtcagtcagaacttcgtagaccgacctgaagtttctttttgaatacttgtttctttagcactttgaagatagaaaaaccactttttaagtactaagtcatcatttgccttgaaagtttcctctgcattgggtttgaagtagtttagttatgtctttttctctgtatgtaagtagtataatttgttactttcaaatacccgtactttgaatgtaggtttttttgttgttgttatctataaaaattgagggaaatggttatgcaaaaaaatattttgctttggaccatatttcttaagcataaaaaaaatgctcagttttgcttgcattccttgagaatgtatttatctgaagatcaaaacaaacaatccagatgtataagtactaggcagaagccaattttaaaatttccttgaataatccatgaaaggaataattcaaatacagataaacagagttggcagtatattatagtgataattttgtattttcacaaaaaaaaagttaaactcttcttttctttttattataatgaccagcttttggtatttcattgttaccaagttctatttttagaataaaattgttctccttctaaaaaaaaaa

SEQ ID NO: 82255 - DNA, 376 bp, Homo sapiens
  sig_peptide (14)...(149): this location contains the signal peptide sequence, MIFPLVGYLVKLFLAGNFIYIKVLGFQPIMNIKRDKITRVIVSGE, Run with SignalP
  misc_feature (280)...(174): similar to gi4127868 in the genepept database release 114, Run with FASTXY 3.3t00, default parameters
cccacgcgtccgcatgatttttcctcttgtgggttatttggtaaaactgtttcttgctggtaattttatatacataaaggttcttgggttccagcccataatgaatattaaacgtgataaaattactagggtgatagtttcaggagaattctgaaaacacagcgtctttatttgagaagtgtttttgggtatgggggcaatgttgatttgcctgtagccaagcaaatatagatgaagactttaaaatttgagactaagaaagaaaaccatgtattgtttcttttcttaaagatctgatacccacagaatcttaataaaataaggtagacatactatccttgataatgctgaccatacaatgaaacttttaaaaaac

SEQ ID NO: 82256 - DNA, 612 bp, Homo sapiens
  sig_peptide (204)...(339): this location contains the signal peptide sequence, MYLKPLIYFSILIFLSQRSKLSLPYNVHNCMNIGEDRRPQKVQLL, Run with SignalP
  misc_feature (165)...(315): similar to gi3258390 in the genepept database release 114, Run with FASTXY 3.3t00, default parameters
ttagacctaaggtgatatgagaatataatgtatgtccatcaagaaaaggatatatttgttgagtaaactttaaaattaggaaggggatcatctatgatacattaacatatatctgatgatacattagctgatgatatatgctatgatatattagcatattctaattagcatatatcatcagcatatatgggaatgtcattggcatgtatttgaagcccttaatatacttttctattttgatatttttgagtcaaaggagtaaattatcccttccctacaatgttcacaattgtatgaatataggtgaagataggcgaccccagaaagtacagctgcttcagttgtactaataagtaatcatcatcctgcaagaagtatgttgtgacttctcctacaattaactatcatatagtttaatatatgtttaatattattataaaaagtagaaaaataaaatttatttagaagcaaggattagattgcaataattattatatttataatttctagcatgtttggggagggaccatttaggttcctaaaccaatgggctgggttttttaaaaccaaaaccttccaccaaaagtttttagctttaaccttaaaaaaggc

SEQ ID NO: 82257 - DNA, 434 bp, Homo sapiens
  sig_peptide (263)...(398): this location contains the signal peptide sequence, MLPLALIVDLIYPWVQVRGPEDPNHGTTERKREEVTCLGAARLSL, Run with SignalP
  misc_feature (251)...(376): similar to gi3876075 in the genepept database release 114, Run with FASTXY 3.3t00, default parameters
gtctcgattccgcacgcccacgctccgttctcttatttcaaaattacatattcttatacactatggaacttggaaaataagggaaagcataaagaaaatttaaatcacccataatttcacaaaccagagatgaaaccactgctaacagttgctgtaatttcttccagtctcttttctacagtgagatctgtatttctagctggctacacatagtataaatctaggtttagaatcaagtagaaatagctctagagtgctgccgatgctgccattggctctgatagtggatctcatttatccctgggtccaggtgagaggtcctgaggacccaaatcatgggacaacagagagaaaaagagaagaggtgacctgcctaggggcggcccggctgagtttggaagccgcaaggtgaactccctccatgggagaaagct

SEQ ID NO: 82258 - DNA, 613 bp, Homo sapiens
  sig_peptide (208)...(343): this location contains the signal peptide sequence, MLTLPLFEGLWMCSHRQLVKGSLLNIKEEGCKKKDADVPEEVTLA, Run with SignalP
  misc_feature (233)...(91): similar to gi945407 in the genepept database release 114, Run with FASTXY 3.3t00, default parameters
cacctctgttgttcagttcacagacagcaaagagtgtccttgtgttgcttccttcattcctagtgatagacccactgacattttactcaaagggataattgaaagaggactttggccaacaaagatgaaagtgcagcaaagaaaaaagtggtaacactggaactgaaattggaatgatatctaaatggaaggaatagctgacctggaatgttgacactgcccctatttgagggactgtggatgtgcagccacaggcagttagtgaaggggagtttattaaacataaaggaggaaggttgtaagaaaaaagatgcagatgtcccagaggaggtgacactggccaagaaaaacttcccattcaaagaactcttggaaagatctcacaacatcgaaagcacaaaggctaccctgaagctaatccaaacttcataaggagtgtcacagttcaaagtacgacagagatgcgtactttacatcatacattatcttacaagaagagggcacgccctgctcaaaatcctcttgataagttttcttacaaaaaaagaaatccctttaatgctcaatgttttaaataagagtttggtaaaaaaaaatgtttttgctaactttt

SEQ ID NO: 82259 - DNA, 439 bp, Homo sapiens
  sig_peptide (47)...(182): this location contains the signal peptide sequence, MVYWLWNIILRRWVVIENKTCSLNHLRIIFLRVKTEQEVTPVGFA, Run with SignalP
  misc_feature (308)...(211): similar to gi4406354 in the genepept database release 114, Run with FASTXY 3.3t00, default parameters
gacccacgcgttcgcagtttcctttgaaaacaggaacacgtatgctatggtttactggctatggaatataatactacgaagatgggtggtgatagagaacaaaacatgttcactaaatcatttaaggattatttttttaagagttaaaactgaacaagaagtgaccccagttggatttgccaaaaattaatgctagattatagggggctttatgctggatatgatatgggctaaacagcagagagccataattacttgaactaaacatacagggcttattggattttaatgtagaatgaaatgcagaatgatgcaaatcctgagaataaccatgtcatttgaagagggttgtttcctatgacaaaatggaaaagtaaccagctcccttactatgagaaggaggtttgcttattcaagttaaatatcttttttggaaccc

SEQ ID NO: 82260 - DNA, 608 bp, Homo sapiens
  sig_peptide (194)...(329): this location contains the signal peptide sequence, MLMTLLTLRLKIYICAYDYGEKSSRLRKKNIKLVLDFAVHSVPKR, Run with SignalP
  misc_feature (314)...(418): similar to gi1006906 in the genepept database release 114, Run with FASTXY 3.3t00, default parameters
cggacgcgtgggcagaaataaaggcaaaaattataatatggaaatcagacaatggatttgtctgtatccagttatgtggataattaaaatggagaccctcagaaaattgaaccgaagagtaaaatgaaactcaaaaatgtagtagaaattgttgggaagtaaagaaaacttgaatatgtagatcagaacatatatgttgatgacgttattgactttgaggttaaaaatatatatatgtgcctatgattatggggaaaaaagcagtcgtctcagaaagaaaaacatcaagttagtcttagactttgcagtgcactcagtaccaaagagagaggaggtccagacttggacctgcgagggaagaataataaccgaaaattttatatcaattcaaaaagacattgtcaaaaatacagggattcaggaaactgagaatgcactaagccttctggaaaaaacacctaatgacaaaatctagcccaacaagatgtaaatgaatataaaggactcataatgaggaaaccgcattatgactggctctcaaccctggctgcatattagactcggcaaagaacttttgaaaagggcacacattggcttggcaaagcccc

SEQ ID NO: 82261 - DNA, 1026 bp, Homo sapiens
  sig_peptide (169)...(304): this location contains the signal peptide sequence, MTAEFLSLLCLGLCLGYEDEKKNEKPPKPSLHAWPSSVVEAESNV, Run with SignalP
  misc_feature (169)...(604): similar to gi1769521 in the genepept database release 114, Run with FASTXY 3.3t00, default parameters
gaaactgcaagagtggggcagagaaccagagtgtcagagcaaaacctcctctatctgcacatcctggggacgaaccgggcagccggagagctgcggccggcccagtcccgctccgcctttgaagggtaaaacccaaggcggggccttggttctggcagaagggacgctatgaccgcagaattcctctccctgctttgcctcgggctgtgtctgggctacgaagatgagaaaaagaatgagaaaccgcccaagccctccctccacgcctggcccagctcggtggttgaagccgagagcaatgtgaccctgaagtgtcaggctcattcccagaatgtgacatttgtgctgcgcaaggtgaacgactctgggtacaagcaggaacagagctcggcagaaaacgaagctgaattccccttcacggacctgaagcctaaggatgctgggaggtacttttgtgcctacaagacaacagcctcccatgagtggtcagaaagcagtgaacacttgcagctggtggtcacagataaacacgatgaacttgaagctccctcaatgaaaacagacaccagaaccatctttgtcgccatcttcagctgcatctccatccttctcctcttcctctcagtcttcatcatctacagatgcagccagcacagttcatcatctgaggaatccaccaagagaaccagccattccaaacttccggagcaggaggctgccgaggcagatttatccaatatggaaagggtatctctctcgacggcagacccccaaggagtgacctatgctgagctaagcaccagcgccctgtctgaggcagcttcagacaccacccaggagcccccaggatctcatgaatatgcggcactgaaagtgtagcaagaagacagccctggccactaaaagaggggggatcgtgctggccaaggttatcggaaatctggagatgcagatactgtgtttccttgctcttcgtccatatcaataaaattaagtttctcgtcttaaaaagaaaaaaaaaaaaaa

SEQ ID NO: 82262 - DNA, 615 bp, Homo sapiens
  sig_peptide (218)...(353): this location contains the signal peptide sequence, MSSVLSDHLAFVLLCFTSLSFFVALPSSATLSFFGLQVFPRFLKT, Run with SignalP
  misc_feature (207)...(324): similar to gi60961 in the genepept database release 114, Run with FASTXY 3.3t00, default parameters
aaccagactgaggggcattcttgacaaagaactagataggactcttcaaaagtgtcaaagtcatgaaagaaaagaccaaggaactgtcacagattggagagaccaaggagacatgacagctaaatgcattctgtaatcctagattcgaccctgcaccagaaaaggaatattagtggaaatactgatacaatttgcataaaggatgtatattagtattatgtctagtgttctttctgatcatctggcttttgtcctcctctgcttcacctccctttcgttttttgtcgccttgccttcttcagccacattgtccttctttggtctgcaggtctttccacgcttcctgaaaaccaggcacatttgcctatgctgttccctcagcctgggactctcttctgtcccgtctcctcctaattaactccttttcagatctcagcttgggctggccaactccactaacctgggccttcatagcatcaatccagtcttcttcatgttacttgccacagtgggtacaaaattcaaattttacctttgtggggaattgtttgaatagaatcctatcctttttttaccagcactgtaagggtgaatttaaagcacgagttctgtggg

SEQ ID NO: 82263 - DNA, 413 bp, Homo sapiens
  sig_peptide (158)...(293): this location contains the signal peptide sequence, MHLWIRYLPFLVGNERQLCGSGWRTEPTARSVFWLCTLCALAEGK, Run with SignalP
  misc_feature (268)...(336): similar to gi2674198 in the genepept database release 114, Run with FASTXY 3.3t00, default parameters
ccgggtcgacccacgcgtccgtgtgaacaattggcaaaggagcagttcacagcatttgagatgatatcttaaggaaaggttgggttgaagcgtgttgtcaagtgaattcctcttggaggtttaagtttcagagacagcttcagggaaggagcacagaatgcatttgtggataaggtacctccccttcctggtaggaaatgaacgtcagctgtgtgggtctggctggaggacagagcccactgctaggtcagtcttctggctgtgtaccctgtgtgctcttgcagaaggaaaaggccctgtgttggtgggaagaggaggacatggttgtgttgtgtggcttcgtgagtggaatcagccaggggacgcacccttagcttaacaagcatttcagtgcgttcttcgtagttgatttt

SEQ ID NO: 82264 - DNA, 923 bp, Homo sapiens
  sig_peptide (327)...(462): this location contains the signal peptide sequence, MKSLWEELGKSLWCVLALVLQVDSHAGLVSPSVSVSESESCSRSR, Run with SignalP
  misc_feature (343)...(372): similar to gi162392 in the genepept database release 114, Run with FASTXY 3.3t00, default parameters
gctttttgttggtcgacccacgcgtccgctttagacaaaggaccaatggaaggattctgcaatgtgctaagtatgtccgttcctcttgtattacgtctcttatattcagggaagtgggcagatggccaccagtggagtctttacccagtggatgtactttcaggtggacctggctgggcttcatgtattatctgactcccatatgttcctactctgcagaggacctttttgatagtttgggtccctaagtatgtgcattgtctcagaccctctatttcaaaaacctctgaagacttgcagttcctatggtacttttacccaggtgaatgaagtccctttgggaagagctggggaaatcactgtggtgtgtacttgccttggtgttgcaggtcgactcccacgcaggcttggtctctccttcagtcagtgtttctgagtctgagagctgctccagatctagaaacggagtcagggattgatactttgcattgtagaagctcaccttagccttctgcttattccgttttgattttcttgtttatatatagtaagcagcaccccttcttggcttcctatctgtcctgcccatggaaactccagcattctgtgagccgtctccatagatccctgcatggatcccaggctcccctggctactattttgactttgctgcctattaccagctgacacctacacctgctctatgcgagtcagtgctgctccctggcttctgctagggaaggtcttattacccccttgctcctggggagcccagttctgtacacgcacacctgatggttagcttccccttcggaggctggccagtacagagcttcccagtgatgcctgtagaccttctgcacactcattagtgccatggttgatggaatgccatcatgttctcctgagggacatgggccacg

SEQ ID NO: 82265 - DNA, 1821 bp, Homo sapiens
  sig_peptide (114)...(249): this location contains the signal peptide sequence, MPLLTLYLLLFWLSGYSIATQITGPTTVNGLERGSLTVQCVYRSG, Run with SignalP
  misc_feature (135)...(1029): similar to gi5706456 in the genepept database release 114, Run with FASTXY 3.3t00, default parameters
tttcgtgaggaagttcaagggcgagagtgagtaccagcagaaggctgggagtctgtagtttgttcctgctgccaggctccactgaggggaacggggacctgtctgaagagaagatgcccctgctgacactctacctgctcctcttctggctctcaggctactccattgccactcaaatcaccggtccaacaacagtgaatggcttggagcggggctccttgaccgtgcagtgtgtttacagatcaggctgggagacctacttgaagtggtggtgtcgaggagctatttggcgtgactgcaagatccttgttaaaaccagtgggtcagagcaggaggtgaagagggaccgggtgtccatcaaggacaatcagaaaaaccgcacgttcactgtgaccatggaggatctcatgaaaactgatgctgacacttactggtgtggaattgagaaaactggaaatgaccttggggtcacagttcaagtgaccattgacccagcgtcgactcctgcccccaccacgcctacctccactacgtttacagcaccagtcacccaagaagaaactagcagctccccaactctgaccggccaccacttggacaacaggcacaagctcctgaagctcagtgtcctcctgcccctcatcttcaccatattgctgctgcttttggtggccgcctcactcttggcttggaggatgatgaagtaccagcagaaagcagccgggatgtccccagagcaggtactgcagcccctggagggcgacctctgctatgcagacctgaccctgcagctggccggaacctccccgcaaaaggctaccacgaagctttcctctgcccaggttgaccaggtggaagtggaatatgtcaccatggcttccttgccgaaggaggacatttcctatgcatctctgaccttgggtgctgaggatcaggaaccgacctactgcaacatgggccacctcagtagccacctccccggcaggggccctgaggagcccacggaatacagcaccatcagcaggccttagcctgcactccaggctccttcttggaccccaggctgtgagcacactcctgcctcatcgaccgtctgccccctgctcccctcatcaggaccaacccggggactggtgcctctgcctgatcagccagcattgcccctagctctgggttgggcttggggccaagtctcagggggcttctaggagttggggttttctaaacgtcccctcctctcctacatagttgaggagggggctagggatatgctctggggctttcatgggaatgatgaagatgataatgagaaaaatgttatcattattatcatgaagtaccattatcataatacaatgaacctttatttattgcctaccacatgttatgggctgaataatggcccccaaagatatctgtgtcctaatcctcagaacttgtgactgttaccttctgtggcagaaagggacagtgcagatgtatgtaagttaaggactttgagatagagaggttattcttgctgattcaggtgggcccaaaatatcaccacaagggtcctcataagaaagaggccagaaggtcaaagaggtagagacaaagtgatgatggaagtggacgtgggtgtgacgtgagcaggggccatgaatgccgcagccttcagatgccagaaagggaaaggaatggattcccctgcctggagcctccaaaagaaaccagccctgcccacgccttgacttgagcccattgaaactgatcttgagctcctggcctccagaattgcaggagaataaatttgtgttgtttttaatgagaaaaaaaaaa

SEQ ID NO: 82266 - DNA, 389 bp, Homo sapiens
  sig_peptide (103)...(238): this location contains the signal peptide sequence, MPCARLCARLLYLILFFLRFIMSAVPSFWLLSHIALRGCTSVSAH, Run with SignalP
  misc_feature (67)...(165): similar to gi2621117 in the genepept database release 114, Run with FASTXY 3.3t00, default parameters
catgtgcacgtctttgtgcccggctgctttatctcatgtaaatggaatcatgccatgtgcacgtctttgtgcccggctgctttatctcatgtaaatggaatcatgccatgtgcacgtctttgtgcccggctgctttatctcattttgttttttttaagattcatcatgtcagcagttccttctttctggctactaagtcatattgcattgcgtgggtgcactagtgtatccgcccacctgctgatgggcttctggacagtttgcagaccattcaccttgactttgtggataaagacaccctgaccctttaggggctatgcttttgctcctcttgggcgcatatttaagagtagaaagctggattataggaaaatgtatatatatatatg

SEQ ID NO: 82267 - DNA, 886 bp, Homo sapiens
  sig_peptide (856)...(721): this location contains the signal peptide sequence, MRLSLPLLLLLLGAWAIPGGLGVMAPLTATAPEVDDEEMYSAHMP, Run with SignalP
  misc_feature (852)...(677): similar to gi2773351 in the genepept database release 114, Run with FASTXY 3.3t00, default parameters
tttttttttcacaagggacatcagcagaaacaccaatgtctgcactcccagccccacaagcaccttttgcagagaaaagaagtgaggtcactgggttttatttgagtccagaggggaaggcgttgactcccacccaggcccgagtgccctgaggctggaggagggaggcaggatggcagcacagagcaagggcttcctgccctcctggctgcctgcagacgggagtggagaccgtcagagcaagccccagcttctttcagaggagggtagagtccaggactagagctcttctcttgtggctgacaccttctctgagcaggccccctgggggtcccccacatagcaatgcctccagagcccctcggccttgttggtgggcttcatagatctggtcttctccaaactcccccaagtagtgcaaacatgtcctggagagcctggtatgccaggggccccctgtgaccatcacgctgatgcttggctctggcccctcgctaagtcctgggcctgtgagacgtttcacttggtccacttctcgaactccgtagtcctgccagttccgggagcagctccggtccaggacatccgtgtagaccaactcgctcacgtcccgccgccccccagagtttgaggtatgaagtttggtctctgcctttgccaaggtttttggcccacattcttggtaagccacagctctgcaggcatcacagcgcaggtgagcgggcatgtgggctgagtacatctcctcatcatccacctccggggctgtggctgtgagtggcgccataaccccgaggccccctgggatggcccaggctcccagcagcagcagcagcagtggcagtgacagcctcatggccccaggagccagttcagcaagtggtcg

SEQ ID NO: 82268 - DNA, 668 bp, Homo sapiens
  sig_peptide (352)...(487): this location contains the signal peptide sequence, MQLLRAVLKVSCLFSFCSHVYTASTDCDTVYEGEKKSFCLFLFLF, Run with SignalP
  misc_feature (502)...(594): similar to gi4376987 in the genepept database release 114, Run with FASTXY 3.3t00, default parameters
tatccaaaaattccaaatgagagtaaacttgaagcctgaaattgcagcactcatttggtgaccaggagtgggcaaacagaaggacaaaggcctacaagattaaataatcaagtcattattgtgaatttggatctaaatgacctggcagaaaccatggagatgatcttggatttaaagaggaaaaactcaaagcaatgtattctgatcaagaaatggcaggaaatggcagctacctgatatggaacaatcaacaactgaaggtttattttgaatgagaggtgttgtccaactgcgagacggagtgattgaagctgagaataaatggaaacacaatcaatagtcactccaggtatgcagttattgagagctgtcttgaaagtttcatgtctcttctctttttgcagccacgtttacactgcatccacagattgcgatactgtttatgaaggagagaaaaagtccttctgtttattcttattcttgttcttaataaaaacttctgagctattatgctttgaaattacatcgataaagtggcgctctgagaataaaagattcaatatattacaattgagaataaaagattcaatatattgcaaagtcaacttgtatattggacagataagcatacctcctgattattgtttaatacacatttcctctatggg

SEQ ID NO: 82269 - DNA, 424 bp, Homo sapiens
  misc_feature (1)...(424): n = a,t,c or g
  sig_peptide (15)...(150): this location contains the signal peptide sequence, MLLGFGNVFILLILXTAILWLKGSQRVPEEPGEQPIYMNFSEPLT, Run with SignalP
  misc_feature (386)...(271): similar to gi1780799 in the genepept database release 114, Run with FASTXY 3.3t00, default parameters
agaggaaccactacatgctcctgggatttgggaatgtgtttatcttgctcatcttggncactgccatcctctggttgaaggggtctcagagggtccctgaggagccaggggaacagcctatctacatgaacttctccgaacctctgactaaagacatggccacttagagagatggatctgcagagccttcctgccctggccacgtttccagaagagactcgggctgtggaaggaacatctacgagtcctcgggatgcagtgactgagataggggccctgggcctccgccctggccttggagctggagggcaccttcctgttctgcacagctcagggacttagccaggtcctttcctgagccaccatcacctcctggggagccagcacctgttcttttggtcaggagctttagagatggagcttt

SEQ ID NO: 82270 - DNA, 723 bp, Homo sapiens
  sig_peptide (193)...(328): this location contains the signal peptide sequence, MFPYHFLVSSLCLCIIMVAVPEGNQRFFDDSKLIFYRIQERHWRE, Run with SignalP
  misc_feature (358)...(388): similar to gi5616206 in the genepept database release 114, Run with FASTXY 3.3t00, default parameters
tgcaggagtcctacatgaactcctttttagtttaaaaggagtttagtaagaaaactgttagctcattaaggactatagtgataataaagttaaacttggactggggttctcactgtgccagtacaatttgatttgaaatagagatgaatttgtttggttgttaacacactttattacatttcttcattatttatgtttccataccattttttagtgagttcactttgcctttgcattattatggtagcagtaccagagggaaatcaaagattttttgatgatagtaagttaatattttacagaatacaggaaaggcactggagagaggatgtgaagtgataaggaatttttggcatgttatataaattgtgttactatggaaaacaaaggattctcacagttctttatcaaaagggaaattgtatttcccattgtggaaataagttgggctttatagtcccaaacttcttagccttacctattatagatttaagaatttgcatattcggcattcatatagcaagcgtatattgagtgccttctatggccaggctctgttctaagcactgggggatgtgagagtgaacaaaatgaagtccttgtcttccaggagctaacatgtcactggaggaaggtggggttggggacgataagcgggatttgtgaaagttaacgtatctggagtcagatggtaacagttactaggaataaaaaaaaaaaaaa

SEQ ID NO: 82271 - DNA, 821 bp, Homo sapiens
  sig_peptide (64)...(199): this location contains the signal peptide sequence, MRISCPWCLWNLSLEVGGTVATTAQQHIAEVCRSSQAGRGFLHCL, Run with SignalP
  misc_feature (154)...(396): similar to gi553240 in the genepept database release 114, Run with FASTXY 3.3t00, default parameters
cctgctcgacgggaggcaggaggggagtctcactaaaccttccttggctggagtcagccaaacatgaggattagttgcccttggtgcttgtggaatctctccttggaagtgggaggcactgtggcgaccactgcccagcagcacatagcagaggtgtgcagaagcagccaggcagggagaggttttctccactgtttgcacccagcactgggcacttctggatgccaccctgttccttgcagcagctccctggtgggctttggatggaggggctactcaggagaagccagctgggggagggccagcagccggccagcagcccccactcctcccatgccagccaacgtacaggccggatgggaacagtctgtgaggcttttgtgccactcctggctgcgcttggcagctctgcatgtcacacatgaggaatcctgagtctcaaaatggcccaggaatccagcatgagctgtgctaggagtcaagaggtttgccacgactgggcttggttccttgttcatgagcgagcacgtccctcagtctatccatctagctggtgacgtttcctgaacaccaggggagaccaggctctgttctaggcacgggcagcagtgaggaagactgcacggcccctgaagctagtgctgggggacagggttggggtggcatggccctcatcaccagccgcctgcgagtctgtgccagagcagattggggtgacaacagactgcactgtgtggggtgaggggcagcatgtggctggcccccaaatgaggggagatatggttagggaggcaccttggcctgttggcaatgggtgggaa

SEQ ID NO: 82272 - DNA, 448 bp, Homo sapiens
  sig_peptide (120)...(255): this location contains the signal peptide sequence, MVLLKRGYVLTRLLKCGPPSAVPFNVGQCTEHMVIEIISKCGFIV, Run with SignalP
  misc_feature (135)...(211): similar to gi2344847 in the genepept database release 114, Run with FASTXY 3.3t00, default parameters
tctctcagcttgttcagatgccccttttgtgcagctcattagcctgatcggtgaaaactaggcgagacgcgcaccctggccctgcagtgcattttgggagttgtagtcataactaatcaatggtcttgttaaaacggggatatgttttgaccagattgcttaagtgtgggcccccttcagcagttcctttcaacgtgggtcagtgtacagaacacatggtgatagaaataatttcaaaatgtggattcatagttttttttttttaatctagagacctcagaaaatgtacttgaagaaaatcatcataatataatacataacaatagagccaattaattgatgtgatgaaagtggacaaaatgtattttgacctcagagaaaataacatttctgtcttggaagagtcagagaatacgaaatggtcgatccgaggttatcaatcggtcct

SEQ ID NO: 82273 - DNA, 765 bp, Homo sapiens
  misc_feature (1)...(765): n = a,t,c or g
  sig_peptide (403)...(538): this location contains the signal peptide sequence, MIISLVLLEIFYGALIFAQQGYYLGHQQGTEGWEMFGILQTAPPP, Run with SignalP
  misc_feature (299)...(404): similar to gi552254 in the genepept database release 114, Run with FASTXY 3.3t00, default parameters
tttcgttgtgctgttaacgctgatcttccctaaaggggccttctactctaagggctttcatttgcgagttttcatgtattcacacctgagataattcatcataaattcaaaaatcccattccgttactagtgtttagttctgatctttgatccttacagcgagctgaccctcagtggagacttgtcttatgctcagaaatttaacaaaatataatggagaagtaggaagcagcactgggcactgcagcgctttggaacatagcagatatgggaacgctaataatttcttcccacacctggtgttttccactttggagattctggcttgggggatggtgggttcctgaaaaagggtcagcagagaaatcacatagcaatgtccatgttatcacatagcagagaatgataatttctcttgttttattagagattttttacggagcccttatttttgcccagcagggctattatctgggtcaccagcaaggcacagagggatgggaaatgtttggaattttacagaccgccccccccccccacactctgctctgtcagttacaggataacccaaaaacctttgttaggagntttgggggaggagaagaccctttactcccccccccccgccctaacctgagggggtataaattgtttgggatcttgtggtttgttagtttgccgccccccccccccccccccccccccccgtttttttttgatgggggggggcgccccccccccccccccccngttctggccccccct

SEQ ID NO: 82274 - DNA, 407 bp, Homo sapiens
  sig_peptide (34)...(169): this location contains the signal peptide sequence, MRIRLLCCVAFSLLWAGPVIAGITQAPTSQILAAGRRMTLRCTQD, Run with SignalP
  misc_feature (34)...(378): similar to gi37442 in the genepept database release 114, Run with FASTXY 3.3t00, default parameters
tttcgtagacctctctgtcttgtagcatctgccatgagaatcaggctcctgtgctgtgtggccttttctctcctgtgggcaggtccagtgattgctgggatcacccaggcaccaacatctcagatcctggcagcaggacggcgcatgacactgagatgtacccaggatatgagacataatgccatgtactggtatagacaagatctaggactggggctaaggctcatccattattcaaatactgcaggtaccactggcaaaggagaagtccctgatggttatagtgtctccagagcaaacacagatgatttccccctcacgttggcgtctgctgtaccctctcagacatctgtgtacttctgtgccagcagtgacggggctagcgggagtccccacaccggggagct

SEQ ID NO: 82275 - DNA, 443 bp, Homo sapiens
  misc_feature (1)...(443): n = a,t,c or g
  sig_peptide (134)...(269): this location contains the signal peptide sequence, MVRESRPWVFFCFLVKAGMAESPYLLVPRAKLLSRLLSSLTVIPQ, Run with SignalP
  misc_feature (92)...(178): similar to gi402220 in the genepept database release 114, Run with FASTXY 3.3t00, default parameters
gtccggaattnnnggaggacgatttcgtacacagtttctaaagttgcaagcaaggtgaaaagttctgtaatcttgccctgctgggtaatggtgccaagcgcctgttgtgagtgcctcctcctctgctggaagcatggtgagggaaagcagaccttgggtttttttctgctttctcgtgaaggccggtatggctgagtcaccgtacttgctggtgcctagggcaaaactgctttccaggctgctttccagcctcacagtcatcccacagatacataacgcctcaaggacttagatgttaaccacaggttaaataatttgtatttggagtatgattagaatgtacagagagggacctaacctagtctggggctctgcgggaggaatcagggaagatttctctggtgtgcacagatagaggggaagtgggacaggcgggtaaggga

SEQ ID NO: 82276 - DNA, 429 bp, Homo sapiens
  sig_peptide (76)...(211): this location contains the signal peptide sequence, MSICQVFLLSSLTALPIAAMSWQCKWSMPKVELPPFPKPNQIPNY, Run with SignalP
  misc_feature (417)...(372): similar to gi507720 in the genepept database release 114, Run with FASTXY 3.3t00, default parameters
tttcgtatcttttgtcagcccatactcccgtatgattatttaatcaatgtccacagctttgagtactacttctctatgtccatctgccaagtgtttctcctaagctctctgactgcacttccaattgctgcaatgtcttggcaatgcaaatggagcatgcccaaagttgaacttcctccatttcccaagccaaaccagatccccaactattctatttttgttaataatactatgaaatctcccagttcattcttcacacagaaaatatagtggtcttttaaaatcatctttctgcttaaaatggcttcccatcaaagttaggaataaaacccaaacttccaaatccaactgtgatatgatttatatccagccacattaaaatcagatttattattttagaaaaaacagacagggtggccctggagcagt

SEQ ID NO: 82277 - DNA, 877 bp, Homo sapiens
  misc_feature (1)...(877): n = a,t,c or g
  sig_peptide (391)...(526): this location contains the signal peptide sequence, MSQQSWFTVYLFYLLRSNIWLEMGIPKYVKEVELRSLDFTSNYFS, Run with SignalP
  misc_feature (373)...(479): similar to gi807877 in the genepept database release 114, Run with FASTXY 3.3t00, default parameters
agtgcccctgatcacccaagttggccagtgaccctggtgtggggctgattctgtctggatatacggggaggggtaagcatgaggaaaggaagcaggtcctgacaggtactttgcactaaacagctccttataaggttctcaatttgcctgctcaatttctacagacatttgtgggaccacaccagtacattgtaaaagcaggaaacaattgagaaaaacctgagttttatgttggtaggagaaatgcctatggaatatggcaaatcgtttctctgagacttcctccctagtaattacatatttgttctcaaaaacaaatgccagaaggaagaagcagatttaatagtgcattttacaaggcaccattaatctctaagaagaacaattaaaatgtctcagcaatcatggttcactgtatatcttttctatcttcttagaagtaatatatggctggaaatgggcataccaaaatatgtcaaggaagtggaattgcgttcattagatttcaccagtaattattttagttagcttcacagatctctcttccttgcttgttcttgagagcgaggctttttagtaggaagagaaattgtctaaaacgattaataaccacaaattcaccaaactattttgggtaagtccctctatttctctaggtctaaagctaggaataagagtcattctcatataatgtactgtcccagaaagggcattannnnnnnnnnnnnnnnnnnnnnnnnnnnnnnnnnnnnnnnnnnnnnnnnnnnnnnnnnnnnnnnnnnnnnnnnnnnnnnnnnnnnnnnnnnnnnnnnnnnnnnnnnnnnnnnnnnnnnnnnnnnnnnnaggcacatcttacatggtggcagacaagacagaa

SEQ ID NO: 82278 - DNA, 472 bp, Homo sapiens
  sig_peptide (54)...(189): this location contains the signal peptide sequence, MFPTIASGGVCKTLWLKKAITLLMWVIILKIAFRFYLLDCLFSTN, Run with SignalP
  misc_feature (89)...(165): similar to gi1619867 in the genepept database release 114, Run with FASTXY 3.3t00, default parameters
ttcccgggtcgacgatttcgtcgggcgttctggagatacgtaggggtgaatttatgtttccgacgattgcatctggaggggtgtgtaagactctgtggctgaagaaagctattacgcttcttatgtgggtcattattttaaaaatagcatttcgcttttatttgcttgactgcctcttctcaacaaattttaagcccgccactacatgtgtttggttttgccctaccagctctggggttggggagtgcactgttatggttattgttgctcctgtggccattctcttgtcatccccactttcacattttggcgtggtgtattaatagactgagtgggattaatgggtaaatatgactttatagtcagctctaatcctggattcaatatcagaatttagattttcagctttgtggatgttcgacattttaaaaacagttattgcaaagaggtgaaaattttgttctgaagtctt

SEQ ID NO: 82279 - DNA, 791 bp, Homo sapiens
  sig_peptide (174)...(309): this location contains the signal peptide sequence, MALKEELTLLRFLSFSCGVIRVTYKKRATGTAQLDFSQALHDTLQ, Run with SignalP
  misc_feature (491)...(318): similar to gi4377049 in the genepept database release 114, Run with FASTXY 3.3t00, default parameters
tcccgggtcgacgatttcgtggaggaacaggaacacagtagctaaggtgacagctgcctcacaaaaggaaagtctatggcttgcaaaagaggtcgaggaaagcggaaaagcaattgccgaagagggacagtaagtgaaaagatgagtttcttccacttggcatctccccaaatatggccctgaaggaagagttgaccctgttacggtttctttctttttcctgtggggttattagagtgacatataagaaaagggccacaggcacggcacagcttgatttcagccaggctttgcatgacaccctacagagcagaatgaggacagataggctgaaggataactacttaactgggtaggtttcaagttgatactcagagtgttgattaaagggtggtcaatgacaacctggaggaggtctttaggtaaagaaactgagttcaaagataaccaacttgcatgaatgaaggagccaggatttgaacccagccctacctgattcaaaagtccattttccatttattataaaacaaaaaccaaaaaggcatgaagttcacttatgaaagaagagttgaaagatataaccagagggttaggagtacaaatccatgcccgaatgaattgtgataggctgagaaattggctaaagggggagaacaaaaacacagtgaaagtcagaaaggttaaatgtgaagccctgggttttggtttcaagaaacccgttgcaaaagttggaaggtccaagttggccattttcatggttggcaaccccccgggcttttgctgccccccct

SEQ ID NO: 82280 - DNA, 463 bp, Homo sapiens
  sig_peptide (99)...(234): this location contains the signal peptide sequence, MKVHVKQLWLWGLGHMWGLGAALSGQCKSCFFFRVRSAVVSPSPG, Run with SignalP
  misc_feature (113)...(345): similar to gi1788762 in the genepept database release 114, Run with FASTXY 3.3t00, default parameters
tcccgggtcgacgatttcgtgtgcaggtgtgcagagcagccagagagctgggatctggagagtgtgtgattagagcagccacagagcaaaggtcttacatgaaggtacatgtgaagcagctgtggctctggggtctggggcatatgtgggggttaggggctgcactgtctgggcagtgcaagagctgcttttttttcagggtgaggagtgcagtagtgtctccctctccagggggttcacagcagcaatgggtgctggttaccttaatggtgaaagctgtcagtgtcctctgcaaagtaggctactggggttggcatcaatgaacactatagggtccttcactgtgaaacctgcaggaagtctgtggctatcttgagggttattggaggactccagggacctgctctggggaggagcctagcagtctttgccactgaagactgtaatggcactcaccacatga

SEQ ID NO: 82281 - DNA, 477 bp, Homo sapiens
  misc_feature (1)...(477): n = a,t,c or g
  sig_peptide (258)...(393): this location contains the signal peptide sequence, MAFLALPFLILPSQLLFQSLTNHLCASYCASCWQYCSEQNKLTAY, Run with SignalP
  misc_feature (264)...(354): similar to gi2299733 in the genepept database release 114, Run with FASTXY 3.3t00, default parameters
ccgtctcgacgaaatcgacttaggctntgcttatacttctgcagctgctattttatagcaggcgttaatatgactgtctcttgggtggcagctctcaaacatctcgtgctgtatcaatattcacaaggcagcctcagatttactgctaaactgagatcatgagcatgaaacaataaacctacaggccactgggcatatttgctgttgatcatgcttggatcagctgcacaagcttgtgatgtttatgatataggcaaatggctttccttgctctaccttttctaattcttcccagtcaacttttatttcaaagtcttacaaaccatctatgtgccagctactgtgctagctgctggcaatactgtagtgagcaaaataagcttactgcctatttaaaaaggcagaagtcaatcaaataatgatgcaaaggagtgagtaattagaaaagagcaccgtgaaggaacacagattgacgag

SEQ ID NO: 82282 - DNA, 3229 bp, Homo sapiens
  sig_peptide (46)...(181): this location contains the signal peptide sequence, MDWTWRFLFVVAAATGVQSQVQLVQSGAEVKKPGSSVKVSCKASG, Run with SignalP
  misc_feature (46)...(398): similar to gi4512282 in the genepept database release 114, Run with FASTXY 3.3t00, default parameters
cacattcctcctctgaagaagcccctgggagcacagctcatcaccatggactggacctggaggttcctctttgtggtggcagcagctacaggtgtccagtcccaggtacaactggtgcagtctggggctgaggtgaagaagcctgggtcctcggtgaaggtctcctgcaaggcttctggaggcaccttcagcacctatgctatcagctgggtgcgacaggcccctggacaagggcttgagtggatgggagggatcatccctatctttggtacagcaaactacgcacagaagttccagggcagagtcacgattaccgcggacgaatccacgagcacagcctacatggaactgagcagcctgagatctgaggacacggccgtgtattactgtgcgagagtttggggtggttcggggagttattattccatagtgtctacgattggagccactactacggtatggatgtctggggccagggaaccctggtcaccgtctcctcagcctccaccaagggcccatcggtcttccccctggcaccctcctccaagagcacctctgggggcacagcggccctgggctgcctggtcaaggactacttccccgaaccggtgacggtgtcgtggaactcaggcgccctgaccagcggcgtgcacaccttcccggctgtcctacagtcctcaggactctactccctcagcagcgtggtgaccgtgccctccagcaacttgggcacccagacctacatctgcaacgtgaatcacaagcccagcaacaccaaggtggacaagaaagttgagcccaaatcttgtgacaaaactcacacatgcccaccgtgcccagcacctgaactcctggggggaccgtcagtcttcctcttccccccaaaacccaaggacaccctcatgatctcccggacccctgaggtcacatgcgtggtggtggacgtgagccacgaagaccccgaggtcaagttcaactggtacgtggacggcgtggaggtgcataatgccaagacaaagccgcgggaggagcagttcaacagcacgtaccgtgtggtcagcgtcctcaccgttgtgcaccaggactggctgaacggcaaggagtacaagtgcaaggtctccaacaaagccctcccagcccccatcgagaaaaccatctccaaaaccaaagggcagccccgagaaccacaggtgtacaccctgcccccatcccgggaggagatgaccaagaaccaggtcagcctgacctgcctggtcaaaggcttctatcccagcgacatcgccgtggagtgggagagcaatgggcagccggagaacaactacaagaccacgcctcccgtgctggactccgacggctccttcttcctctatagcaagctcaccgtggacaagagcaggtggcagcaggggaacgtcttctcatgctccgtgatgcatgaggctctgcacaaccactacacgcagaagagcctctccctgtccccgggtaaatgagtgcgacggccggcaagcccccgctccccgggctctcgcggtcgcacgaggatgcttggcacgtaccccgtctacatacttcccaggcacccagcatggaaataaagcacccaccactgccctgggaagtatgtacagggggtacgtgccaagcatcctcgtgcgaccgcgagagcccgggggagcggggggctttgcgtgccggtcgcactcatttaacccgggaacaggaaaaggctcttttgcgtgtagtgggttgtgcagagcgctcatgcatcaccggagcatgagaaagacgttccccttgctgccaccctgctctttgtccaacggggagctttgttatagaggaagaagggagccgtccggagtccacccacgggaaggcggggtctttggaattggttctccggttgcccattggctctcccactcccacgggcgaatgtcgctgggataagaaggcttttgaccaggcaaggtcagggctgaccatggtttcttggtacatctccctcccgggaatggggcgcagcggtgtaccaccttgtggttcttcggggcttgcccttttggcttttggaaaaaggttttcctaaaaagggggcctgggaggggctttggttggagacccttgcaacttgtaactcccttgcccattcaacccaatcctgggtgccaggaacggtgaggaacgctgaaccacacgggtaccggcctgtttgtactgactcttcccgcggctttgtcttggcacttatgtacctccaaggccgttccacgtaccaagttggaacttgtacctcaggggtcttccgtgggtccacgtccaccaccacgcatgtagacccctaggggtcccggaggatcatgagggtgtccttggttttggggggaaaaaagaaaactccccggtccccccaggaagtcaaggtgttgggcacggtgggcatgtgcgagttttgtcacaagatttgggctcaactctcttgtccaccttggtgttgctgggcttgtgattcacgttgcagatgtaggtctgggtgcccaagctgctggagggcacggtcaccacgctgctgagggagtagagtcctgaggactgtaggacagccgggaaggtgtgcacgccgctggtcagggcgcctgagttccacgacaccgtcaccggttcggggaagtagtccttgaccaggcagcccagggccgctgtgcccccagaggtgctcttggaggagggtgccagggggaagaccgatgggcccttggtggaggctgaggagacggtgacatgggttccctggccccagtagtccacaagcgggctaccaggcgctgccaaacccctcaaggtcgcacagtaataaacggccgtgtcttcatatctcaggccgctcagctccatgtagactgtgctcgtggatttgtccgcggtaatcgtgactctgccctgaaattgctgtgcgtagtttccaacaccgaggatagggataatccttcccatccactcaagtccttgtccaggggcctgtcgcacccagctgacagcatagctgctgaaggtgcctccagaagccttgcaggagaccttcaccgaggacccaggctccttcacctcagccccagactgcaccagctggacctgggactggacacctgttgctgctgccaccacaaagaggaacctccaggtccagtccatggtgatgagctgtgctcccaggggcttctttaga

SEQ ID NO: 82283 - DNA, 3032 bp, Homo sapiens
  sig_peptide (104)...(239): this location contains the signal peptide sequence, MACRWSTKESPRWRSALLLLFLAGVYGNGALAEHSENVHISGVST, Run with SignalP
  misc_feature (104)...(2683): similar to gi5524734 in the genepept database release 114, Run with FASTXY 3.3t00, default parameters
tttcgtgcggcggcggcggcggcgtcggcgtcggcgtcgtctacctccagcttctcctccctcctcctccgtctcctcctctctctctccatctgctgtggttatggcctgtcgctggagcacaaaagagtctccgcggtggaggtctgcgttgctcttgcttttcctcgctggggtgtacggaaatggtgctcttgcagaacattctgaaaatgtgcatatttcaggagtgtcaactgcttgtggagagactccagagcaaatacgagcaccaagtggcataatcacaagcccaggctggccttctgaatatcctgcaaaaatcaactgtagctggttcataagggcaaacccaggcgaaatcattactataagttttcaggattttgatattcaaggatccagaaggtgcaatttggactggttgacaatagaaacatacaagaatattgaaagttacagagcttgtggttccacaattccacctccgtatatctcttcacaagaccacatctggattaggtttcattcggatgacaacatctctagaaagggtttcagactggcatatttttcagggaaatctgaggaaccaaattgtgcttgtgatcagtttcgttgtggtaatggaaagtgtataccagaagcctggaaatgcaataacatggatgaatgtggagataggtccgatgaagagatctgtgccaaagaagcaaatcctccaactgctgctgcttttcaaccctgtgcttacaaccagttccagtgtttatcccgttttaccaaagtttacacttgcctccccgaatctttaaaatgtgatgggaacattgactgccttgacctaggagatgagatagactgtgatgtgccaacatgtgggcaatggctaaaatatttttatggtacttttaattctcccaattatccagacttttatcctcctggaagcaattgcacctggttaatagacactggtgatcaccgtaaagtcattttacgcttcactgactttaaacttgatggtactggttatggtgattatgtcaaaatatatgatggattagaggagaatccacacaagcttttgcgtgtgttgacagcttttgattctcatgcacctcttacagttgtttcttcttctggacagataagggtacatttttgtgctgataaagtgaatgctgcaaggggatttaatgctacttaccaagtagatgggttctgtttgccatgggaaataccctgtggaggtaactgggggtgttatactgagcagcagcgttgtgatgggtattggcattgcccaaatggaagggatgaaaccaattgtaccatgtgccagaaggaagaatttccatgttcccgaaatggtgtctgttatcctcgttctgatcgctgcaactaccagaatcattgcccaaatggctcagatgaaaaaaactgctttttttgccaaccaggaaatttccattgtaaaaacaatcgttgtgtgtttgaaagttgggtgtgtgattctcaagatgactgtggtgatggcagcgatgaagaaaattgcccagtaatcgtgcctacaagagtcatcactgctgccgtcatagggagcctcatctgtggcctgttactcgtcatagcattgggatgtacttgtaagctttattctctgagaatgtttgaaagaagatcatttgaaacacagttgtcaagagtggaagcagaattgttaagaagagaagctcctccctcgtatggacaattgattgctcagggtttaattccaccagttgaagattttcctgtttgttcacctaatcaggcttctgttttggaaaatctgaggctagcggtacgatctcagcttggatttacttcagtcaggcttcctatggcaggcagatcaagcaacatttggaaccgtatttttaattttgcaagatcacgtcattctgggtcattggctttggtctcagcagatggagatgaggttgtccctagtcagagtaccagtagagaacctgagagaaatcatactcacagaagtttgttttccgtggagtctgatgatacagacacagaaaatgagagaagagatatggcaggagcatctggtggggttgcagctcctttgcctcaaaaagtccctcccacaacggcagtggaagcgacagtaggagcatgtgcaagttcctcaactcagagtacccgaggtggtcatgcagataatggaagggatgtgacaagtgtggaacccccaagtgtgagtccagcacgtcaccagcttacaagtgcactcagtcgtatgactcaggggctacgctgggtacgttttacattaggacgatcaagttccctaagtcagaaccagagtcctttgagacaacttgataatggggtaagtggaagagaagatgatgatgatgttgaaatgctaattccaatttctgatggatcttcagactttgatgtgaatgactgctccagacctcttcttgatcttgcctcagatcaaggacaagggcttagacaaccatataatgcaacaaatcctggagtaaggccaagtaatcgagatggcccctgtgagcgctgtggtattgtccacactgcccagataccagacacttgcttagaagtaacactgaaaaacgaaacgagtgatgatgaggctttgttactttgttaggtacgaatcacataagggagattgtatacaagttggagcaatatccatttattattttgtaactttacagttaaactagttttagtttaaaaagaaaaaatgcagggtgatttcttattattatatgttagcctgcatggttaaattcgacaacttgtaactctatgaacttagagtttactattttagcagctaaaaatgcatcacatattcatattgttcaataatgtcctttcatttgtttctgattgttttcatcctgatactgtagttcactgtagaaatgtggctgctgaaactcatttgattgtcatttttatctatcctatgttaaatggtttgtttttac

SEQ ID NO: 82284 - DNA, 442 bp, Homo sapiens; identical to SEQ ID NO: 82114
  sig_peptide (193)...(328): this location contains the signal peptide sequence, MYGMLEWPISMYFVAFLHCFLCSGGNLGDSFQALPELCANCSSSP, Run with SignalP
  misc_feature (198)...(268): similar to gi3172278 in the genepept database release 114, Run with FASTXY 3.3t00, default parameters

SEQ ID NO: 82285 - DNA, 2433 bp, Homo sapiens
  sig_peptide (91)...(226): this location contains the signal peptide sequence, MRRRSRMLLCFAFLWVLGIAYYMYSGGGSALAGGAGGGAGRKEDW, Run with SignalP
  misc_feature (91)...(1804): similar to gi971461 in the genepept database release 114, Run with FASTXY 3.3t00, default parameters
gtaaccaactcaattgttttctggtttaccactattgtgtatgcagcactcgcgagcagcggcggccccgccggcggccgagttgggagaatgcggcggcgctcgcggatgctgctctgcttcgccttcctgtgggtgctgggcatcgcctactacatgtactcggggggcggctctgcgctggccgggggcgcgggcggcggcgccggcaggaaggaggactggaatgaaattgaccccattaaaaagaaagaccttcatcacagcaatggagaagagaaagcacaaagcatggagaccctccctccagggaaagtacggtggccagactttaaccaggaagcttatgttggagggacgatggtccgctccgggcaggacccttacgcccgcaacaagttcaaccaggtggagagtgataagcttcgaatggacagagccatccctgacacccggcatgaccagtgtcagcggaagcagtggcgggtggatctgccggccaccagcgtggtgatcacgtttcacaatgaagccaggtcggccctactcaggaccgtggtcagcgtgcttaagaaaagcccgccccatctcataaaagaaatcatcttggtggatgactacagcaatgatcctgaggacggggctctcttggggaaaattgagaaagtgcgagttcttagaaatgatcgacgagaaggcctcatgcgctcacgggttcggggggccgatgctgcccaagccaaggtcctgaccttcctggacagtcactgcgagtgtaatgagcactggctggagcccctcctggaaagggtggcggaggacaggactcgggttgtgtcacccatcatcgatgtcattaatatggacaactttcagtatgtgggggcatctgctgacttgaagggcggttttgattggaacttggtattcaagtgggattacatgacgcctgagcagagaaggtcccggcaggggaacccagtcgcccctataaaaacccccatgattgctggtgggctgtttgtgatggataagttctattttgaagaactggggaagtacgacatgatgatggatgtgtggggaggagagaacctagagatctcgttccgcgtgtggcagtgtggtggcagcctggagatcatcccgtgcagccgtgtgggacacgtgttccggaagcagcacccctacacgttcccgggtggcagtggcactgtctttgcccgaaacacccgccgggcagcagaggtctggatggatgaatacaaaaatttctattatgcagcagtgccttctgctagaaacgttccttatggaaatattcagagcagattggagcttaggaagaaactcagctgcaagcctttcaaatggtaccttgaaaatgtctatccagagttaagggttccagaccatcaggatatagcttttggggccttgcagcagggaactaactgcctcgacactttgggacactttgctgatggtgtggttggagtttatgaatgtcacaatgctgggggaaaccaggaatgggccttgacgaaggagaagtcggtgaagcacatggatttgtgccttactgtggtggaccgggcaccgggctctcttataaagctgcagggctgccgagaaaatgacagcagacagaaatgggaacagatcgagggcaactccaagctgaggcacgtgggcagcaacctgtgcctggacagtcgcacggccaagagcgggggcctaagcgtggaggtgtgtggcccggccctttcgcagcagtggaagttcacgctcaacctgcagcagtaggagggtccgggaggccctgccgtcctgtctcctgcaccattgggtggagtctggtgatcacattattgattatgtttcttaaactttccgcgaaactaatatacctcagtattccatcatggtctgaaagtcaaacttcggcaaggcacggacgactgtgcagacacagcagcggcaagaagcgagaactgccctccccctcctctcggtgcagcccagccgggcccccttccccaggccggagcgcccctcttccttccagctttcacttctgccggctccgcaactgagtgacacccagcgacaaccgactggggagtggtagaagcaactgaacggatgcgtgcgagctgaggacagggcgggaggagggggcacacatgccccaggggagcgaggagaactcttgaaatctccattttcaatcccttcgaaatcacgtatggtttccacaaagccgagtcgtgtcacgtggcaggtttacgtcaatagtccctctctctgctcctccattcgcaagtgtcttcctgggccagactcccctccacctcatgtacttgctatattgaggatgaagttttctatggtgggacactaaatataaagctatatagagaaagaaaaaaa

SEQ ID NO: 82286 - DNA, 1520 bp, Homo sapiens
  sig_peptide (133)...(268): this location contains the signal peptide sequence, MACPGFLWALVISTCLEFSMAQTVTQSQPEMSVQEAETVTLSCTY, Run with SignalP
  misc_feature (148)...(552): similar to gi235088 in the genepept database release 114, Run with FASTXY 3.3t00, default parameters
atggaggagcttttaggaactgtatttgtgatctggtggctttggcctggcagctacggcaccagtgcagctgatactcaaggttcagatcagaagaggaggcttctcaccctgcagcagggacctgtgagcatggcatgccctggcttcctgtgggcacttgtgatctccacctgtcttgaatttagcatggctcagacagtcactcagtctcaaccagagatgtctgtgcaggaggcagagaccgtgaccctgagctgcacatatgacaccagtgagagtgattattatttattctggtacaagcagcctcccagcaggcagatgattctcgttattcgccaagaagcttataagcaacagaatgcaacagagaatcgtttctctgtgaacttccagaaagcagccaaatccttcagtctcaagatctcagactcacagctgggggatgccgcgatgtatttctgtgcttataggagcggaagagatgacaagatcatctttggaaaagggacacgacttcatattctccccaatatccagaaccctgaccctgccgtgtaccagctgagagactctaaatccagtgacaagtctgtctgcctattcaccgattttgattctcaaacaaatgtgtcacaaagtaaggattctgatgtgtatatcacagacaaaactgtgctagacatgaggtctatggacttcaagagcaacagtgctgtggcctggagcaacaaatctgactttgcatgtgcaaacgccttcaacaacagcattattccagaagacaccttcttccccagcccagaaagttcctgtgatgtcaagctggtcgagaaaagctttgaaacagatacgaacctaaactttcaaaacctgtcagtgattgggttccgaatcctcctcctgaaagtggccgggtttaatctgctcatgacgctgcggctgtggtccagctgagatctgcaagattgtaagacagcctgtgctccctcgctccttcctctgcattgcccctcttctccctctccaaacagagggaactctcctacccccaaggaggtgaaagctgctaccacctctgtgcccccccggcaatgccaccaactggatcctacccgaatttatgattaagattgctgaagagctgccaaacactgctgccaccccctctgttcccttattgctgcttgtcactgcctgacattcacggcagaggcaaggctgctgcagcctcccctggctgtgcacattccctcctgctccccagagactgcctccgccatcccacagatgatggatcttcagtgggttctcttgggctctaggtcctggagaatgttgtgaggggtttatttttttttaatagtgttcataaagaaatacatagtattcttcttctcaagacgtggggggaaattatctcattatcgaggccctgctatgctgtgtgtctgggcgtgttgtatgtcctgctgccgatgccttcattaaaatgatttggaagagcaaaaaaaaaa

SEQ ID NO: 82287 - DNA, 653 bp, Homo sapiens
  sig_peptide (197)...(62): this location contains the signal peptide sequence, MMGFLIKCHWFPQYVCGLATVSSFCHQFHHNSLEMLSIYYASALC, Run with SignalP
  misc_feature (116)...(160): similar to gi5924373 in the genepept database release 114, Run with FASTXY 3.3t00, default parameters
tttcgtggataatgatagtacgaaattcatagagctgttgtaaaaatgaaatgaagtgttacacataaagcactagcatagtaaatgctcagcatttctaagctattatgatgaaattgatggcaaaaagaggaaacagttgctaaaccacagacatattgagggaaccagtggcattttatgagaaaacccatcattgtatgcgtctgaccagatgaaagaagtgcacaaaggaattttttaaatgtgtttgaggttattacagccatttcagatgagctgcgtagaattcagagccttaaaaattttgcccttaccgctttctaacttatttacagaggacttggaatggtggggagcgatgacaatgaatatagctatttctttttgtgcctattgtatgccaggtattagttccctgaaagatagatattgtctccattttacaaataagaacactgaagctcaaagagtttaaatttctcaatattgtccagtaagtgtcaatatcaatatttgattctcaaaacccaggtcctttccccatactatgctgaacataaaatggagtgactattactgcttatgtatattgatatacttaaaccttttcaaaattattattactattttgagacggagtttcacccttg

SEQ ID NO: 82288 - DNA, 668 bp, Homo sapiens
  sig_peptide (164)...(299): this location contains the signal peptide sequence, MVLRLPWWGVLAYGNDVGFGFYSFLCYQINPPTCPILWLWEVLTV, Run with SignalP
  misc_feature (158)...(241): similar to gi1143031 in the genepept database release 114, Run with FASTXY 3.3t00, default parameters
attcccgggtcgacgatttcgtatatatttctaatgattgggctttagctttaaaaacattaggctagatgcctccctattttttgtggcatgatttagctgtaactagcctggaggcaataacaatactaaatgaccttttgtagtcacattaaacattgaaatggtactgagactgccttggtggggagttttggcctatgggaatgatgtgggttttggtttctactcctttctctgttatcagataaatcctcctacatgtcccattctctggctctgggaagtactgacagtagggaaaagttagtacactcatctcattgttcagatcaagtttcctgggtgcggttttgcagaacttcctacaagagctgactcaagagttctcttctattgtggagatgatcctgctcttatatgtcatactaatttatatcctagaaactgtgagcagcatcatttgcatgtgttaagttgggaatgaataaagtgaaaatattttcacacattccttgagaaaagggttccttttgctgtgcaaatcaacgctccctagatgctgtggctaaaaagtgaagaattctaggccaacatttttttacccctttcatttcctttacttgcttgtttttagaaagcgtgcgaggtcctgggacccaaaggta

SEQ ID NO: 82289 - DNA, 648 bp, Homo sapiens
  sig_peptide (372)...(507): this location contains the signal peptide sequence, MTPNLCIRFLLKFYKAVLAHYYLSQLEPFSHDRLHLHSAFMKSRF, Run with SignalP
  misc_feature (338)...(395): similar to gi2558859 in the genepept database release 114, Run with FASTXY 3.3t00, default parameters
tttcgtcagatttctctttgtaagagttgttgtatcccctaaaagaaaacaaagctctgggcctggggtctcagcattaggagtggtgagggatatccaagcttattttctagatgcatacctcatggcatgttagttacattttgtgctttagcaaacttacacgtcatttcacagctctttgggttatttggcaaattgttaaagtaatgctataagttttagtttaatgtaacttactcacttatggataaactgaacagtttttcctttgcattcagtcgtttgttaatgtttgtcttcatgaagcctggagttgagcataatactctaaacatactgtgacaaacataaaattcagtggaactgttatgactccaaatctgtgcattagatttctattaaaattttataaagcagtattggcacactactatctgtcacagctagaacctttttcacatgacagactgcatctgcattctgcatttatgaaatccaggttctgagctgttaatatgactgtataactaattggttaattctgcctagcattctaagacctttaaaaatcttggtcatggaatacatttgcactccttcagagaatgatagataacatatgccgcgaatactttccaaggacta

SEQ ID NO: 82290 - DNA, 3467 bp, Homo sapiens
  sig_peptide (268)...(403): this location contains the signal peptide sequence, MERPLCSHLCSCLAMLALLSPLSLAQYDSWPHYPEYFQQPAPEYH, Run with SignalP
  misc_feature (927)...(871): similar to gi4579868 in the genepept database release 114, Run with FASTXY 3.3t00, default parameters
gggaaaagagtaaacgcgcgactccagcgcgcggctacctacgcttggtgcttgctttctccagccatcggagaccagagccgccccctctgctcgagaaaggggctcagcggcggcggaagcggagggggaccaccgtggagagcgcggtcccagcccggccactgcggatccctgaaaccaaaaagctcctgctgcttctgtaccccgcctgtccctcccagctgcgcagggccccttcgtgggatcatcagcccgaagacagggatggagaggcctctgtgctcccacctctgcagctgcctggctatgctggccctcctgtcccccctgagcctggcacagtatgacagctggccccattaccccgagtacttccagcaaccggctcctgagtatcaccagccccaggcccccgccaacgtggccaagattcagctgcgcctggctgggcagaagaggaagcacagcgagggcccgggtggaggtgtactatgatggccagtggggcaccgtgtgcgatgacgacttctccatccacgctgcccacgtcgtctgccgggagctgggctacgtggaggccaagtcctggactgccagctcctcctacggcaagggagaagggcccatctggttagacaatctccactgtactggcaacgaggcgacccttgcagcatgcacctccaatggctggggcgtcactgactgcaagcacacggaggatgtcggtgtggtgtgcagcgacaaaaggattcctgggttcaaatttgacaattcgttgatcaaccagatagagaacctgaatatccaggtggaggacattcggattcgagccatcctctcaacctaccgcaagcgcaccccagtgatggagggctacgtggaggtgaaggagggcaagacctggaagcagatctgtgacaagcactggacggccaagaattcccgcgtggtctgcggcatgtttggcttccctggggagaggacatacaataccaaagtgtacaaaatgtttgcctcacggaggaagcagcgctactggccattctccatggactgcaccggcacagaggcccacatctccagctgcaagctgggcccccaggtgtcactggaccccatgaagaatgttcacctgcgagaatgggctaccggccgtggtgagttgtgtgcctgggcaggtcttcagccctgacggaccctcgagattccggaaagcatacaaagccaagagcaacccctggtgcgactgagaggcggtgcctacatcggggagggccgcgtggaggtgctcaaaaatggagaatgggggaccgtctgcgacgacaagtgggacctggtgtcggccagtgtggtctgcagagagctgggctttgggagtgccaaagaggcagtcactggctcccgactggggcaagggatcggacccatccacctcaacgagatccagtgcacaggcaatgagaagtccattatagactgcaagttcaatgccgagtctcagggctgcaaccacgaggaggatgctggtgtgagatgcaacacccctgccatgggcttgcagaagaagctgcgcctgaacggcggccgcaatccctacgagggccgagtggaggtgctggtggagagaaacgggtcccttgtgtgggggatggtgtgtggccaaaactggggcatcgtggaggccatggtggtctgccgccagctgggcctgggattcgccagcaacgccttccaggagacctggtattggcacggagatgtcaacagcaacaaagtggtcatgagtggagtgaagtgctcgggaacggagctgtccctggcgcactgccgccacgacggggaggacgtggcctgcccccagggcagagtgcagtacggggctggagttgcctgctcagaaaccgcccctgacctgggtcctcaatgcggagatggtgcagcagaccacctacctggaggaccggcccatgttcctgctgcagtgtgccatggaggagaactgcctctcggcctcagccgcgcagaccgaccccaccacgggctaccgccggctcctgcgcttctcctcccagatccacaacaatggccagtccgacttccggcccaagaacggccgccacgcgtggatctggcacgactgtcacaggcactaccacagcatggaggtgttcacccactatgacctgctgaacctcaatggcaccaaggtggcagagggccacaaggccagcttctgcttggaggacacagaatgtgaaggagacatccagaagaattacgagtgtgccaacttcggcgatcagggcatcaccatgggctgctgggacatgtaccgccatgacatcgactgccagtgggttgacatcactgacgtgccccctggagactacctgttccaggttgttattaaccccaacttcgaggttgcagaatccgattactccaacaacatcatgaaatgcaggagccgctatgacggccaccgcatctggatgtacaactgccacataggtggttccttcagcgaagagacgggaaaaaaagtttgagcacttcagcgggctcttaaacaaccagctgtccccgcagtaaagaagcctgcgtggtcaactcctgtcttcaggccacaccacatcttccatgggacttccccccaacaactgagtctgaacgaatgccacgtgccctcacccagcccggcccccaccctgtccagacccctacagctgtgtctaagctcaggaggaaagggaccctcccatcattcatggggggctgctacctgacccttggggcctgagaaggccttgggggggtggggtttgtccacagagctgctggagcagcaccaagagccagtcttgaccgggatgaggcccacagacaggttgtcatcagcttgtcccattcaagccaccgagctcaccacagacacagtggagccgcgctcttctccagtgacacgtggacaaatgcgggctcatcagcccccccagagagggtcaggccgaaccccatttctcctcctcttaggtcattttcagcaaacttgaatatctagacctctcttccaatgaaaccctccagtctattatagtcacatagataatggtgccacgtgttttctgatttggtgagctcagacttggtgcttccctctccacaacccccaccccttgtttttcaagatactattattatattttcacagacttttgaagcacaaatttattggcatttaatattggacatctgggcccttggaagtacaaatctaaggaaaaaccaacccactgtgtaagtgactcatcttcctgttgttccaattctgtgggtttttgattcaacggtgctataaccagggtcctgggtgacagggcgctcactgagcaccatgtgtcatcacagacacttacacatacttgaaacttggaataaaagaaagatttataaaaaaaaaa

SEQ ID NO: 82291 - DNA, 2325 bp, Homo sapiens; identical to SEQ ID NO: 60064
  sig_peptide (83)...(218): this location contains the signal peptide sequence, MGSLQPLATLYLLGMLVASCLGRLSWYDPDFQARLTRSNSKCQGQ, Run with SignalP
  misc_feature (77)...(1565): similar to gi37187 in the genepept database release 114, Run with FASTXY 3.3t00, default parameters

SEQ ID NO: 82292 - DNA, 412 bp, Homo sapiens
  sig_peptide (158)...(293): this location contains the signal peptide sequence, MNVIPAFTILLRSPIYCLPSYPTLCFLRNTRNGGRPPKTLPFHKL, Run with SignalP
  misc_feature (316)...(240): similar to gi2224361 in the genepept database release 114, Run with FASTXY 3.3t00, default parameters
tttcgttttagacctatatcttaactattgagaacttcaggaaaaaaaataaaaagattacggattgctgcttctacataggaacgttctccaacctcaaacaggccctcagcatggcctcacaattattctgtttgatctgctcctctcattttccatgaatgttattcctgccttcactattctcttaagatccccaatctactgtctcccttcctaccctacactttgctttctacgtaatacaagaaatggaggtagacctcccaaaactcttccttttcataaactttaacaaaaaaatgaagaaactgctgtcatccagtaggaatacaaaatacttcaggtgagcattattcactggaaatgtgaagtttcaaattcttggtgaacagtcaactttgttcccgat

SEQ ID NO: 82293 - DNA, 4692 bp, Homo sapiens
  sig_peptide (2131)...(2266): this location contains the signal peptide sequence, MQGLCISVAVFLHYFLLVSFTWMGLEAFHMYLALVKVFNTYIRKY, Run with SignalP
  misc_feature (73)...(3115): similar to gi2117161 in the genepept database release 114, Run with FASTXY 3.3t00, default parameters
agccagcccgaggacgcgagcggcaggtgtgcacagaggttctccactttgttttctgaactcgcggtcaggatggttttctctgtcaggcagtgtggccatgttggcagaactgaagaagttttactgacgttcaagatattccttgtcatcatttgtcttcatgtcgttctggtaacatccctggaagaagatactgataattccagtttgtcaccaccacctgctaaattatctgttgtcagttttgccccctcctccaatgaggttgaaacaacaagcctcaatgatgttactttaagcttactcccttcaaacgaaacagaaaaaactaaaatcactatagtaaaaaccttcaatgcttcaggcgtcaaaccccagagaaatatctgcaatttgtcatctatttgcaatgactcagcattttttagaggtgagatcatgtttcaatatgataaagaaagcactgttccccagaatcaacatataacgaatggcaccttaactggagtcctgtctctaagtgaattaaaacgctcagagctcaacaaaaccctgcaaaccctaagtgagacttactttataatgtgtgctacagcagaggcccaaagcacattaaattgtacattcacaataaaactgaataatacaatgaatgcatgtgctgcaatagccgctttggaaagagtaaagattcgaccaatggaacactgctgctgttctgtcaggataccctgcccttcctccccagaagagttgggaaagcttcagtgtgacctgcaggatcccattgtctgtcttgctgaccatccacgtggcccaccattttcttccagccaatccatcccagtggtgcctcgggccactgtgctttcccaggtccccaaagctacctcttttgctgagcctccagattattcacctgtgacccacaatgttccctctccaataggggagattcaacccctttcaccccagccttcagctcccatagcttccagccctgccattgacatgcccccacagtctgaaacgatctcttcccctatgccccaaacccatgtctccggcaccccacctcctgtgaaagcctcattttcctctcccaccgtgtctgcccctgcgaatgtcaacactaccagcgcacctcctgtccagacagacatcgtcaacaccagcagtatttctgatcttgagaaccaagtgttgcagatggagaaggctctgtccttgggcagcctggagcctaacctcgcaggagaaatgatcaaccaagtcagcagactccttcattccccgcctgacatgctggcccctctggctcaaagattgctgaaagtagtggatgacattggcctacagctgaacttttcaaacacgactataagtctaacctccccttctttggctctggctgtgatcagagtgaatgccagtagtttcaacacaactacctttgtggcccaagaccctgcaaatcttcaggtttctctggaaacccaagctcctgagaacagtattggcacaattactcttccttcatcgctgatgaataatttaccagctcatgacatggagctagcttccagggttcagttcaatttttttgaaacacctgctttgtttcaggatccttccctggagaacctctctctgatcagctacgtcatatcatcgagtgttgcaaacctgaccgtcaggaacttgacaagaaacgtgacagtcacattaaagcacatcaacccgagccaggatgagttaacagtgagatgtgtattttgggacttgggcagaaatggtggcagaggaggctggtcagacaatggctgctctgtcaaagacaggagattgaatgaaaccatctgtacctgtagccatctaacaagcttcggcgttctgctggacctatctaggacatctgtgctgcctgctcaaatgatggctctgacgttcattacatatattggttgtgggctttcatcaatttttctgtcagtgactcttgtaacctacatagcttttgaaaagatccggagggattacccttccaaaatcctcatccagctgtgtgctgctctgcttctgctgaacctggtcttcctcctggactcgtggattgctctgtataagatgcaaggcctctgcatctcagtggctgtatttcttcattattttctcttggtctcattcacatggatgggcctagaagcattccatatgtacctggcccttgtcaaagtatttaatacttacatccgaaaatacatccttaaattctgcattgtcggttggggggtaccagctgtggttgtgaccatcatcctgactatatccccagataactatgggcttggatcctatgggaaattccccaatggttcaccggatgacttctgctggatcaacaacaatgcagtattctacattacggtggtgggatatttctgtgtgatatttttgctgaacgtcagcatgttcattgtggtcctggttcagctctgtcgaattaaaaagaagaagcaactgggagcccagcgaaaaaccagtattcaagacctcaggagtatcgctggccttacatttttactgggaataacttggggctttgccttctttgcctggggaccagttaacgtgaccttcatgtatctgtttgccatctttaataccttacaaggatttttcatattcatcttttactgtgtggccaaagaaaatgtcaggaagcaatggaggcggtatctttgttgtggaaagttacggctggctgaaaattctgactggagtaaaactgctactaatggtttaaagaagcagactgtaaaccaaggagtgtccagctcttcaaattccttacagtcaagcagtaactccactaactccaccacactgctagtgaataatgattgctcagtacacgcaagcgggaatggaaatgcttctacagagaggaatggggtctcttttagtgttcagaatggagatgtgtgccttcacgatttcactggaaaacagcacatgtttaacgagaaggaagattcctgcaatgggaaaggccgtatggctctcagaaggacttcaaagcggggaagcttacactttattgagcaaatgtgattcctttcttctaaaatcaaagcatgatgcttgacagtgtgaaatgtccaattttaccttttacacaatgtgagatgtatgaaaatcaactcattttattctcggcaacatctggagaagcataagctaattaagggcgatgattattattacaagaagaaaccaagacattacaccatggtttttagacatttctgatttggtttcttatctttcattttataagaaggttggttttaaacaatacactaagaatgactcctataaagaaaacaaaaaaaggtagtgaactttcagctaccttttaaagaggctaagttatctttgataacatcatataaagcaactgttgacttcagcctgttggtgagtttagttgtgcatgcctttgttgtatataagctaaattctagtgacccatgtgtcaaaaatcttacttctacatttttttgtatttattttctactgtgtaaatgtattcctttgtagaatcatggttgttttgtctcacgtgataattcagaaaatccttgctcgttccgcaaatcctaaagctccttttggagatgatataggatgtgaaatacagaaacctcagtgaaatcaagaaataatgatcccagccagactgagaaaatgtaagcagacagtgccacagttagctcatacagtgcctttgagcaagttaggaaaagatgcccccactgggcagacacagccctatgggctcatggtttgacaaacagagtggagagaccatattttagccccactcaccctcttgggtgcacgacctgtacagccaaacacagcatccaatatgaatacccatcccctgaccgcatccccagtagtcagattatagaatctgcaccaagatgtttagctttataccttggccacagagagggatgaactgtcatccagaccatgtgtcaggaaaattgtgaacgtagatgaggtacatacactgccgcttctcaaatccccagagcctttaggaacaggagagtagactaggattccttctcttaaaaaggtacatatatatggaaaaaaatcatattgccgttctttaaaaggcaactgcatgggtacattgttgattgttatgactggtacactctggcccagccagagctataattgttttttaaatgtgtcttgaagaatgcacagtgacaaggggagtagctattgggaacagggaactgtcctacactgctatttgttgctacatgtatcgagccttgattgctcctagttatatacagggtctatcttgcttcctacctacaatctgcttgagcagtgcctcaagtacatccttattaggaacatttcaaaccccttttagttaagtctttcactaaggttctcttgcatatatttcaagtgaatgttggatctcgagactaaccatagtaataatacacatttctgtgagtgctgacttgtctttgcaatatttcttttctgatttatttaattttcttgtatttatatgttaaaatcaaaaatgttaaaatcaatgaaataaatttgcagttaagatctttaaaaaaaaagtcgacg

SEQ ID NO: 82294 - DNA, 647 bp, Homo sapiens
  sig_peptide (120)...(255): this location contains the signal peptide sequence, MFRERLGGLPRVSWLCTSSLLVASQANDLSATLCGFCMISVHYEM, Run with SignalP
  misc_feature (186)...(278): similar to gi2326395 in the genepept database release 114, Run with FASTXY 3.3t00, default parameters
tttcgtcttgtttaactcaactagggatagaaaattttactgagtcagccttctgatcatagttagatcttatttatgagggtccaaatttagaaatgtgactgtaagttttagtcctgatgttcagagagaggttaggtggcttacccagggtctcatggctatgtaccagcagtcttctcgtcgcttcccaggctaatgacctctctgctaccctgtgcggattttgcatgattagtgtccactatgagatgacctactgcagcatcccaagattccccaggccaagagaatcctgagacctgcttctaggacctgctgtgctcagagtaactagggacccaatttgttgtttttaaaatgaaggaattgaactgcatgatctggagcccttcagagctaatattcagatataatgctgactctcccctgtgtggaaagtggtctaagcacatctgtctcatcggatgtaggctgcatttggaacatgttttccatacacggtaatgaggtgctagcatttctaataaagttttcactgttgtgcagggtagaaccagagggaccacctgtcaacagtgactttccaggccagtcagtgtctgtttcacacagacttagatgtatgaacctatgcagtgagatac

SEQ ID NO: 82295 - DNA, 517 bp, Homo sapiens
  sig_peptide (232)...(367): this location contains the signal peptide sequence, MTANTGTGNIVCFLPLLPGHGSFFPEACLSGTGAVLIFQLLCTMC, Run with SignalP
  misc_feature (153)...(211): similar to gi2995283 in the genepept database release 114, Run with FASTXY 3.3t00, default parameters
tttgccgggtcgacgatttcgtctcgctgctgccaccccacgtggtgcacagcccacctgcctgctctgctgtgtattcccgttttagaaaggaggagggaatgactgtcgttagccaggccacgtgactctttggagggatacactggtgattctcctttagaggcccttggattctctgcatatcagacagaaatagttggatttcttaaagacagcttgcttctctagatgacagcaaacacagggacagggaacattgtgtgctttctgccactccttcctggacatggctcattctttcctgaagcttgcctctcaggtacaggggcagtattgatctttcagcttctctgcaccatgtgctgctctgagtgtgccttgccagatgctaataccttcaagctccacctcctgttgcttcagagggaagctgtgcttccaccggggtttccagccaaagggaaggggagggcagcagggagcagccctgtggcagaatggccagctttgtatt

SEQ ID NO: 82296 - DNA, 1833 bp, Homo sapiens
  sig_peptide (959)...(1094): this location contains the signal peptide sequence, MEFLGPCGLRLVGARPLLPYWLLVFLAALNALLQWLLRPLVLYAP, Run with SignalP
  misc_feature (143)...(1250): similar to gi2563999 in the genepept database release 114, Run with FASTXY 3.3t00, default parameters
gaattcccgggtcgacgatttcgtcaggagggagaaggaggagccagcggaaggacggtgtgcgggccggccagccctggacgaaagaagagggcccctccaggccagtctgggcaccctgggatagcggctgcagccaggcatggccgactctgcacaggcccagaagctggtgtacctggtcacagggggctgtggcttcctgggagagcacgtggtgcgaatgctgctgcagcgggagccccggctcggggagctgcgggtctttgaccaacacctgggtccctggctggaggagctgaagacagggcctgtgagggtgactgccatccagggggacgtgacccaggcccatgaggtggcagcagctgtggccggagcccatgtggtcatccacacggctgggctggtagacgtgtttggcagggccagtcccaagaccatccatgaggtcaacgtgcagggtacccggaacgtgatcgaggcttgtgtgcagaccggaacacggttcctggtctacaccagcagcatggaagttgtggggcctaacaccaaaggtcaccccttctacaggggcaacgaagacaccccatacgaagcagtgcacaggcacccctatccttgcagcaaggccctggccgagtggctggtcctggaggccaacgggaggaaggtccgtggggggctgcccctggtgacgtgtgcccttcgtcccacgggcatctacggtgaaggccaccagatcatgagggacttctaccgccagggcctgcgcctgggaggttggctcttccgggccatcccggcctctgtggagcatggccgggtctatgtgggcaatgttgcctggatgcacgtgctggcagcccgggagctggagcagcgggcaaccctgatgggcggccaggtatacttctgctacgatggatcaccctacaggagctacgaggatttcaacatggagttcctgggcccctgcggactgcggctggtgggcgcccgcccattgctgccctactggctgctggtgttcctggctgccctcaatgccctgctgcagtggctgctgcggccactggtgctctacgcacccctgctgaacccctacacgctggccgtggccaacaccaccttcaccgtcagcaccgacaaggctcagcgccatttcggctatgagcccccgttctcgtgggaggatagccggacccgcaccattctctgggtacaggccgctacgggttcagcccagtgacggtggggctggggcctggaggcccagatacagcacatccacccaggtcccgagccctcacaccctggacgggaagggacagctgcattccagagcaggaggcagggctctggggccagaatggctgtccttgtcgtagagccctccacattttctttttcttttttgagacagggtcttgctctgtcacccagactggagtgcagtggtgtgatcatagctcactgcaccctcaacctcctgggttcaagcaatcctcctgcctcagcctcctgaacagctgggaccacaggtgcacgccaccacacctggcttttttttgttgtttttagagacagggtctcactatattgctcaggctggtcttgaactcctgggctcaagtgatcttcccacgtgggcctcccaaaacgctggaactacaagtgtgagccaccgcgccctggcccaagccctccacattttcaatccaggaagccttgagtctgtgttgtgtcctgacacctccaagttctaagggccgtcaggacaacggggagggtttggggacagagtgtccttcctctgtcctctcatcccag

SEQ ID NO: 82297 - DNA, 430 bp, Homo sapiens
  sig_peptide (316)...(181): this location contains the signal peptide sequence, MEPLTTCRLCPAALAWLLSERWTPSASVHGIALCVNAPWLILFSY, Run with SignalP
  misc_feature (33)...(58): similar to gi1314771 in the genepept database release 114, Run with FASTXY 3.3t00, default parameters
aggacttgcaatatcaagtgttggcaaggatgtggaaacctggataccttcagatgctgtgggcgtgcgacacggggaaactgtggcagcggtgtgcacaacagctgaacatgcgtatcatctaggacccagcacaagagtattatgtgcaccaaaaggcacacacagcaaaggtctgtaagaaaacagaatcagccacggtgcgttcacacaaagggcaatgccgtgcaccgatgcggatggagtccacctctcagacagaagccaagccaaagcagccgggcacaaacgacaagtggtgagtggctccatgcccctgaagttcaacaggtaacgctcatctacagtaatggaggtcagaaggacagtcacctttgtggggctacagacatacatggcataatgacctctcagtctgtcgacccgggaa

SEQ ID NO: 82298 - DNA, 4486 bp, Homo sapiens
  sig_peptide (715)...(850): this location contains the signal peptide sequence, MGMGRLLPMAWVLAGIPTGAQQSWRRPWSGSAPRCASCGSAWRCC, Run with SignalP
  misc_feature (375)...(3658): similar to gi3327122 in the genepept database release 114, Run with FASTXY 3.3t00, default parameters
gtgcccactcccacatccggggactggggctggacgatgccttggagcctcggcaggcccgcaccgccgccatgatgtgcgaggtgatgcccaccatcagcgaggatggccggcggggctcggcgctgggcccggacgaggcgggcggggagctggagcgcctcatggtcacgatgctcacggagcgcgagcgcctgctggagacgctgcgcgaggcacaggacgggttggctacagcgcagctgcggctgcgcgagctcggccacgagaaggactcgctgcagcgccagctcagcatcgcgctgccccaggagtttgcagctctgacgaaggagctgaacttatgtcgggagcagctgctggagagggaggaagagattgcagagctgaaggcggaacggaacaacacgcggctgctcctggaacacctggagtgcctggtgtccaggcacgagaggtcactgcgcatgaccgtggtgaagcgccaggcccagtccccgggtggggtctcctcggaggtagaagtgctcaaagctctaaagtctctcttcgagcaccacaaggccctggatgagaaggtccgggagcggctgcggatggcgctggagcgcgtggcagtgctcgaggaggagctggaactgagcaatcaggagactctgaaccttcgagaacagctgtctaggcggcggtcagggctggaagagccgggcaaggatggggatgggcagactcttgccaatggcctgggtcctggcggggattccaaccggcgcacagcagagctggaggaggccctggagcggcagcgcgccgaggtgtgccagctgcgggagcgcctggcggtgctgtgccgtcagatgagccagctggaggaggagttgggcaccgcgcaccgtgagctgggcaaggcagaggaagccaactccaagctgcagcgcgacctcaaggaggcgctggcgcagcgggaagatatggaggagcggattacaacactggagaagcgctacctgagcgcccagcgggaggccacgtctctgcacgacgccaacgacaaactggagaacgagttagctagcaaggagtcgttgtatcggcagagtgaagagaagagccgtcagctggccgagtggttggacgacgccaagcagaagctgcagcagacgctgcagaaagcggagaccttgcccgagatagaggcgcagctggcgcagcgcgtggcggcgctcaacaaggccgaggaacgtcatgggaattttgaggagcggcttcggcagctggaggcccagctggaagagaagaatcaagagctgcagcgggcccggcagcgggagaagatgaacgatgaccacaataagcggctgtccgagacggtggacaagctgctgagcgagtccaacgagcgcttacagcttcacctcaaggagcgcatgggggcgctggaggagaagaactccctgagcgaggagatagccaacatgaagaagcttcaggatgagttgctgctaaacaaggagcagctcttggccgaaatggagcggatgcagatggagatcgaccagctgcgggggaggccaccatcctcctactccaggtctctccctggcagtgccctggagctccgttactctcaggcacccactttaccttctggtgcccacctggatccctatgtggctggcagtggtcgggcaggcaagaggggccgctggtcaggggtcaaggaggagccctccaaggattgggagcggtctgccccttcgggctccataccacccccattccctggggaactggacggctccgatgaggaggaggcagaggggatgtttggggccgagctgctgtcccccagtgggcaggctgacgtgcagacgctggccatcatgcttcaggagcagctggaggccatcaacaaggagatcaagctgatccaagaggagaaggagacaacagaacagagggcagaggagctggagagtcgggtgtccagctctggcttggactcgttgggccgctaccgcagcagctgctccctgcccccctccctcaccacctctacccttgccagcccctcccctcccagctctggccactcaacaccccgcctggcaccccctagccctgcccgtgagggcaccgacaaggctaatcatgtccctaaggaggaagctggagctccacgaggggaggggccggccatcccaggagacaccccaccacccactccccgctctgcccgtcttgagagaatgacccaggccttggcactgcaggcggggtccctggaagatgggggacccccacggggaagtgagggcaccccagattctctgcacaaagcccccaagaagaagagcatcaagtcatccataggccgtctctttggcaagaaagagaagggacgaatgggacccccaggccggtacagctcttctctggctggaacaccctcagatgagacactggccactgaccctctggggctagccaagctgacaggcccaggagacaaggaccgaaggaacaagaggaagcatgaactcctggaggaggcctgccgccagggcctaccttttgctgcctgggacgggcccaccgtggtgtcctggctggagctgtgggtgggcatgcctgcctggtatgtggccgcctgccgggccaatgtcaagagcggtgccatcatggccaacctgtcagacacggagatccagcgcgagatcggcatcagcaacccgctgcaccgactcaagctacgcctcgccatccaggagatggtctcgctcacctcgccctcagcccccgcctcctcccgcacttccacaggaaacgtgtggatgacacacgaggagatggagtcccttacggccacgaccaagcccgagaccaaggagatcagctgggagcagatcctggcatatggcgacatgaaccacgagtgggtggggaacgactggctgcccagcctggggctgccccaataccgcagctacttcatggagtcgctggtggacgctcgaatgttagatcaccttaacaagaaggagctccggggccaactcaagatggtggacagctttcacagggtgagtctacattatgggattatgtgcctgaaacggctcaactatgaccggaaggacctggagcggaggcgggaagaaagtcagacccagatccgagacgtgatggtgtggtccaatgagcgggtcatgggttgggtgtccgggctgggcctgaaggaatttgccacgaacctcacggagagcggggtacacggggcactgctcgccctggacgagaccttcgactactccgacctggccttgctcctgcagatccccacgcagaatgcacaggcccggcagcttctggagaaggaattcagcaaccttatctccttaggcacagacaggcggctggacgaggacagcgccaagtctttcagccgctccccatcctggcggaagatgttccgggagaaggacctccgaggcgtaactcccgactcagctgagatgttgccccccaactttcgttcggctgcagcgggagccctgggctctccggggctccctctccgcaagctgcagccagaaggccagacttctgggagttcccgggcagacggcgtttcggtccggacctattcctgctagtgcaggcctccaggtgacctcactcggacggaagaatcttcccgaggctgggctgttccctctcctgcccggactgtggcctcgccggggagagcgggcgggggagctcgcgccgaggactggaccatctgtacagaccagcgggagtgcgcgcgcccgcctcgcacagggccggggcctggaccaaaccacatgaactggactgagagggggaagaagcggggaggaagaaatcccgccccaaacgtccgctttccttttctctactttgtaatttattgatcagtttctgttgggagacgggtgtcctttacccgcgggaaggggggcggggcttccctcccgggccagcatgcggcgagaggctgctccctcccctttttcctgcccagtcgcggggcccaagtcttccttcttcgtccgaaaggaggggaggggggactcgctgctacaagcctcgccccctgtgccaactaaagtccgccccgccgcgtccggtccgccggtcccccgggtcatttgcgggcggggtccccctttctccctccccgtgtctcgtgtccccccgggcctcaaccgccccccgtgctgtggccgtgtaccgtgccccgggggtagggggcgcagaatggcgcttcccccttctcctctggctccggggtttgcatgggagaatcctctttccacgatgccgctgggcgacgtggcgtgggggcagggggacggtgggggagccctcgcccccgactctcgagtcggcctgcgccgccccaggcgtcactcagtgatcacgggtaaagagaactgtttcaaaaagcttaaaaaaaaaa

SEQ ID NO: 82299 - DNA, 4057 bp, Homo sapiens
  sig_peptide (52)...(187): this location contains the signal peptide sequence, MIASCLCYLLLPATRLFRALSDAFFTCRKNVLLANSSSPQVEGDF, Run with SignalP
  misc_feature (43)...(2063): similar to gi3882239 in the genepept database release 114, Run with FASTXY 3.3t00, default parameters
tttcgtctgctggctgcagtgaggagcggaggcgggcgcgggcggccggccatgatcgcgtcgtgcttgtgttacctgctgctgccggccacgcgcctcttccgcgccctctcagatgctttcttcacatgtcgaaaaaatgtccttctggcgaacagctcatccccccaggtagagggcgactttgccatggcccctcggggccctgagcaggaggaatgtgagggcctgctgcagcagtggcgagaagaagggttgagccaggtgctctcaactgcaagtgaggggccccttatagataaaggactagcccagagcagcctggcacttctgatggataatcctggagaagagaatgctgcttcagaggacaggtggtccagcaggcagctgagtgaccttcgggctgcagagaacctggatgagcctttccctgagatgctaggagaggagccactgctggaggtggagggggtggagggctccatgtgggcagctatccccatgcagtcggagccccagtatgcagactgtgctgccctcccagtgggtgccctggccacagagcagtgggaagaggacccagcggtgttggcctggagcatagcacctgagcctgtgccccaggaagaggcttccatctggccctttgagggcctggggcagttgcagcctcccgcagtggaaataccatatcatgaaattttgtggcgagaatgggaggatttctccacccagccagatgctcagggcctgaaggcaggagatggccctcagttccagttcactctgatgtcttataacatcctggctcaggacctgatgcagcagagctcagagctctatctacattgccatccagacatcctcaattggaactatcgcttcgtgaacctcatgcaggaattccagcactgggaccctgatatcctgtgtctccaggaagtccaggaagatcattactgggagcagctggaaccctctctgcgaatgatgggctttacctgtttctacaagaggaggactgggtgtaaaaccgatggctgtgctgtctgctacaagcctaccagattccgcctgctctgtgctagccctgtggagtacttccggcctggcttggagctacttaatcgggataatgtgggcttagtgttgctactgcaaccactcgtcccagaaggcctgggacaagtctcggtggccccgctgtgtgtggcaaatacccatatcctttacaacccacgccggggcgatgtcaagctggcccagatggccattctcctggcggaagtggacaaggtggccagactgtcagatggcagccactgccccatcatcttgtgcggggacctaaattctgtccctgattcacctctctacaacttcatcagggatggagagctccagtaccatgggatgccagcctggaaggtatctggacaggaagacttctcccatcagctttaccagaggaagctgcaggccccactgtggcccagctccctgggcatcactgattgctgtcagtatgtcacctcctgtcaccccaagagatcagagagacgcaagtatggccgagacttcctgctacgtttccgcttctgcagcatcgcttgtcagcgaccagtaggactggtccttatggaaggagtgacagatactaagccagagcgacctgcgggttgggctgagtctgtccttgaggaagatgcatcggagcttgagcctgccttctccaggactgtaggtaccatccagcactgcctccacctgacgtcagtatatacccacttcctgccccagcgtggccgcccagaggtcactacaatgccattgggtcttggaatgacagtagattacatcttcttctcagctgagtcctgtgagaatgggaacagaactgatcacaggctgtatcgagatggaactctcaagctcctgggtcgtctctcccttctctctgaagagatactctgggctgccaatggcttacccaaccccttctgctcttcagaccacctctgcctgctagccagcttggggatggaagtcaccgccccatgacagggctcccaggggaagagagcttctcttccagaagagctcactggatcagagactgtggaaaaatcccatgcatctagaaacttagatccaagaaacttacatcccctcccttccccctcctcgttccctttttcccacggttagactttctccaggcctggctgcgttctctgcctgtggtccttgccccaccccagcctcttcttaatcctgtgccacacactcagtggccctgggagaggcagaaggggggctcccccttccttccatgtatccagcgctcccccttgatttttaattaccagggttatgggagttcttgatttcattggttatttgctttcaggccgtttcttgatgtaccttctgacctgaccttttccctgccttcaggacttctgggcccagccctcttgccaggcatgcatatgtgagatatgcatatcatgtatgtgtcctcttggggtgagacttctgcacagccatgcctgcctctgaccagtccacttttcatgttggggctgtaggcctggggcaggttcagagtctacccaagtacctatgtatgagcaggcagcagcagggcatggccccatctctccttttagcctctgtgtttcattaggcattcatcctgccaaccagggcaggcccggcgtctgggctctgggaacaaatggggcccacatcctggagtggcaaattttgggggatgcgctacctgtcccagcgggccctgtgcctccaacccagagctccccacagacctggtgtaatttcacaagggccatccctttccccaggcttccctgagggaggcggaagtttgaacccttatgtggggttcattgggctagggtagtggtatgaggtttaaaactatttaaggattaggaggagaaagagtcttcaggaaactcttgtttcactggactctgcagcctgcagaactggggcaagggtaggagttccagtaggggaaggagcaggtagactcttcagctgcctcagctgggactgaagacctaagctgattctctttcctctccactcctaagaagcaattttctgttcctctccttccaccactttttactttctgctatctcccatctcccgcttcccttccatttcctttctagaaaaccctggtatttagctcaggccaaactgcctcagcagaaaggtggccttggacaaaactggtccaagaatttgaagtggcagtacttgcggattggctctgtccagcaaggcctcagctgcttgttgcgtctgctttccctcccctaacagaagggtaccctggcttattcaggggactccttagtccacactgtgtcacctgcatgccttaatctttcattgctggggtgtggccttgggagatcctgggccagcccctccacacatctccctaagtcagagtggctgctggccctggtagatttgacttgctcttgcctcactcgacctccaaagtgggactgaagacagtggtcaagagacttgagttcgggacagtaagccaggggttaaggttctttcctttttttgaaagccaaagacccagtttgcattgtgctgctgcattcatggttagaagctttccatgcctaggttctagggaatttatttttctatgtgtatatattttcaaactttgtttcctgggtactgggcatgtgcctgtctgagccccaggtctgtctacaccccaccattcattctgtctgtctgttccctggacactgcctaaaagggtctcaagacagtgccctgtgggttcctaggactagggcccatcactgttctcttctgctgggaaatgcagctttaaaatggctaaccacagcagagggcagatgcttgatagattatcttttccttgctttcttgtttctgttttgaaagtgaaatggggttttaaattgttatttaaactctttttccaaataaaggtttaccttttttccccccaaaaaaaaaa

SEQ ID NO: 82300 - DNA, 417 bp, Homo sapiens
  misc_feature (1)...(417): n = a,t,c or g
  sig_peptide (60)...(195): this location contains the signal peptide sequence, MSPHNSLVLCFFFGAIKLPATGSFPCPRLPLSLRLSHPTALWETG, Run with SignalP
  misc_feature (236)...(107): similar to gi163072 in the genepept database release 114, Run with FASTXY 3.3t00, default parameters
tttcgtctcttacccaggctgagccgtctccctgcagctaatgcctgacagctctgtttatgtctccccataattctctggttttatgtttttttttcggggccattaagctcccagccacaggctccttcccctgcccccgcctgcctttgtccttgaggctcagccaccccaccgccctttgggagacaggctgtctccctaccccgcaggtagacaaggatcctgcaccccggccagagggnnttntttaaatctgggctagagagccttttcgagaaagagcctctctggatgtatctgtaagcgctcggcttttaacacaacacttctagtaattggctggttgaaagatggagccttacacactccttctgaatgaacatgagtgacccggtgaacctgtgttgcctttcc

SEQ ID NO: 82301 - DNA, 421 bp, Homo sapiens
  sig_peptide (52)...(187): this location contains the signal peptide sequence, MPVWLMVKGISFCPLPLPPQLGWERGGGRRQEGGDNAKRPRRYRS, Run with SignalP
  misc_feature (115)...(233): similar to gi405102 in the genepept database release 114, Run with FASTXY 3.3t00, default parameters
tttcgtggctatttatggatcagagtgggctgggaagaaacacagcagctgatgcctgtctggcttatggttaaaggtatttccttctgtcccctaccccttcccccacagctgggatgggagcggggaggggggaggaggcaggaaggaggcgataatgctaaaaggccccgcagatacagaagccatgggctgctgggcactgccctcccctgcaagccccatgccacttgctgcctgttggagctgtctctgccccttgttttcaccttacaagaggctatgaaaaggttaaagggtcatcagggtgtaggagacatggtggcaaacccgggagcttggccagacccagcttcaagccccagctgcccctacccacaacagcccaggtctgcaccacataggcagtgacacatatggg

SEQ ID NO: 82302 - DNA, 1015 bp, Homo sapiens
  sig_peptide (62)...(197): this location contains the signal peptide sequence, MMCLKILRISLAILAGWALCSANSELGWTRKKSLVEREHLNQVLL, Run with SignalP
  misc_feature (265)...(102): similar to gi3550297 in the genepept database release 114, Run with FASTXY 3.3t00, default parameters
cccgggtcgacgatttcgtcagaagttgacttctggttctgtagaaagagctaggggaggtatgatgtgcttaaagatcctaagaataagcctggcgattttggctgggtgggcactctgttctgccaactctgagctgggctggacacgcaagaaatccttggttgagagggaacacctgaatcaggtgctgttggaaggagaacgttgttggctgggggccaaggttcgaagacccagagcttctccacagcatcacctctttggagtctaccccagcagggctgggaactacctaaggccctaccccgtgggggagcaagaaatccatcatacaggacgcagcaaaccagacactgaaggaaatgctgtgagccttgttcccccagacctgactgaaaatccagcaggactgaggggtgcagttgaagagccggctgccccatgggtaggggatagtcctattgggcaatctgagctgctgggagatgatgacgcttatctcggcaatcaaagatccaaggagtctctaggtgaggccgggattcagaaaggctcagccatggctgccactactaccaccgccattttcacaaccctgaacgaacccaaaccagagacccaaaggaggggctgggccaagtccaggcagcgtcgccaagtgtggaagaggcgggcggaagatgggcagggagactccggtatctcttcacatttccaaccttggcccaagcattcccttaaacacagggtcaaaaagagtccaccggaggaaagcaaccaaaatggtggagagggctcctaccgagaagcagagacctttaactcccaagtaggactgcccatcttatacttctctgggaggcgggagcggctgctgctgcgtccagaagtgctggctgagattccccgggaggcgttcacagtggaagcctgggttaaaccggagggaggacagaacaacccagccatcatcgcaggtaacacccttctcctgggctttctgaaatcctga

SEQ ID NO: 82303 - DNA, 1253 bp, Homo sapiens
  sig_peptide (52)...(187): this location contains the signal peptide sequence, MPRPRRVSQLLDLCLWCFMKNISRYLTDIKPLPPNIKDRLIKIMS, Run with SignalP
  misc_feature (238)...(807): similar to gi4884202 in the genepept database release 114, Run with FASTXY 3.3t00, default parameters
ctgggttctggaggccctgggaccgcggaagaggcttcagacgctgcagcgatgcctcgcccacggcgggtcagtcagctcctggatctatgcctttggtgcttcatgaagaatatttccagatatctcacagacattaagcctttgcctcccaacataaaagacagactgattaaaataatgagtatgcagggacagataacagattcaaatataagtgagattttacatcctgaagtccaaactctagatctacggagctgcgatatatcagatgctgctctcctgcacctgtctaactgtagaaaactgaagaaattaaatttaaatgcttcaaaagggaaccgagtttctgtaacttcagaaggaataaaagctgtggcttcatcttgttcatacctacacgaagcttctttgaaaagatgctgcaatctcactgacgaaggagtcgttgctcttgcactcaattgccagctgctaaagatcatcgatttaggtggctgcttaagtattactgatgtgtccttacatgcattaggaaaaaactgcccatttttgcagtgtgtcgacttttcagctactcaggtatctgacagtggtgtgattgcacttgttagtggaccttgtgcgaagaaattagaggagattcatatgggacattgtgtaaatctgactgatggggctgtcgaagctgtccttacttactgtcctcaaatacgtatattactcttccatggatgccccttgataacagatcattcccgagaagtgttggagcaattagtaggcccaaacaaactaaagcaagtgacatggactgtttattgatgcttttttgaagatgatcaatgctaggaaagcttatcaaaactactttcccaggaaaccatctatagagatttgcattctacttaatgttaacactatttttaattattttattgtcttaagttataactctcagagaattagctaagtcttggtatatacatggtttgtgctttactcttaaacatctttaaagtgctattattctatatctgttggatgagtcattatttttgaaatgataatcctagcatgaactctgatctatggtgttggattctgtttcttaaataactttaaaattaactgttttcccttgagatttccttctcctatgtaggtatttgagctattgttctaagtttacctgtaagtataaaccttgggagaatctaagtaaacatatttctaaaagcatagttacc

SEQ ID NO: 82304 - DNA, 874 bp, Homo sapiens
  sig_peptide (266)...(401): this location contains the signal peptide sequence, MRSLPQPGYPSGNYFLFCFFCIFLLTFNPVSRYSTPCRKYSSLLE, Run with SignalP
  misc_feature (203)...(160): similar to gi2224468 in the genepept database release 114, Run with FASTXY 3.3t00, default parameters
tttcgttcagagttgagatggtaaagtctgctttcaagattccaaaagggtgccctgaaaaagaaagtgctacctgttcagggggatattatcctatttccatttcaagttcttagcagtcaggagcacccggtggacaccatagatgctacatgttgatttgggacttcaagaagaagaaagaaactgctgagcagaagaatgctcagccacaattagggttaaccaattagtggctgaaaaaaagagtcccatgctttgggtaatgcgaagtcttccacagcctggctacccatcaggcaattattttcttttttgtttcttctgtatttttctccttacttttaatccagtaagtagatactccacaccatgccggaaatactcatctctccttgagctccccaccacagaaaattctaaagaagttctctgactttttaaataaatccagcctttgcccgtgagccatccataatcattacaggaactacaatctcataataagactatatttgcattgcattttattgtttataaaggttataggtatctcattgggtgctcacaacaacgctgtgatataggcaaggtagtttttaccacatccccttcacagaagagaaatagaaattcagaaacttgtcccctaagttttcataataatcatggagcataaactagaatccacctctttattactatccctattcccacatttcatggtgtctttcattgaaaggcctaaaggccctgtggccaaggaggactgtccagatttaactgggcccctggggagaaaaggaacttgtgaaaaaaaacactacctcgatttttgggcggagattttttttttaatcttaaccccagagcg

SEQ ID NO: 82305 - DNA, 870 bp, Homo sapiens
  sig_peptide (411)...(276): this location contains the signal peptide sequence, MLSRFLYCRIFMAFYMQIYSESVRVPKLNNCRTFSCGVWFICLLG, Run with SignalP
  misc_feature (333)...(282): similar to gi529983 in the genepept database release 114, Run with FASTXY 3.3t00, default parameters
tttcgtggatgaggtgactgagcagcacggtgcttttacaggggtacagagaataacatgctctggttagtaagctcttctttgaggggctttattgcttcattcagcaaaagtaacaacttcaggcaattccaaagaatcattatttcttctagttgtcattctgtctattctccaactgatataaatatattttccatgccactgtcatagaaactgttaatccctttccaactgactgctaataatacattcagtggtttaaaaactgagttcccagtaaacagataaaccagaccccacaagaaaaggttctgcagttattaagtttgggaactctaacagactcactatatatttgcatataaaaagccatgaaaatcctacagtagagaaacctgcttaacattacccaatattgtccaaacttttcgagtaacagagttccctttgagggactctatattccacatggagctaagctcccttaggaggcaatttgggaaatgataaattgtagaaatatcaataggtaaagttgtctgaggagtaattttggataagcttacatttaaattctcttttcattagggtactggtacttgatattagttacactaataaaagcatccactatgttgggacagtatttcatggtgcaacacattgttaatggctacagagggctgagggccattaattttatgattgcccctgagtcccgcaggtcagattctaaggacccagattgcatctatttctggcactgtaagaccaaattagagggccccccgcggagattatgactgtgtcccaccactttctaacgccatgtggccgaacatgtggtttaaactgaacccacaggcg

SEQ ID NO: 82306 - DNA, 5597 bp, Homo sapiens
  sig_peptide (332)...(467): this location contains the signal peptide sequence, MFFGSAALGTLTGLISALVLKHIDLRKTPSLEFGMMIIFAYLPYG, Run with SignalP
  misc_feature (89)...(1279): similar to gi4589522 in the genepept database release 114, Run with FASTXY 3.3t00, default parameters
aatcttggctgttctccagggttttttttttgtgttaatgctttaatatgtggaccaagtgacacacattacagaatctccccttccctctgtctcttacagttttgcgtttggctccctaatatctgctgtcgatccagtggccactattgccattttcaatgcacttcatgtggaccccgtgctcaacatgctggtctttggagaaagtattctcaacgatgcagtctccattgttctgaccaacacagctgaaggtttaacaagaaaaaatatgtcagatgtcagtgggtggcaaacatttttacaagcccttgactacttcctcaaaatgttctttggctctgcagcgctcggcactctcactggcttaatttctgcattagtgctgaagcatattgacttgaggaaaacgccttccttggagtttggcatgatgatcatttttgcttatctgccttatgggcttgcagaaggaatctcactctcaggcatcatggccatcctgttctcaggcatcgtgatgtcccactacacgcaccataacctctccccagtcacccagatcctcatgcagcagaccctccgcaccgtggccttcttatgtgaaacatgtgtgtttgcatttcttggcctgtccatttttagttttcctcacaagtttgaaatttcctttgtcatctggtgcatagtgcttgtactatttggcagagcggtaaacattttccctctttcctacctcctgaatttcttccgggatcataaaatcacaccgaagatgatgttcatcatgtggtttagtggcctgcggggagccatcccctatgccctgagcctacacctggacctggagcccatggagaagcggcagctcatcggcaccaccaccatcgtcatcgtgctcttcaccatcctgctgctgggcggcagcaccatgcccctcattcgcctcatggacatcgaggacgccaaggcacaccgcaggaacaagaaggacgtcaacctcagcaagactgagaagatgggcaacactgtggagtcggagcacctgtcggagctcacggaggaggagtacgaggcccactacatcaggcggcaggaccttaagggcttcgtgtggctggacgccaagtacctgaaccccttcttcactcggaggctgacgcaggaggacctgcaccacgggcgcatccagatgaaaactctcaccaacaagtggtacgaggaggtacgccagggcccctccggctccgaggacgacgagcaggagctgctctgacgccaggtgccaaggcttcaggcaggcaggcccaggatgggcgtttgctgcgcacagacactcagcaggggcctcgcagagatgcgtgcatccagcagccccttcaagacataagagggcggggcgaggtactggctgcagagtcgccttagtccagaacctgacaggcctctggagccaggcgacttcttgggaaactgtcatctcccgactcctccctgagccagcctccgctcagtgtggctcctcagcccacagaggggagggagcatggggccaggtgccagtcatctgtgaagctagggcgcctacccccccacccggaggacccctgcggccccctgcctagaggagcaccatctacagttgtgccattccccagccactgccttcatgctgcccccgccggactggcagagccagggggtcagccacctgcctttgagtcatcaagatgcctctgcagccacaattctgacctaagtggcagggcccagaaatcctgaaaacctcccgctgccttttgtgatacttcctgtgctccctcagagagaaacggagtgaccttttgtcctttacctgattggcacttcgcagtctatctccctgggtagcagacggctgctgcccttctctgggcatgttctgaatgtttacactggtaccttctggtatcttctttagagccccctgcaagctgcaactctaggcttttatcttgcggggtcagagcgccctctagagggaaaagctagaggcacagggtttctgccggcccacaactgctgtcttgatttgcattttacagcaaagtgctgagagcctctagtcgcctcctgccatctgatctccctccccaccattcccgtactcagttgttcttttgtctaatcggaggccactgtgctgaggccctgcagtgtctgctcactgctgccatcttcgctgctagtcagggttccatcctctttcccctctcccagttccctaccacgttggatcccattcgtcacccatgctagggtccccaaagcactggggcaggggccagagcagcagcacccagagctccctcctctactctgacctggggccccagcatcctggagcacacgctccacgcacacacaccccagccctgtcccaggggcctggccccctcagccatctcagggtgaggagctgccagtcatgtccagatggaatgactcccatcctctcctcatctcccctttgacgagcctcaaactgctcagctcatcaaagagccattgccaacttccgtatgtggttctgggtcccagggagccttggaacctggcaccctggggtggtttaattcatcattaagaagcattcctgcttctcaagggacacagtggcctgcatgggccagcatggaccctgggctgatcatgtgcattcctgcttctctggggacacagtgggcccacatgggccagcatggaccctgggctagagcaagcacatctccatctcttccacctcaggcagtgtggctccagatgtcaggagggactgacctcaggaccttccaggttcctctgtgccaggaatgagaggccaggcccgatcctaccacctcgccttgaccctgaagtcagagcaggccagccaagcaggaagcacactgtttactttttgcatgaaaagtaaatgtgtacttgatagagctaaaatatgatcttttttaatttctcaaccccataatttgagccattgccttgcttaattttggtttccaccatttccttttagtggagaagagaggaagtcagagggtagggacctttgcctgcccctgggcgagtgcgggcagggatctgagaccagattgttctcgcacccctgccagaactcactctcccctgaagtttagggtcccatctcccagatgtaagttgttttgcaaactcagtttgccaggatttctttctttcctaatcttaaattcacagataaagcaatgaaaagagtcagatcccatttccgtctgccccctcgtcaccaggtgtgatagccccagccaggtcacacctggcctcacactttgagctgagacttgaaaacgatgctgtggcggaagagcatgtggggcttggtggaggggccccaggatttgttgggggcaaagggggtggcgggaccgttcccaggaggtaccagcacctgcctcgatctcctctgagcctcttctgccccctgtcggccaggtgaggtcagcagcctgggagagtgcccccaagagatgagggcaccccgtgttccttggcaatcttggctcaccttggtaacaaaaggccatagaagtctgtttttctgggtcagttttttttgcctgagaataacaaattgctgctgtctacctttagcacacccaataattctatttggggcagtgaatgcatagaagatataaaaatacgcagcttaactatatcttcctgcgtgtgtatttattttcttctgggtctaggccatggtacaggagaactgtggcgtgtaggaggaatacttcaggatgagtgaaggctggagccagggagcgctggaggaaaccagccctttagccagcagcccctccaccacaggcactgctgtgtggaacgagttcttggaatgaatcccatgctttctgcagcctgtagttgttatgacccctcggaacaaccaccccgtggcttgtgtggggtctcgcagggaaaagggctggcttctaggtccccgagataagtgtgcagggggatgggccagggccaggctaagggtggctcagttccatcatctggaggtcagacacactgtccagaggcagaactgaagccctctcggcccctaccctaagccagccacccctcttcacagtgggtgagctgggctgggctggctggcatgaggccaaggggtaggcctgagcgccagagtcgcccaggttagcccacaggattcctttgtgtgccatggaatgctgaaagatgggtgactggggacccttcttaaaacctttggcaaaggtgccatcggcagggcttggcctcatgaagtctcaggtccgtgttcccgcagggcgcacatgcttggagagtcctcagcagggtagccgaggccaggccacttctgctgaggatggggcaggctggggtgtgggtgtggcctggggtggctcaggtctggaactgctgcctgattcctgtgtggggagaagctcagtggccgtttgctgccactgacaaggatttcacatgcagaagagaaaaggcccccctccaccccccgcattccctgccgagtgagagccagtgtttgctgcccttgctgggggcgggtaggaaaccctgagcttcctgatgcggagtcatgaagcagagtcctcgggaaggcatctccacagccccgggtcctctgtctaacgccctccatttcacgccctccatctcacagtcaagataaaggcctcgagaataaagagccagcccccttccatttagtctcctgccgtttcccaaacagttgtccaacagttagacattgaggggcttcactgttaccaggcatgtaacagaaggaggaagactaacacacaccccctgccccatcccatccccctctcccgagctattttcttgctgtggcctctggtgcccttgagttggtctccccggctgctctgcgggggcttcactggcttcggagtgagcgcgaagtgctggtgagcagtgggcctgtgattggatgggaagatgtgcatccgtggtcaaaagtcagctgccagccctgcggaaccagagcctcaggctgggatgggggaggcctccctgctttcacctgcatggggggcatggcctggcttacaccaaaggctttgacggtttctccaagtaaggatctgcaaatcttgaatcgtcctcaaaatgacgaagcttgaattgtcctcaagatggatgtgaatcttacattccttttcatcatttcctttgtaaaaatgacgagtgcctgggtttttgttttaagaagcattatgaaggccagacttactcatttttctcccccaagtgagctgcaagaggcccctgttaggcccctgtttcctgagcagtgatgtgctgctcttcttggtggggctttgggctgggaggggaaggcgggtcagagatgggggacctgtggctgccatgcaggagcccctgcgtcatctcgttggactctttaagggagtcaggaatagatgtatgaacagtcgtgtcactggatgcctatttagaaataaagtgtatgctgctgaattggaaaaaaaaaa

SEQ ID NO: 82307 - DNA, 424 bp, Homo sapiens
  misc_feature (1)...(424): n = a,t,c or g
  sig_peptide (264)...(399): this location contains the signal peptide sequence, MCSLMFGSSVFVCFPPCVPLPAPHSGGPPHRAGRSVFSAMKLGKX, Run with SignalP
  misc_feature (200)...(321): similar to gi4029230 in the genepept database release 114, Run with FASTXY 3.3t00, default parameters
tttcgtctgaggggctgggatcagactgaaaagtccaagacccagaggagctccagttaaaacggctctttccggctcaagaccacgttccctgcttgctggggaccccatccctctcctccgtgtgtgaaaggatggcaaaggcggaagtggaggggtctctcactgccctgattccccctcctggctcccaatttgggaagacagatcccgatctgtctcgggaccagtaggtgaggggccgggtccatctcccttctctgatgtgttctctcatgtttggctcttctgtgtttgtgtgttttcctccatgcgtccctctccctgcacctcattctggtggcccccctcacagagccgggaggagcgtgttctccgccatgaagctcggcaaanaccggtctcacaaggaggagccccaaag

SEQ ID NO: 82308 - DNA, 2168 bp, Homo sapiens; identical to SEQ ID NO: 81727
  sig_peptide (122)...(257): this location contains the signal peptide sequence, MLKVSAVLCVCAAAWCSQSLAAAAAVAAAGGRSDGGNFLDDKQWL, Run with SignalP
  misc_feature (122)...(1432): similar to gi3581970 in the genepept database release 114, Run with FASTXY 3.3t00, default parameters

SEQ ID NO: 82309 - DNA, 1754 bp, Homo sapiens
  sig_peptide (1003)...(868): this location contains the signal peptide sequence, MSPTTPISLFFLCRSLLLLTVILPSCFLCGEMGGGRKYKHICIDL, Run with SignalP
  misc_feature (326)...(505): similar to gi1262615 in the genepept database release 114, Run with FASTXY 3.3t00, default parameters
tcccattcttctttttaaattttattaagaaatatcatacatacaaaagcacataaacatacagattaaaaaaggaaatgcccacaggctttagaaacagaccctcaccagttcttttgaagacccctgtgccctcatgatcacctggtccctccatcaaaacggctaacattaaattttgtcttaatcgtttccttttatcatgtatttgacagcctgtttttgactttcattgaaatgaaaccatagtgatgtattcttctgtgacttgctttttttgatccttctattgttgagttttgtccatgttcacatacatagctgcagttcagtttcacttctgtggaattccactgttggaatataccacagtatttatccaacacactgttggtggacacttgggatcttcccgggttttttcttcttttcttcctattacacacaaatgcttaaatccatcccctggtacgcatgtgtaagagtttctctagggtatgtatccgggaatgaatggctacgagagaggttatggcacacccacttataccaaattgtttcccgtttcccaaagttgttgtttctaaacattcttaaatctgttgacaaatgacctatttgggatggctgaggggaagaaatagatcagctacaaaactcttgaatttttaaaatagtaaattcaaaattctgatacaacaatgaaaaatacatttacttctctgctttggcttacttgaaatgtactttttaaaactacaggttcaacttaaaagtgctctcctttatctcaaaataaatgtttttaaatattaccaggtaaaaacagcaagactcagaacatacgggtataccgtcatatattttgaaagatctatacatatatgtttatatttcctcccacctcccatctccccacaaagaaaacaacttggaagaataactgttaacagcagcaagctcctgcagaggaaaaacagagaaataggagtagtaggagacatagatccctgaacccttttttttttttaaccatgggcaacattacaattataatacaaaatttcaaaagtagacctggggttctttcacaaacaactaaaaaatccctcaggaaatcaaacttgaaaaccaatcctgaatgaagtcccatcccacagaattgtatacataataacttcaagtgttttttgtttcatgcacatatcagatgtttaaaaacatattcacatagcccatctgcaatgcatttttaaaaacagaatggatgagggctcagagaacttccaccataaaaattttcagttcttacaagtctgaaaactttaatcagaaggtggctgagctcaaccaatatgtggtccaagtgttctcagaccttagaaataaggttggttatttatcctctgtgacactaactatatttaaggaaccagaatgcctaaggagagggagtaaaaatatctgagctgagcaatatgactaggttattataagctcaagatcaagaaaaggatgtttcaacccaaactgaaaaatgaatggactgtgtttgaaggggaaaaaaaaacgttttaacaaaaaggagcatgatatgtattatctctacattccagaggagaggatgtcttgagcagcagactggtcggtcctcttgaaaggctcaatgaaaattaaactattggaccagtgctaatatagtttgatgaccaacaaaagtttacccaatttgttttatactaatgaactgttcc

SEQ ID NO: 82310 - DNA, 1944 bp, Homo sapiens
  sig_peptide (313)...(448): this location contains the signal peptide sequence, MLLLLLPLLWGRERAEGQTSKLLTMQSSVTVQEGLCVHVPCSFSY, Run with SignalP
  misc_feature (223)...(1702): similar to gi4589281 in the genepept database release 114, Run with FASTXY 3.3t00, default parameters
atggattctatactgattcctccacttactaagaggttgaaaatgggcaagtcactttacctctctgtgccgcagtttcctgcttgtaacacctacagctgctccctgaacctcagagatgccaatgaggcggatacagggacgtacttctttcaggtggagagaggttattacatgaaatacagttacggaaatgagaagttgttcttgcatgtgacaaggcctcctctaagtcttgagcccgcagttcctgagagaagaaccctgaggaacagacgttccctcgcggccctggcacctctaaccccagacatgctgctgctgctgctgcccctgctctgggggagggagagggcggaaggacagacaagtaaactgctgacgatgcagagttccgtgacggtgcaggaaggcctgtgtgtccatgtgccctgctccttctcctacccctcgcatggctggatttaccctggcccagtagttcatggctactggttccgggaaggggccaatacagaccaggatgctccagtggccacaaacaacccagctcgggcagtgtgggaggagactcgggaccgattccacctccttggggacccacataccgagaattgcaccctgagcatcagagatgccagaagaagtgatgcggggagatacttctttcgtatggagaaaggaagtataaaatggaattataaacatcaccggctctctgtgaatgtgacagccttgacccacaggcccaacatcctcatcccaggcaccctggagtccggctgcccccagaatctgacctgctctgtgccctgggcctgtgagcaggggacaccccctatgatctcctggatagggacctccgtgtcccccctggacccctccaccacccgctcctcggtgctcaccctcatcccacagccccaggaccatggcaccagcctcacctgtcaggtgaccttccctggggccagcgtgaccacgaacaagaccgtccatctcaacgtgtcctacccgcctcagaacttgaccatgactgtcttccaaggagacggcacagtatccacagtcttgggaaatggctcatctctgtcactcccagagggccagtctctgcgcctggtctgtgcagttgatgcagttgacagcaatccccctgccaggctgagcctgagctggagaggcctgaccctgtgcccctcacagccctcaaacccgggggtgctggagctgccttgggtgcacctgagggatgaagatgaattcacctgcagagctcagaaccctctcggctctcagcaggtctacctgaacgtctccctgcagagcaaagccacatcaggagtgactcagggggcggtcgggggagctggagccacagccctggtcttcctgtccttctgcgtcatcttcgttgtagtgaggtcctgcaggaagaaatcggcaaggccagcagcgggcgtgggagatacgggcatagaggatgcaaacgctgtcaggggttcagcctctcaggggcccctgactgaaccttgggcagaagacagtcccccagaccagcctcccccagcttctgcccgctcctcagtgggggaaggagagctccagtatgcatccctcagcttccagatggtgaagccttgggactcgcggggacaggaggccactgacaccgagtactcggagatcaagatccacagatgagaaactgcagagactcaccctgattgagggatcacagcccctccaggcaagggagaagtcagaggctgattcttgtagaattaacagccctcaacgtgatgagctatgataacactatgaattatgtgcagagtgaaaagcacacaggctttagagtcaaagtatctcaaacctgaatccacactgtgccctcccttttatttttttaactaaaagacagacaaattcctaaaaaaaaaa

SEQ ID NO: 82311 - DNA, 406 bp, Homo sapiens
  sig_peptide (71)...(206): this location contains the signal peptide sequence, MNFGATAQLLHVAISLFFLIYIFKNPSISAFENKIFFCLLGKLNL, Run with SignalP
  misc_feature (119)...(255): similar to gi2447179 in the genepept database release 114, Run with FASTXY 3.3t00, default parameters
aaagcccccttccggaggtcacataacagtagaaatctgagattttaagaccatgaaatcaaaaacaattatgaattttggggcaactgctcagcttcttcatgtggctatatctttattttttttaatctacatcttcaaaaatccaagcatttctgcctttgaaaacaagatttttttctgtttattaggcaaattgaatttgagatatatattatcaacattcataaagttacagtatatttatccattgatttatagaattaatctgtactaatgaaattataatctttttctgttgctgaggacaaggactacatcttaatcttctttgcgtccctaaaagtgcttagtaaaataactcctaacaagtatttgcaccaaccaacgaaggatcgaaaaatga

SEQ ID NO: 82312 - DNA, 418 bp, Homo sapiens
  sig_peptide (15)...(150): this location contains the signal peptide sequence, MVYGGEHRVLLCVGLVLLGRRRPGKQEVDVSFTGKGTQKGVRIGR, Run with SignalP
  misc_feature (344)...(235): similar to gi1171604 in the genepept database release 114, Run with FASTXY 3.3t00, default parameters
gcggaattcgtaggatggtgtatggaggggagcatcgagtccttttgtgtgttgggctggttcttctgggaaggaggagaccaggcaaacaagaggttgatgtttcttttactgggaaagggacacaaaaaggtgtgagaattggaagggctatctttattctaggatcttattctacacagaaatctttatctcaactttagtcagtgttttggattttaaaatgtagagaaatcagggttttgtgtttaaaaaaattatataaagaatacaaaaagttaaataacaaattatgaattacatgcaaaatatgaacatttttaataaggatgagaatgttaattagttcttatagctgatttttttcccctaggagactatgaaattattactaagtattgaaaatcggccagatgcc

SEQ ID NO: 82313 - DNA, 1089 bp, Homo sapiens
  sig_peptide (195)...(330): this location contains the signal peptide sequence, MFQIYFSFCQLCFIWSCFFNSRETFNEIYKFFLKSVMVRKIFECH, Run with SignalP
  misc_feature (431)...(371): similar to gi16010 in the genepept database release 114, Run with FASTXY 3.3t00, default parameters
gtggtggaattcatttatttttccttctcaaggagtgacagtaatgccttttctttccatgaatgagattgaacattgtttttatcatgtttattgatcacttgtaataattttgcaagttgtctattcatgcccttgaccttttttaaaaaataaagagactgtagataaaggacattaaacttttgccaagtatgtttcaaatatatttttcattttgtcaattatgtttcatttggtcgtgcttttttaacagtagagaaacttttaatgaaatctataaatttttcctaaaaagtgttatggttagaaaaatatttgagtgccataaaatgtcatagtttatgtgtggatggatccatttaataaacgtttttccttaaaatttcacaggatttgcagagtctttgcaagctaacatagacctgaggtgctaacatcataatagctaccactcactgcacacacgctgtgtgccatagcaatgtgctaggtcttttacgttcaatattcctaaaactcagcttcaagctaaattgtattatctgcttttcatagatgagtagtgagccctgaagaagtgaaataatttgcccagggtcacagagctaattgatggattggaattttaactcaactctgcctaactccaaagtatacagtatactttctctacaaagctctactttttgaggcttcaaataaattacatttatcctaaaagtgacattacttttactagaacttgaaaatatgagtctgtagcctactgagactgcttttgattcccgaaagcacagtagataaggtaatgaaaaacatgtaaacgagctgaaaagtctccactgtctagggctttgattttcaaagtgtgcttctcagctgggcatagtaactcacgcctgtaatcccagcactttgagagagcaaggtgggtggatcacttgaggtcaggagttcaagaacaggcctggccaaaagggggaaacctggtctttaataaaaaggccaaaattaaccagggcttgggggcaggccccctgtgttcccagctggcttgggaaggcctggcgcccaggaaaaaatgct

SEQ ID NO: 82314 - DNA, 443 bp, Homo sapiens
  sig_peptide (220)...(85): this location contains the signal peptide sequence, MSLNVLLALFCLLLAKERTTTKRCISCLPFSTFFSFGPLQKVTDP, Run with SignalP
  misc_feature (212)...(418): similar to gi4808229 in the genepept database release 114, Run with FASTXY 3.3t00, default parameters
cgggtcgacccacgcgtccggagcgccccggggagctcggagcgcgtgcacgcttggcagacggagaaggccagtgcccagcttgaagggtctgtcaccttttgcagcggtccaaatgagaaaaaagtggaaaatgggaggcatgaaatacatcttttcgttgttgttctttcttttgctagaaggaggcaaaacagagcaagtaaaacattcagagacatattgcatgtttcaagacaagaagtacagagtgggtgagagatggcatccttacctggaaccttatgggttggtttactgcgtgaactgcatctgctcagagaatgggaatgtgctttgcagccgagtcagatgtccaaatgttcattgcctttctcctgtgcatattcctcatctgtgctgccctcgctgcccagaagactccttaccctcagtgaacaatg

SEQ ID NO: 82315 - DNA, 529 bp, Homo sapiens
  sig_peptide (295)...(430): this location contains the signal peptide sequence, MALHCGCFLLPPWTCTELSHVSVCLGTTEEGSMKDAEVRPFYCPP, Run with SignalP
  misc_feature (366)...(251): similar to gi1006918 in the genepept database release 114, Run with FASTXY 3.3t00, default parameters
aatccactgccatggaatgagtgatttttcttataagcagaggtggagccactgaggaagcacaggcgagccctccccagcacgtgatcactggtccccaacagaacaaccgctgccgcatccatgagctcatctgatcccctgggatctctactaagatgctggcagcccaaccagctggtctggccctggacatgccttcagggactggttatccttcatgacctgtgttgcggtcattggtaagcagcacctgcttctagctttactgttgggccagatttcatccccaccatggctcttcactgcggctgcttcctgctccctccatggacctgcacagaattgtcccatgtttctgtttgtttgggcaccactgaggaaggaagcatgaaggacgcagaggtcaggccattctattgccctcctgctgctgggtctttaatcctgagatggcttcaggggctggtccttctccatggccccctccacatatctcagccattttgcaaaccctggtcagaatgaa

SEQ ID NO: 82316 - DNA, 448 bp, Homo sapiens
  sig_peptide (48)...(183): this location contains the signal peptide sequence, MVRLLAFVCSEAMSSVLCWVSGWEAMIPNTKNSNRQDFKRKRRNS, Run with SignalP
  misc_feature (271)...(249): similar to gi3116332 in the genepept database release 114, Run with FASTXY 3.3t00, default parameters
cgagaactttgaaggccgaagtggagaatgtggatcctagttggagaatggtaagactgttagcttttgtatgtagtgaggctatgagcagtgtgttatgctgggtttcaggatgggaagccatgatacctaacaccaagaatagtaacagacaagattttaaaaggaaaagaagaaacagtatttctagttcttcctgggttctccatttctgataagaggaaatttatttactatgaagtcctatagaatattcctttacataaacatgcattttgtgtgagccaagaatacacctatttaaatgtgtattcttaaaaaacctgaatctctatatagggtgaagtttgttcctttggttagaacagcagtcagattgctcatctctatcactttttctcattgagtcccttttctctccttagtacaataaataaagaacaatttt

SEQ ID NO: 82317 - DNA, 2590 bp, Homo sapiens
  sig_peptide (1642)...(1777): this location contains the signal peptide sequence, MYFSLIFLVFFFLSLPLSSSSSEPTSSILGFSSSSLSSSSFSPFS, Run with SignalP
  misc_feature (2476)...(300): similar to gi386786 in the genepept database release 114, Run with FASTXY 3.3t00, default parameters
ttttttttttttgtataaaaacggcatattctttattttgcatactttaatttcagaacaaaatgaagaaaataaaataaaccacaatacacaacatccaatcctgctgtcaagagtagagagggaatggggcttgacacccttagtttactgccttcaacacaaggacaggagagggaaaaaaacactagacaccagcagggggagccaggtgggacaggggcactcgaggctgcagtgggagcccatggggacactatacaagggcacaagttttccaactatgaactcctaacctaatcgacttcttccatgcgagacgcatcctcatcgccctcgagaggggggatctcatcaggaactgcagcattgggttcctctgctgccacttcatcttcatcaatacctagacctagcttgatcatgcgatagatgcggttggagtgggtctggggatcctcaagggaaaagccagaagatagcagggcggtttcaaacagcagcaccaccaggtccttaactgccttatcattcttgtcggcctcagccttctgccgcagcgtctccacaatggggtggtcagggttgatctccaggtgctttttggccatcatatagcccatggtggagttgtcccgaagtgcctgggctttcatgatccgctccatattggctgtccagccgtaggtgctggtcacaatgcagcaaggtgaagacacaagtctattggagattgtcaccttctcaaccttcttatctaagatttctttcatgagcttgcagaggttctcaaactttgccttgctctcttccatcttcttcttctcctcctcatcctcaggcagctccagaccctccttggtaactgagaccaggctcttcccatcaaattccttgagctgctgcacacagtactcgtcaatgggctcggtcatatataccacctcgaagccccgtttccgcactcgctccacaaaagctgagttggccacctgctctttgctctcaccagtgatgtaatagatggacttctgtgtctccttcatgcgagaaacatactctgacagagatgtcatctcatctccagactgggaggtatgatagcgcagcagctcagacaggcggcggcggttagtggagtcttcgtggattccaagcttgagatttttagagaatgcctcatagaatttcttgtaattctccttgtcttctgccagctcagagaagagctcaaggcacttcttaacaatgtttttgcgaatgactttcaagattttgctctgctggagcatttctcgggagatgttcaggggcagatcctcagagtcaaccacaccacggataaaattgagatactctggtatcaactcatcacagctgtccatgatgaacacacggcggacatagagtttgatgttgttctttttcttcttgttctcaaaaaggtcaaagggagcccgacgaggaataaatagcaatgccctgaattccaactgaccttctacagaaaagtgcttgactgccaagtggtcttcccagtcattagtgaggctcttgtagaattctccatactcctcttgggtgatgtcatcagggtttctggtccaaataggcttggtcttgtttagttcttcctgatcaatgtatttctctttgatcttcttagttttcttcttcttatccttaccgctgtcatcctcctcatctgaacccacatcttcgatcttgggcttttcttcatcatctttatcttcctcttctttctcacctttctcttcctctgcctcatcatcactaatttccttctctcgttccttctccaaataaagggtgatgggatagcctatgaactgagaatgcttcttcactacttctttgacccgcctctcttctaggtactctgtctgatcttctttaagatggaggatcactttggtacccctgccaatgggctcaccatggtcagcacgcacagtgaaggaacctccagcagaagactcccaagcatactgttcatcatcgttgtgctttgtgatcacaaccactttctctgccaccaagtaggcagaataaaagccaacaccaaactgcccaatcatggagatgtctgcaccagcctgaagagcctccatgaatgctttagtaccagacttggcaatggttcccaaattatttatgagatcagctttggtcatgccaatgcctgtgtctaccaaagtcagggtacgttcctgagggttggggatgatgtcaattttcagctctttaccactgtccaacttcgaagggtctgtcaggctctcatagcgaatcttgtccaaggcatcagaagcattagagatcaactcccgaaggaaaatctccttgttggaatagaaggtattgatgatgagggacatgagttgggcaatttctgcctgaaaggcaaaagtctccacctcctcctctccatggtgcacttcctcaggcatcttgaaaagaaaaggattatacgtaatagtgagcaacgtaggcttgctttccgatacccagacagtcccaacactgcgccggagtgactagagagagatactgcgtgccccaagtcgcc

SEQ ID NO: 82318 - DNA, 666 bp, Homo sapiens
  sig_peptide (506)...(641): this location contains the signal peptide sequence, MLFLSFFPLLSKKVTWQLPSACPTIVFWVCVGQVICLLSSRNEIE, Run with SignalP
  misc_feature (346)...(226): similar to gi2199519 in the genepept database release 114, Run with FASTXY 3.3t00, default parameters
agaggcaccccgctgtagtttccggcgtcgacccacgcgcgcggcgaattcctttgttatgacctcaggaggatttaagatgaacctctaagaaactttcgatcgaagtagtaggtcctatacgaagtgtaaatgtatgtcacttagcagaagtttaaggttgagaagagtttttctcatttatgagtgtgctttttatctaatggagtggacctctacaagattcacaaagtttttcaaagcattatattggcagaaataccacctttgattgaagaggggccctttggatccccaaaattccactggcaggaagcaagttgaaaacactatgcagatgcaaacttggcctacctttcaatgaaaatagaaggaaattagaaattagaaccaagatctcaggccagagccacgagttatgaaaaattattcccaggtcctaagttccactctaggaacttctaacattgccaccttgatttcagaattatgtgcaccaataactatgttgttcctctcattttttccacttttgagcaagaaggtcacatggcagttaccctctgcctgtcctaccattgtcttttgggtatgtgttgggcaggtaatttgtctcttaagttccagaaacgagattgagagaagccatatatattccaggagcac

SEQ ID NO: 82319 - DNA, 450 bp, Homo sapiens
  sig_peptide (24)...(159): this location contains the signal peptide sequence, MKLLQFQRFCCNLCAEIVATSIGSLMCQGLSKRSTFINSANPQNS, Run with SignalP
  misc_feature (280)...(172): similar to gi1789655 in the genepept database release 114, Run with FASTXY 3.3t00, default parameters
tatgccaagcttggcacgaggggatgaaactgttgcaatttcagagattctgttgcaacttgtgtgcagaaatagttgccacttccatagggtctcttatgtgccagggcctttctaaacgctccacatttattaactcagctaatcctcagaacagccctattttcaactccatttttgccccacgaggaaactggggcacagagaatttaagtaacctgcccaaggccacacagccaagaagagatggagccgggatttgaaccaggaagtggttctgcagcctgtgctctcagtcaccctgctgtcctcactctgcggcagacggccaggcaggaaaggtgacattggagcgggggtttagcagcactaaggcccataaacaggaagtgtgttatttatttttccttgattactcttttcacctagtctcgggactgcacaatcagg

SEQ ID NO: 82320 - DNA, 425 bp, Homo sapiens
  sig_peptide (38)...(173): this location contains the signal peptide sequence, MRAMLGTCALGQFFLIMGNTQRCDDFPTESPPAKTNVSRAGLSPP, Run with SignalP
  misc_feature (122)...(367): similar to gi190475 in the genepept database release 114, Run with FASTXY 3.3t00, default parameters
tccagtgcggtggaattcctggggcggggtccgtgggatgagggctatgttaggtacatgtgccttaggacagttttttctaattatgggtaacacgcagaggtgtgatgactttcctactgaaagtcccccagcaaagacaaacgtttcccgcgcaggcttgtcccctccgtgtgaggccctacatggtgtagaaagtaggggcagctgcagccacgggaagctgcaaagccctcctgggagagactggccgcagggtgacccacaggacaggcccaagcgcagatggcagaggccaggacctgctggtcggggcgccccagaccccactcctaagggccagggggcagcagtcccaccgcgctctgccagcatgtttctgatccacaagcagatgtgggcctatggctttggggactgaaaga

SEQ ID NO: 82321 - DNA, 792 bp, Homo sapiens
  misc_feature (1)...(792): n = a,t,c or g
  sig_peptide (590)...(725): this location contains the signal peptide sequence, MLFGLALQLILDLKLTTVNQRESDVARVATAEEYSKKGLLGQETL, Run with SignalP
  misc_feature (575)...(743): similar to gi930080 in the genepept database release 114, Run with FASTXY 3.3t00, default parameters
ctgatctagataatttatgtgtatacaaggttcattaaaaatagtttcttataatttttccctgatgacaaaagcnnnnnnnnnntttttcctgaattgatacattttcagattaatattatgaatctcacttataatttatgaaaaattctaaggtattaatatatacggaaagaacagtagtttgatttgaccaattttctaacatctgaaataaacacttcaaataaaatattagaataaaatatatgtactgccaaatggaaagttaattcattttcttaatctataatatatatagacagagatgaagaaaatgtgataattacaaaaaagatgatgaggaaacgcagtgactgtctgtaaaaccaactttttattcacaccttagcatcatgctgaagcccactgaatgtaaaggaaatacttttcccatgtgtatccatatttctcaagtaaactgaggagtccgtatattatcgacttcagtctgtgtacatctaaagggggctactcttggcttacaagtcaatttttaagatacctggggctttgccttctttaacagcccttttgctcagaatgttctatgctgtttgggcttgccttgcaattgatcctcgatttgaaactgacaactgtgaaccagcgagaaagtgatgtggcaagagttgccacggctgaagaatattcaaagaaaggtctgcttggacaggaaacacttcatgctggatcacagacaagaatgcagattcttatctcctgagaccccttgaattccaccgcaagtgg

SEQ ID NO: 82322 - DNA, 465 bp, Homo sapiens
  sig_peptide (204)...(339): this location contains the signal peptide sequence, MGTFTAIILFLLCYSTSGVLGADNCLLALGCWTTGSIFRPSKKDC, Run with SignalP
  misc_feature (148)...(259): similar to gi1262691 in the genepept database release 114, Run with FASTXY 3.3t00, default parameters
gggtggacttctacagaaaaaatttgccagtccctggtctatgccaaccttatatgcagttggatgacaatgcacatagaagattcttccagaggacacattcaagggctgccagattggctaaccagagaacttagcccagcaggatttaatatcttctttgaaccgatgatttacatattttccattcttccctttctcaaatgggaactttcactgcgattatcctgttccttctctgctacagtacatcgggtgtgttgggagcagataattgtcttctagccttaggttgctggaccacaggatccatattcagacctagcaaaaaggattgcacatcactcagagatctttcacttcaggctgggttatttttatgtagagcgtacataggagaaaaagagtgtgtttggatgattgattgccaaagaagtcaactggcagatagtggtagttgctaca

SEQ ID NO: 82323 - DNA, 841 bp, Homo sapiens
  sig_peptide (520)...(385): this location contains the signal peptide sequence, MIWALSSSLIPFLIALCFVHSANSHLQVLVICSSLFLEPPPHNFM, Run with SignalP
  misc_feature (451)...(396): similar to gi1345535 in the genepept database release 114, Run with FASTXY 3.3t00, default parameters
gcagtgcgcgtggaattcatttcttccccttatggccaatttccaggcctccaggcccctctctggacctggaatgaccctagcatcttggctcttgcttaaagccattccagatttcaagaaataccatttaaggcaataagggacctatttatttctctaatgaggcaactggacttcagaaaatgtaagtgacttgacaagttgcattcccttagtcattcagctgccttcctggaacacataagcaaacaatcctcaatgtaatgtcagagattggtaagtgctttgagaaaacactagagcaaggtaagaaaatgacagagcagggagtctattttaaataaggcagtagagaaagccctggtacagcaggtggtagtcacatgaagttatggggagggggttccaggaagagggaagagcaaataacaaggacctggaggtgggaattagctgaatgaacaaaacacaaagcaataagaaatggaattagagaggaagacagagcccagatcatttaagctttgaaggccaagctccgactttggactttatttgaaagtgtctgtaaagcttttaaagagtcttaaaactcttggccaggcgcgggggctcatgcctgtaatcccagcactttgtgaggccaaggcgggctgaacacaaagtcaggagttcgagaccagccggaccacatgggggaaccccatctttactaaaaacacaaacattagctgggcatggggggatgcacctgtaatccccactacttaggaggctgaggcaagagaatcgctttgacttccagaggggggagttgccattcgccgaaaaacaaccc

SEQ ID NO: 82324 - DNA, 440 bp, Homo sapiens
  sig_peptide (256)...(391): this location contains the signal peptide sequence, MVAFFFYFSLKTFLSSFCHKEEIKHSVLFLHLTINQALFWFSSAC, Run with SignalP
  misc_feature (289)...(405): similar to gi3834489 in the genepept database release 114, Run with FASTXY 3.3t00, default parameters
gtggtggaattctgggcccacagtgctatacttttattagagtttgaactgcaagtgatttcatccactttaaactcttgctttccacctatagttgtttatgagatggtggcaataatcacactgaccttagtagacctgcctcctttcctgattgatctatttctgttatatttttgctaattaataaaaattttacttcctgaaatatttttcattaaaggcctgtaaaagaaatactgatatttcacagccatggttgccttctttttctactttagtttaaagacgtttctttcatccttctgccacaaggaagagattaagcattctgtcctatttctgcatctgactataaatcaagcactcttctggttttcctctgcctgtattttgtttctttttactttttagtttgaaataatttcaaatttacagaa

SEQ ID NO: 82325 - DNA, 1236 bp, Homo sapiens
  sig_peptide (600)...(735): this location contains the signal peptide sequence, MWNFQHLLTHAMLFHTFVTLLIFFSLPGKLPDNLHCHYPLGKYIL, Run with SignalP
  misc_feature (698)...(788): similar to gi2764845 in the genepept database release 114, Run with FASTXY 3.3t00, default parameters
gtcccgggcggggaattccagcaatcattagtcctactgtgtatgaaatttctaagtatttctaaatgctcaaccctagacatgcccttcactgatatttttaatgtgctttcagtaccttggccatttaataacttatgttcttttttcaaaatcttaggaagaaattgtgttttggaattgggccaacagtatgtgtttctccggtggataagcaaaatttcataagaacaaagatgattcaagcagatgtttatcatgaaactgccataaaaagcacccgaagtcacaaagataaacatcaaatccagtccttggaaatttcccccaccctacctgagcatcttttgaagtagatattcaattattttgaaggatttttaaagaattttctagatttcatctaaaagacacttttgaaatctgcgttaaaattcatggaaatatatcctagatgaatttggaggaatgtaagcaagtaggtacaaacctttattttatccctcagtgactcactcagttgtgaataggaagggctctctgtgatctggccacagcttatttcttgccacattcctattttcagtcctcttccaatcatgtggaacttccagcatctccttacacatgccatgttatttcacacttttgtgactttgctcatatttttctctctccctggaaagctccccgacaacctccactgccattacccactaggcaagtacatcctgttttcagaatcagcccaatatcatctttcctagggaatcttgtcagactgcccttcattaccaacagacaaaataactaccttatctttggttctgtcttcactctagacctatgtagcatgctacttataacactgcattggtttgttggcatttgtattttccactgagcaaccataacttatgtgtagacaaaaattgtattgctcacctttggattactaggacctagcagtgttctgattcaaagtatgtactcaataaattcatcttgaaaagtgaatgaatgaataaatgaacgcctgcatctccatcattggtttactatttaatcaaggaagtttttaaattatattcccccatatcttgaaaatgaatcttggggttaaatcggtgccccatataaaacattactttgcccttttcacttctccttaacacatatggggctatataatctttataagggttaaggaatatattggaatatgttataacacaa

SEQ ID NO: 82326 - DNA, 851 bp, Homo sapiens
  sig_peptide (21)...(156): this location contains the signal peptide sequence, MLYMPSYYFVVCFLNYNVAGAFLHVYRAPPLCEAYRVFSAGCTLS, Run with SignalP
  misc_feature (145)...(177): similar to gi563379 in the genepept database release 114, Run with FASTXY 3.3t00, default parameters
atagtgccgtggaattcgctatgttatatatgccatcatactattttgtagtttgctttttaaattacaatgtagcaggggcattcttacatgtttatcgagcacctcctctgtgtgaggcgtacagagtgttcagtgctggatgtactctgtcaacaaagcccatcaggatgctgtccttacagatttactgggtgtaataaatggaaaagggaaaacagaaagaacaaggtacagtgaggaataatagcagcaaccccatttgaacagaagggttaagggaagcctctctgagaaatgaaggatgtagagaagttaccccgagtgccaggaaggggaagccgactgatgcagggacagcatatccaaagtccagagatggggcagagctaggcttatcccgaggcgctgatagaaggtgggtgtggcgggagggaggcactgtttgacaagggtgtgacaagctcagggcccaggctgaggccggtgtcctcctgtgggaccccccaggtagacaagcgcctggttacaggagcacgcacggccttgatgaagcacagcttggagagggaattcccttgctcatctcattaccgtgggaatacccttagaggctttaagctccccatggcatgattcaggcttctaactctaacacatgaccagggcacccggaactccgaaggagcacagacggacacctgagagcctagttagaacggttttgaggaaagcacggcccgacgctacacgcgcgaaatcccagcagtgtaccctcgacgttgagtgaatagacgcgcccggctgtcctctccaggagagcactggagttcgtgcggacggctcgcgtc

SEQ ID NO: 82327 - DNA, 787 bp, Homo sapiens
  sig_peptide (326)...(191): this location contains the signal peptide sequence, MWEELLRGLTAPYWLSSWLCFSWRAATVAVAVAVAVAAAAATAAA, Run with SignalP
  misc_feature (126)...(349): similar to gi213584 in the genepept database release 114, Run with FASTXY 3.3t00, default parameters
aagggtctagaaagaatgggctccccctgggtgctgcatgcctctggggtgagcacagtcctggccctcatgagcccacgcagagagcgtggcaatcctgtgtctcctgcaggtatgcaggcggcccggggggcctgggcctcccctcacatgctgcaagaccctccactgacttcacgcaagcggcagctgctgcagctgtggctgctgcggcagccactgccaccgccacagccacagccaccgtggctgctctccaggagaagcagagccaggagctgagccagtatggagcggtgagccccctcagcagctcctcccacatggcagccagcctgagggcctgggaggaggtactcagccagacagtgggctccagggacaagcatggaatatgccagggctcatgaagccagtaaaagagagatgtgtgggaaggagtgagggtctgaggggagaggtttctggggtgtcctgtgaaagggtatggtgcccacatgggtgggtgggcgggttttatgcctatcttttggagccctttgtgggtgggacctggaccattcttcttttttctcttcctagatgggggccggacagtcttttaacagccagtttctgcagcatggaggtccccgggggcctagtgtccccgctggcatgaaccctactggcataggaggggtaatgggcccctctggcctctcccccttggctatgaaccccacccgggcagcaggaatgacacccttgtatgcagggcagcgtttgccccaccatgggtatcctg

SEQ ID NO: 82328 - DNA, 811 bp, Homo sapiens
  sig_peptide (237)...(372): this location contains the signal peptide sequence, MCLIHFREGMLFLALTHLQELVESHCYVNHSDTRLQSRRFMVPVV, Run with SignalP
  misc_feature (428)...(334): similar to gi1561671 in the genepept database release 114, Run with FASTXY 3.3t00, default parameters
tagtgtggtggaattcgactcaagaccaaatgaatcggaatctctgggctagggtctcaggtatccattttgtgtttctttgtttattctaaagctccccaggtggttcacatgtgcagctaccagaattgagaacccactgtctagatgcctaaatatttggccagctgtggcatgtttcagcttctcactgctaacaagtgatgcctaggcagctgctttcttcccagggatgcatgtgcttaatccatttcagagaggggatgctttttttagctctgacacatctacaagaattggttgaatcacactgctatgtaaatcattctgatactagattgcagtccagaaggtttatggtccctgttgtcttattcatctttgagtcccctgagttccactcagtgttgtacatgcagtaagtgttcaataagtctaagtgggatggatcaataatgctctacctatgtacaatgttcatgttttatactccacttctaatcatattgtctcatttaatcatcacaagtcagagaggtaagggtgatctgttacccccacttaataaatgaagaaactgagacacacacaaaatgaacaaaatacaccctgaggttgatgctgttttgctgtgttgctaaatcatcatcctttagaagagacttattattaatggaagagccttccaaaagctgggggaaaaactaagggtttctcctgggggccatttcacaccccaggttgactttctatacaccataagtaaggcgtttaaccttctgaagggggggggcttttccccccccattcc

SEQ ID NO: 82329 - DNA, 497 bp, Homo sapiens
  sig_peptide (231)...(366): this location contains the signal peptide sequence, MLPRYLVCVLMGTGFQACLCPSLLCGRGQVTSLRSQLPHLSVGAE, Run with SignalP
  misc_feature (355)...(284): similar to gi1045447 in the genepept database release 114, Run with FASTXY 3.3t00, default parameters
aattcgactggtgttttctgaatgtgactatctgtcatatgtatttcttcttctacaaactgtcctttaccaatctttctgttgatgtcttagagttttgctaaaggaagaattagttactgaatttgttacacacgtttttcctgctgtctttaaattttgtgttgggcttttatgatctacactatagaatacgagcagccaaaccttttctccctttgcaagggtatatgcttccaaggtacttggtgtgtgtgctcatgggaactgggttccaggcctgcctctgccctagcttgctctgtggccgtgggcaagtgacatctctcagatcacagcttccccatctgtcagtgggggcagaggtggttagacctctgagcttcctcctagctctggcatcctatgattttagttcttgagctagaaattgggcatgttggctctgagttaacagctcattttaagaaacagttactgcctagcacagcagtctg

SEQ ID NO: 82330 - DNA, 501 bp, Homo sapiens
  sig_peptide (273)...(408): this location contains the signal peptide sequence, MSLKFLKGFKNIYLYFILLLKKKNHIVCVLNDLCLTGCLLRSSTS, Run with SignalP
  misc_feature (291)...(456): similar to gi3878560 in the genepept database release 114, Run with FASTXY 3.3t00, default parameters
tgcaattcgcagtgatcactggatgtgatcatatatctgtctgattttagcagtaaccaatattgagtctcaaactgaaaatatttaattggacaaagccttatcataaaatcaaaaagctgctagactgatcatttttccctttgtgatcctaaaaagtccttggtggtttggggttgcggggaaacagtttctatcttttccatggttgctcagccagaggagagaaaagatgtcacaacatgtttgtatttcccaacagttgtgaatgaatgagtctaaagtttttaaagggctttaaaaatatatatttatatttcatcctcctcctaaagaaaaaaaatcacatagtgtgtgttttgaatgatctgtgtttaacgggttgtcttttaaggtcctctacctcatattatgccagcttttttgaaggccagaagaaaagatttggaaaatatgctaaaatgaggggtttggccaaaatcttcgttctttataactaca

SEQ ID NO: 82331 - DNA, 798 bp, Homo sapiens
  sig_peptide (270)...(135): this location contains the signal peptide sequence, MGMLGVLIWFLVLVFIVCPESSLSLSTRCLPPSQVPKVSFLGTYP, Run with SignalP
  misc_feature (43)...(163): similar to gi5441256 in the genepept database release 114, Run with FASTXY 3.3t00, default parameters
gtggaattctatgactagaaatttcttccagaattcccttcaaagcatgactctcctgctgtgtttggggtggggagtgtgtggcagtggcgaggggacacaatcctgcctctaggatacaactctggagtggatatgtgccaagaaagctcaccttggggacctgggatggaggtaggcatctggtagaaagggagagtgaggattctgggcacactatgaaaactaataccagaaaccagatcaagacacccaacatccccattcccaaccacactcatctatgctggaggtgattatccccacgcccctcctatgttactcttcctgagccattggagtgccagaataaacataaccaactagaagacttctgcagaatggaaaaggatggaagattccagactagaaaggccaaggacagcagatggacactgaatgttgagatttgtcagtggagtgctgcaagacaggatgcaaagttatgacaggtgtctttgcttctagagaggcttcgcagacatgcattctatcccaccccaccccgccccaccccctgggtgtgtaggtactcctccttcttgttcccacagcactctgtgttcacttctacagtggtgcttttcacactgtttatgattgtctgtctgctcatgtattggtcagcttctctgaactggaaactcctggcaaagcagggattatcatctttttctttggactccccagggtccagctccaacacctggctcaacattagcactcagtgaatggtgaggtgaacaaatggcctgattc

SEQ ID NO: 82332 - DNA, 480 bp, Homo sapiens
  sig_peptide (47)...(182): this location contains the signal peptide sequence, MCPFCPLLFCLSFISKVQIVSSLLLKPFMTLYYERTSSKLLNLTY, Run with SignalP
  misc_feature (68)...(260): similar to gi3860622 in the genepept database release 114, Run with FASTXY 3.3t00, default parameters
gggtacaactcatctcttcctgaaattattgggaaagcctccagccatgtgtccattctgccctctgctcttctgcttgagctttatttccaaagttcagattgtgtcatctctcttattaaaacccttcatgactctctattatgaaagaacaagctccaaacttcttaatcttacttataagaccttcacattcaacttgtctgtcttgcttttatttcttcgtagcactgttttgtacaacacagttactaacctcaccacccatgaaataggaaaggaaaaacagaattaaaaatacccattctgccttagacatttgccatcaatatcgttttcaacctccctctttcccccttggcaattaattcaatggatcattttcctaatgattgctgttcacactctgcttaactgttttaaatatcaagatattgaatagttttgatgaacacagacaatcagtgtgtgattattgac

SEQ ID NO: 82333 - DNA, 814 bp, Homo sapiens
  sig_peptide (226)...(91): this location contains the signal peptide sequence, MFLLFSRISNLMFVNHKLPMLITENKQVSKEENKATHSHRSSFQS, Run with SignalP
  misc_feature (312)...(454): similar to gi340618 in the genepept database release 114, Run with FASTXY 3.3t00, default parameters
gtggaattccccccacaggctccttgtcatgcgaggttgcagtctgattttcatctactcagattaaatttaatcttgaagatatagtagaggactggaatgaggatctgtgactatgggtggctttattttcttcttttgacacttgtttattttctgtaatgagcatgggtagcttatgattaacaaacattaaattggatattcttgaaaacagcaaaaacatttttaatgaaatggcatgctaatctcattaatttcattattttgtgataaagtctaatgatgagatgagagttgtaaactaagagacgagtggtaatccttggcaccctttcttattatgctatttatttgacttggagagttttacttgtctgtttttagagagtatgttaattgagtgctcagtatgcattacgaataatcttgtctgttttcttgtggagattctgaaggcccttttgctctttctgtaaaagccaagcagactgtattaacttctgggttaatttgaaaaatgaatgtggaacttgttggcacaacaccttaaagaattgcatgtttaataactggaaggctttccattagatttggctctagcctgaattaataatgatgctgacttattgggaatagaagaccccgcccttggaccgcctaggaccaaagaaatggggcctggtctgcaaacccgtcctgccccccttgacccgggcccccctccgctctgggaacgacactcaccgcccccgcgaccgaacttgtcatctacaaaccccgcgcgccctccgcccacctcacccacaggacg

SEQ ID NO: 82334 - DNA, 794 bp, Homo sapiens
  sig_peptide (110)...(245): this location contains the signal peptide sequence, MHESPLAWASVHLSSLPLLCTACSSPLMGNSVLCRAPADMGLAWM, Run with SignalP
  misc_feature (195)...(287): similar to gi552372 in the genepept database release 114, Run with FASTXY 3.3t00, default parameters
aattcctcaagtggagatctcagataaatcacttattggagcttctgtacaatcatctgtaaaaccattacttcccacttggagagatttttgaggattaaatgagataatgcatgaaagccctctagcttgggcatcagtacacctgagttcccttcccttgctctgcacagcctgctcatcaccactgatggggaactctgtcctctgtagggcccctgcagacatgggccttgcctggatgctgctgctgtcggagcctaggagagttgtgcctggcatcgcagcacaggtactcacagctctcagaaggagactcctgtctgggaccctgccctcattcccacgtaggaaaaatcctttacatgagcatctcctggccttcattgttaggttgtagactacaatgaatgatattctgtgtttaattacattatgcacaacactctacagagtgggtggttttgaatcccaaccactaatttacgaagtggagcggctctgctggctctgtgaagtatgtgttgtggagccagaggtgatgctgttggatgtgggtggtgatttacgggagagcagcataagcagaggaaggcacagagacctgggttcaaatcccactgccagggctatctgacgtgagacttcggacaagttatttaaccttaaagcttagtggccttgcatgtaaaaaacaaataatgccgacctcattggatccttgtggaggagcccctgggataatggggggtaccatgcatcagggatcatttccctttcccttgataaatgag

SEQ ID NO: 82335 - DNA, 796 bp, Homo sapiens
  sig_peptide (206)...(341): this location contains the signal peptide sequence, MLKLLCAAEVTNVLFNCVFDYGCPKTFCHPWTIFVLFWSSLEGGF, Run with SignalP
  misc_feature (167)...(282): similar to gi20814 in the genepept database release 114, Run with FASTXY 3.3t00, default parameters
aattctccctaaagttcagaaaataacataatttggcttatttggtacaaaaatcatataggaagcattgtcaaatatgaaatggtgttgggtttttgagggctgcatttttaaaatatgttattagtatgtgttccaaaattatgggaaattcctataattctatataactcagtgtacattatcagtaataatcataattgttatgttaaaattattgtgtgccgcagaggtaacaaatgtccttttcaactgtgtttttgactatggctgtcctaaaactttttgtcatccatggacaatttttgtcttgttttggtcctctttagaaggtggctttataatcagctacaaaactctaacaggtgctcttgaatgcaggtttctgataactttggagattgtgacatcagaatagaggaaaactttcaggactcatggagagctataaaatattcatgagtatcaagcagaacaggaattaactgcatggactgaactgatctttttgactttttgcttaaaaagttgctgatcttttgttttggttttcagagccttacaacttttcttttgagctattggcagcttttaacaatttacgatacttccataaacaaagcttgcagcctatttcggttctctttagctgattcctgccgaataggcacactattcgctcgcactccctacctatcggccctccggcaataccccacccgcgcccaccaatcctgtcttcctcgatacctagaccccttcgtggcgcactccgttctctgaccaccagtcgggg

SEQ ID NO: 82336 - DNA, 796 bp, Homo sapiens
  misc_feature (1)...(796): n = a,t,c or g
  sig_peptide (297)...(432): this location contains the signal peptide sequence, MVYIFMCNCFLHMLHLKTHYNLCFPIFLETRRNNPTIKRQSSLTD, Run with SignalP
  misc_feature (125)...(40): similar to gi1226296 in the genepept database release 114, Run with FASTXY 3.3t00, default parameters
gtggaattcggagaaatgcctaatctatagacatctttttgttattttccttagaaatgctattcaaatctggagctaagggaaaagtcagatatgaatccttggagtcgttaagtggcacaatctgaatgtaaatttcatggcaccagccaggccttcagatctcaatggtaactgttgctaacccaaatattgtcactgaaaaaatgacacccattaataattactattccaaacacatgaaagcacctgagaaatgttcactccagacatggtacttttgactacaaagggtgatggtatacatatttatgtgtaattgtttcctacatatgttacatttgaaaactcactacaatttatgtttcccaatctttctagaaactagaagaaataacccaacaattaaaaggcaatctagtttaactgacttgccaaagggctgacttttgatagttattattcaccagaaaacaaaacactggctattatgtgggctttggtaacagcatggcatgtagtaggctttactattcataataaacatagaataaaatggatggatgaaagtatctgtaattatacttgaacataagaatcaaattttgaatagattatgtgtgntttcttttctctaaatatgtataaaattgatatcaatgcttgtaattactactaaaagcttttgagatgaaatgattgccccatctactcaggctacttttaaaattggcttttgccatgctactatggcaaccatctttggtatctatacctcatgccttgaatttacctt

SEQ ID NO: 82337 - DNA, 958 bp, Homo sapiens
  sig_peptide (241)...(376): this location contains the signal peptide sequence, MRSSLTMVGTLWAFLSLVTAVTSSTSYFLPYWLFGSQMGKPVSFS, Run with SignalP
  misc_feature (241)...(827): similar to gi4877582 in the genepept database release 114, Run with FASTXY 3.3t00, default parameters
tgcctgtatgtctgaggctgggtttgaagcctccagcgtgtttggagttaatccccattaggttggactccgcccctttctcccaaaggtaaagcaaggttttcaggcatcactgcaaagggcagctagtattcccatccttgtctaacaagctgtaaggagaagttgtttctgagatctgagcctgaagagagggaacaagtcagtcagccttcgtggtcagaagagaaacctgtgaccatgaggagcagcctgaccatggtgggaaccctctgggccttcctgtcccttgttactgctgtgaccagttctaccagttacttcctaccttactggctctttggatcccagatggggaagccagtgtcattcagcacattccggaggtgcaactaccctgtgcggggagagggacacagtctgatcatggtggaagaatgtgggcgctatgccagcttcaatgccatcccaagcctggcctggcagatgtgcacagtggtgacaggtgccggctgtgctctgctgctcctggtggcactagctgctgtcctgggttgctgcatggaggagctcatctccagaatgatgggacgttgcatgggagcagcgcagtttgttggagggctgctgataagctcaggctgtgccttataccctttaggatggaatagcccggagataatgcaaacatgtgggaatgtctccaatcaatttcagttaggtacctgtcggcttggctgggcctattactgtgctggaggtggagcagctgcagccatgttgatctgcacctggctctcttgctttgctggaagaaaccccaagcctgtcatattgggggggaagcaccatgaggaaaaccacttcttatgctatggagcttggccattgccctcaacccttgagcttcgaaaagaagaccggggggggcgggcaacagggaagcaagtgacccccc

SEQ ID NO: 82338 - DNA, 1012 bp, Homo sapiens
  sig_peptide (303)...(438): this location contains the signal peptide sequence, MTVSGTVVLVAGTLCFAWWSEGDATAQPGQLAPPTEYPVPEGPSP, Run with SignalP
  misc_feature (113)...(177): similar to gi705389 in the genepept database release 114, Run with FASTXY 3.3t00, default parameters
atggccatgagagtgacctctggtcgtcctcactgctacactcccaccagcgccatgacagtttacaaatgccacggacccaaggttccgatccgcgccaaggcgttccggtcagcagcagccccgcggctcctcgggccccgccgcgctggcaagccccagtccccgccagcccaatcgtgctggcgctttaaggacgggcggggcgggctgggcgacagcgctggacacctggagctgcccgaggacgcggaggagagatgtgtgacgggagccacttggcctccaccctccgctattgcatgacagtcagcggcacagtggttctggtggccgggacgctctgcttcgcttggtggagcgaaggggatgcaaccgcccagcctggccagctggccccacccacggagtatccggtgcctgagggccccagccccctgctcaggtccgtcagcttcgtctgctgcggtgcaggtggcctgctgctgctcattggcctgctgtggtccgtcaaggccagcatcccagggccacctcgatgggacccctatcacctctccagagacctgtactacctcactgtggagtcctcagagaaggagagctgcaggacccccaaagtggttgacatccccgactaacgaggaagccgtgagcttcccagtggccgaggggcccccaacaccacctgcataccctacggaggaagccctggagccaagtggatcgagggatgccctgctcagcacccagcccgcctggcctccacccagctatgagagcatcagccttgctcttgatgccgtttctgcagagacgacaccgagtgccacacgctcctgctcaggcctggttcagactgcacggggaagaaagtaaaggcttcctagcaggtcctgaaaccaaaagacaaaaaaggctgtgcccttctcccaaaaccttaggccgggcgctgggacaacaggaggcccttcctgcaaacgttcgttggtgaaaggctggtcatatttaa

SEQ ID NO: 82339 - DNA, 827 bp, Homo sapiens
  misc_feature (1)...(827): n = a,t,c or g
  sig_peptide (472)...(337): this location contains the signal peptide sequence, MCHLMTTLWLLHLQALRPCSRREEGRIIRANSSHLLSASDNSSPE, Run with SignalP
  misc_feature (116)...(226): similar to gi2252608 in the genepept database release 114, Run with FASTXY 3.3t00, default parameters
ttcgctctagtccagcgtggtggaattccaactctccaaagctccatgcctccactgccgtacttcccgctactccttgtcccactgcagtctggcttccactattccactggaacagtgctcaccgtggccgccagttatgtcatattccccaaacccaaggaacaccacagccgatgatattgttgaaatatcacaaggccatttccagcccctttccttctgcctcctaatatagagactggaagagtaaatactcactctctcagcctcctttggaagagagaccacgtgacccaatactagccagtaagatgtaaggggatgtccttgaggacttctggggaagaattatcactagctgataaaagatgagaagagtttgctcgtattattctgccctcttccctccttgaacatggacgtaatgcctggaggtgaagtagccataaggtggtcattaggtgacacatttgaggacaaaaacaatgctaaccgctcagcatgaaaatcacagaaaacatctgaatttcttgggtacaatgttgagccattgaaagagctctggaatcatcacactccagacttcttgatacgtgcttctgcttctttagatctttcccttggnttcagatattttctacattctcctgggttctaccctatttctctggtggctcctcagacttttttgtaagatcctattccagggcccatcctttatatgccatggtttctcggtgcccctaaatgaagacctctttttctttttcctcttaagaagttcaattgccatctggtagaataaccattcccaaatcattaac

SEQ ID NO: 82340 - DNA, 860 bp, Homo sapiens
  sig_peptide (365)...(500): this location contains the signal peptide sequence, MGAWAWVPTPSLCLCHSTCLEFLLFLYILFYCIFETVSLSPRLER, Run with SignalP
  misc_feature (204)...(347): similar to gi9449 in the genepept database release 114, Run with FASTXY 3.3t00, default parameters
ctccgtgtggtggaattcttcacatttcaggaagggagacttggggcctggagaagcgatgtgatttttcttttctagttcagcgctggttttgatggctttttatcatgaccttgttatgtcttattttagtttcggcccatttagtggatacgacaacagtggcccagggaggtatggcagagctgaggcttaacccagggcctgcgccctccacggcctgcactgccccacctccagctccttgccctgttcctccctctgcaccggatcagcccccggactctgggtcacctccacaccagttgacagggccccccagtccccaccgccaaccacctggccggctacttgtcagacagacatgggggcgtgggcatgggtccccacccctagcctttgcctctgtcactctacctgcctggaattcctactttttctttatattttattttattgtatttttgagacagtctcattgtcgcccaggctggagcgcagtggcgcgatcttggctcgctgcaacctctgtctccggggttcaagcgattctcgggccttagcctcccgagtagctgagactacaggcatgcaccaccatgcctggctaatttttgcatttttggtggagacagggtttcaccatgttggccaggctggcctgaactcctgaccttaagtgatccactcgcctaggccttccaaagtgctgggattacaggcgtgagccacctcacccagcctggagtgtctcatcttccaccactaaatgaaacgatggaccctgaacagaaaaaggaacagtggtggaagaactagcaaagcccacagccttgagtttggccgtaagtatcaaggtt

SEQ ID NO: 82341 - DNA, 1710 bp, Homo sapiens
  sig_peptide (136)...(271): this location contains the signal peptide sequence, MSLLSLPWLGLRPVAMSPWLLLLLVVGSWLLARILAWTYAFYNNC, Run with SignalP
  misc_feature (334)...(1708): similar to gi3012097 in the genepept database release 114, Run with FASTXY 3.3t00, default parameters
tttcgtcagggctggaaggtcctggcctgggatgaagaggggactgcctaaggctggggtggctccaagatgccggcatgggaaactgggggtttcctggtaactggactcctagcaaactcccaaggattcaggatgtcgctgctgagcctgccctggctgggcctcagaccggtggcaatgtccccatggctactcctgctgctggttgtgggctcctggctactcgcccgcatcctggcttggacctatgccttctataacaactgccgccggctccagtgtttcccacagcccccaaaacggaactggttttggggtcacctgggcctgatcactcctacagaggagggcttgaaggactcgacccagatgtcggccacctattcccagggctttacggtatggctgggtcccatcatccccttcatcgttttatgccaccctgacaccatccggtctatcaccaatgcctcagctgccattgcacccaaggataatctcttcatcaggttcctgaagccctggctgggagaagggatactgctgagtggcggtgacaagtggagccgccaccgtcggatgctgacgcccgccttccatttcaacatcctgaagtcctatataacgatcttcaacaagagtgcaaacatcatgcttgacaagtggcagcacctggcctcagagggcagcagttgtctggacatgtttgagcacatcagcctcatgaccttggacagtctacagaaatgcatcttcagctttgacagccattgtcaggagaggcccagtgaatatattgccaccatcttggagctcagtgcccttgtagagaaaagaagccagcatatcctccagcacatggactttctgtattacctctcccatgacgggcggcgcttccacagggcctgccgcctggtgcatgacttcacagacgctgtcatccgggagcggcgtcgcaccctccccactcagggtattgatgattttttcaaagacaaagccaagtccaagactttggatttcattgatgtgcttctgctgagcaaggatgaagatgggaaggcattgtcagatgaggatataagagcagaggctgacaccttcatgtttggaggccatgacaccacggccagtggcctctcctgggtcctgtacaaccttgcgaggcacccagaataccaggagcgctgccgacaggaggtgcaagagcttctgaaggaccgcgatcctaaagagattgaatgggacgacctggcccagctgcccttcctgaccatgtgcgtgaaggagagcctgaggttacatcccccagctcccttcatctcccgatgctgcacccaggacattgttctcccagatggccgagtcatccccaaaggcattacctgcctcatcgatattataggggtccatcacaacccaactgtgtggccggatcctgaggtctacgaccccttccgctttgacccagagaacagcaaggggaggtcacctctggcttttattcctttctccgcagggcccaggaactgcatcgggcaggcgttcgccatggcggagatgaaagtggtcctggcgttgatgctgctgcacttccggttcctgccagaccacactgagccccgcaggaagctggaattgatcatgcgcgccgagggcgggctttggctgcgggtggagcccctgaatgtaagcttgcagtga

SEQ ID NO: 82342 - DNA, 886 bp, Homo sapiens; identical to SEQ ID NO: 82267
  sig_peptide (856)...(721): this location contains the signal peptide sequence, MRLSLPLLLLLLGAWAIPGGLGVMAPLTATAPEVDDEEMYSAHMP, Run with SignalP
  misc_feature (852)...(677): similar to gi2773351 in the genepept database release 114, Run with FASTXY 3.3t00, default parameters

SEQ ID NO: 82343 - DNA, 414 bp, Homo sapiens
  sig_peptide (261)...(396): this location contains the signal peptide sequence, MSRTWVMRKLTGGFKFFLQVLIMETDLLQSRIPNVLGLKLQDIRP, Run with SignalP
  misc_feature (242)...(161): similar to gi4651084 in the genepept database release 114, Run with FASTXY 3.3t00, default parameters
tctggtggaattcagagaggtcatgttttctagcatacaaatgtgcctcccatatttacatagttttgaacaaatagaaagaataagcagaaactcggaggtttcagaggctaagcagatagggtgttccagccctctactaatatttttctaatgtttcactgtaaatgttgagcggcacttggaaatttcccaagtctcaaagctgttgttctcttgctttctcctcccattggatggaaatatgatgtttgagcttaatgtcaagaacatgggtcatgagaaaactaacaggtggcttcaaattctttttacaagtcttaattatggaaacagatttattacaaagtagaatacctaatgttttgggtctaaaacttcaggatattagacctctcatccagaggtcctatt

SEQ ID NO: 82344 - DNA, 1832 bp, Homo sapiens
  sig_peptide (782)...(917): this location contains the signal peptide sequence, MTLRPSLLPLHLLLLLLLSAAVCRAEAGLETESPVRTLQVETLVE, Run with SignalP
  misc_feature (815)...(1174): similar to gi1272406 in the genepept database release 114, Run with FASTXY 3.3t00, default parameters
tttcgtattacgtgtgctgccctttgagaagtttgttgatgaaaggagaaaggaaatagtagcaccagaggaaaagagcagggatttaccctgttcttacaggataacagctccttgctcttttcagctagcttttcaaaggacagggataggacagccccctgccttatttcggatacttggatctataacctccagaaattcaagctgaagtagctggaggtcggagaggaatgagaactgcctgggtggggtctgccagccagacactgccaggatagccacaaggagacaacttggaagaacagacagcaaccacgttggactcaggcagtcctgggtttgaatcctgtctctgtcaccacctagcctgatgaccttgggcacatcctgagcaccctgtgccttatctgtaaaatggaaacaatcatgccgacctttcagggtggttttgaggattagagactagctcctgacacacagtaggtaatcgtaaatgggtgctattatttggcccgacccacgttataggacagaacgtctaacggatgcgtcagaacctgcgccctccggatcttggagggtacagagggcgcccctcggcctcctccctttcggaggtggggacaaggtggaggaagggctgcaggaggaggagctctagcatcgcgacccgccccgtcccgtccagtctggcctgggcgccgcgggaacgctgtcctggctgccgccacccgaacagcctgtcctggtgccccggctccctgccccgcgcccagtcatgaccctgcgcccctcactcctcccgctccatctgctgctgctgctgctgctcagtgcggcggtgtgccgggctgaggctgggctcgaaaccgaaagtcccgtccggaccctccaagtggagaccctggtggagcccccagaaccatgtgccgagcccgctgcttttggagacacgcttcacatacactacacgggaagcttggtagatggacgtattattgacacctccctgaccagagaccctctggttatagaacttggccaaaagcaggtgattccaggtctggagcagagtcttctcgacatgtgtgtgggagagaagcgaagggcaatcattccttctcacttggcctatggaaaacggggatttccaccatctgtcccagggactaaagacaacctgatgaggccacctggcatgacctccagcagccagtaacttgttagggaagagacctgcttgggccacatgggtctgctgcctgtgccaccacctttcccagaacactggacttctttcctgcccttttctacaactctacgctgtgtcagctgtacagccacccccccaccccttcctttcagcctccatcagggaagagacagtaaaaataatcacagtcaagtgattcaaaacaaaacaaaaagcaactgttaaagccaagtctgccccataactttaaaagccatcattggtcactgccgatgtctatttttgaagggttgagatggacagatttcccaagatgcatatcttttgctttcagttctaacaaatgttctattagctaaaatgtgttgtactccacagagtattgggctcgtaattcttcttttttttttttagaaagggagttccatttttgttgcccaggctggagggctttagggaatttttaatttaccaaagcctccgccacccgggttaaagcatttttcttgtctaaccttcccaggtagttggaattacaggcatgccccaccccaaccgtttatttttatacttttagtaaaaagggggcttttccatgttggccagcctgctctca

SEQ ID NO: 82345 - DNA, 629 bp, Homo sapiens
  sig_peptide (31)...(166): this location contains the signal peptide sequence, MFLQVHSFIKLKIMFYNFIVCLINLYQSKAAITLKVYPGQGKKNL, Run with SignalP
  misc_feature (557)...(510): similar to gi295220 in the genepept database release 114, Run with FASTXY 3.3t00, default parameters
actccctgaggggttccttcaaagacctgcatgtttcttcaagtccacagtttcattaaattgaaaatcatgttttataattttatagtttgccttataaatctttatcagtcaaaagcagctatcaccctgaaggtttaccctgggcaggggaagaagaatctctttatttttggtacataagttccttggtgcctaaatacttttagtcccactgggtaactttgatgggtgttgtaattgttctagattatcagacatataacagtctcaaccctgaggacttcttccattctagtgacttgtgatcaggcaccactaccccagggccaaagagtgaagtagatgaaatttgtcctacatcaagaagtatttactgagtattcctgaggacttcttccattctagtgacttgtaatcaggcaccactaccccagggccaaagagtgaagtagataaaatttgtcctaaatcaagaagtatttactgagtatctatttagtcctgtgctagccctgtcactacaacaagatggtaaacatgacggtcatggtctgtgacttcctagaaggtagggtctagcttcaggtctttgtcttcttggatatactccctgttcctttgtaacg

SEQ ID NO: 82346 - DNA, 1800 bp, Homo sapiens
  sig_peptide (97)...(232): this location contains the signal peptide sequence, MTWTAASIPATLIQRGLLTPCGTGLWPHLSQPPPMKPSTRQQPLL, Run with SignalP
  misc_feature (27)...(816): similar to gi36563 in the genepept database release 114, Run with FASTXY 3.3t00, default parameters
cggacgcgtgggcgcccggcaccaccatgctcgccctggaggctgcacagctcgacgggccacacttcagctgtctgtacccagatggcgtcttctatgacctggacagctgcaagcattccagctaccctgattcagagggggctcctgactccctgtgggactggactgtggccccacctgtcccagccaccccctatgaagccttcgacccggcagcagccgcttttagccacccccaggctgcccagctctgctacgaaccccccacctacagccctgcagggaacctcgaactggcccccagcctggaggccccggggcctggcctccccccataccccacggagaacttcgctagccagaccctggttcccccggcatatgccccgtaccccagccctgtgctatcagaggaggaagacttaccgttggacagccctgccctggaggtctcggacagcgagtcggatgaggccctcgtggctggccccgaggggaagggatccgaggcagggactcgcaagaagctgcgcctgtaccagttcctgctggggctactgacgcgcggggacatgcgtgagtgcgtgtggtgggtggagccaggcgccggcgtcttccagttctcctccaagcacaaggaactcctggcgcgccgctggggccagcagaaggggaaccgcaagcgcatgacctaccagaagctggcgcgcgccctccgaaactacgccaagaccggcgagatccgcaaggtcaagcgcaagctcacctaccagttcgacagcgcgctgctgcctgcagtccgccgggcctgagcacacccgaggctcccacctgcggagccgctgggggacctcacgtcccagccaggatccccctggaagaaaaagggcgtccccacactctaggtgataggacttacgcatccccaccttttggggtaaggggagtgctgccctgccataatccccaagcccagcccgggcctgtctgggattccccacttgtgcctggggtccctctgggatttctttgtcatgtacagactccctgggatcctcatgttttgggtgacaggacctatggaccactatactcggggaggcagggtagcagttcttccagaatcccaagagcttctctgggattttcttgtgatatctgattccccagtgaggcctgggacgtttttaagatcgctgtgtgtctgtaaaccctgaatctcatctggggtgggggcccctgctggcaaccctgagccctgtccaaggttccctcttgtcagatctgagatttcctagttatgtctggggccctctgggagctgttatcatctcagatctcttcgcccatctatggctgtgttgtcacatctgtcccctcatttttgagatcccccaattctctggaactattctgctgcccctttttatgtgtctggagttccccaatcacatctagggctcctccaagatccttttgtcatgtctgaaatcactcttgagaggtctggggtggaggatggggagtcagtgaaatgcgtcatgtctgggccctgtcagggacacccttgttatatctgggatcctccaatcacatctgagacctcctaggctctccatctgagatgccctttcagggaccccacaaagactgagctctcatggggatcctacccttcctagtgccactccctatggccatgctgaagaccactctggccacgcgactgactttggtgaacatggcagttcccacccatgtcatttctaaccagaagtttaaggtcgtccccccctg

SEQ ID NO: 82347 - DNA, 825 bp, Homo sapiens
  sig_peptide (96)...(231): this location contains the signal peptide sequence, MVALLCRQIISAAFSGEGTPLCSWSSGPILSSVCLLCPLAVLCPA, Run with SignalP
  misc_feature (435)...(339): similar to gi1350526 in the genepept database release 114, Run with FASTXY 3.3t00, default parameters
tgaaccacgtggtggaattcgtcattcggacgtctctgcaggtctctgaagttctcagcagggacggtagctcctctctgaagctctcagcagggatggtagctcttctctgccggcagatcatctctgcagccttcagtggagagggtactcctctctgcagctggtcgtctggtcccatcctgtcatctgtctgccttctttgtcctctggccgtcctctgccctgctaagcctgagcccagggcttttacggacctcagaggggaggaagtgtgtgccgactggttcatgggcggccatgggagggtcgaaagaggcaccatgagtccccactctggtctgtaggactggcagcctggcccccagtcttcaggccctccctggcctgaaggtggggccttactggggacccacccccttctgcccaggaattaatctgccttctgctgccattcacggccctatgacttggaccaaaccccactctgacagaggtcaggcagtgggagcaaacacccctgaacctgcatggactagggagctcttcctgagacccctgacggtgcagggtgcgaagatgcctggcccatgcctctgagcagaacagcaccacttgccccagcaactcctaccctagcccacatccacgagccaaggcacttccccaggaatccacaagctgccaggtcaccacgggagacgaaggcaccaggacataaaaactgcgggaccagtacagcattgtgcatttcaggtctccaaggttctgacccccccccccccggatgacctgggaacttgtaggaatcccccgaggggaggc

SEQ ID NO: 82348 - DNA, 800 bp, Homo sapiens
  sig_peptide (273)...(408): this location contains the signal peptide sequence, MWVCIYLALLVFYSLDISLSQNNNYILLWYNAIINRKILGLYLML, Run with SignalP
  misc_feature (309)...(392): similar to gi2314072 in the genepept database release 114, Run with FASTXY 3.3t00, default parameters
taatccccgtggtggaattcggaaaggtatattgattgatataagaaatccccaggaaatcatatacattaatttctttggtaatttaaaactagtaaatcctagtaattatcagggtaaggagattaagatgtgagataaaaaattgagacaagaatgtcttaaggtggattgttggttttgaatagtttgcctatgaaggctgaacatacgaattgacatgatggttttattaggtggaagtattaaaaaacccatgggtatgtgagtgtatgtgggtatgtatatatcttgctttgcttgtattttattcattagacatttctttatctcagaataataattacattcttttatggtacaatgctataattaatcgtaaaattttaggcttgtatttaatgttggaggtcatttatttcaaccttgtgcaaggtacatgaatctcttttatggtatgctcgacagactgttacgtggtacctgctaaaggtcttcctttgatgggctactcactgtactgtgagccgaacgaggacagggacaatatctattttgttctctactgtataccccaccgcctagcacagtgtccagcacatagtagttattatggattttgataaaataaaaaaattatttcaaggggtttctttttttagagaaacatttggattaggagggcttcttcttttgtagggttctctaattttttaaaccattttctatatatgggacttaaaattctcatatttaggctggcccacactatgacattgggcgattacgttctcttctac

SEQ ID NO: 82349 - DNA, 648 bp, Homo sapiens
  sig_peptide (248)...(113): this location contains the signal peptide sequence, MLLFGLIYCLGHQVSLLLKASGARTLPSPKPHTQLIYIWREPSVW, Run with SignalP
  misc_feature (154)...(76): similar to gi808684 in the genepept database release 114, Run with FASTXY 3.3t00, default parameters
gccttgtggaattcgggaatgcggtgcgggctttttctgtgctttgttgaaaggaatgtaaaggaaggagagggctgaagaattgcatgtggtggtcagtgaggggggccacacactgggctccctccagatgtaaataagctgggtgtggggctttgggcttggaagtgttctagcccctgatgccttcagcagcaggctgacttggtgacctaagcagtaaatgagtccaaatagcaacatgccctgtctaaaatctgcaacaccacccctttttaaaaagaaatacctatgctgtaaattacacatcaacgaaaggaagtacttctcagtttgcctaaaaaggctaagtttgcggctcttaaccttttggtgggacctactcctttgagatgctgattatgtctccagaagaaacacacacccacacaaactgatgtggactctctgatgcttctcagaggcctgcgattccctttctagaaccctgatagtccccatgacatcctgggctgcagggagttcagcaagaggaccctgggtcatctggggtaggagatgttttatgtcgttagcattaatcatgtgatagtggatacatttccctaagtgcttatccaatcgcagtgtcattgaagactgttgaac

SEQ ID NO: 82350 - DNA, 867 bp, Homo sapiens
  sig_peptide (740)...(605): this location contains the signal peptide sequence, MKTLPVLVLSLTLLTVFSETSPILTEKQAKQLLRSRRQDRPSKPG, Run with SignalP
  misc_feature (569)...(746): similar to gi296384 in the genepept database release 114, Run with FASTXY 3.3t00, default parameters
ttttttaaatttaataccaatgtttattagggcagaaaagaagaggaaaaaaatagaggacaaaacaactcagcaaccccaagtggtatgcttcactactctgaacaaggattccccaaattccttagggcaggcagcctgcccgaactcctggtctgggagttccagctccatcaaccccaggtaagattctggttgttcccactcttgcaaactgatgggaagacctttgggaggtgtctatgctttaagctattggttttagtgatctatgcaggttagtaaaatgaagcagtatatatatttgccatttccaaggcaatctttgatatgcccacagttcacgaggtctgaagacatccatttctgcaatttaaaaacaagtgaaagaagcagccttgtcttgcttcgacattatccagcttgttgtctattaaaatgcttgcgaggctggtcctgatccccttacacaggatgaatcctgttcctgtcacagtggggtttgcagtgagggttcagccagtgctccaggaactgctcctcagcgcgatgctccagggcgagcaggtggtgcatgtattcccgcattggctcatcggggaatccgggtttgcttggtctatcctgtcgccgagatcttaggagctgtttggcctgcttctctgtcaaaatcggggaggtctctgagaagacagtcagtaaggtaagagacagcacgagcacaggcaatgtcttcatcctgccttggttcctctgcctcttgctgagtgaatcctcccagactgagtcagccaacttgaaggaagccatgccaggccctgcgcttgtttatgctttgactaacgggacttacggtatgatgctcaa

SEQ ID NO: 82351 - DNA, 654 bp, Homo sapiens
  sig_peptide (222)...(357): this location contains the signal peptide sequence, MKRDVLITETFCILFWLCAFSSMNDYVFKPHVLYIDCPLKRLDSS, Run with SignalP
  misc_feature (502)...(457): similar to gi3123527 in the genepept database release 114, Run with FASTXY 3.3t00, default parameters
ctgtgagtgtggcggaattcagatttttcacttttcttctgagctctggtgctttcagagtggtatttttatattcgaatagttgctagttgtacttttaaaagcgattgatgctggaggtcttctattccaccatctcgctgatgtcagtcctcaaataataattttatattttagcaaattattttggttttaggattttgtgtctacgtgacacagacatgaaaagagatgtactcattactgaaactttttgcatactgttttggttgtgcgccttttctagtatgaatgattacgtatttaagccacatgttttatacatagactgtcctttaaagagactagatagttctgtgtgtcagcatatagggacagaatataactacacattaataatttctcaagtatttattttagaagtgtaagtaacctttattttaatttttgttatattatgcctctgtaatgcagataaatttttatcttcaggaaatggaaaattttgtccagagttcaggggaagatggtattgtggtgttttctctggggtcactgtttcaaaatgttacagaagaaaaggctaatatcattgcttcaggcccttggccagattcccacagaaggtcaggtaaaccctccattcctggtaaa

SEQ ID NO: 82352 - DNA, 611 bp, Homo sapiens
  misc_feature (1)...(611): n = a,t,c or g
  sig_peptide (364)...(229): this location contains the signal peptide sequence, MLQPMFFTLSTHLVGLSQISYLSFPLISLHPAQVVKRQSSLPRLM, Run with SignalP
  misc_feature (100)...(213): similar to gi2447137 in the genepept database release 114, Run with FASTXY 3.3t00, default parameters
gcggttttcctcaccagagtttgataaatcaggggcaaggaggaagttaaacgggcagatgactgcagagggtccttccagttctaacatcaacggaagctaactacattccccactcaaatcatctctgcacatacagcccgcaggaagccctttgaaatgtatttaaccacctttctcgctctcagaatgatctcaacaagaacagctttgctttccttggagctctgcatcaatctaggaaggctgctttgtctcttcactacttgagcaggatggagagatatgagcgggaaagacagataagaaatctgagaaagccccacaaggtgggttgatagtgtgaagaacatgggctgaagcatccaaatcttggttcagctacttacagggtaaccttgagaaagttacttaaacttgtcagctcggacgggcgtggtggctcacgcctgtaatcccagcacattgggaggccgaggtggacggatcacgaggtcagatcgagaccaccctggctaacacggtgaaaccctgtctctactaaaaatacaaaaaaattagctgggcgcctgtagtcccagctactaaggaggctgagngcggagaatgcc

SEQ ID NO: 82353 - DNA, 644 bp, Homo sapiens
  misc_feature (1)...(644): n = a,t,c or g
  sig_peptide (314)...(449): this location contains the signal peptide sequence, MSTIIFQWPFMLVSLHRCRKLPRALKDWQAFLDLKKIIDDFSECC, Run with SignalP
  misc_feature (323)...(189): similar to gi1200076 in the genepept database release 114, Run with FASTXY 3.3t00, default parameters
ggcgtaatgcattatacttcacagcctgatacactttgctatgctttgtgcttagtaagttctcagtacatgtttgtagaattgaattagcttgagcagcacctctacgctctaaaataatgcctctaactaggtaatagttgtgaagggttggaaaaaatcttttctaatggagaggacaattttctgtaatataaaagtcatctgtatattatatgaacagacagcctgcaagtcatgggatttaaaataggataagtattcaaagagactgtttttaatagaaatactagcagaccgtcttggtccagtgatgtctaccatcatatttcaatggcctttcatgttggtgtcccttcacagatgtcgaaagcttccccgggccttgaaggactggcaggcttttttggacctgaagaagatcattgatgatttcagcgagtgttgcccgctgctggaatacatgggcagtaaagccatgatggagcggcactgngaaaggataaccaccctcaccgggcacagtctggatgtggggaatgaaagctttaagttaagaaatatcatggaggcacctcttctganatataaagaggaaatagaggtagagtatgatgtgatggaagattgcaaggtctcatggg

SEQ ID NO: 82354 - DNA, 488 bp, Homo sapiens
  misc_feature (1)...(488): n = a,t,c or g
  sig_peptide (98)...(233): this location contains the signal peptide sequence, MRLLTVFILLNMNIYTFYCRNVNILGYRILFPVPYTVSVPFYFFK, Run with SignalP
  misc_feature (147)...(281): similar to gi496230 in the genepept database release 114, Run with FASTXY 3.3t00, default parameters
cagtgtggcggaattcgaatactcttacaaccgtaagttttttaaaatataaatttacatcaaattcatttggctgtaaaatcttacctgagctaagatgaggctacttacagtctttatcctactaaatatgaatatctatacattttattgtagaaatgttaatatactcggttacaggatactattccctgtgccatatacagtatctgtgcctttttacttttttaaaatatgagacattctgtattttgaaacacatcttcagagtttcatatatgcgattatagacctgtgtcatctgactttctgattttagtaaatctgatggttataaaattgtctcattttaatatgcatttctttgattagtgtagaggttctgcagctcttcatatgctcactgcctattgtatacttgntaagggagtcattcaaatggaaataggtgaagttttgggaaaagaataatctaaagaaggcanatc

SEQ ID NO: 82355 - DNA, 488 bp, Homo sapiens
  misc_feature (1)...(488): n = a,t,c or g
  sig_peptide (28)...(163): this location contains the signal peptide sequence, MYISLCKTLTVSHFGFISTWVLNNFVFHIDVRVDTNIFQVISTTP, Run with SignalP
  misc_feature (345)...(274): similar to gi2781379 in the genepept database release 114, Run with FASTXY 3.3t00, default parameters
ggaattcgctcagttgttaatgctgagatgtacatttcattgtgtaagacgctcactgtttcacattttggatttatttcaacttgggtattaaacaattttgtttttcatatagatgtaagagtggataccaatatatttcaggttatttctacaacaccaggaatttttaaaaattaaaagattattctgaacataacaaacttagaactcagatttaatatcttcatgattcaatttttaaaaattcagtaatatatttattaagatcagcttggatgggtgggtgaccaggaatcccagctcccagtgtccagatcatttatttgtacacaaggattcaccatggttgtacaatgacagttgtatatgctgattaaattcttcagagcctcaaatgcttttcagaaagtagatcataagaaagttctgcaggattcaaatatgcnaataaataagccaacataaattatgtcgtagggaattan

SEQ ID NO: 82356 - DNA, 3834 bp, Homo sapiens
  sig_peptide (961)...(1096): this location contains the signal peptide sequence, MTAGTVTMLLWHASNWDVQLPSQPLVELTPVRDLDTSGLTAFLAR, Run with SignalP
  misc_feature (102)...(3453): similar to gi312142 in the genepept database release 114, Run with FASTXY 3.3t00, default parameters
gaattcttagttgttttctttagaagaacatttctagggaataatacaagaagatttaggaatcattgaagttataaatctttggaatgagcaaactcagaatggtgctacttgaagactctggatctgctgacttcagaagacattttgtcaacctgagtcccttcaccattactgtggtcttacttctcagtgcctgttttgtcaccagttctcttggaggaacagacaaggagctgaggctagtggatggtgaaaacaagtgtagcgggagagtggaagtgaaagtccaggaggagtggggaacggtgtgtaataatggctggagcatggaagcggtctctgtgatttgtaaccagctgggatgtccaactgctatcaaagcccctggatgggctaattccagtgcaggttctggacgcatttggatggatcatgtttcttgtcgtgggaatgagtcagctctttgggattgcaaacatgatggatggggaaagcatagtaactgtactcaccaacaagatgctggagtgacctgctcagatggatccaatttggaaatgaggctgacgcgtggagggaatatgtgttctggaagaatagagatcaaattccaaggacggtggggaacagtgtgtgatgataacttcaacatagatcatgcatctgtcatttgtagacaacttgaatgtggaagtgctgtcagtttctctggttcatctaattttggagaaggctctggaccaatctggtttgatgatcttatatgcaacggaaatgagtcagctctctggaactgcaaacatcaaggatggggaaagcataactgtgatcatgctgaggatgctggagtgatttgctcaaagggagcagatctgagcctgagactggtagatggagtcactgaatgttcaggaagattagaagtgagattccaaggagaatgggggacaatatgtgatgacggctgggacagttacgatgctgctgtggcatgcaagcaactgggatgtccaactgccgtcacagccattggtcgagttaacgccagtaagggatttggacacatctggcttgacagcgtttcttgccagggacatgaacctgctgtctggcaatgtaaacaccatgaatggggaaagcattattgcaatcacaatgaagatgctggcgtgacatgttctgatggatcagatctggagctaagacttagaggtggaggcagccgctgtgctgggacagttgaggtggagattcagagactgttagggaaggtgtgtgacagaggctggggactgaaagaagctgatgtggtttgcaggcagctgggatgtggatctgcactcaaaacatcttatcaagtgtactccaaaatccaggcaacaaacacatggctgtttctaagtagctgtaacggaaatgaaacttctctttgggactgcaagaactggcaatggggtggacttacctgtgatcactatgaagaagccaaaattacctgctcagcccacagggaacccagactggttggaggggacattccctgttctggacgtgttgaagtgaagcatggtgacacgtggggctccatctgtgattcggacttctctctggaagctgccagcgttctatgcagggaattacagtgtggcacagttgtctctatcctggggggagctcactttggagagggaaatggacagatctgggctgaagaattccagtgtgagggacatgagtcccatctttcactctgcccagtagcaccccgcccagaaggaacttgtagccacagcagggatgttggagtagtctgctcaagatacacagaaattcgcttggtgaatggcaagaccccgtgtgagggcagagtggagctcaaaacgcttggtgcctggggatccctctgtaactctcactgggacatagaagatgcccatgttctttgccagcagcttaaatgtggagttgccctttctaccccaggaggagcacgttttggaaaaggaaatggtcagatctggaggcatatgtttcactgcactgggactgagcagcacatgggagattgtcctgtaactgctctaggtgcttcattatgtccttcagagcaagtggcctctgtaatctgctcaggaaaccagtcccaaacactgtcctcgtgcaattcatcgtctttgggcccaacaaggcctaccattccagaagaaagtgctgtggcctgcatagagagtggtcaacttcgcctggtaaatggaggaggtcgctgtgctgggagagtagagatctatcatgagggctcctggggcaccatctgtgatgacagctgggacctgagtgatgcccacgtggtttgcagacagctgggctgtggagaggccattaatgccactggttctgctcattttggggaaggaacagggcccatctggctggatgagatgaaatgcaatggaaaagaatcccgcatttggcagtgccattcacacggctgggggcagcaaaattgcaggcacaaggaggatgcgggagttatctgctcagaattcatgtctctgagactgaccagtgaagccagcagagaggcctgtgcagggcgtctggaagttttttacaatggagcttggggcactgttggcaagagtagcatgtctgaaaccactgtgggtgtggtgtgcaggcagctgggctgtgcagacaaagggaaaatcaaccctgcatctttagacaaggccatgtccattcccatgtgggtggacaatgttcagtgtccaaaaggacctgacacgctgtggcagtgcccatcatctccatgggagaagagactggccagcccctcggaggagacctggatcacatgtgacaacaagataagacttcaggaaggacccacttcctgttctggacgtgtggagatctggcatggaggttcctgggggacagtgtgtgatgactcttgggacttggacgatgctcaggtggtgtgtcaacaacttggctgtggtccagctttgaaagcattcaaagaagcagagtttggtcaggggactggaccgatatggctcaatgaagtgaagtgcaaagggaatgagtcttccttgtgggattgtcctgccagacgctggggccatagtgagtgtgggcacaaggaagacgctgcagtgaattgcacagatatttcagtgcagaaaaccccacaaaaagccacaacaggtcgctcatcccgtcagtcatcctttattgcagtcgggatccttggggttgttctgttggccattttcgtcgcattattcttcttgactaaaaagcgaagacagagacagcggcttgcagtttcctcaagaggagagaacttagtccaccaaattcaataccgggagatgaattcttgcctgaatgcagatgatctggacctaatgaattcctcaggaggccattctgagccacactgaaaaggaaaatgggaatttataacccagtgagttcagcctttaagataccttgatgaagacctggactattgaatggagcagaaattcacctctctcactgactattacagttgcatttttatggagttcttcttctcctaggattcctaagactgctgctgaatttataaaaattaagtttgtgaatgtgactacttagtggtgtatatgagaagaagaactccataaaaattcacctctctcactgactattacagttgcatttttatggagttcttcttctcctaggattcctaagactgctgctgaatttataaaaattaagtttgtgaatgtgactacttagtggtgtatatgagactttcaagggaattaaataaat

SEQ ID NO: 82357 - DNA, 437 bp, Homo sapiens
  sig_peptide (36)...(171): this location contains the signal peptide sequence, MLMIIAMILVLIMLLTALPRVLNILQRLSYLVHAAYLHEVFFRGG, Run with SignalP
  misc_feature (373)...(182): similar to gi347468 in the genepept database release 114, Run with FASTXY 3.3t00, default parameters
ccgttgggtacgaccaagcatttggtgagttgataatgttaatgataatagcaatgatactagtattaataatgctattaactgcattgccaagggtgctaaacattttgcaaaggttgtcttatttagtacacgcagcttacttacatgaggtatttttcagaggggggaactggggttcaaaaaaattaagcacttggccaagatcacacagctgataagtattggagcacaaactggaataccaagacaaaactgtgctcttagcctgctgccacaataaatagcaaaagaaatagaatgagaaattggagaacctagcatagcagtacctttttaaaaaattgtagcccataatttgaatgtgcatgaatcacacctgctctctgtgagccacagagtcgtctctcttttactgcgctacctccgttcatttg

SEQ ID NO: 82358 - DNA, 1024 bp, Homo sapiens
  sig_peptide (977)...(842): this location contains the signal peptide sequence, MFTRFIGLFLKFILMFFLLLSFISYFCLFPCSNLPKVIAIFNIVL, Run with SignalP
  misc_feature (662)...(873): similar to gi4106941 in the genepept database release 114, Run with FASTXY 3.3t00, default parameters
tttttttttgggagttttaaaaaaatttattggctatgtttgattatccacaacagaatttcccttaattagcacaggaaattgaaagttggttagaattgtaagagtctctgctcttgtcttcaacagacaatactcagcatttatacttgtaaatagaattcgagttttcattgtttccgttttctgtttttgtttccttaggaacaagaggatgaaggaaatatggtcagcattttaataacaccataaatccaagataataagtaattctataaagttttccagtttcattaattcagaatttcatcatataacttgaaatccaattggcttcctctttcttagaaacaaaaaccaaagaaacctttttctgaaagacattattttccagtattaggccaatttgtcctcaaattaagtagaatctcaacatcttgttgagccagtttgtaaattccaacttcatttaatgctgctgtggcagggaagctgccctgaagctgactggcagtacatcctttccagcagtagtgcagaaccgacgttcaaattcaaatcaatacaggcttcttttatatgtttagggaaaacaaaggagggaaatgagatctccattatgtgcatcaattatattacaattttgagaatcctaaacagcttctctgcactgctggtccacatgttctctataaaaatatttatggatttattatttggttcttttaacatggtaagactacacaggtgcagagttgctatttctttagattactataaggtaatacgatccctatttcaatatgtatccgttatttccctaaatacaatacttaatattaacactatattaaatatagctataactttaggtagattagaacatgggaaaagacaaaaataagagataaatgaaagcagcagaaagaacattaaaataaattttaaaaacagtcctatgaaacgtgtaaacataagctttcattttataagtctaaaaggaatgctttataacctcacaaaa

SEQ ID NO: 82359 - DNA, 3592 bp, Homo sapiens
  sig_peptide (968)...(833): this location contains the signal peptide sequence, MLFWLIKVSCSFSCSDETSAASWGFGAFSFSFLLLGISCLMRLVP, Run with SignalP
  misc_feature (185)...(22): similar to gi3064199 in the genepept database release 114, Run with FASTXY 3.3t00, default parameters
ctcaggctcataccacacggggggtgctagtgggctgctgtgtgtttacatgagtaatggagctgccgggggaggggagttgtaagcagagcgctgagcctcgcagctcgcattcggagggaagctgacatccacaccaagtcgagacttccagggatgtggccggggagcagtcacatgctgtagctttcatgagcacaggcatcagtcaggcagatgtttgtcgactggaatggcgccaaatcttaaaggcagaccacgcaaaaagaaaccatgcccacaaagaagagattcattcagtggtgttaaggattccaacaacaattccgatggcaaagccgttgccaaggtgaaatgtgaggccaggtcagccttgaccaagccgaagaataaccataactgtaaaaaagtctcaaatgaagaaaaaccaaaggttgccattggtgaagagtgcagggcagatgaacaagccttcttggtggcactttataaatacatgaaagaaaggaaaacgccgatagaacgaataccctatttaggttttaaacagattaacctttggactatgtttcaagctgctcaaaaactgggaggatatgaaacaataacagcccgccgtcagtggaaacatatttatgatgaattaggcggtaatcctgggagcaccagcgctgccacttgtacccgcagacattatgaaagattaatcctaccatatgaaagatttattaaaggagaagaagataagcccctgcctccaatcaaacctcggaaacaggagaacagttcacaggaaaatgagaacaaaacaaaagtatctggaaccaaacgcatcaaacatgaaatacctaaaagcaagaaagaaaaagaaaatgccccaaagccccaggatgcagcagaggtttcatcagagcaagaaaaagaacaagagactttaataagccagaaaagcatccctgagcctctcccagcagcagacatgaagaaaaaaatagaagggtatcaggaattttcagcgaagcccctggcatccagagtagacccagagaaggacaacgaaacagaccaaggttccaacagtgagaaggtggcagaggaggcgggagagaaggggcccacacctccactcccaagtgctcctctggccccagaaaaagattcagccttggtccctggggccagcaaacagccactcacctctcctagtgccctggtggactcaaaacaagaatccaaactgtgctgttttacagagagccctgaaagtgaaccccaagaagcatccttccccaggcttccccaccacacaggccaccgctggcaaaccagaatgagacggaggatgacaaactgcccgccatggcagattacattgccaactgcaccgtgaaggtggaccagctgggcagtgacgacatccacaatgcgctcaagcagaccccaaaggtccttgtggtccagtcgtttgacatgttcaaagacaaagacctgactgggcccatgaacgagaaccatggacttaattacacgcccctgctctactctaggggcaacccaggcatcatgtccccactggccaagaaaaagcttttgtcccaagtgagtggggccagcctctccagcagctacccttatggctccccaccccctttgatcagcaaaaagaaactgattgctagggatgacttgtgttccagtttgtcccagacccaccatggccaaagcactgaccatatggcggtcagccggccatcagtgattcagcacgtccagagtttcagaagcaagccctcggaagagagaaagaccatcaatgacatctttaagcatgagaaactgagtcgatcagatccccaccgctgcagcttctccaagcatcaccttaacccccttgctgactcctacgtcctgaagcaagaaattcaggagggcaaggataaactcttagagaaaagggccctcccccattcccacatgcctagcttcctggctgacttctactcgtcccctcatctccatagcctctacagacacaccgagcaccatcttcataatgaacagacatccaaatacccttccagggacatgtacagggaatcggaaaacagttcttttccttcccacagacaccaagaaaagctccatgtaaattatctcacgtccctgcacctgcaagacaaaaagtcggcggcagcagaagcccctacggatgatcagcctacagatctgagccttcccaagaacccgcacaaacctaccggcaagggcctgggcctggctcattccaccacagggccccaggagagcaaaggcatctcccagttccaggtcttaggcagccagagtcgagactgtcaccccaaagcctgtcgggtatcacccatgaccatgtcaggccctaaaaaataccctgaatcgctttcaagatcaggaaaacctcaccatgtgagactggagaatttcaggaagatggaaggcatggtccacccaatcctgcaccggaaaatgagcccgcagaacattggggcggcgcggccgatcaagcgcagcctggaggatttggaccttgtgattgcagggaaaaaggcccgggcagtgtctcccttagacccatccaaggaggtctctgggaaggagaaggcctctgagcaggagagtgaaggcagcaaagcagcgcacggtgggcattccgggggcggatcagaaggccacaagcttcccctctcctcccctatcttcccaggtctgtattccgggagcctgtgtaactcgggcctcaactccaggctcccggctgggtattctcattctctgcagtacttgaaaaaccagactgtgctttctccactcatgcagcccctggctttccactcgcttgtgatgcaaagaggaatttttacatcaccgacaaattctcagcagctgtacagacacttggctgcggctacacctgtaggaagttcatatggggaccttttgcataacagcatttaccctttagctgctataaatcctcaagctgcctttccatcttcccagctgtcatccgtgcaccccagtacaaaactgtaggctcagctctgcccagcagtccaaagcggcatggccaacagagcttcactccttacccaggagtgctggcttatagagttagaagtcagtatttcttctaatctgaggctatgatcagtcccagctgtaggggcccagaggggaggtgaacatgcctgatttttgtgggacaactgtagcccacaaactgactggctggtgagtcttgactcccttccaacacagatgcccaggcacctccagatcattcacttcgcacgtgggccttgtgaagggatttgtgaatatccaggaagaacttagaggaccccatctgagttcggatggtcaggaaacaatctgggcaaaaaagaggcaggcatttcaaaggaaggggcaaggaagactggcaaacagatggcaagggatgcccctctttttcataaaactctccaaggttcaatcaatgcaatgtatagtgaaacttcaatagatctttcattttgacactattaaacaatccagagaagtaaacactgtt

SEQ ID NO: 82360 - DNA, 388 bp, Homo sapiens
  sig_peptide (98)...(233): this location contains the signal peptide sequence, MLTAWAASVCPVPSRLALGSWTTVKRPAVMPLFYLNTPACLRSVS, Run with SignalP
  misc_feature (55)...(209): similar to gi165924 in the genepept database release 114, Run with FASTXY 3.3t00, default parameters
atgtccttcaactgctccacaagaaattgctcttccaggcccattggaggacgctgcattgttccagtggcccaagttaccacgacttccaccactgatgctgactgcctgggcggcatctgtttgcccagttccttccagactggctcttggctcctggaccactgtcaagagacctgctgtgatgcccttgttttacctgaacacacctgcatgtctgcggtctgtgtctccaacccttgccagagtgacttgctctcctacaactaccatgatttacactggctgctcacacagaaggactgagggactgtctccctccatgaagcagcaggttaactggttggcagagacagagggacagagggactgtctttcttcattaacg

SEQ ID NO: 82361 - DNA, 2393 bp, Homo sapiens; identical to SEQ ID NO: 81782
  sig_peptide (940)...(1075): this location contains the signal peptide sequence, MALRFLLGFLLAGVDLGVYLMRLELCDPTQRLRVALAGELVGVGG, Run with SignalP
  misc_feature (940)...(2040): similar to gi4589468 in the genepept database release 114, Run with FASTXY 3.3t00, default parameters

SEQ ID NO: 82362 - DNA, 444 bp, Homo sapiens
  sig_peptide (89)...(224): this location contains the signal peptide sequence, MLVTDTEAFWQPQPWFVVVLTATGALLLLALGWLLGRLLQGLAQL, Run with SignalP
  misc_feature (248)...(32): similar to gi5104677 in the genepept database release 114, Run with FASTXY 3.3t00, default parameters
caccattattgtgcatctagttccccggagggccagcacagtggccaccagcacccacagaaccacagtgccctcaacgatgacacccatgctcgtgacagacacagaggctttctggcagccacagccctggtttgtggtggtgttgacagcaactggtgctcttctcctcttggccctaggctggcttcttggcaggctcctccaggggttggcccagctgctgcaagcacccagcaaaccagcccaggctttgctgctaaacagcatccagggaactgagggatccatcgagggtttcctggaggcaccgaagatggagatgtcccaggcacccagcagtgtcatgagtctgcagcattttgatggcagaacacaagactcccgtaccggaagagactaccttgttaacacacacacaggagcccggcgctggctctgagg

SEQ ID NO: 82363 - DNA, 435 bp, Homo sapiens
  sig_peptide (64)...(199): this location contains the signal peptide sequence, MLPIPLKSIMLKKAFFFVLLQRECPLLFFIFVYLPETHFTTPHWF, Run with SignalP
  misc_feature (61)...(193): similar to gi5924124 in the genepept database release 114, Run with FASTXY 3.3t00, default parameters
atttaatattgtcagtgatacatgaaagatttgttttgcgtaatcttgcagttattttgaaaaatgctcccaattcctcttaagagtataatgctcaaaaaagcctttttttttgttctgttgcaaagagaatgccctttactctttttcatttttgtttatctccctgagacccacttcactaccccccattggttttctgaagcattttcactttacagcagtatgaggctcttccacactgatcggctttagaggtgctgccaccttttctatgactaataccctgcgggaaaaggcttagctgcttaaggaagtacacgtgcttgtttaagtaatgtgaccctatgagccacgagaaattagagcccagaggctacaacttgatgtcccactgcggataggcaggtcatttgcttaccttctggcatgaag

SEQ ID NO: 82364 - DNA, 378 bp, Homo sapiens
  sig_peptide (133)...(268): this location contains the signal peptide sequence, MVKRKSWTKWCGWLTVVRFLARGFEMHLKSCSRLLFSELAAFAFF, Run with SignalP
  misc_feature (350)...(158): similar to gi2829202 in the genepept database release 114, Run with FASTXY 3.3t00, default parameters
acttttttatttatggaataacagatttgctggcattcactgaaagagtgcaaatattcggtccttgtgacttccactgactcttccaaattttatgaatgtatcagtgtgttggataaacccagtttcagaatggtgaagaggaaatcttggaccaaatggtgcggctggttgacggtggtacgatttctggcccgtgggtttgaaatgcacttaaagtcctgttctcgccttttattttctgaacttgccgcttttgcattctttgagttcagtttaaagacggttactttgagggcgttttgaaccctcgggctagaggtcggaccactgttggtcggccgcattgtttggtctaacgttttttcttttattgtt

SEQ ID NO: 82365 - DNA, 721 bp, Homo sapiens
  sig_peptide (229)...(364): this location contains the signal peptide sequence, MWVDCPVLCLCLALVLQSTGSQAWSSTGITLTLEFSSPLSALTKI, Run with SignalP
  misc_feature (27)...(127): similar to gi5031193 in the genepept database release 114, Run with FASTXY 3.3t00, default parameters
ttgactacgcgttcgtttaaatctctccagtttgctgcttgtcagcagctctgatcacacgcttggttggggtggagtttgaaaccaaagactcggaaaaggttttaggttatctgtgcatttgcagttccaggtgtgaggttatcttcacattgcaatgacagattttaggttacctgggcattgcaattccagtggggctgggcttgttgcacctgggagtgtgtgatgtgggtggattgccctgttctgtgtctctgcctagcactggtcctccagagcactggttctcaggcctggagtagcactggaataaccctgaccttggagttctccagtcccttgtcagcactcactaaaattaggagcagccctaagctagcaagatcaaagaacttcattaactctctatttcatggggggggccttaatttgtattcacttcttacattttgcaatactgtgaggtagggcttattgttttaaagttgtttccctgcttatctgtctcctggtagcattgaacatgccttgagaggcaggaaggatatttcacctgtgcatcttttgccctatatcagtgacacagcataggcccacagatacttgtttgttttccatgccttgtattggggaataaataagaaaatgaagcttagaagggttaagtgattaacatggcagtaaatctggggtaaaagtctggcttcattgtgcctaa

SEQ ID NO: 82366 - DNA, 421 bp, Homo sapiens
  sig_peptide (90)...(225): this location contains the signal peptide sequence, MPCSFTLPFTYLLFLQSRMPFILLMPRKLHLILQYRAPVPPLLLL, Run with SignalP
  misc_feature (183)...(346): similar to gi684982 in the genepept database release 114, Run with FASTXY 3.3t00, default parameters
cgactccgcgtccggccgccttcatctcctgtagtacctcacctcccttgtcaggcccctcctctcctctcagtcgctgctccctacaaatgccctgttccttcactctgccattcacttatttactgttccttcagtccaggatgcctttcatacttttgatgcctaggaaactccatctcatcttgcagtacagagctccagtgccgcctcttcttcttcttgatcccttcttccctgctccaggcagaactaacttttctgtgccccctactcctgtgccactttgtacagagtggtcagggccccaccatgaaatgacaacctactcaaatttggacaatgcaaacaggatttaataaaggatgatttaagaagatgtgtgcagaatgtagagaaaccacaaggaatagcatcctac

SEQ ID NO: 82367 - DNA, 708 bp, Homo sapiens
  sig_peptide (349)...(484): this location contains the signal peptide sequence, MAPFIIFSLCALCFERFCLLNKLHLLSNNIFPIFNMRHTSLSMNK, Run with SignalP
  misc_feature (210)...(48): similar to gi808715 in the genepept database release 114, Run with FASTXY 3.3t00, default parameters
ggacttgacaattccagggtatggacattattaaacaccagtttcaaaatattttaagaatctgaatgcaaaggtttttgagaatttcagattcaccaagcagctggctcttgacttgatgtggaacattccagaacatgcagccacattccatccaaggtggattatagaacttgtcaataggagaaactgaggaggatggtaattaagtttagagcgagaaaatgcttttgattgagcaaggcatgattttctgtttaagcctatgcaaaatatggagtgctagacaagcagctggaacatatgaaaacattattgtgtacttatgtttcccaactttcaccatttatggccccttttattattttttccctctgtgcattatgttttgaaagattctgtctactaaacaaactgcatttattaagtaataacatatttcctatttttaatatgagacatacatcactgagtatgaataaaaaacataaaacagcaacagttcaattgccattaggctttgggaaatattgaaaatagcgtgtggacctcattaccactcatgaattactaggagtccaggtactttgggttaggagccactatttatatgcttacatgactagcatgtctatgctcacttaaggagtaggaagagaaattaaagacgcaccagaaagagggcaaattcttggctggtgtggagcc

SEQ ID NO: 82368 - DNA, 414 bp, Homo sapiens
  misc_feature (1)...(414): n = a,t,c or g
  sig_peptide (30)...(165): this location contains the signal peptide sequence, MACLWLTHVSAFSWAGGSKMASPSRLGPWRCVSAGVPQTSSMWLL, Run with SignalP
  misc_feature (105)...(252): similar to gi5105817 in the genepept database release 114, Run with FASTXY 3.3t00, default parameters
gtcaagacttcaggcaaggcttggtggggatggcttgtctctggctcactcatgtgtctgcgttcagctgggctggtgggtccaagatggcctcaccctcaaggctggggccttggcgctgtgtgtcggctggagttcctcaaacttcctccatgtggcttctctcttcatgtagagattcatcttttgttccatgttcttttccctccaagaggttagcctggagttctttacaaggagaaatcatccactaatatttgtataactaaaacttgatggcaattaaaatatattaacaaaggtgtgctctgtggtccaatattgttgggaaatgttgcatatggcttctccttgtggagcttccactgcaaacaaaacagaaagcttactanagtctctgagagtcttgcatgg

SEQ ID NO: 82369 - DNA, 399 bp, Homo sapiens
  misc_feature (1)...(399): n = a,t,c or g
  sig_peptide (247)...(382): this location contains the signal peptide sequence, MSLFGFGASLASFSFFSLGGAGGEPSQPLSPTFSFTGITSAAPPP, Run with SignalP
  misc_feature (351)...(222): similar to gi506195 in the genepept database release 114, Run with FASTXY 3.3t00, default parameters
attcctttctccgaatcctatcattgtgttcttgcagctgtgtgacatgagtggcgcagttttggatacgcgtgagggggattttcagggtaagctggccccggcctcgcccctccaccccgctagctagccaggccagctgcccgctcctcccctccgctcctcgtctctgcatgtggctcagaccatttgcatggcagcttcactctccagccttccccggcctcagcaaggatgagttgatccatgagcttatttggctttggggcatccctggcctccttttctttcttttcattaggaggagctgggggagaacccagccagcccctttcccccaccttctctttcactggaatcacatctgcagctcctccccctccgccctccctcaggctn

SEQ ID NO: 82370 - DNA, 425 bp, Homo sapiens
  sig_peptide (100)...(235): this location contains the signal peptide sequence, MGQRWKLVTSFLIIFHWLELSLMAKYLMSGDTEKYSQVVCYGEEK, Run with SignalP
  misc_feature (162)...(85): similar to gi3861233 in the genepept database release 114, Run with FASTXY 3.3t00, default parameters
ccaggatgactggattgtgtcttcaattacggcttctaggaactctctggacatcgacacccaactgaaggaaggaaaaaagaagctgtcaggttttctatgggccagcgctggaagctggtcacatcattcctgatcatattccactggttagaactcagtctcatggccaaatacctaatgtcaggagacactgagaaatatagtcaagttgtgtgctatggagaagagaaactgactttgatgactgcttagttattctctactacattctcttacatgctaagtcttcctggggaaaaactaaaccctctgttcagatttttccacctatgaactagcataagtgggaagtatgtgaaaggctacattttactttgtgtgatgcctgaaaggtcttctattttgagacgctggttttctga

SEQ ID NO: 82371 - DNA, 881 bp, Homo sapiens
  sig_peptide (100)...(235): this location contains the signal peptide sequence, MAAALKDVLFILFQLSYFCDSKTYIFYILSSRKSHASYNLWQFTT, Run with SignalP
  misc_feature (148)...(276): similar to gi1066265 in the genepept database release 114, Run with FASTXY 3.3t00, default parameters
ggctgaagtgggaaaagaagaatcatatctgcagtgagcccattttcaggtcagttacaaaatgagaatattgatggctcaccaggcttttgaaatcacatggcagctgcacttaaggatgtgttatttattctctttcaactgtcatatttctgtgattctaagacatatattttttacattttatcatctcggaaatcacatgcatcttataatttgtggcagtttacaactgcttttgaccagaaaactgatgtgatatcagtgttactgcccagatatgagagttggatgcagagacatctgttcaaccgagttaggcacatgactacttcttcttgtgttgaatttaattgccgttctaaagaggtttgaaaattaaactattgttcaatattcgaaggaaagattcttgcataagcatggaaacaaacaaaacagaatgttacataagtataacaaatacttttaataagtctaaaattaaaattctaattgataagacaatattgtgtcacagtttaatatgaagcatcttttcctttgtgttacttaaaatgatggggcatcttaaatcttgtgtcttagattcaatgaaatatggtataaatgactgtatactctctgctctaggtatctcaaagaagacaaatttcttgcttgtgttattaattgatttctaatttattctttttctaatctttttttttttttcccaaggggatcccaattacttttcccttgggacggcagggcctctcctttccttgaaaaacaagggggtggatggaattcatttgggggggcccaaattccctcctgtggactaccccggagggatcttttccaattccccaaatctgcctttttggccaaccaaa

SEQ ID NO: 82372 - DNA, 438 bp, Homo sapiens
  sig_peptide (201)...(336): this location contains the signal peptide sequence, MTLSVDLCSKSPLLPKCHLTKSFVLLGQLLLSFLSSSSLNVPHYC, Run with SignalP
  misc_feature (106)...(46): similar to gi5731192 in the genepept database release 114, Run with FASTXY 3.3t00, default parameters
ccgggtcgacccacgcgtccgcatatggctgatagatataaaagagcttttagttttataatatactctaatactcttctgctccactcgccagcaaaagcccaatcctgtaccggtcagcaatttaccaactttaatcattcctacagcagaggtagtaagtattgctgagaaaaaataatgcaaagctatgtgtctcaatgacactcagtgttgatttatgttctaaatctccactgcttcccaaatgccacttgaccaagtcatttgttttacttggacaactccttctctctttcctctcttcaagcagtctaaacgttccccactactgtctaccagctgtcaaatggcaatcctccattattaacagattacctctctaattttagatgaaaaccaaaaagaacattgggagcagtgtgtcttttaactttt

SEQ ID NO: 82373 - DNA, 425 bp, Homo sapiens
  sig_peptide (89)...(224): this location contains the signal peptide sequence, MLSVNLSWSTHLLRWITFFYLSIGTAHLYHWLEMRTKMRIMGFNA, Run with SignalP
  misc_feature (266)...(358): similar to gi52585 in the genepept database release 114, Run with FASTXY 3.3t00, default parameters
ccaccgtgccctctttgccaaataaaaaaatgaagcgtggtcttcagtatgaatcaatgtgttattgttgccaccccccacggtatccatgctcagtgtcaacctttcatggagcactcatctgttacgctggatcaccttcttctatttgtcaatcggcacggctcacttgtaccactggctggagatgcggaccaaaatgcgcatcatgggtttcaatgccgctgccatcaagccgctgaacgagggtgcagccgccgagctgggcgcggagctgctgggcgagggcatcatcttcatcaccgcctgcagctgcctgatgctggagtattggcgccaccagttgcagcagcgccgcaaggaaaaggagcgacgtgttgccagggaggcgctgcggggcgaggtgggccacttggggctggcgc

SEQ ID NO: 82374 - DNA, 667 bp, Homo sapiens
  sig_peptide (112)...(247): this location contains the signal peptide sequence, MVLILSPGLSILFTKMSETFSSSLLKLSSSICIFPLCINMIICYQ, Run with SignalP
  misc_feature (226)...(147): similar to gi808683 in the genepept database release 114, Run with FASTXY 3.3t00, default parameters
agagacagcaccggtccggaattcccggcgcgacaccacgcgtccgctaatatattactagaaaattaccttccagagtagagttgcacacccagttatggatccacctaaatggtcctcatactcagtccaggtctctccatcctgttcaccaagatgagtgagaccttttccagttctcttctgaagctcagctccagtatctgcatatttcccctatgtatcaatatgataatttgctaccaaaaaaaatctcaataattcactatgagttggtttttatgagcatatgctacagtctggtaatttttatttgatattttgggttctcagaaacagaatagttattagttagttcctagctggcaatcataatcaatgataattaatgacgccataccttcagtgtttccaaatctaacaaactttgtcattaaattctcacattaagctacgtgtggtagctcacacctgtaatcccagcactttgggaggctgaggtggcaggattgcttgaggccaggagtttgatactatccctggcaacatagtgagaccttatctttactaaaaaaaactttaagattacctgactttgatggcgcctgcctgtaatcccaactatgcgggaaactgaggcaggatggcactgtgccaccacaatcct

SEQ ID NO: 82375 - DNA, 625 bp, Homo sapiens
  sig_peptide (235)...(370): this location contains the signal peptide sequence, MVYACIFILVRLTLNPERYSFLYSHLEYALPGSVGCLEGPLEASL, Run with SignalP
  misc_feature (211)...(230): similar to gi495470 in the genepept database release 114, Run with FASTXY 3.3t00, default parameters
aataaaagtaaaatcatcataaaacatagtagctaggcacttctgaagctgtgtgtgcgctgattcattcacccagtgactcacagccttacagcctaggtgctggcacccctactttcattcgaggaagtgaactcaggttcaggaatttacccagcatcccccagatggggtggcaggagccacatcttccctgaaaactttcttgcccagggtgtctgctgggatttaggaatggtctatgcctgcatttttatcctggtcaggctgaccctgaaccctgagagatactcttttttatattcccatctggaatatgcactgccggggtcagtggggtgtctggagggccctctcgaggccagcttggatgtgacacgtgtcgtgggtcccaacggggcccagtagagtgtgcagcgttagaaaaatgaacatgctcggctgggcgcggtggctcacgcctgtgatcctagcactttgggaggccaagatgggtggatcatgaggtcaggagatcaagaccatcctggctaacatgagaccatcctggtgaaaccccatctctactaaaaatacaaaaaattagctgtgcgtggtggcaggtgcctatgggcccagctactca

SEQ ID NO: 82376 - DNA, 669 bp, Homo sapiens
  sig_peptide (213)...(348): this location contains the signal peptide sequence, MSLFWGIQPVLIFCLNFLGFLSFCPQVELLPPSRGSGSTIIVNCL, Run with SignalP
  misc_feature (423)...(315): similar to gi475435 in the genepept database release 114, Run with FASTXY 3.3t00, default parameters
agagacaccaccgtccggaattcccggcgacgacccacgcgcgcggcgtttagagaccaataggttttccaaagctgctcaccgaattctgctgcctttgctccccttgatgtaaccaccatgttaaacttaaggcttctgctctggaatcccccagacttgtctgggaccccatcatattcccccttgggattcagttcagggactggaagatgagccttttctgggggatccagccagtactaatattctgcttgaatttccttggatttctctccttctgcccacaggttgaactcttacccccttcaaggggctcaggctccaccatcatcgtgaactgtcttttccatctattgtctatgcataagctctttgcctcttcctttagctttaactccaaatcctccaagctttgtagaatctataatggttcctttctcaagtcccatgtcttgtcctgaaaagctatggctttcattcctgtagactcccctgtggacaatagtccacacaattgtgggttgtgctacagattcacaaaagcccacagaggagctcaaaggccaagccagggactctatgtaatgtcagcaccccaaaaaccatgcacccaggaagcttggacagtggggcgaagaatgagggtggaggatattaaacccatcc

SEQ ID NO: 82377 - DNA, 398 bp, Homo sapiens
  sig_peptide (17)...(152): this location contains the signal peptide sequence, MKITSPFICSAALKIFAFAISFYPDNNRVRKAGWQSYCPCTHGEI, Run with SignalP
  misc_feature (23)...(139): similar to gi1464761 in the genepept database release 114, Run with FASTXY 3.3t00, default parameters
ccagttggttaaaggaatgaaaataacttcgcctttcatttgcagtgcagctttaaaaatatttgcttttgctatctcattttatcctgataataaccgtgtgagaaaagcaggatggcagtcttactgtccttgtacacatggagaaatagatgcacagaggttaagttgcccagtttagtaaagggcagagcagggactagactccatttctcttcgctggaagagcccagcactatcacattgcaagattgtttcttgtaaaacagtcctgcataaaaataaaaaagagtagagagcatgatgtgaatttcagcttttagaggctgctgtctgtttttcataggttaaatagtgaatcagtgtgctccgagcttccatgaggggcagccctcctt

SEQ ID NO: 82378 - DNA, 615 bp, Homo sapiens
  sig_peptide (201)...(336): this location contains the signal peptide sequence, MSFQAFVFLMIGWLHPDPRLMTQRSCGPHPEVDSAQEDHFSHPYD, Run with SignalP
  misc_feature (243)...(333): similar to gi156990 in the genepept database release 114, Run with FASTXY 3.3t00, default parameters
cctttaaaaactaaatgtcctttgttaaattaatgaaaagccaccagatggggaggatgacaggggcctgaattctgctaagatgtaggcatagttaaatgattaccagtcattattctggagggcccaatatttgcaatttccccaattacttctgtaaataacatcattattatagaagcgaagattaaccttttgagatgtcttttcaggcttttgtatttctgatgatcggatggctccacccagacccaagactcatgactcagaggtcctgtgggccccacccagaagtggactcagcacaggaggaccatttttcacacccctatgatatccccaaccaatcagcaccaccccttccctagcccacaaaactatctttaaaaaactcgagcctctagctaggcatggtggttcacatctgtaatcccagcatttggggaggctaaggtgggaagattccttaagctcaagagttcaagaccagcctgggaaacacttggagaccgcatctctacaaaaaaaaaaaaaaggggggggccttttaagggaacccagtttaaaggccggggggtggaaaggaattatttttttaatggggcccctaaatta

SEQ ID NO: 82379 - DNA, 636 bp, Homo sapiens
  sig_peptide (196)...(331): this location contains the signal peptide sequence, MCLMKQIIYLLYVGLCSILTAFLFTPHHVLERYRYYCPDFREIKK, Run with SignalP
  misc_feature (193)...(337): similar to gi3292967 in the genepept database release 114, Run with FASTXY 3.3t00, default parameters
ggtcgacccacgcgtccgcactgtgtgcacaagagagcgataagcactctggatcatttaaaggaaaaggagatgcgactcctaccttcagaaggttataatggacttattataatggacttattatacggacaaacaaatgaacagttacacacatgcaaagctacagcagtacaagatagtatgtcatgagtgatgtgcttaatgaaacagatcatatatctgctgtatgtagggctctgttcaattctcacagcattcttatttactcctcaccatgtccttgagaggtataggtattattgtcctgattttagagagattaagaaacttggtcaaggctatacaactaattagtagaagaattaaaattcaatcctaagtctgtctgaccccaaagcccatgaatactcttaactcctatgctgtaaatataaaaagactgaacgggggccagacgtggtggctcatgcctgtaatcccagcactttgggaggatggtttgagcccaggagttcaagaccagcctgggcactatagtgagaccctgtctccattcaaaaaaaaaaaaaagggggggcctcttaaaaggctcaattttacttaccgcgtgctgcaaagttaaatgtttttatc

SEQ ID NO: 82380 - DNA, 636 bp, Homo sapiens
  sig_peptide (252)...(387): this location contains the signal peptide sequence, MKEALLKCSRLARGLLLCLDCANDHRSPVERNAQTTLILHSSLYS, Run with SignalP
  misc_feature (264)...(372): similar to gi2447140 in the genepept database release 114, Run with FASTXY 3.3t00, default parameters
ccgggtcgacccacgcgtccggtagaataatatttgtttgttttttgcaatgtacaaattaagggcatgaatcctggagccaaactaactgagttccaaatcctgatgctgccccatattaattctgtgaattcgggcaaatgacttagtttgtctaaacctcaattatctcatctataaaaggcagctagatcttaactcactgggttctcgtgaggattaaatgagatagtgcccctaaggtttctggtatgaaggaggcactccttaaatgttcgagacttgccagagggcttcttctctgtctggactgtgctaatgaccacagatccccggttgagaggaatgcccagaccacactcatcctacactcatccctatactcattgtcccttgggaaccaactgcagggaggaggggaaatggccaccactggagggagtactcagcaggccaagacttatgggggactcttccaaattggggccatggaaccggcactatttctactctttattttccttttggcatccttttgggttcaccgagctatagaataacctacggagacgaatttagcaaatacatcactgaagcttctccctcggaagttggacccaagccatgtgaatgggc

SEQ ID NO: 82381 - DNA, 651 bp, Homo sapiens
  sig_peptide (44)...(179): this location contains the signal peptide sequence, MYMLLQAFWLWQETLKTILLYKFTKPPANTPVLGVNAQVCHSCLA, Run with SignalP
  misc_feature (100)...(172): similar to gi31863 in the genepept database release 114, Run with FASTXY 3.3t00, default parameters
gcaccgcgtccggaattcccgggtttgagaagtgaaaccagccatgtatatgctgctccaagcattttggttgtggcaggaaactttgaagactattttgctgtacaaattcacaaagccccctgcaaacactcccgtgcttggggtgaatgcccaagtgtgtcacagctgccttgcagctctgaggatcagaaaggttaatggacataaaagaaacttcaaagctcaacctcctaatgggaagctgcccttggttttaggctgtctttgcttactgaccgacttaattcatgctttgggttatgactgtaggagagattttcctgtgtctttggagtatgctgaacttgtgtttctttttgttgttgcatattagacagtcagtgttgaaactaaagtgacctaaagtgactgagctcatgttatgggctgaattttgtctccccagaattcataggttgaagccttcccagtccttagaacatgattgtatctggagctatggcctttaaagacataaataaggtaacatgaggtcataagggcaaggccctaatccaatatgactggtgtccttatacgaagaggaagaggccaggcgtggtggcttacgcctataatcccagcactttgggaggccagggccggcag

SEQ ID NO: 82382 - DNA, 609 bp, Homo sapiens
  sig_peptide (101)...(236): this location contains the signal peptide sequence, MIAFLWYPLGMCNIHVAVCLFLNASWSVVPDKTQSPFEGFSVAYQ, Run with SignalP
  misc_feature (297)...(186): similar to gi2078380 in the genepept database release 114, Run with FASTXY 3.3t00, default parameters
agcaaaattgctttaagtcttttctctcctcccccactgtacactcagtgttttaaggaatttaaaacacttaactgcttcagaggatgcatgataggggatgattgcctttctctggtatcctcttggcatgtgtaacatacatgtagcggtctgtttgtttctcaatgcttcatggtctgtggtgcctgacaagacccagtctccatttgaaggcttttctgttgcttaccagggctgcagaggagctgctttttaagggcagtatttcaatagttaactgggactttggggaggcacagccttcggggagggcaccaccaggctcatttaattttcactagtaatgtggtaaggcaggcaggtacaatttacatttgacacacagggtaactgagttccaggcctatgcatggaggagacaggattttaaaattccaaatctcatgggttttctcaccacatcatgtgaggtgtcctatagaacaatccttaagtgaatgcgtttcgtgaccgtttttacagatcatggacggcgtataagaatagacagctaaaagctcttgaacgagactggtcctctcctttccctgatcatgggccggagaa

SEQ ID NO: 82383 - DNA, 676 bp, Homo sapiens
  sig_peptide (33)...(168): this location contains the signal peptide sequence, MWGLPHGKKIVAATHTCLLAAFHTVVSQQIFMEMNEHMKTIAITE, Run with SignalP
  misc_feature (418)...(497): similar to gi2296910 in the genepept database release 114, Run with FASTXY 3.3t00, default parameters
caaacattgctcagtggaaggcctggaaaaccatgtggggcttaccacatggaaaaaagatagtagctgcaactcatacatgtttacttgctgctttccacactgtagtcagtcagcaaatatttatggaaatgaatgaacatatgaaaactatagccatcacagaggtgtactataaaccaatgccatgtttttgtaaaggccggaatgaaagaaccacctggaatccgactcatggtgctaatactgaactcatttggcacaagttatttagattcaaaaaggccaccccaagagcactctctttcagtttgagcagaactcctgaaaatcatactagctacctttcattgtgttcttattatgagcaggatattgggataaagaacactggtttctctcatttaattccaacagcagtctggtggctcaggagctattaggattttttttgtatcgataaggagactgagggtcaaagaggtgacgtcacttgcccagggtcatagcaccaggaagcaggagagttaggctttacatacagcatggctggtcactctggctcatgactttaatgccagaattttgggaggcagaggtgggaggatcacttgaacccaggagtttgagactggcctgggcaacatgacaagaccccatctctacaaaaaaaaaa

SEQ ID NO: 82384 - DNA, 619 bp, Homo sapiens
  sig_peptide (46)...(181): this location contains the signal peptide sequence, MLETFLFKLFLFFTLLVNLFITNDQLSVGSIFLSFQLPAFFLDMA, Run with SignalP
  misc_feature (70)...(158): similar to gi2690113 in the genepept database release 114, Run with FASTXY 3.3t00, default parameters
tttttcccaataattacttcaactcacagttagttaaagcataacatgttggaaactttcttgtttaaactcttcctattcttcaccttattggttaatttatttattaccaatgaccaactcagtgtgggtagtatttttctcagcttccagctcccagctttctttcttgatatggctgaattttgagatactcaaagcaagcagaccataaagagagacagataaaactggacctgggtgttcatatgtgtatgtgtgattgtgtgttggagggttattatccctttttaaagaactacttataggatggtggcaggacctttgaaattgcaggctgaattgattattagcatatgtaaatttgggtaagttattaagcaactttcaaagtgtttttgttttctcttctgtaaaagtaggatgataataatatctaatgatcttgttgtagattaaatgatgaaaagcaccttacacagtgagtgttacgtagtaagtagacaataaatggtaacatgactattatcatcatgttgctgctatcgtggatatttgcatcttatagctttggcagactgaaaacttccttttgctgtgaaatatcttgatagacgca

SEQ ID NO: 82385 - DNA, 6517 bp, Homo sapiens; identical to SEQ ID NO: 59893
  sig_peptide (1807)...(1942): this location contains the signal peptide sequence, MDLVQFFVTFFSCFLSLLLVAAVVWKIKQTCWASRRREQLLRERQ, Run with SignalP
  misc_feature (226)...(2264): similar to gi3043592 in the genepept database release 114, Run with FASTXY 3.3t00, default parameters

SEQ ID NO: 82386 - DNA, 647 bp, Homo sapiens
  sig_peptide (397)...(262): this location contains the signal peptide sequence, MLSMSHSPSWIFLCCFIIFSPGRVCQSKKPAGGHSPVLPLCPFGL, Run with SignalP
  misc_feature (247)...(345): similar to gi531376 in the genepept database release 114, Run with FASTXY 3.3t00, default parameters
ccgggtcgacccacgcgtccgtgctttaaaaagttccctgggcaatttgggtgatcagccagctttggagacaacagtgtaaacacacacacacacacacacacacacacacaaacacacagcctgcccatcatttaagccctcatgctggtttctgttcttttacagacatatgcttgcgagctttcacatcataactcaatggggatggagtggtggtgggaggtgacacaaaacaagacggggggaaaacaaggtgagaagagaccaaaaggacagagcgggaggactggggaatgtcctccagcaggtttcttggactggcacactctcccaggagaaaagattatgaaacaacatagaaatatccaagagggactgtgtgacatgctgagcatgagtggagagtcaagacccaggggaccaagaaggcacagaagagtccctttcccataccctgaagaccgcaaactttgagagcatgcgggggcagatcctgtgctggcatgtgctgcagatatttctccacatagctttggcgcatcaaaatgaatctgtgtgaaacagaggcagcaagtaaggtccaagcagctgctacaggatgtggcagctatgaggatgcaccctgcccgctttctactgcgggt

SEQ ID NO: 82387 - DNA, 645 bp, Homo sapiens
  sig_peptide (175)...(310): this location contains the signal peptide sequence, MVLPLYLDGYFSIFMFLLVHLCFCLVNLLQGPTNCSKAKALVPIF, Run with SignalP
  misc_feature (34)...(97): similar to gi833034 in the genepept database release 114, Run with FASTXY 3.3t00, default parameters
ccgggtcgacccacgcgtccgcacaaatgtgtgtgttatgaagcactttgtgagatccttgctctgaaaagacaaaagatagtctgtcaatcctgccattaggcatttctgagtgtggctagtgtctacattctgaatgtggctagtgtcccaggccttgctgctccgtttagaatggttcttcctctatacttagatggctacttctcaattttcatgttccttttagttcatttatgcttctgtttggtaaaccttctacagggaccaacaaattgctcaaaggcaaaggccttggtccctattttttttgtaacactgttcacacagtgactcccccatgtctctgagtgggtggagaggaagttatacagggcaaggggagcacagagatgtgctgcttaataagagtttctttacgtttttccatttcctgtaattggtgcattggtattttcacaactcctgcacattaccactgtgtaggagttagcgtcatatttattgacagggacctgtttagccaatggaacatacagggtgcaggcatggtttagggcccgaagaccttactctgggatatgagacagagctccttctttttctgtctcgggtatgcacgatcacatcacatcacggctttct

SEQ ID NO: 82388 - DNA, 1433 bp, Homo sapiens
  misc_feature (1)...(1433): n = a,t,c or g
  sig_peptide (339)...(474): this location contains the signal peptide sequence, MHWLRASAGSLLMVPLMTDLHELALPPASLRTVVKENMCVLPFPV, Run with SignalP
  misc_feature (247)...(327): similar to gi45471 in the genepept database release 114, Run with FASTXY 3.3t00, default parameters
attctcaagtgctaaatgaaacatttaagacaggagtggaaactgttcactttctcatatgaaagcaagattcagtgattctgtaaggaggtagtcactggtattgtgttaggtattaaggggcatatgtgcttaaacagagaaatatgtctaaaatatttaaattctaatataaaaaagaaagtgactgtattatttagggctgcattttagttgtaagaaaaaagtccaactcaagcaaaaatggcccacacaatggaacagtcccaggacccaccggcttcaggggctgctccagcaatggcgcccggactccctcttgctccgcgtgccttcccatgcactggcttcgtgcttcagcggggtctctgctgatggtgccattgatgactgacctccatgagcttgctttaccccctgccagcttaagaacagtagtgaaagagaacatgtgtgtcctcccatttccagtaaaaacttcaggcaggagcctcactggctcagcttggtcccgtttccatctcccatgccatctccggccaggtgacaggctaccatgtcactgcctagggaagtttaggaagagagtggcaaagtggtgcattagaaagaacatggccaggtcaccccacctcctgggcggcaggcccaactccaccagtggtccactgtgtgacttccctgctccctctaagcaagtcactcctctcctctgggtctctgtttccttacctataaaatgagaacgtttcttcatgtgatctcaagtcccttttaaaatcgctaggattctttgaaaaccttttctatcatctagtgcagagaacttgttgaggaagttgggattggaatgagcctcagcagatgggcaaggtttgaataggaagagaagagacatttcaggagaaagaaacaacatagagagacagatgtaggtataagatatggtaataagccaaaatgtattaagagttataaatgcatgaaatcatcatcaaagcttgcttagtgattaactgcttatattttgccagtgcatatgatgtgacatttttctttaactcaaacactaaattacgatgtcctcaggttatcataaaccccatttgacttcatgcctctactctctcagggctggcgctgtgacaactgccgcagacctgggggtgaacccccggcccgaaggcactactggccagtcctacaaccagtattctcagagataccatcagagaacaaacactgtaagtgcattagcagcacaagtgtgttccctcatactagacagtctctttctacaggtatctttcttcagaatgaaccaagtgttttaattaattaaaaaaaaaaacaactcataaatgacttaagtgaaacactggattccataatatnagttaagttataatttatgtaactcttggacatctcct

SEQ ID NO: 82389 - DNA, 378 bp, Homo sapiens
  sig_peptide (68)...(203): this location contains the signal peptide sequence, MTFLLHVLVTALSSHSTGRRGTNCFMLLSSGNHPIPCGSLTPYPH, Run with SignalP
  misc_feature (38)...(152): similar to gi32575 in the genepept database release 114, Run with FASTXY 3.3t00, default parameters
tgaacttggggtgttgattcagcatcacttgccatgacccccaagccctcctctcagctttctctccatgacttttctcttacacgttctggtgacagctctgtcctctcattccactgggcgtaggggtactaactgcttcatgttactttcctcagggaatcatcctatcccttgtggttccctgacaccctacccacacctttgaaaatggtgcctttattacatactcctcgggtctccccctactaaagtgggccgtctctttcctgttgaagcattgactgatacactggcgaaagggaacaccctgcctgcccttcaccccctcccaagagcctaaagagacttctgagcttcaggaagaatctgccgtga

SEQ ID NO: 82390 - DNA, 400 bp, Homo sapiens
  sig_peptide (214)...(349): this location contains the signal peptide sequence, MVYLPVSLNGLRLACFSYVLAPIKVKPGGGSETRDGFRIPESTPS, Run with SignalP
  misc_feature (254)...(136): similar to gi5458991 in the genepept database release 114, Run with FASTXY 3.3t00, default parameters
ctcaaatattctatagactgtttaaatataaaccaaactaaactatttaagttccaggatattagtgactttttacctgagatacttgctcagattatctatctgttgtgaactccattttaaaagcacctcactataccatgcttgaagtcaggtagtctgtagacttcatcacagcccctttatatataattacttctctcacggaggagtatggtgtatttacctgtatctttgaatggcttaagattagcatgcttcagctatgttcttgctcctatcaaagtgaaacctgggggtggctcagagacacgtgacgggtttagaatcccagagagcacaccctcactaaaggccggttactgcgaccataaacacttcttgcccacaattcatcttt

SEQ ID NO: 82391 - DNA, 857 bp, Homo sapiens
  sig_peptide (514)...(649): this location contains the signal peptide sequence, MGAFVTRVALPCSFAWCACILGPASALCSLCMKNFQPFFQVILDS, Run with SignalP
  misc_feature (290)...(213): similar to gi2231098 in the genepept database release 114, Run with FASTXY 3.3t00, default parameters
ccaggaataacagcaacaaatatttattcagacattttcatgtagctgacgctgggttgagccttttatgtggattgcttcatttgaaaatccagcagcactgggtagtagactactgattattattccagttgtatgtatggataaactgaggtgtataaggctaagtgactaaccaaggagccctcagctggtatgtagtggagtggaatgtgaacctatgcgacctgatgcccgcccaagctctccctcaggttctgccgacatgcctgaggggatcattgtggcaagagaagaggcaggtgtgaaggaggttctgaatgagacagacttttgagcccttcccctgcccttaatcagagtaactttgttttaatctgttttataaatttgtgtttcaagtacattttatctacatgaaggattttgctatttttaaaaaatgctaaaaccattagggtgttaatagatttcttcagtttcaacccaccgcataacaggggataaataaaaatgggtgcatttgtaacaagagtagctcttccctgttcttttgcatggtgcgcatgcattcttggccctgcatctgccctctgctccttatgcatgaagaactttcagccattctttcaggtgattttggacagtgtcttccccagctgtcttcacttttggaattgctgctgttggaggaagtgctttgatattgcgactaccctggaacttctcgggagggccagtaactggcctttaccacttagcatcaacaaatgaaatgcaaagacttaccttctctgccctgtacacttagataggagctttggaaacagggatgtggccatttcctaaaggtccat

SEQ ID NO: 82392 - DNA, 596 bp, Homo sapiens
  sig_peptide (224)...(359): this location contains the signal peptide sequence, MLGLLRLFVLLSSYSCIFSLSLNYCFRADELPICSNGPKSKEGLM, Run with SignalP
  misc_feature (94)...(174): similar to gi3005866 in the genepept database release 114, Run with FASTXY 3.3t00, default parameters
tgggccctggcatgtttgtcgtggggatgtcctgtgccttaaaggatgtgtgtcagcattgcggcctctactctctagacgccggtagcactccctcaggctgtgacaaccagggaagtctcccagtatcgccaaatccacccctctcccactgagaacccccgttctagagagaaaagaaacgtgaagctgttgatcagttctgggtcattgcgcaccccccatgcttggtttacttagactttttgttctcctgagctcctattcctgtattttttctctcagcctaaactactgttttagggcagatgagcttccaatatgctctaacgggccgaagtcaaaagaaggcctgatggaaggaggaagggatttcatggaagcaacagggcgcgtagcataggattgctcacccaggcctggtggcaaaaaggtttgaattatatctccgtggctttctagcgtgtataaccttggggcgagccccctaatgtcctctgagactgccggggcctccctgttggtgcctgggggatgagcatgggccccagcacatacagactggatggtgagaaaccacctgagaacacaggccc

SEQ ID NO: 82393 - DNA, 581 bp, Homo sapiens
  sig_peptide (50)...(185): this location contains the signal peptide sequence, MTLLNLYYLNSFLLYSKRFEGISFCVQKVSIILCIHYLRSTTIWN, Run with SignalP
  misc_feature (17)...(163): similar to gi5107000 in the genepept database release 114, Run with FASTXY 3.3t00, default parameters
aatttgaagtatatttaaagtcaataagcaaacattcaaaaacacttgtatgactctcctaaatctttattatttaaatagttttctattgtactcgaaaagatttgaaggtatatccttctgtgtccaaaaggtcagtataatattatgtatacattatcttcgtagcacaactatttggaataagcttttcttcagagatgtatcggcataaaggagctctgatttgtttaaatattttaaaaggtattaaaatatattttcatttgagaacctcccctatatactcaggaaagctcaccttttcaaaacctgagtgttaactctttccaaacgttctgtaatgtttatcaaaaacaaaaaataatgaaaagaggtgaacattattttggagagcctcattgtcttcatctactcagatcatccacaatcactggagaggaggcagaattttgtcactgggacagcagtcacttggcccagaatcctctacagattccctccagggagcccttcccattggctctttcctagaaatttcatgtttttggggttcctcagtaaaactttgggcttaacac

SEQ ID NO: 82394 - DNA, 606 bp, Homo sapiens
  sig_peptide (55)...(190): this location contains the signal peptide sequence, MPKFGFKPECMFCFSLLAHTLGVLSYHHQYFLRFPVRNDSYLQKL, Run with SignalP
  misc_feature (296)...(179): similar to gi3845106 in the genepept database release 114, Run with FASTXY 3.3t00, default parameters
tgataccccaactttggtttagagaggtcacggacaaggttgtgcagatagaaaatgccaaaatttggtttcaaacctgaatgtatgttttgcttttctctccttgcacacacattaggagttctgtcatatcaccatcagtattttctaagatttccagtaagaaatgacagctatctgcagaaattgtataggcagcaatgagaatcataatatagagtcagagaactgatgtcacagactgacagagaaaagtctctaaggggctgtgctgggatatcaggaaaggggaagcaggagggttcttaagtgggctgcgtgccctacaaacatccatcgcatggatgccgccatctttgaggcgaccatatgaagagccatgtggaggccacaaatatcaaggctaatactgaaccatgtggtatggggaatcctacaacgcatgcgcagttagtggaggggggatttaaaatcgttttttaggggaattgattgcaaaaataagaggcacccccaaagtccgcggagacataggtttggtgagacacaaagtgactgcaagagtccatgacagccacattcgcttgcacacaaagtcattacccg

SEQ ID NO: 82395 - DNA, 392 bp, Homo sapiens
  sig_peptide (104)...(239): this location contains the signal peptide sequence, MRNLLQFKLFLLYRSSAAAIARVGYCTPTTGSATEVIYTDRSTSS, Run with SignalP
  misc_feature (137)...(331): similar to gi2605887 in the genepept database release 114, Run with FASTXY 3.3t00, default parameters
gaagatggggaatcatcttcattccacacacagcttaatttggcagtttttgcatgaatttcaaaaatattgtggcacttattcccggccttcatagtctgtgatgagaaatctgctgcaattcaagttatttctcctctacaggtcatctgctgctgctattgcaagagttggctattgtacacctactacagggtctgctactgaagtcatatacaccgacagaagtacctcctcacctgccactgccagcattattactactgtaggagtgcatcttagtgagctgccaccactgaggctggagtcaaaagaagaatggctattcctttcttctgcattacaatcttgcagaagtacttcccattggtagaacctacactgaaatgctt

SEQ ID NO: 82396 - DNA, 584 bp, Homo sapiens
  sig_peptide (274)...(409): this location contains the signal peptide sequence, MLKAVTLTLCPCWQRAIASHEKAEGPLSCLPLKLSIWMPELKERT, Run with SignalP
  misc_feature (204)...(112): similar to gi395187 in the genepept database release 114, Run with FASTXY 3.3t00, default parameters
tcaataccctgtgtttcactggcagagagcagagaaggggagaagagaagcagcagctgaacaccggagagaagtttgactccagagggatggcttgatggtgggacttcaggagaagaataccttcctgctccatcccctttccagctccccttcccactgagagccacttccattggcaataaaatcctcctcagtaaccacccttcaattcattcatgtgacctgatttttcctggacacagaaaaagagctcaggggctacatgtgcagatgctaaaggctgtcacactgaccctctgcccttgctggcagagagcaattgcctcacatgaaaaggcagagggcccactcagctgtttaccacttaagctgtccatatggatgccagagctaaaagagcgcactgtaacgcatgccctctggggcttcagggattgctggtactccctttccagaagctactgtggggcctgcattgagttttgctcctgctgatgctcagaagcacttgccctgcctcctgcaccggctcacctgtgtgatccccctcccacaagggtttgagagctgcgggctgaatc

SEQ ID NO: 82397 - DNA, 322 bp, Homo sapiens
  misc_feature (1)...(322): n = a,t,c or g
  sig_peptide (314)...(179): this location contains the signal peptide sequence, MLYCLAFAQILKSFASIVIPATYQPRLLPARSSSTLTPISNTVWS, Run with SignalP
  misc_feature (14)...(150): similar to gi5918019 in the genepept database release 114, Run with FASTXY 3.3t00, default parameters
gagcccaatgagaagccaagaaatcagagagagatggtgcaaagggatgcttagccctgttctagagaattttcatgttaaaaatatgagtgcctatacacaaagactagttctgttcttgaatcccctgttcgctaattatgttctctgatgtcaggataaaatgtcagcacagggggaccaaactgtgttgctaattggtgtgagggtagaggaactcctggcaggaagtagtctaggttggtaggtagcagggataactatggaagcaaatgacttgagaatctgagcaaaggctaaacagtataacataaagaaaacn

SEQ ID NO: 82398 - DNA, 438 bp, Homo sapiens
  misc_feature (1)...(438): n = a,t,c or g
  sig_peptide (8)...(143): this location contains the signal peptide sequence, MSARDXYKNEWEISFGVFLLLDGFLWLIFRYLPCFSHFLHYFLSQ, Run with SignalP
  misc_feature (365)...(245): similar to gi755230 in the genepept database release 114, Run with FASTXY 3.3t00, default parameters
tgctctcatgtcggcacgagatgngtataaaaatgaatgggaaatatcctttggagtttttctgttacttgatgggtttttgtggttgattttcaggtatctcccttgtttttctcatttcttacattattttctttcccaaaatcccttaatatacctgtttagcttgtgatgtcattttccattagactgaaaccatccaagttgtttaggctaacccagacttaagcattttctgggcttatttttggactctttttaaaactcatcatctgacaatatttaatgtccacacggataattctgaagacatgtgcataccatttttcttttatgtacatggcgtaaaccttgatttttccatagcaggagatagcattataacattgtattggtttcactggggtaatatcttttgtgctataagagatanatttn

SEQ ID NO: 82399 - DNA, 602 bp, Homo sapiens
  sig_peptide (67)...(202): this location contains the signal peptide sequence, MGWAMACAASTTLGLGHHGHGVHQHCQLPRRRGWALECSYYVNAE, Run with SignalP
  misc_feature (63)...(155): similar to gi2854113 in the genepept database release 114, Run with FASTXY 3.3t00, default parameters
ggtatccattagggtccccagccagctgatgcacagcccagcctttggcacgtgcagtagagggctatgggctgggccatggcgtgtgcggcaagcaccaccctggggctggggcaccatggccatggtgtgcaccaacactgtcaactccccaggaggagggggtgggcactggagtgcagttactatgtgaacgccgaaatgtggttttggagggtgattatgggaatggaatggtagcaaaaatggggtgctggtggaagcatccaggatttcctacatgccaacatgtgacctctggcctcctaatgaaatcaggagcagtgaggattggctccattttccaggtctgactctgctttggagagaaattgccctggcctgtgtggcacagccatcagccaagcccagggacctaccactggaagtcagagaccaatttttctattggacataccttgcttagctgaccaccttctgaagaagaagaacctggccagattagcaagaaactaggtttgagttctgagtggggaaacaggggttagaaaaaagactttggggccgggaacccacacagctggagtgttcttccgagatag

SEQ ID NO: 82400 - DNA, 371 bp, Homo sapiens
  sig_peptide (115)...(250): this location contains the signal peptide sequence, MFMVLMLLISVEAATKHSWCLREACLRCQEHFEKEVLPSMRFKGC, Run with SignalP
  misc_feature (148)...(270): similar to gi1229012 in the genepept database release 114, Run with FASTXY 3.3t00, default parameters
tggttttactagaaagacttattatgcaaacaattgcatataaatataagggttcttttaaatatttgtaagctgatcagcccagtgcctggcgtggaataagccatcatcacgatgtttatggtcctgatgctgttgatatcagtggaagctgctacaaagcacagctggtgtttaagggaggcatgcctgaggtgtcaggagcactttgaaaaggaggtcttacccagcatgaggtttaaaggatgtagggagttttccagaaaggtttccacgtggaggaaaccacatgtgccaagaacagaggcaggagagaacatggcatgttcagcgaattaaacagtacttctctgtggcttgcatgggaactg

SEQ ID NO: 82401 - DNA, 596 bp, Homo sapiens
  sig_peptide (5)...(140): this location contains the signal peptide sequence, MRLFYCSGTYMLVSYAVCWLSLDPDSQDPVSQNQSHGLTPNQWAE, Run with SignalP
  misc_feature (255)...(142): similar to gi18704 in the genepept database release 114, Run with FASTXY 3.3t00, default parameters
caacatgcgtttattttattgttcaggtacatatatgctggtgagttatgctgtgtgctggctgagtttggatccagatagccaggatccagttagccaaaaccagtcacatggtctaaccccaaatcagtgggcagagatgtacacaaccccctacttgaccccactgtggggttccagagggtgggactgaggatttgagaacaattatcacatccactacacaagaaaacatcattttcctcttctatctgactgtcatttcaatagcaggttcacattcattgattatctaagatgtgatcaaattatgcagtaagagaagcaggaagtcagagatgagtaactagctaggccctgtcttagaggattttatggtctaatagaggacacaggaccattatttgacctccttgtgcttcctcatacatatagcaaatagcactactgcttgctttacgtggctatgctgaaaattcatatgaagggcttttctataagattataggattatatggatatacctggtgactgtatcggggcgatctagggggagcatcaagttatttgggcttcgcgattagatttaacgaggc

SEQ ID NO: 82402 - DNA, 600 bp, Homo sapiens
  sig_peptide (84)...(219): this location contains the signal peptide sequence, MKLPHLAQFLTSPLVLWSTGVSGSAGFHQLVPQWECEEVPGCGKS, Run with SignalP
  misc_feature (224)...(140): similar to gi1680374 in the genepept database release 114, Run with FASTXY 3.3t00, default parameters
gcagaaatgactggacagaaatacaagcctgtgagacagagagatctaggagatccctagagaggtccatctagacctccaggatgaaattacctcatttagctcagtttctcacctctccgttagtgctttggtccacgggggtcagtggttctgcaggatttcaccaactggttccacagtgggaatgtgaagaggtacctggctgtgggaaaagctgcttatcaaagagaggcctgatagaaatgctagggaaagtggctgtgagcctgcattatggacgggagcagagcggcagggcatgttgctaggactaagcagtcgattcacgtgagtctggacaccatgtataaatattttgaaaacttcctgttacaatttaatttactccattgtggtaaagggagtgcttccctgcacatggcgtactgtatgtttattggcaaatgttccttagctggtagccttgatatataccgactggaggaaccccgcttatgcaaatgttggaggcctggaataccctaatgccttttttttggggcggggaggaccctggtaggcaattcttaggggctttttgcataatttttgcgctgg

SEQ ID NO: 82403 - DNA, 588 bp, Homo sapiens
  sig_peptide (146)...(281): this location contains the signal peptide sequence, MVICYTLSITTLIYFVCYNKYIQIRKIERDQNEIYNIFKLLIIMV, Run with SignalP
  misc_feature (188)...(275): similar to gi3282303 in the genepept database release 114, Run with FASTXY 3.3t00, default parameters
ggcggatgccatgccagggctggtgttgggcacaggggaaggggcatggcttgagacacaagaccagcgtggaggctgtagtgtagtattgacccgagggcttcaaccttctgatggtgtacacaccattttttgagcatgtaccatggttatatgttacactttaagtattactacattaatatattttgtatgttataataaatacatacaaattaggaaaattgaaagagatcagaatgaaatatataatattttcaaattactaatcataatggtgtcaatctccaggcagggtccattgctacagttgacgatagtggatgaaaattcactcctcagagtcttcttgataatttgaaattgacttgattgacttgtcagatctgattagatcgacattttttaaatctcgaatgtgactgacagcttgtacaaggagaagtttcactctgcctttcctttttgtttacttgactgccattatttctctgcttccaatctgtggttttctgcacgagttggttaagccattacttcattttgtgaaagattgttgagttaaacttaaggtaacttaatctggca

SEQ ID NO: 82404 - DNA, 590 bp, Homo sapiens
  sig_peptide (143)...(8): this location contains the signal peptide sequence, MFPPSVLLNFLLGITLPRAFWMLSNERLAWNCKISHLPIKNVTSC, Run with SignalP
  misc_feature (363)...(295): similar to gi2058399 in the genepept database release 114, Run with FASTXY 3.3t00, default parameters
atcggatgcagctggttacatttttaataggcagatggctaattttacagttccaagccaatctctcattggacaacatccagaaagcccgtggtagggtgatgcccagcagaaagttcaacaggacacttggggggaacatgctaatgtcagcccttttacttaaatgtctttaaaaagaatattcagtgctaagctgagggattttcacagactcaagcctaacaccagatgggtggccagctatgaagtccttagggcctgagcaaatgctcttaatctggcttggatgggcggagaatcaaatagcaccaaaccagtaatctctgagtgatttttaaaaatgacaaaggggtatgcacttgcagaaatgaccaggctaactagagaagcgagtttctcttaatagaagtccatggcgttactaaagccctgtggccctatgattacctcggcatcccgacctccgttttgggtgcccctccccatctgacctttatggagttacaggaatgaatgtccggttacctccccccaggtgacagtccctcgccttcagggtcaaagagggcggaatgtcttgtcgcatt

SEQ ID NO: 82405 - DNA, 603 bp, Homo sapiens
  sig_peptide (296)...(161): this location contains the signal peptide sequence, MQLCFCVWPSCCFALMNSIPLYEYFPVCIHLFCWGGHLGCFKLRL, Run with SignalP
  misc_feature (49)...(211): similar to gi887410 in the genepept database release 114, Run with FASTXY 3.3t00, default parameters
ctgcacaagaatcctttctcccgcccaaggtcatgaagacattctaccatgttttctcctcctcgctttatgatttcacttttcacactgaggtctatgactggaaaagacacaagtgcaaaagccacacacgcaaatgttcatagttgctttattcatgaaagtctcaacttgaaacaacctaaatgtccaccccagcagaacaggtggatacaaacagggaaatattcatacaggggaatactattcattagtgcaaagcaacatgagggccatacacagaaacacagctgcatctcacgtccacagtactgagtgaaagaaactagacccagaggagcacacactggttccgtttaggtcaagttcaaaaacaggggaaggctgggggtggtggctcacgcctgtaatcccagcactttgggaggccgaggtgggtagatcacctgaggccaggagttcaagaccagcctggccaacatggggaaaccccggctctaccaaaataccaaagttagcccggcgtggtggccggcccctgggaattcccgagtactcacggaagactgagggcgggaagaaaacactttgaacctggggagg

SEQ ID NO: 82406 - DNA, 363 bp, Homo sapiens
  sig_peptide (64)...(199): this location contains the signal peptide sequence, MLHQMKFIGHLIFIVVLDPDLSDMKNNEPYDYKFVKWMTKHKVMF, Run with SignalP
  misc_feature (118)...(190): similar to gi5002577 in the genepept database release 114, Run with FASTXY 3.3t00, default parameters
ttctaaaccaagctaatttaaataggagaaaatgttgaatcttgatagacttaaatgaaatacatgttgcatcagatgaaattcataggccacctaattttcattgtggttttagatccagacctctctgatatgaagaataatgagccttatgactataagtttgtgaaatggatgactaaacataaggtaatgtttattgttctttgcaagattctgttatattttatagttaatttttgaaggaaatctgctggtatgctttgaaatcgatcaaatgtaatggtgatatatgatactccacttgcggcttttaaaagcatttttctttttgaaaattattgggactatttaaaagtatct

SEQ ID NO: 82407 - DNA, 411 bp, Homo sapiens
  misc_feature (1)...(411): n = a,t,c or g
  sig_peptide (6)...(141): this location contains the signal peptide sequence, MWVFWSYEFCIFLFDLYSXSHLYVYCAVHTLTRFLKMRNRHFLEE, Run with SignalP
  misc_feature (161)...(323): similar to gi974097 in the genepept database release 114, Run with FASTXY 3.3t00, default parameters
atgaaatgtgggtgttctggtcttacgagttttgtatatttttgtttgatttatattcagngtcacacctgtatgtatactgtgcagttcacacattgaccagatttctcaaaatgagaaatcggcattttcttgaggaaggacattcttaggtgtttgttcacaagcagatccaagggaatgttccccatcttggtgctgcaattgttcttttgtaagcttgaccatgcttgttatgtcagcttgcctcattgcctgttcatcctttgcttttgccatttttcaaacaataggaaatgatgttaaaagtgataataattttcttaaaaagcatttttgactttagaatgcttaattcttgtatttaaaggctcccttaagatgttttgtgctatagtgtactgagattgn

SEQ ID NO: 82408 - DNA, 688 bp, Homo sapiens
  sig_peptide (145)...(280): this location contains the signal peptide sequence, MQESNIYFLSICFKTSWCLFLLATGHLYYCNSQTLWQYTEHCYDS, Run with SignalP
  misc_feature (217)...(126): similar to gi1245699 in the genepept database release 114, Run with FASTXY 3.3t00, default parameters
cggcacgaggcatattttatattaacactacaaaatgcttatttaatttcgttttataatttcagaataagggtgacagctgctagaaattccacaatactcaagggccaaatttagtctttttgcctcaaatagaaagaaagcatgcaggaaagcaatatatacttcctatctatctgtttcaagacatcttggtgtctgtttttactggcaacgggacatctttactactgtaattctcaaacactttggcaatacactgaacactgttatgacagtttgttctttaacacatttgtattatctttcagttaaaagtatgtctttatgcctacatatttcaaagtaatatgagagagaacattaaactgtgttggattgtgataaaattcttggaatcttaaacatcataatacctcaggttatttggtcactgctcttgctagcaaggctaagtagtttcagtcctttagagctttatatttaatggaaggttaaaaacaaaaacgggatgggaaggaacgtatcgcctaatacataattcttggcattagatgatttttcctgtaaaggagctaataagaatattctcgtaatttattggacattatgattttgatatatacttactaaagataaataaggtacttggcccagccagggagaggtgatacatccttagaaagct

SEQ ID NO: 82409 - DNA, 359 bp, Homo sapiens
  sig_peptide (52)...(187): this location contains the signal peptide sequence, MPFHSISLLWFLFPLLLKKGLGYTRVFIFPPRPALNENGKEKPLF, Run with SignalP
  misc_feature (331)...(251): similar to gi1652095 in the genepept database release 114, Run with FASTXY 3.3t00, default parameters
ttgctttatgctttgccaccgtgccagaaagctgactgctagtgagggaacatgccttttcactcaatttctcttctatggttcttgtttcctttacttctaaagaagggactagggtacaccagggtgtttatattcccgcctaggccagctttaaatgaaaatgggaaggaaaaacctctttttaaaggaaccaaaatattacttagagaacatagtaaactgccatttgattgcacgccggccagctaaggttatgtgggtagattagaaaatgcactccctctagagggggggtaaaatggctggattcttgatacacagccaaatgccaactggaggggggaccatggggggcg

SEQ ID NO: 82410 - DNA, 694 bp, Homo sapiens
  sig_peptide (51)...(186): this location contains the signal peptide sequence, MISAFSFGASPLTLNCFFICALLGSIGYWVRKMDVTVISLWTKLP, Run with SignalP
  misc_feature (301)...(234): similar to gi313699 in the genepept database release 114, Run with FASTXY 3.3t00, default parameters
ggaaagcctatgatggattcttacttaaagagatgggttgtgagaactttatgatctcagcattctcttttggggcctcacctttgactctgaactgcttctttatttgtgctctgttagggtcaatagggtattgggttaggaaaatggatgttaccgtgatctccttgtggaccaaactgcctgattatgtgacagggtgtatttgacatttttatcattggcttggagctgggggaaaaaagtacagtgaatgacacgagcaaagaaacaacaaaaaccaagataccaaaaagattaaaacttaacagagcgaaatatcttaagtctaaaaaataacctgcataagtggtctggactagcagttgttattttaaaaaaatagaaataaaaaaataaaaggcagagcctgaggggctgtcgtcaacccgcactaaggtctttcgtgtggttgtgctctctgaccatgttcattgaagtgacctgaagaacgtgagttgcgtgataagcctcattccagctccacattggtcagaccctaactgtggttcgcactggcttcgaaacaggcaagagggttcatgaaagagcagccaacaccaggctgctggcaaggacttttagcctggataatggggtctcgggaggggcatgctactgggcttcaaaatttcatggggcccggcgcactgcc

SEQ ID NO: 82411 - DNA, 369 bp, Homo sapiens
  sig_peptide (153)...(288): this location contains the signal peptide sequence, MNVTAIWLHRDKLFCWLVISYISEICLSECWIKIAVFKNSLFKNV, Run with SignalP
  misc_feature (121)...(37): similar to gi1499555 in the genepept database release 114, Run with FASTXY 3.3t00, default parameters
gaaatttacaaaaattagaaagctactacatgaaaatataacatttatgtcaaacaacaggaaatttttttcaggagtatagataaaaagtttccagtgaatttttttttccccacagttttttttcttcccacccactactcaaggtagttatgaatgttactgctatttggttacacagagataagttattttgctggttagttatttcttatatttctgaaatatgcttaagtgaatgttggattaaaatagctgtctttaaaaactctctatttaaaaatgtcttacaatactacattcttacagacctgtgtctgagccaattattgatgaataatttgtatagtttagaaagttatataaaag

SEQ ID NO: 82412 - DNA, 364 bp, Homo sapiens
  misc_feature (1)...(364): n = a,t,c or g
  sig_peptide (155)...(290): this location contains the signal peptide sequence, MPVSLTFWYVLGRGCLYDQPTIQTLGLESLSSFPGREPFTRVVTA, Run with SignalP
  misc_feature (323)...(271): similar to gi466233 in the genepept database release 114, Run with FASTXY 3.3t00, default parameters
cattatcttgcctgagacttaggcctgttcgcaaggttggcccttggctggcctctgggagcttaaattttgcaagggtacccaccatttcccagtaaggatggctcactgcataaactcttaaacaattgataaacaatgtggttcatgctgaatgcctgtgagtctgacattttggtacgtgctaggcagagggtgcttatatgaccagcccacaatacaaaccctgggacttgagtctctaagcagcttccctggtagagagcccttcacacgtgttgtcacagctcactactggggcattaagctctacctctgactcccctcagggaggagtcttggaagcttgcaccctgtttccccn

SEQ ID NO: 82413 - DNA, 694 bp, Homo sapiens
  sig_peptide (174)...(309): this location contains the signal peptide sequence, MAEDNQRRCGNFCLVITGVKVWPVCCLVLPRNCCTCCSFAYALTL, Run with SignalP
  misc_feature (213)...(343): similar to gi454086 in the genepept database release 114, Run with FASTXY 3.3t00, default parameters
aaaagcacaaatttattgaagcgaaccaagtgcttcaagagtcccaattgcagtgttcttaagggttactaggctaaaagaatttggtaaatccctaggtgccctttacagtcgtccaattggttgcaccctatgaaggattggcctgcgaccaatcataggctgaaatggagatggccgaggacaatcaaaggcgatgtggaaacttctgtcttgtaatcacaggagtgaaggtgtggcctgtatgctgcctagtcttgcctagaaattgctgcacctgctgttcttttgcttatgccttaacccttgggtaccctaattccctattctcttgcctcattaggtctttaccctgactaaaaatgcactcatctagctgggacaaatcctacactgcatttgtcccatctagatgagtattctagcagagtacatggcacatgagtaggcattcaaaaattcaacatacagtacattttgttacctatgtgccaggtgtcgggcaggctgagttaacagctgaacagaaacctacctacccaacgtgctatcttctatacagcatgcgcgggcatccaaatcaaatggaaagcgggtatggagatctggaaaggcctcctgtgggtggcatctgactacctaaattcccatgcaggttcacttactgactttgacacttggaacaaacacccta

SEQ ID NO: 82414 - DNA, 691 bp, Homo sapiens
  sig_peptide (447)...(582): this location contains the signal peptide sequence, MPTCFLRYPFLLIFFLAQLLYIWTSLYCPPFLSNLSLPYSSALSP, Run with SignalP
  misc_feature (318)...(206): similar to gi699384 in the genepept database release 114, Run with FASTXY 3.3t00, default parameters
ggtaatctgtgtcccttataaatggcaggctctcttcccactccttggcttcctttcccttattccagtctgatgctaatccctcttgcttcctcagggaccttgcttcattgtcttttcttcagggtctcaatgatccttttctttcaacatataaacatgcataagtctttcatattctttatgaaaacagaaaacgatgaacgcttttggtcgcttctctctaggtttgggaggggtcatcttattcctggtcttaccaggcagctccttgaagtacaggtcctcgtacacatcccgcacctcgccatcttcctttcatcttcaaccccctgcactcctgtcctctcctaatgaccaccaggtccattatctaggattctctttcatttcttgaactttgcacaacatttggggttcttgaccactctctgctccttaaaatgatgcccacctgttttctgaggtatccatttctcctcattttctttcttgcccagctgctctatatttggacttctctttactgtcctcccttcctctcaaaccttagcctcccctacagttcagccctcagccctctgctcattctgcacgtttgccctgtggcagctcatcttctgttttcttctactaccacctatatgccattgattccattggaaatctgcatctccagccttgaaatcta

SEQ ID NO: 82415 - DNA, 694 bp, Homo sapiens
  sig_peptide (63)...(198): this location contains the signal peptide sequence, MVLCSSAFLTVQWGGEASDNIYLAFYFSVCGFTISLTLTPSRHLK, Run with SignalP
  misc_feature (259)...(213): similar to gi1785641 in the genepept database release 114, Run with FASTXY 3.3t00, default parameters
ctttcagttcccgtcgtgagaagaagctgaaccggaagttggtaagccgaggtctgcccaccatggtactgtgttcttcagccttcttaactgtgcagtggggaggagaggcatcagataatatttaccttgctttctacttttcagtctgtggttttacaatctccctgactctcaccccatccaggcatctgaaaggttgtgtggaagcaaggttgagtgagagtggggagggggagaaagggtggcaggagggtttggtttctggggcctgagtaactctggccttgaacattcccgcgatcccgacagattcccaggtggaataaagacctgggggccccagtggctgctagaaagggctgaccaggggtcttccccttttgactaacatgtgttggaaatatggggtctgtgatatataaggaatttctctctccctctgtctactgggaagatattcgccatattatatggagaccctcactggagtagaaaatgaaaaggctttgaggacaagttacttccatgtttttatcgaggaaactaaactgtctgcagccatggttatatgtctccaccaagatgtacacctcacgcattctcctttttctgtggttgggtgtattttcttgcctagaaatactctgagctggaaccacagcggggctcctgcaagttcggatattaattt

SEQ ID NO: 82416 - DNA, 372 bp, Homo sapiens
  sig_peptide (169)...(304): this location contains the signal peptide sequence, MLFILIQMIRTMGYSLHYVLHCSLGACCPYMYKEESNFLNKLKRN, Run with SignalP
  misc_feature (110)...(53): similar to gi3860912 in the genepept database release 114, Run with FASTXY 3.3t00, default parameters
gtgtttcttggtatttattcccctgacaggccttgccaatgtttctttagcccatttggaagcatttggttgttccatctcaacggctgtttatataaaagattgctggtttggcctataacttcctgatttggggaatattaccattagagaggaaaggtgtcatatatgctatttattctaatacaaatgataagaacaatgggttattctttacactatgttttacactgtagcctaggagcatgttgcccatatatgtacaaagaggaaagtaactttttaaataagttgaaaaggaactatgaaagtattaataagttcaacttctaagagcatgcaaattttagttccctctaagtcatgcatagt

SEQ ID NO: 82417 - DNA, 701 bp, Homo sapiens
  sig_peptide (158)...(293): this location contains the signal peptide sequence, MHFPVNCFFKSLHIFLLLQVFLATFLRKKLSKVAFSCLVEFFYYC, Run with SignalP
  misc_feature (98)...(352): similar to gi4586208 in the genepept database release 114, Run with FASTXY 3.3t00, default parameters
gattggacttatttcccacattttttcaagctctggatattaccacacttttcactatttacctatctggaaaagcaaatatctttatatttaaatttttataacctcaatcatcagtgaaaacatttctaatgtttatatcacttgcttgcaaatcatgcattttcctgtgaactgtttcttcaagtcattacatatttttcttttactacaggtttttcttgccacttttttgagaaaaaaattaagtaaggtagccttcagttgtcttgttgaatttttctactattgttattattttttagactttgctagtagtgtttcttttttgttttgttttgttttgcttttgagacagagtcttactctgtcacccaggctggagtgcagtgacacgatcttggctcactgcaaccttcgcctcccgggttcacgctattcttctgcctcaacctcccgagtagctgggattacaggtgtgcaccaccacacctatgtaaattttgtatggacagtacagaaggcggttcactgtgttggccaggctagctgggaactcctgacctcaagggatccacccaccttggcctcccacagggctgggattacaggcatgagccaccgcacctgggcaaaagtgttccttaaaagagtgatttttctaaatagagaatacgatttgactatgttttgctttttaa

SEQ ID NO: 82418 - DNA, 348 bp, Homo sapiens
  sig_peptide (76)...(211): this location contains the signal peptide sequence, MSVFFLSCLILPQPGPIAAGVRCYSWTPPLVRGDLAGKVACDVHP, Run with SignalP
  misc_feature (297)...(147): similar to gi3127820 in the genepept database release 114, Run with FASTXY 3.3t00, default parameters
cggcacgaggtgattaagtaataagaaagacagtgatgggatcagtagcacagagtctcatcgttttgtgatttcatgtctgtgtttttcttgtcttgcctgatcttaccccaaccaggacccattgctgccggagtgaggtgttactcctggacccctccgctggtccgtggagacttggctggcaaagttgcatgtgacgtacatccttagttccctgagtggcctcatgcaggagctgcatagggttactctgattttgggatatcccgtgaataatcacaagtggcattttctctttcattacctgtgtaatgtataaggagacttcaaaacggttgtggaaaa

SEQ ID NO: 82419 - DNA, 406 bp, Homo sapiens
  sig_peptide (74)...(209): this location contains the signal peptide sequence, MSSWPRMLAHCFYLLKALSSSYLIKEMTIMPGTLLSTLCILTHLN, Run with SignalP
  misc_feature (296)...(390): similar to gi829334 in the genepept database release 114, Run with FASTXY 3.3t00, default parameters
tgttgggatatcataaacttccctagaaatgtacatatatagagattgctattagccttgaacaaactggaagatgtcttcctggcccagaatgttagcccattgcttttatttacttaaagctttaagttccagctacctaataaaagaaatgacaataatgccaggcactctcctaagcactttatgtatactaactcacttaaatctcccaacacctctgtgagataaatactactgttattctcattttacaggtgtcttctcagtagcagaagtgaattagttagaaaagtttttttactttagcttaacgtattccttcttatccattccattacttatttatttcatcactgtccttcttccacatttcttagggctcttgggttaggtgttcaatatg

SEQ ID NO: 82420 - DNA, 793 bp, Homo sapiens
  sig_peptide (115)...(250): this location contains the signal peptide sequence, MYTHFFSIWLLGILTKIENCPFSVRYGISCHTDFLRLYIQLCLEV, Run with SignalP
  misc_feature (150)...(235): similar to gi491055 in the genepept database release 114, Run with FASTXY 3.3t00, default parameters
gatgaataatgtacacttttaatttaatgaaatcaaatagattttaactatctatgcttacaatggggggacataagtctgacaatccttaatatcaagtcatctccaattcacatgtatacacactttttttctatttggctattgggaatcctcacaaaaatcgaaaattgccctttcagtgtacgttacggtatttcatgccacacagattttctgaggttgtacatacagctttgccttgaggttccaatttttgctcagtggattgagaatatattatttgctatatatcagaagaggcatgtgcttcctacttatgtcaggtaactttgggattaataattgtcctacaaagcatagatagatagaaatacttcatccttaatttctaatattatgacatatctaaagtaggcacctttaaaagttaatctccactaaatactaatgactgcttatagtggcaattcatctttcatggtagtcctcctacaaaggtatactaacatttatgagtttgaaacaaaggcaattcacaagtgttctgctagagatggtctatatctgctgtctgatccagcatgatggccagctggccctcctgtgcatgacggctcgcggtttaactgcaccatttcgttggccataaccagggaaaacatggcatggtgtggagggcatgggcttgaaattacggaacagagaggtggtcttctctctctcactctactggaggaggcatctcccctttttaacatgagttttcttactgggaataacaacgcgaaac

SEQ ID NO: 82421 - DNA, 433 bp, Homo sapiens
  sig_peptide (207)...(342): this location contains the signal peptide sequence, MHCTFLSVLALPVIVRILKSWSSCLWEGNLVHVKCLKFPVLSHGS, Run with SignalP
  misc_feature (302)...(330): similar to gi1245208 in the genepept database release 114, Run with FASTXY 3.3t00, default parameters
cttatttgtctgtgtgtccttggacaagctacttagcttctatgctaagtttcctcatacttacagagttggtttgagtgttaaataggatcatgcctataaaacacttaggtcatcaccttgcatagagcatatgtcagtgaaaattaacttaaattgttatttttattattagcagatttttttcagcctgcacgtgtacatccatgcattgcacattcctttctgttcttgccctccctgtcattgtgaggatactgaaaagttggtcttcctgtctctgggaaggcaatttagtccatgtaaaatgtctcaaattccctgtcctgtcacatggctcatgaactgcctctggcttctgaaggagcctgaaggagttgtcaaacctgccgcagagtgctgacgatatgtcagtgtaggttcatccattgta

SEQ ID NO: 82422 - DNA, 592 bp, Homo sapiens
  sig_peptide (71)...(206): this location contains the signal peptide sequence, MPEHLCFEICNTLLNFFSFLLLCVTDHETTFFDSGWKASGSTVTC, Run with SignalP
  misc_feature (486)...(571): similar to gi1224131 in the genepept database release 114, Run with FASTXY 3.3t00, default parameters
ctgaggacacatgttgatcccatatatggatgtgcacatgtgactgctttgatttttgtctagtgtagacatgcctgaacatttatgttttgaaatatgtaatactttgttaaatttcttttctttccttctcctttgtgtcacagaccatgaaacaactttttttgatagtggctggaaagcgtcgggtagtactgttacatgcaaggctggttgatgaagagcacagtctctaggaattaggagtacctcaattcaaaggctgcctgtgtaactatgcatagcttattacttcctttcttcacaagtttagacaagtttgatcatgggaacaatgagaaactatgctcatgattgttcttcaggaagatttatctgatgcagtgcctgagtgtggagagacacaagagttaagtgattgataaggaggcaaaaccttgggagaaaagagcttctggaccagggtcttgacctagaggaaaaagattggctggatgtgggaactcacacctgttattccagtactttgggaggcatatgcaagaggattgctgggaccccacaatttgataccagcctaatgtctctacca

SEQ ID NO: 82423 - DNA, 386 bp, Homo sapiens
  sig_peptide (85)...(220): this location contains the signal peptide sequence, MPYFLCFYRENSCLLVLGTWVYCQPVTTWCSLIEGFAPHWWWLVY, Run with SignalP
  misc_feature (191)...(135): similar to gi998946 in the genepept database release 114, Run with FASTXY 3.3t00, default parameters
agccatgagaaattttaagaatgtttttagtggttggaagagagtggaaagctttatgcctaaattttctcatacagagtacaaatgccatatttcctgtgtttttacagagagaattcatgtttgcttgtgctgggcacctgggtatactgccagcctgtgaccacttggtgttctctgatagagggttttgcaccacactggtggtggcttgtttacagtgctcatgggattttttatgtttcccactcactgtaagcaatgaaacctacaaggctacatgctggcccttccatatggaaggcttatttttcatttaccttaagctatatgtcggatagctattagcactataacttgggggggtctctatcttaatggcatat

SEQ ID NO: 82424 - DNA, 718 bp, Homo sapiens
  sig_peptide (59)...(194): this location contains the signal peptide sequence, MITVMWMFVYMTSMGASRLKKTNKTKNSKGYSHNHMQVVVNTAGW, Run with SignalP
  misc_feature (145)...(111): similar to gi2970427 in the genepept database release 114, Run with FASTXY 3.3t00, default parameters
ctttaatggtagcaaagagaaaattaactgtatgaattaacaccagctagttagtgtgatgattacagttatgtggatgttcgtttatatgacttccatgggggcgtctagactaaaaaaaaccaacaaaacaaaaaactcgaagggttattctcataatcatatgcaagtagtagtgaatactgctggatggaataaagcctcagttcttcagaatatagcatcatgcccagggggccccagctctgtagaaagcaatatcaaattactgaaaggccttattttattattccaagtattcagatggtaactagtttactcctgcattgtccaaaataggtcaaaccctcaaccctaaactgacaaacatttctgggggatatatttttttctttttcttttttcttttctttttttctttcttgggtttttagacagggtctcactctggttgcacaggctggagtgcagtggtgcaatcttggctcattggagccttgaccttccagactctggggatcctctcacttcagcctcctgagtagttgggactacaggcatgcaccaccattggtgggttaattttttggtttttataaaaaaggaaggggtttggccctttttcctacactgggtttgaactcccgggttacaggaatgtggctgcctttgtctctcccggggggtggatatacagggttgagaaccctttcctggc

SEQ ID NO: 82425 - DNA, 359 bp, Homo sapiens
  misc_feature (1)...(359): n = a,t,c or g
  sig_peptide (86)...(221): this location contains the signal peptide sequence, MWCHMQCLIMTQLFPNVRCTGLSLHTEASYLILVLKCERSSCWAQ, Run with SignalP
  misc_feature (143)...(90): similar to gi6010271 in the genepept database release 114, Run with FASTXY 3.3t00, default parameters
gtgagccagctggcacctgagaataatttcttgccctagaaccaaaagtgatgggacttggaacaggttctatttgtgtgataccatgtggtgccacatgcagtgccttataatgacccagctcttcccaaatgttcgttgcacgggtctgagcttgcacacagaagcttcctatttaatacttgttttgaaatgtgaacgctcttcttgctgggctcaattctgcctgtttataaatttaacaagactcggtggccatgagcgtcctcctctgtgtgcgctgggcaccaggtgcctccccttgccgaatcatttgggtaaaagggactctggtgagtggcgcggaggcctctgtgccn

SEQ ID NO: 82426 - DNA, 710 bp, Homo sapiens
  sig_peptide (417)...(282): this location contains the signal peptide sequence, MKCFLFVCLFVCFSEKLDLGASFFSLSAPLAFGVRFSWSCLPRNS, Run with SignalP
  misc_feature (356)...(273): similar to gi1762949 in the genepept database release 114, Run with FASTXY 3.3t00, default parameters
acaaattactttatccctggtgcctcagtttcctgctttttaacatgaggatgaatttgtatcaggtaaagtgaatacaacaccagagacaaatcccagacacacttaaaattctcttacaaaggattatgaaacactgactcttcctggcacatgtcacgttcttttgccattgactgttgaatgacatctgtcttccccactagttcaggctcagtgagatcaggaacatggcatgttcgctttcgtgtctctcatgaccagaacatgtacagcactgttccgtggtaagcaggaccatgaaaacctaaccccaaaggccaagggagctgagaggctgaagaaagaggctcccaaatccagtttctcggaaaaacaaacaaacaaacaaacaaacaaaaaacacttcatagggacttacaaacagaatgcatgtcttgggtggaggtgagacaggggatccctgtgccattaccttccagatccagggcttacatactggagggaatttgacccaaggccaggatttatggggtgcgcatgaaagtgggaatcttttaggatttccacaaacgggggtttcataagaatcatgggggaatgtggttccccgagggggaattttatttttctcagacacttattataacccctggggggtaattccatcttttgagggcggcaccacacgcccacaaatagtttcccaa

SEQ ID NO: 82427 - DNA, 699 bp, Homo sapiens
  misc_feature (1)...(699): n = a,t,c or g
  sig_peptide (60)...(195): this location contains the signal peptide sequence, MWQDLLVSLFICAFQKYFHYGSSQIKSKCSERWIWSDFLEALEFC, Run with SignalP
  misc_feature (153)...(240): similar to gi5106954 in the genepept database release 114, Run with FASTXY 3.3t00, default parameters
gactttcccatttcagaatgggacttgagccaggcttcatttgatctttgtggatttgaatgtggcaggacctcttggtgtcactttttatctgtgccttccaaaaatattttcattatggaagtagtcaaatcaagtccaagtgcagtgaaaggtggatttggtcagatttccttgaggctttggagttttgctttaaatctagaaagtgttcgtggcttctgaattggttctgcactctgactattgcttggtcctttcttcgtcatcatcagagctccataaaagagagcggggaggggataacataaataatgctgaaatagccctgagggatgagacatggcccagcaactgaagccttcgtctgcccgtggccacagggcactttatgggtttgcttcttgtcattcaaccacctgcctgggggggtttcattttgaatttcaagccaaagtttccggcattgccaaactgtgaaagtggcctaatgggacaggctgggagtgagggggaatttgcataaaatttgggggcccacccaggaacatcgtgagagaaaaactttaagggttgtaaattggcccataaccgaaattgtaaaaaatgaaatattttttcatcttaaaaaaagggtgtttttttttttggccaanttttgttggttgtgggttgttggnacgcgccaatcgcccccct

SEQ ID NO: 82428 - DNA, 694 bp, Homo sapiens
  sig_peptide (122)...(257): this location contains the signal peptide sequence, MGRLFPLVLLLFPVTNSVSPTALLVLVTTGGSGPATMVLLPAPVM, Run with SignalP
  misc_feature (349)...(303): similar to gi4164458 in the genepept database release 114, Run with FASTXY 3.3t00, default parameters
ttcaataccctgtctctaaaaaaaattaacaataacaaataaaattaaattgtcctgttattattccacgtaaggaggatgtccattagaacaagggagactagtccagctccttatactcatgggaaggctgtttccattagtattgcttttgttcccagtaactaactctgtttcacctactgcactgttggtgctggtcaccacaggtggctctggacctgccaccatggtcctcctgcccgcaccagtgatgggcagaattccaaaccattgcctctctaagtcatctcgccagagccccagtcccagatgtgacaaacctgaagtcccatgagtgtgcctacttgctggcagacatcaagaaaaacacaaaagtgggcatttctgcttgggaagttaaaagaaatgacacttttatccacccagcttcacacaatgacgaatgcccccaaattcaggaaaaggattcagataccaggtagcccaaatggggataaatgtctactgtacacacaataaaatgttaattcaaactggcacatggacccctgccgcttgtcaggggatatgggccataatgaaagggaggggagctggaagattatggggaaacaattttcttttccacgcattcactaaggactcctgtccataaaaatctcccacgatttatagggtaaaccaggctttg

SEQ ID NO: 82429 - DNA, 705 bp, Homo sapiens
  sig_peptide (207)...(342): this location contains the signal peptide sequence, MTQVHQRVLVCTVADLGFISCLDLLHYQQSESLRSPGQEISEASL, Run with SignalP
  misc_feature (152)...(23): similar to gi556202 in the genepept database release 114, Run with FASTXY 3.3t00, default parameters
gaaattcttcactaaggggtttcaaaccacagtgcaacttcagaccacaatcctgtacaagagccagcttgtgatttacaaattctccagggaaagtgacaggttggagataggcatggggttttgttgttgttcttgttgactcctgcattctgcatggcaggacctaggcctctttacctgtacattgcaggtataaccctttcatgacacaggttcatcagagggttttagtctgcactgtggcagaccttggctttatctcttgccttgacctcctacattatcaacaaagtgagagtttaagatctcctgggcaggagatttcagaagccagcctaagcttttgggccttcctcacctcctagggcctttgtgtcaggttcttttgggttcttcatattccttacctccctttcagtgatgttattataaagattttgatttattcagcatttcacggtctgtttagtgaggtgcttaacattgaacttctgaaatgaagggcatatagctaggggaagcttacctttggtttgccctgaaaagttatggtttacatctggtttcccaaacaaataatagctccccttttacacacgcacaaaaattggttcatttgatgataaacttgagggcctcctacccatagcccttgggatttcatttttgaacacagcaggggaggggatcaccaaggtgttt

SEQ ID NO: 82430 - DNA, 320 bp, Homo sapiens
  sig_peptide (107)...(242): this location contains the signal peptide sequence, MSEAQLKNPWTSSFFVIFQFAFSRACCMETRLMGANNEWSSELGK, Run with SignalP
  misc_feature (212)...(72): similar to gi895614 in the genepept database release 114, Run with FASTXY 3.3t00, default parameters
gatacagccctgttgggaacctgtggaagctgaggatcctcttccctaacaaaaagacacaaatagacagttcttttttttccttaggattttggacagttcctgaatgtctgaagcccagcttaagaacccctggaccagttctttcttcgtaattttccagtttgctttctccagagcgtgttgcatggagacccgtctgatgggtgctaataatgagtggtcaagtgagcttggaaaatgggattcaagtcaatgtgtttctgaagtgcaagacccctctaaggttaatttgctaacaggcaacgtgactctcccca

SEQ ID NO: 82431 - DNA, 341 bp, Homo sapiens
  sig_peptide (86)...(221): this location contains the signal peptide sequence, MVSKFKLHYIQFSLWGALACIILETILCLKEESCYTVTSFRESII, Run with SignalP
  misc_feature (39)...(110): similar to gi2634413 in the genepept database release 114, Run with FASTXY 3.3t00, default parameters
gccagatgcatgaaaggtgggcacaagtaaatagctgaaaatatatagctaaaagccaggtgtgtttttacatttcagacaagccatggtatctaaatttaaactgcattatattcagttttcattatggggggcattggcctgtattattttagagacaattttgtgtctaaaagaagagtcttgttatacagtgacatcatttagggagtctattatcccctaaaggacgcatagcagggcatttttattgctttttgagtatttagatgttgaaccgaagttctatctttaagttacctcattctgtcttacatgtaattctagaaatgtaatgggtt

SEQ ID NO: 82432 - DNA, 704 bp, Homo sapiens
  misc_feature (1)...(704): n = a,t,c or g
  sig_peptide (109)...(244): this location contains the signal peptide sequence, MMYLIVLSAVSSPWILRRESDPPKFYDVFGGPVFQRCKFVNIPWK, Run with SignalP
  misc_feature (260)...(334): similar to gi3337102 in the genepept database release 114, Run with FASTXY 3.3t00, default parameters
acctgtaacctgatactctttgaggaactaactttcctatgtcaatagttttatcagcagtatcttctccatggatattgagaagagaatctgatcctcccaaattttatgatgtatttgatagttttatcagcagtatcttctccatggatattgagaagagaatctgatcctcccaaattttatgatgtatttggtggtccagtgtttcagagatgcaagtttgttaatatcccctggaagatttctcaagggtgctttgttttcctcttcagggtcactattaagtatccctttttgccctgttctcttcctcctgaaccccattctgcttcactttcaaaacgatggctagagggttggatatgtcagtgatcatgaactgctgagtcctaaactttggtgtctgtgtccctcagaacctcaaagggcagtttccctgtgactttttaaaatgagaaccatgttcatgaagggctgtcttagtttcagatcacttgaaatgtaatctgatttgagagacagggcttaagctcctgtttaccaaaaggctgttttgattatcattttggaggaattgttggtgggtncaccacaaatgaacaaagttcttagaaaagatgaccaaatggggcggattcatggtggacccctcttttgggggcccccctctgggttcaagtagtcccccccccttttagaat

SEQ ID NO: 82433 - DNA, 373 bp, Homo sapiens
  sig_peptide (31)...(166): this location contains the signal peptide sequence, MLTFLVWQAELVLLPTLPFPIVTIYRTSHCCLLCVASASLPGRSR, Run with SignalP
  misc_feature (106)...(161): similar to gi3892463 in the genepept database release 114, Run with FASTXY 3.3t00, default parameters
cttgggtttttaaaaaacaaaacaagatacatgctgacatttctggtttggcaggcagagcttgttctgctccccaccctcccttttcccatagtaaccatttataggacatctcactgttgtctactctgtgttgcctctgcttccctgcctggtagatctaggaatcttaggatttcttagttttagctggtgatccgtatctttttcttaattccattgtaacttcagcttttcttattgcttgtaggaaggctgtttccattgaatacaaacaaaataaaagcttttattcttaatcttagagataggatgtttgtatttaaaaataattgtgctgtcaaaattctgtcaagttggcttttaccacatt

SEQ ID NO: 82434 - DNA, 594 bp, Homo sapiens
  sig_peptide (56)...(191): this location contains the signal peptide sequence, MCCSFLLEGLISLFSLQLFSVQLVLLFFLWIVSYSKKQIKDTFAK, Run with SignalP
  misc_feature (289)...(145): similar to gi3046553 in the genepept database release 114, Run with FASTXY 3.3t00, default parameters
gaaattaattagaaattagttttcataaaatccagagctgtatagcccaagttttatgtgttgttcttttctgttagagggacttatcagtttattttctcttcagctcttttcagttcaattagttttattatttttcctttggattgtatcatacagtaaaaaacaaattaaagacacatttgccaaaaccaaaaatactgttgccagaattttacttagcattcctgacttaccaagtttaactttaattacacaaattttatgaattttaaaaagggtatgatactttgtcatgggacctatagtgcttaagtggatatatttaattttagaagaggtaatagaaatactggatttataaactaatttttaatgaaatgttgaggaaatctgcaaatatacctgtgaaatgtgaaggcactaaaggtgcttcactttattctataaaaacattgcaaatgtggctgggcatggtggctcatgcttgtaatcccagcactttgggaggccgagacaagtggatatcttgagctcgggagttcgagaccagcctgggcaacatggtgaaaccctgtctctacaaaaaaaaaa

SEQ ID NO: 82435 - DNA, 698 bp, Homo sapiens
  misc_feature (1)...(698): n = a,t,c or g
  sig_peptide (468)...(333): this location contains the signal peptide sequence, MPFLSRFMLKLWSLSLGHKPILCLGEKIKEGKKKEFRARNSQQPA, Run with SignalP
  misc_feature (94)...(71): similar to gi619255 in the genepept database release 114, Run with FASTXY 3.3t00, default parameters
aactggaagtggaattaatggtggaacagtatagtagaaagagcataaatgttggagtcaggcctttgttcttatccctgctccactgcttactacccacataactcatcctgctacttcagctccctggcccttggtttcatgtgtaaagcctgtctttgtgtggggttgtatggctcaggagcaggcatgcctttgctggcacttacatatcagatccccttcctcctcactcacctgagaacacccataggacatcacagactgttcctctaaaaaacaatatgttctttcttttcgtctgcaaggtttctactcccatcacagggctggttgttgagaattccttgctctgaattcttttttttttccttctttgattttttccccaagacagagaatcggtttgtgacccaggctgagggaccatagctttaacatgaatctggataaaaaaggcatttgcctttggcacttgtttacccttggggggcgccccatattacccttgagggggggaagtttcacctacaccagagaaagcttttcacaaatgccacaaagaaaaactttcggagagccccccttttcgccgctgaaccgaacccccaaggatttagcaatggattacaacgaaggagacggggagggggaaanganaagggccccagatctgttttcgccgccggctgtcgttt

SEQ ID NO: 82436 - DNA, 794 bp, Homo sapiens
  sig_peptide (466)...(601): this location contains the signal peptide sequence, MTQILAPSSLLLFLCPIFLPYFLCMFTLPCRRICKLAQILLGTRW, Run with SignalP
  misc_feature (336)...(205): similar to gi300503 in the genepept database release 114, Run with FASTXY 3.3t00, default parameters
ggaagtgccatgaggcttcctattgtttgggcagtgtttgatgttcttaagaatgtatacagaattaactttgatcaacgatagtagcttcaatctggtggctccatcggccaatggaaagtgagtagtattttatacatggcaaggacacagccaagaaaatgaaatgatcagttttgtgtgtatcccactttacttttcgagtgctttccttcacagacaagctctaactgaatcctcacaaagatcctacaaggcaggatttgcccattagacagactggaaaactgatgcctcaaaagaaaaggggcgcattgtgggttagtgaagacacctaaagaacaaaaaagcggagctccatgggactgttgtatttcaccctcctcttggctgccagcatcttagtactaagtctatcgccatgccgtgtcacgtgggcaggtcttcttggcattcatcttgaacatgacccaaatcctggctccatcttccctcttacttttcctttgccccatttttcttccttattttttatgtatgtttaccttgccctgtaggcgcatttgtaagctggctcaaatccttttgggaacaaggtgggttataaatgcacacgttcctacacaggatgttgttagtcatttcataaggtctcttgtggaggagattagccaatagcttcttttgtaaccttaggcacaccctccttccataagggtcaagtgagagtatggtccttacggctcggacgggccaaccaccttgacaggctgggattcttctatttcaacccc

SEQ ID NO: 82437 - DNA, 722 bp, Homo sapiens
  sig_peptide (416)...(551): this location contains the signal peptide sequence, MFIFFNPAFSLLIIYPLKKSKKTCLSLHKRIFPASLFIMWKIRWN, Run with SignalP
  misc_feature (475)...(413): similar to gi298347 in the genepept database release 114, Run with FASTXY 3.3t00, default parameters
gagagctagcaccatgagcccgacaagttcaagggaggaatagggagattggcttgattagagtgtgtttatttgttggggtgggagaagttagccagcaggggcttaataaatatttgtgggtttgaataacagcagataaggtgaaaagggcaggtccaacttacagagggccttgaaagctaagccgaagaaaatacaattaaccaacaaataatgtggacaaacctgaaatctcactagtaataaaaacaatgcaaactgaaaaaaacacggaaatttccccctcacattcccttaaatgaacattaaaaaaaattattattctcactactaggaagactatacataactggtaaatttgtaaactgatataatcttattttttaaaaggcttggttattagtttcattgaatgtttatattctttaacccagcattttcgctgctgatcatttatcccctcaaaaaatccaaaaaaacatgcctctctctgcataagagaatattccctgcatcactttttattatgtggaaaatcagatggaatgtaatgctcaatgataagtaggtggttaaaacaaaaaaagtttcttagaaagtgttttaaaaacgaaaaggaccaattagatgggtatgactttagactgtaggcaacagaaagctaataaaaattcctgagtaggaaggtgacatgggaaaaaatgtttttcaagaaatcc

SEQ ID NO: 82438 - DNA, 494 bp, Homo sapiens
  sig_peptide (347)...(482): this location contains the signal peptide sequence, MSSLFILAWTPIILFCLGIRHCSVLLAHSFLYCHLVLYNSPALDT, Run with SignalP
  misc_feature (479)...(357): similar to gi1563782 in the genepept database release 114, Run with FASTXY 3.3t00, default parameters
ctggaatcaagagtaggtccccaaacccatggcttctcttttcattcatgtgatgtgccttttatgatagcattcaccacactataaggacaaagcatgcagagatcaggcatctgatctcccaatcccaattctactcccggccagcaattctgtctccttgctgggccttaattttcttatctgtaaaatgagaatatatggggaagcacttggttttgctttccatggtttcaggtaccctgtggtcaactgaaggctgaatcatattatactgaaaatttcagaactgattgactcatatattctaaattgtgcacccttctgagtagctccatgaaatcttatgtcatcccttttcattctggcctggacaccaatcattctcttttgtttaggaatacgacactgttcggtgcttcttgcccattcgttcctatattgccatctagtattatataattctcctgcgttggatacttttatttttcttt

SEQ ID NO: 82439 - DNA, 716 bp, Homo sapiens
  sig_peptide (254)...(389): this location contains the signal peptide sequence, MTFIFIVASWSSIAAGAPAFPATSQAGSRRKGWGRGKKDTYHLSI, Run with SignalP
  misc_feature (311)...(370): similar to gi555253 in the genepept database release 114, Run with FASTXY 3.3t00, default parameters
ttttacgagcctgcctcttgagactgtggtaaaaactcactgagtcacacatatgccagccctaagcttaaagtaagggtggctttctagtgctggtaatagagaatggaaacaccagtaacttaactgggatcatagtttttattctctcttatacaagaattccacaggtcggcagtctagggctggtgcggtgattatacagtcgtaagggaataagttctcagtatctttgcccagtcatcccaggcatatgactttcatctttatagttgcctcatggtccagtatagctgcaggagcaccagccttcccagccacatcccaggcaggaagcaggaggaagggatgggggagaggcaaaaaggatacctaccatctatccatcattcctcatgaacttcacctgaagatcgttgcttagtcatgtggccacactttacctatctgcaagggaggctgagaaatgtcttggagctgggtacattgccaccctggtgaaaatcagagttctgttagcaagagggaagaggaggatggcctcaggataggtagctagcagtctctgccacgtgagctgacacactatccctggcaagatggaccacatgacttgctggtagatcacaggccctggaatcacaccgtcatgggttcaagccctcaccctactatgtattaggagggggattcttgggaacccacccccccccccg

SEQ ID NO: 82440 - DNA, 711 bp, Homo sapiens
  sig_peptide (31)...(166): this location contains the signal peptide sequence, MKIGVLFIPRDSFILLLLSASCTPRFWKRLTNRLQRQPTLLVTET, Run with SignalP
  misc_feature (308)...(140): similar to gi1458150 in the genepept database release 114, Run with FASTXY 3.3t00, default parameters
aactggtgtaagaagagaactaagttgttaatgaaaataggggtgttatttattcctagagattcctttatcctccttctcttgagtgctagttgcactccaagattctggaagaggttaactaacagacttcaaagacagccaactctgctggtgacagaaaccatactcaaaaaacctggcactggccactgctgccagtccagccaaacacacgcaatgaattgatggctgtgtcccaatgccctgcctatttcatccagcccaacctccttcacaggcacaaccctccagatgctaacacttccttcctttctaaagttctcattagacactttaggttagaaagcaagagcactctccaggagcacactatggaaatatactctatgaaaagctgtatggaaaagtgaagggaagcagctagaaatagtgttatcgtttttgctcatgagtctactagcatgaattcatatattaaattaaattcctagcatttgtcactttagaaggcacagtggacatggtgcttgaaagttctatataaaggggaagcacagaacactatcccagatggatatcagctgagtgtcagagctcaaacctctttggagatcatcaaacttcccaatcaccaacgaaagaactaattcctaggagagaaggagctacccaaggccaccccaggttattggtagagctgaaactccc

SEQ ID NO: 82441 - DNA, 628 bp, Homo sapiens
  sig_peptide (133)...(268): this location contains the signal peptide sequence, MLVPTFLSLVCDFSLFVLLLLGCLSFLLPPHLPCTSFPLHLWRLL, Run with SignalP
  misc_feature (130)...(326): similar to gi450755 in the genepept database release 114, Run with FASTXY 3.3t00, default parameters
ttcgagcttctcttcaatacccatatgtatctcaaagtaatgtaatcagcaaattagcagtgtaaaaatgctagataacttattctgaaatccacttccgaaatcatttgagcagctaagtttgaaaaactcatgttggtaccaacatttctctctttagtgtgtgatttttccctttttgtgcttctcctccttggctgtctctcctttctccttccccctcacttaccttgcacttccttccctctccatctctggaggcttctctctccttttatatcttttctggacttactgctgcttcttagttataaaatgaattgtataatttaaactgtttaataaatgtactttgttatttgtaattttcaagtcgggtactaaaacctttataacctttacccccctccttgaaccctctaaaattaacaaaatcatgttaagttttatataacaaggccttgggatatacttttttgttgaaattgctaggcaaatatgctcttaacaagtaattgcctggggcaggaggattgcttgagcccaggaatccgagtttgcaaggagctgtgatcaccactgcactttagcctggacaacagaaccagaaccttgctcaaaaaaaaaa

SEQ ID NO: 82442 - DNA, 718 bp, Homo sapiens
  misc_feature (1)...(718): n = a,t,c or g
  sig_peptide (182)...(317): this location contains the signal peptide sequence, MIYILCLSVQPHLCHSWLTVSQLGEFFKHSRVFSAIPHQDLCHFS, Run with SignalP
  misc_feature (201)...(298): similar to gi773351 in the genepept database release 114, Run with FASTXY 3.3t00, default parameters
gaactatctagacactgcactggcgttctgactggttgtgtctgactatgtctcattctcccattcatctattccattccattcttcacagaactggaagagtgaccttaaaatataaaacactctcttcctgaaaacgcttctgttgctttctttctaattatgggctgtaagtgtctccatgatctacattctttgcctctctgtacaacctcatctctgccactcctggctcaccgtgtcccagctgggagagttttttaaacacagcagagtcttttctgccatcccccatcaggacctttgccattttagcctctctgccctggactgttctttaaacggctacatctgtcttgtcctttaaagattatgttttcagagaagtctttcatgaccaccaccccaagtagaggaaggtcctatttttttttcgaggcctttttgtttttcctttcgggggacttaccacaatttgaattggcttctgtatatgatgctctacttggttttgttgaccctgctagaatgagcttcataaaagcaggtacaacatctcttcggagtcactgttctgtatctagtccctaaaacagtgaatggctcccacggaaaaaaanagaaagggttttttcttttaggcggccggagggttattttccttttggggggggaaaattttaacttgggccccgggcgccgccttttaaaaaccacc

SEQ ID NO: 82443 - DNA, 717 bp, Homo sapiens
  sig_peptide (71)...(206): this location contains the signal peptide sequence, MLPLFKHSPVRIFLFCLNTQHLSVRNNFVFNCVSPGILPISLCLA, Run with SignalP
  misc_feature (71)...(293): similar to gi1150483 in the genepept database release 114, Run with FASTXY 3.3t00, default parameters
ctcaggctgcctgctttttgtttgccatagctggtcctgttacctctcattttcctccctggaggcagttatgttgcctctatttaagcactcaccagtcagaatcttcctattctgcttaaatacccaacatttgtcagtaagaaataattttgtatttaattgtgtatccccaggaattttgcccatttctctttgccttgctttcaatcatgatagaagcacctttttcttttcaataatattattgttaaaagccttaattattttgtcttctctgcttcaaactaagtaattctgacttccttaatcttttatcacaggctctgttctccaaactttcagtcttttctgttgttccatattccattggtttctcctcctactcattcagaggcaaattaaggtggttttttaagttttggtttgtagactatgtcgttatgtgagaaatttactttaggtttgtattgtcaaccccatagcacaagccaggtacttaatttaggcattagtcagtgatatagattgaatatttgtccctgcgcaaatctcatgttgaattgcaatccccagtgttgggggtggcgcttggtggaaggcgaaaggatcaaggcgaccggcggcccccacccctcgggggcttttcttaacggttgtggaaattttgtgcccccccccccaaaaaaaagggtgggggaaacgtttccccccttt

SEQ ID NO: 82444 - DNA, 717 bp, Homo sapiens
  sig_peptide (95)...(230): this location contains the signal peptide sequence, MKPILLVLSSITRALLLQISSVSWQSCMWRAMPDCLQTDYPISLG, Run with SignalP
  misc_feature (68)...(197): similar to gi183017 in the genepept database release 114, Run with FASTXY 3.3t00, default parameters
gccttgttttgtaacaaatgtgaggactcaaaggaacacccagcctacctctctggtctcagcttttcccagtcatgaggagctcacttctcccatgaagcccatcctgctggtcctcagctctatcacccgtgccctccttctgcagatatcaagtgtgtcttggcagtcctgcatgtggagggcaatgcctgattgtctccagactgattaccccataagccttggctttcatcaaagaacaaggcttctagatgctctctgcccagtcactcaatgccatcactctgcctggccctgtgtttgccagggagcacagacacccatctgaggaatccatgccatgaggagtttatggtctgtgaagaatacaggcaggaatttgagaaggtgtcagactgcaggaaaggagctcactctgctggggtggatatctgaggcagagatctgctggtataggggaccaactggctaagtaagtttccccaagactcacggaatttccacaacaggtgatttaggatctgaaaacctgacaattatgggtacacatgaggggggcagcctgcacaatgttctccaggtgaggagactggtggttgagttgcccattggaaaggggttgggtagccctccgggttttctttccacacacccggacttgggagcttccctggggggggagcaagggaattcccctttcttgggcccccgccc

SEQ ID NO: 82445 - DNA, 727 bp, Homo sapiens
  sig_peptide (13)...(148): this location contains the signal peptide sequence, MRLININVLLQLVLGITRPQENYPAGPLSFVPASSSLFHTPVSSF, Run with SignalP
  misc_feature (117)...(292): similar to gi5102571 in the genepept database release 114, Run with FASTXY 3.3t00, default parameters
atttcatggtgcatgagactcataaacattaatgtgttacttcagcttgttcttggcatcactagacctcaggaaaactacccagcaggcccattgtcctttgtccctgcctcttcctccttatttcacaccccggtttcttccttcgctttgctgctgttttccagctgattaaagggaatttgccctgtttcatgtctacaaagtcaaaaggaaaccacccagtttacctgaactctgagcgccattctcagtgcaaagctctcttcctccctctgccccttatcgtaccggtgtgctcatctgtgaggtgccattctcagggtatatgaggatgtgcaaaagtttgtatctgcctatcctccttcaagcctgctccccaggtaagtccaatctgcctgcttggagccctgtgggctggataactcagggctagagacacagtggaagacgtagcttggttagccaagtgtccccattaggactcttgctctttttctgtctccagaggaaaggtggagctttcctgcccacagaacttagtttcattttcccattctttctaatggtggggttcctggccctacccctcctgggaaacacggggccctaaaggggtttttttggaacagcaatttttggaaaaaagggcctggtttttcccccaaccacagggcctttggaggctaaaggggaaaaacacacagggttggaaaacccttcaaaa

SEQ ID NO: 82446 - DNA, 689 bp, Homo sapiens
  misc_feature (1)...(689): n = a,t,c or g
  sig_peptide (197)...(332): this location contains the signal peptide sequence, MCLCWLSGCSKAWCNDCQIPLCKKTAQNPALCQLESSSQHVHMIS, Run with SignalP
  misc_feature (350)...(321): similar to gi1000374 in the genepept database release 114, Run with FASTXY 3.3t00, default parameters
acctggggtagtgaagccataagttgctgcaggctgcaaagaacagtgtgtgcaagagcaccaggtaggggaagaacgttgcaaaccaatggagctgtttctcgtaacagacagcgttgatgtaggagtactgctgtcagtggaggtcgttctggattccgagtgggatcggaaagtgatgtcccgggattagaggatgtgtttatgctggctttcaggatgttccaaggcatggtgcaatgattgtcaaattccactttgtaagaagacagcacagaaccctgctctgtgtcagctggagagctccagccagcatgtccacatgatcagcatgatgtaataccagaagacatcctaccatgattttaagatgtgataagatgactgggtgtctgctagtaaacattttagctcggttagtgtaatcatgactttcccttgtaggaggacagaaatataatgaaaaaatattaaataaatcagaaatgcttcaatcaggtgatctataccttttgaagtttcttagacataccatctctgtgtttgtcttcattcctatgaccgccggccaaatggaaccctgcantttatcctcaatgaaaaatttcttgctttggcccagggtcactgtggatgaggttatgaggggggtttgaaaaaaggggtttaagacctggggccctcagggc

SEQ ID NO: 82447 - DNA, 712 bp, Homo sapiens
  misc_feature (1)...(712): n = a,t,c or g
  sig_peptide (188)...(323): this location contains the signal peptide sequence, MCRCVQYILTCSHVPLLCTRLFITTGSDDQQWPMPIIRYFQVKPQ, Run with SignalP
  misc_feature (320)...(274): similar to gi633645 in the genepept database release 114, Run with FASTXY 3.3t00, default parameters
gagagactagcaccatgagcttcataccctgttgccagtttagttaatctgggagctacgttccccagactttctttccctgtatagttctagattagagttggccaaaagaggaatttgtgcaagtttgaaaggcaatagtcattactcactgaaggctgttttgtaatcacatacagagaaagaaatgtgtagatgtgtccaatacatcctcacttgctctcacgttcctctactctgcacccggctctttataactactggctctgatgaccaacagtggcccatgcctatcatcagatactttcaggtgaaaccacagaggtggtagctgcttacagccaacagcttctcagagacccttttccatgagcctccccttcattgttgcactttggccccttaggtagaattgacttatcagattcccttgcagatgccaatatttccacccatgccagggctttaagagaactgcttggtgaccttttctctaatcctttaaatccccatttccaacttttacttgcccagctccttctattattacatgagtttttatacccactaaaatttcattatctcccattattcataaaggacttttctttcccgatggaagcctggctggaaaaagttatttggttcccccaaatgaaaggctgtccgtncccaaaaaactttaaaatgtgggcttccgttttaggaatgc

SEQ ID NO: 82448 - DNA, 385 bp, Homo sapiens
  sig_peptide (180)...(45): this location contains the signal peptide sequence, MQSPRAPPGSSIITLNVHLCFITPWPLLCALITSINPFHFHTPLQ, Run with SignalP
  misc_feature (186)...(59): similar to gi62162 in the genepept database release 114, Run with FASTXY 3.3t00, default parameters
gactagagtgctgagttttcacagttgaatgctatggaactgcagaggtgtatgaaaatgaaagggattgatacttgtaatcagtgcacatagtaatggccaaggtgtaatgaaacataagtgcacatttagggtaattatgctgctaccaggtggggccctggggctttgcatgtatagaagctgcttgaggtggcggatgtgcagcgaggaatactgcagcaccatctggtagattctcattttctcattaattcttctggcccctaagtctgggctacattgactttgaacagcacttcatctgttcagtatctcatctcattttagatgggagttgctctcaacagtggtattgatatgatgtaattcacaatctcggcct

SEQ ID NO: 82449 - DNA, 422 bp, Homo sapiens
  sig_peptide (45)...(180): this location contains the signal peptide sequence, MLRITTAWLPSAFPCLSPASSLGGEQRCLPILHIGKLRPRGNGDS, Run with SignalP
  misc_feature (208)...(62): similar to gi4128135 in the genepept database release 114, Run with FASTXY 3.3t00, default parameters
cccacgcgtccgggggcctcgggccgtcggtctactcatttctgatgttaagaataacgacagcctggttgccaagcgcttttccgtgcctgtctcctgccagctctttgggaggcgagcagcgttgtctccccattttgcatatagggaaactgaggcctagagggaacggggacagttttgtcaagctacacagcctaacgctctattccagggctgtgtgggctagagaggatggtcgtgagggccgttggaccattggtgctaatggctgcctcatcatattacctggtgaagatgagcctagggagatgaaaggtggttcccatatagagcaaatgttctttacattgtggggtcgcaggcccctttgctatctgtttgaaagcagtggaccttcttctcagaaaaatgcacataaa

SEQ ID NO: 82450 - DNA, 760 bp, Homo sapiens
  sig_peptide (302)...(437): this location contains the signal peptide sequence, MIFWLNLSHLFSSYVYISSSLNNFILTSCLILTLFSLSLIRYTSR, Run with SignalP
  misc_feature (164)...(25): similar to gi52019 in the genepept database release 114, Run with FASTXY 3.3t00, default parameters
aaagaatatttctttcttactatttataccagccatctccaccttcaccagaccgataataaaagcatgctttcttggagatctcttctaaagagaatagctgcattaccagcatccattggatttctttctgtggcaggtctctatcaataatatccttcccatttttctgtctcaaagactgcatgcaagaaaattatatacttaagcaaaaaattcttgatcattcgggaatgaaattcttctctgagtatggcagtatgcctgcttctgattaaattcacttttaatagtagctgtgatgatattttggttgaatttaagccatttattttcctcttatgtctacatttcttcatcacttaataattttattttaacttcctgcctcattcttacacttttttctctctcacttatacgatatacttcaaggacgtgaacagttacaatacccagtctttcttacctgctgtcttgcctgtggggtcactcactcaattgtgttttaaaattactgaataactacttcatgccaggccctgcaccaggctctgtgagaggacatgaaggattattgcctcttgtaggagattacagatgtgcatatcattaattatgatggggtatgataagtattacaatgacaaaagctatgaataaagtgctacaaggaacagaagcagggataattaaatccatttcagtggaatctatttcaatgtacaatagtctcccctaatctgcgagatatgggaag

SEQ ID NO: 82451 - DNA, 406 bp, Homo sapiens
  sig_peptide (54)...(189): this location contains the signal peptide sequence, MLWAWVICFAVDCPGSLVFKWIGKREEYCPRYKGKAAGSGGRIKE, Run with SignalP
  misc_feature (348)...(388): similar to gi142384 in the genepept database release 114, Run with FASTXY 3.3t00, default parameters
agtgattgacgaggagtgggttaagtgaccacaagtcagaatttttggtgctgatgctttgggcttgggttatatgctttgctgttgattgcccaggaagcctcgtttttaagtggattgggaagcgtgaggaatactgccctaggtacaaagggaaggcggcaggtagcggtggacgaattaaagagcttcatgagcttgtgagtctccactgccctaaactggaggggatcgtcgtacgtagagacaggcatgggcgtttctgcataacggatcctcaaaacagccctggatggtggcctatgagtagtggttaagagcacgggtttggcgtcacagttatgaagccgggttctgctgacttgagacctggaggaatgccttgagctctgacttctgtgtcctt

SEQ ID NO: 82452 - DNA, 430 bp, Homo sapiens
  misc_feature (1)...(430): n = a,t,c or g
  sig_peptide (187)...(322): this location contains the signal peptide sequence, MKCGPGLAFNCFSLQLRWFPTFIKCDQLPSLSSLVCCMDTLYSPL, Run with SignalP
  misc_feature (334)...(234): similar to gi5852605 in the genepept database release 114, Run with FASTXY 3.3t00, default parameters
aaatttggtaatctcatcctgggggaaatcagaactatgttgggcttgcattgtacatgttgctttttggtttgaatatagcggtggattggatgggggcaggcaagaggattcatcctatgatcttttcagagcctctaggtcttgcctaagtcctgcctctgtccttttcaacaggaagcatcaatgaaatgcggcccaggcctagcgtttaattgttttagtctacaacttaggtggttcccaaccttcataaaatgtgaccagcttccttctctgagttccctggtgtgttgtatggacactttatactcacctcttccaaaccacacacagaacagtttgttgaattcatggagagatgatgacccaaaacagtggtaacagttacattaagagccaagctttttttgaactttggtagtttnag

SEQ ID NO: 82453 - DNA, 416 bp, Homo sapiens
  sig_peptide (28)...(163): this location contains the signal peptide sequence, MMGGLAPSIINFFFFRICLIFKNRLGVSSKILHLAIPFYEHINHS, Run with SignalP
  misc_feature (40)...(162): similar to gi927009 in the genepept database release 114, Run with FASTXY 3.3t00, default parameters
gccttcctgcgtcgacccacgcctccgatgatgggcggactggctccatcaataataaactttttcttttttagaatttgcttgatttttaaaaatagattgggggtctcaagcaaaattcttcatcttgctatccctttttatgagcatattaatcacagttggtttactgcccaataaccctaatatgtaagacacatatggggttatttttcctgcgagattttcttgcctgcgttttctcttggacttgtaacttggaatacttactattttttattgaatactgtagagcttatattaaaacatgcggagactttggatgataacatcttcttctatagagggttcattctattctctggcatgcatataaagtaggggctggatgtttacctccattcaatcaagggctg

SEQ ID NO: 82454 - DNA, 651 bp, Homo sapiens
  sig_peptide (255)...(390): this location contains the signal peptide sequence, MFALFEGISNKLLVLFPLLLFFPFMKMVIHSSALQRAGTGHSCGS, Run with SignalP
  misc_feature (306)...(417): similar to gi3150518 in the genepept database release 114, Run with FASTXY 3.3t00, default parameters
gtgagtcgcccacgcgtccgcgataatcccttccagtgccttccactgatacagagcttgaaagcaacatgattcaacactgtgccttttctgtgccctggatgagctgccaaatatttgagaaagaatcagcccatgaataggatatcagatcaaacttttgttgaaacaagttcttttttctatgcattccattcaaaacaacaaaaccaaagatccaaaccgtcatatattatctaaaaattattcacaaaatgtttgccttgtttgagggcattagcaacaagctgcttgtcctttttcccctcctcctattctttccattcatgaaaatggtgattcatagcagtgccctgcagagagcgggcactggccactcctgtggcagcccacctctgccacgcgcttgtgggaaaaaaagccctgcagtgaatcaagttcattgagcaaaatctaggcgaaaatatttgtctggaaatctaacacgcctctctctgtgcttgtctggacagaactagggtggacttaacatttttttcctttttgtcagaaatgtgtgtagaaaaattgcatatttttgcaaaagagtgtcacagaggtgggaggcggaatttggggggatttttaagctttcagatcggtgtcaccact

SEQ ID NO: 82455 - DNA, 630 bp, Homo sapiens
  sig_peptide (408)...(273): this location contains the signal peptide sequence, MCTNIRCWPLPQLLAIHLTNPSPCSASKAGSHRQWALAAAALLVK, Run with SignalP
  misc_feature (205)...(115): similar to gi1899113 in the genepept database release 114, Run with FASTXY 3.3t00, default parameters
ctattttaataatgcaagctttatggttcattgaggtgcctatgaggactgtgctgtgcgatctcagcctgttcagagcctttcagacaagctttcctggcccttccttgtgtctgtttcttgaagactagggaaagaaagtggagagggatgcttctcatttgagtttctagaaggtcttcgttggaaatcattccccttccttatcagagttgggcagtagcaagggcaaccttctcagggaggacggctagataacagtggaagccctctttaccagcagggccgccgcagcaagagcccactgcctgtggctgccagccttgctggctgaacaaggagaagggtttgttaagtgaatggctaataattgtggtaatggccaacatctaatgttcgtacacattgagccaggcagaatgctaagtgttttatagggattgtctcaactcacaaaagaataatagctagtagcaccaactgtatgccaggcactgttctcagagcattagatacattatattgggctaatcatgagaacaacctagtgagaccatgccattctttgtcctgttttacagatgaggaaactgaggcttagagaaaccaaataactttctcattgtcact

SEQ ID NO: 82456 - DNA, 542 bp, Homo sapiens
  sig_peptide (147)...(12): this location contains the signal peptide sequence, MNFLVLFLTILGFTRGLRAAMMPRRRWLPPPPTRPPTRPRTRGST, Run with SignalP
  misc_feature (77)...(484): similar to gi200774 in the genepept database release 114, Run with FASTXY 3.3t00, default parameters
ccgggtcgacccacgcgtccgcggacgcgtgggcggacgcgtgggcggaggtggcagccatctccttctcggcatcatggccgccctcagaccccttgtgaagcccaagatcgtcaaaaagagaaccaagaagttcatccggcaccagtcagaccgatatgtcaaaattaagcgtaactggcggaaacccagaggcattgacaacagggttcgtagaagattcaagggccagatcttgatgcccaacattggttatggaagcaacaaaaaaacaaagcacatgctgcccagtggcttccggaagttcctggtccacaacgtcaaggagctggaagtgctgctgatgtgcaacaaatcttactgtgccgagatcgctcacaatgtttcctccaagaaccgcaaagccatcgtggaaagagctgcccaactggccatcagagtcaccaaccccaatgccaggctgcgcagtgaagaaaatgagtaggcagctcatgtgcacgttttctgtttaaataaatgtaaaaactgccccaaaaaaaaaa

SEQ ID NO: 82457 - DNA, 1282 bp, Homo sapiens
  sig_peptide (148)...(283): this location contains the signal peptide sequence, MWVCSFLIFLPLESISPNPIKKSATPHPPSRSAVLLWDCCLALIP, Run with SignalP
  misc_feature (813)...(713): similar to gi4138608 in the genepept database release 114, Run with FASTXY 3.3t00, default parameters
attaggattaaactgttagaagcttcttctgttctcctagccaactggatccccacatgcctatgaagaaaactgtcagattgtagtctggttcttactcctacaccccgtgatatagttctagaatccccactgttgttgttcaccatgtgggtctgttccttcttaattttccttccgcttgaaagtatcagccccaaccccataaagaaaagtgccaccccccatccccccagcaggtcagcagttctgctgtgggattgctgtctggccttgataccagctgagactggaaatcagggacagcccatatggttccaaaccccacagaacccaactgctttaacgtagctgtttgcttgaatggcctattttagcctcccttttccagagtgactaattggggattcttatcaacaaagggtataatgaatgttaagggcccagccaagctagactcgacttaagcccagaaggattttgctgctgcttggataatagattttccctgagtgaattagtacgcccttttagaatgcctagggcctggcccacatccacaccctatcactccctcaaataggatgtgaagtgaaattgtccccaattgaagtgaatccatttgtctgtcaccaggaaaacttactgaagacacattactgcagtaggggaaatgctccgattgtggactggggccatgcagtgtgctgtgccagaatgccttccatctggaagcagctgagtaaactctgtatggtttactttagttaagttacattctattctcagatacaaaactaaaacaatccttgagtatattttgaagcatttatgaagttgtggggaggggcaggcagtgaggaggcttcgaaagtatttccagttagtttttccatctctgctcgaagcccaagaagtccacctccagtatttgttaagataataagacttaatgaagtgtaaagctgaagacgcctaagagttcccaaagaagcatgtgtattcttaaaatgtcaaaatagccaagggattggttgattaaaaagggttcaaggtatatgtgataaattttttaaagatgattttgtgctgtgaagttttaataatgttgacgagaaagaaacggcttgaattttatacattgtcagcttgcaagtcttcatgggggtttttcattctttttaggagcacaagtaatgtagccacagtcactgcagaaagaatgtctttgagagggacattcttgtcatttttattagttgttcaacattgccacagaagt

SEQ ID NO: 82458 - DNA, 860 bp, Homo sapiens
  sig_peptide (394)...(529): this location contains the signal peptide sequence, MLFPFLLFLPSILKLCWEMVVLVSLHSAKYLQDLPRSPKQPILSC, Run with SignalP
  misc_feature (581)...(555): similar to gi191769 in the genepept database release 114, Run with FASTXY 3.3t00, default parameters
aaccccgcgcggcgttcacaaaacatgagtaccttaggcagaagggttccaacgagagagtcatggctccagaaatgtcatggcacttccgagcaatttgacttgtgctgggagaacactaggaccacttctgacaatgaccaccatagcttgcctctgtgatgcatgctgggcacagccccatgcccctcccagataccctgggcagtcctgcaggtggttaagtgttcttcttataaggcagaaacctgagactcagaaaggggaggtgatcggcccagggtcacacagtttaataactggcagagctgggctttaaacccagtctgcacagtgctaaagctcaagttgccgtgatactgctcttcatggtaacagcatgctttttctttcatgctttttccttttctcctcttccttcccagcatcttaaagttgtgttgggaaatggttgtgctagtttcccttcattctgctaaatacttgcaggatcttccaaggtccccaaaacagccaatcctgagttgtttctctaggccagtcttctgagatgcagcatgtagcttcttggtggtactgaaagaattttagaattttagatgtgcctggatgtagcacctaaattaaattaccatcaccattatctattgctgagtaaccaaccacatatattaacttcatggcttaaaacaactatgggaatcattttgctagcacaagtataatttgccaaggcttaatgggaataactctggccccaaggcataactggcgtgtatagactggagctggtggggccctggacctggttttcttttgggtggcccctgggtcctgggcttaccacaaatgggggaacc

SEQ ID NO: 82459 - DNA, 400 bp, Homo sapiens
  sig_peptide (23)...(158): this location contains the signal peptide sequence, MGASLALGFTEVVLVLGFTVKLGAHLTLLPPLGGHLSPYCAAQAW, Run with SignalP
  misc_feature (158)...(282): similar to gi516535 in the genepept database release 114, Run with FASTXY 3.3t00, default parameters
atctggcctggtgcctgggtccatgggtgccagcctggcactggggttcactgaggtggttctagtgctggggttcacagtaaagttaggggctcacttgactctccttcctccacttggagggcatctatctccatactgtgctgcacaggcttgggaaggggtgaaacaattaatgtgcaactgtagttcctatcctcttcaatgcatcatttgttgtatctatgctacacccgggtgctacaatctatcatttggaatccttagctcttgtgaaggtatttttgtctatgagtggttattcgaaatgcttctgtgaagaaacaaatgctgaaaactactattctgacattttactaacatcactcttcctatttaacttttaaatatgatgaagtca

SEQ ID NO: 82460 - DNA, 527 bp, Homo sapiens
  misc_feature (1)...(527): n = a,t,c or g
  sig_peptide (283)...(418): this location contains the signal peptide sequence, MPWLFLGGKLFYAVIKWALMILQSYIXVERRKLASPTRLDSYLGS, Run with SignalP
  misc_feature (187)...(258): similar to gi2690057 in the genepept database release 114, Run with FASTXY 3.3t00, default parameters
gttcgatccacgcgtncgacagaacaacagaagctcaactcatggcccattcagagtgccgcaacataagaatcacatcctggttgaagatgatctgtgcccctgtcacagttgatgccatggctgagaccaatatgttctgttcagatttgaaaaaagcagtttccatgtaataagtctgatgccataattaaaacatgtagcaactgggtccatgcctgccttttacacgaatcctcaagagcgacatttagatgagcatggacatctgaaatccacttgatgccatggctctttctaggagggaagctcttttatgctgtcattaaatgggcacttatgattctccaatcatacatcanggttgagaggcgcaagcttgcgagtccaactcgccttgattcatatcttgggtccatacatggctttagccctgttgtttaacctcgtttagcctagctttccctgtctatataatgggcataactattattatcatgtatctcaggcctgtcacatgatagtct

SEQ ID NO: 82461 - DNA, 419 bp, Homo sapiens
  misc_feature (1)...(419): n = a,t,c or g
  sig_peptide (182)...(317): this location contains the signal peptide sequence, MCCELLAVVIATLIIKIGLVVLLYFIKLLIHIEFIKRHSILKCES, Run with SignalP
  misc_feature (182)...(337): similar to gi4049695 in the genepept database release 114, Run with FASTXY 3.3t00, default parameters
tttcnccccgaatnnaaggtcgacccacgcgtccgcctttgggttatcttctctattaagtgtggatccctgaaaaatggcataccctggtggtttttctagcccctgctgaaatcctttgaaggaatgtacttatttgtcaagattcgtctaaaaatgtggtctccagaaatgaacatagatgtgctgtgagctccttgcagttgtgattgcgacactgataattaagattggtttagttgttctgttgtacttcatcaaattgttgattcacattgaatttatcaaacgtcattctattctaaaatgtgaaagtatttttaacttaaatgtaggaattcgcatgtatccaggacaagtaaatttttgtgaaacattgcagatgttagatggatttgggagaattttccaaactaagt

SEQ ID NO: 82462 - DNA, 855 bp, Homo sapiens
  sig_peptide (380)...(515): this location contains the signal peptide sequence, MVCLLLLFSSYIICKQMTILYLNIYILRRGLTLSALPRNVSLSNM, Run with SignalP
  misc_feature (730)...(586): similar to gi3204434 in the genepept database release 114, Run with FASTXY 3.3t00, default parameters
gggtagttccccttaaggctgtctccgatttttcctttctcctaatttgagggaagttcatgagtcatcaaaattcagttaaagatgtgtctgcttaaaacattctctgcgaagttccatcttggtaatatgatctcattccacatcaagggttcctccgttttttcgggcattcttcagtgccttttattagagttttctgctttctccatcaaggccttgtaactaggtcagtaattcccaggcactttgtagtttttgtgtctgggtagctggagtcttcatctctgtttcttttttgtatttgcttattgttagtggaaaggtggttgctgttggtttcatatttttgatatttgcatgtggtagtctagttgtgatggtctgtctgttgcttctgttttccagctatatcatttgcaaacaaatgacaattttgtacttaaatatatatatattgcgaaggggcttaacactttctgcccttcccagaaatgtatctcttagcaatatgactcgtagaacctaacagttccatcacaggaggaagtgttctgcagtaactgtaatttggcctttgatggattcatctgttataaatccttctgcagtgggtgagtccagcgggcaggtctggactccgtggacaggcagcgggcacgagacttggccgtggtggacactgcaggccgcaggtggactctcctcagagaagctgcagtttgggtctcacaggcctctcagctgactggttgaagcccccacattctcaagagtgatcgctacttgaagtccattgattataggtgttaaccacatctataaaatgccttcacaggaacacccacagcagtg

SEQ ID NO: 82463 - DNA, 861 bp, Homo sapiens
  sig_peptide (180)...(315): this location contains the signal peptide sequence, MDHAKSLFYFLLLTFNYLCLQMLLPGIGKEKSREDGIWFLDQNVR, Run with SignalP
  misc_feature (14)...(98): similar to gi46719 in the genepept database release 114, Run with FASTXY 3.3t00, default parameters
cggacgcgtgggacttattgagtgcccaatctgcagacacacatgcctaacactcttctccaaagaatgtacaagaataacacatttgctggtgtggatggcaggtgaaaaagaattactgatgtagcgtgtaggcccttcaacatattcacggccaattccggattatcccagcacagatggatcatgcaaaatccctcttctacttcttactgctgacctttaactatttgtgtttgcaaatgcttctaccagggattggaaaggagaagagcagagaagatggaatttggtttcttgaccagaatgttaggtgttctggtaaaaggtttggtggttttgccacttaagagtacagggagaccgtaggattctctctggatttgaacttgtccgggatgcccaatttagccttgaatatgaacaatcagaaagaaagcaaactgacgcaatgcaaagagcttagtttggaatttgctttattgggttgaaattctattcgcttgtgccttgagcaagtccctcaacatatctgagccccagtttcctcctttttagaagggcaaggaatgagcttctttcaagccagtaacatatgaagcacccagcttagccctttggatgggtggaagagttactaaatggtacttgcatcgggcggggggaacacatcctccatacagggagaagaaggacctgcttccgggaaacgttcccatttttctcctcagggatggccccgcttaacttgagtgggggctcaaaccatccgggtgcggtggcgaacgcatgggcgcactccatttatcctctaacgggagctaatgagtctttgactactcgacactatgggcttgcatc

SEQ ID NO: 82464 - DNA, 3032 bp, Homo sapiens; identical to SEQ ID NO: 82283
  sig_peptide (104)...(239): this location contains the signal peptide sequence, MACRWSTKESPRWRSALLLLFLAGVYGNGALAEHSENVHISGVST, Run with SignalP
  misc_feature (104)...(2683): similar to gi5524734 in the genepept database release 114, Run with FASTXY 3.3t00, default parameters

SEQ ID NO: 82465 - DNA, 404 bp, Homo sapiens
  sig_peptide (47)...(182): this location contains the signal peptide sequence, MRKLVLETTLRVWLDYLSLLKITYDVNQPSEQKSGIEFGKKQQKY, Run with SignalP
  misc_feature (134)...(217): similar to gi1122338 in the genepept database release 114, Run with FASTXY 3.3t00, default parameters
gaacttaaacatttggaaaattctgagcctttatgtattgcaatatatgaggaagcttgttctggagacaacactaagggtgtggctggactatctgtcactacttaagattacttatgatgttaaccagccatctgagcagaagtcaggaatagagtttggaaaaaagcagcagaaatattaccagtttggaccaaagagaacaggacagtatggtatagttatttggctgcaaacatggtttatctttcaagaaaagggaagaacgaccctgagggtgattcagagataaccagggctgccattcctactataggcccaaagtgcacaggcctggagggtaaggctgcctctaccttggtttcaaaaagtgagactgacatccaacagagccacataggtgg

SEQ ID NO: 82466 - DNA, 846 bp, Homo sapiens
  sig_peptide (230)...(365): this location contains the signal peptide sequence, MSNRTRIRTHVNLCCFCRYTTPKMSFSSACVSLCLMLLFCSPPLL, Run with SignalP
  misc_feature (233)...(380): similar to gi1196713 in the genepept database release 114, Run with FASTXY 3.3t00, default parameters
attcagctaatttggggctaccagaaaatgctctgccaggcctcctggataaatggggagtcagccgtgacagctgccgcttgcaagtgtcttcattgtgccagtcgctcctcacacatcctttcatttaatcctcacattatgaggtgtaatgtctttaataagcttattttatgggtaggaaattagggttatgaggttaaatatcttgtcctagatgacaaagctaatgagtaatagaaccaggattagaacccatgtaaatctttgctgtttctgccgctacaccactcccaagatgagtttctcatctgcatgtgtgagcctctgcttaatgctgctgttttgttctcctccactcctgcttttgctcctgtcctcatttgtttaatgactgggttcatttccttgatcatatttttttttccttctcctatttgaatgatgggggcacagttggccagttctttgatactgagctgtaacaatcaccatccttgcttgaagaagtccttgcttctttgaatctctcatttggcttgacatcaaagctgaaaaaggttactgatgacggtatggaccttttcaatatgcaaattatgtaatggtacaaacgactttatatcagtataataaagtgcttaccgattcatttttattgctgcctgtccatacgcgaagctgtaaaaaagaatattttaatttatgggaacgactcacatcttggaaaatgaagggaaaaaactgaatcccaagggccacctctgccctagccgggacttctggggacagggctggaccccggggacagcttcctcggctcacacgggccgcctgcgggtaccc

SEQ ID NO: 82467 - DNA, 410 bp, Homo sapiens
  sig_peptide (259)...(394): this location contains the signal peptide sequence, MCLVYAQNSSFQMILLVLLHCSSPECNIRAESRLVQSVFGKEVVA, Run with SignalP
  misc_feature (214)...(110): similar to gi4049735 in the genepept database release 114, Run with FASTXY 3.3t00, default parameters
aatgataattttggaggaaatgaaacagatgaaagtgaaataaattattttcatattggctcagtgtagctgtggaaacctttcagccctgagcctacaaaccttcctgtttgactggatatgacattaccaggagttttactttcctgcctttattgtccctggagagaaaaaagaaatatgtcttttccacagctagacatggaaggttcaaacaaatataaaggacccctgagttattaacaattccatgggaacatgtgcttggtgtatgcccagaatagttcctttcaaatgattctcttggtgcttctgcactgttcttcaccagagtgtaacataagagctgaatcaaggcttgttcagtcagtgtttggaaaagaagtggtggctggatgctggtcagctgg

SEQ ID NO: 82468 - DNA, 3629 bp, Homo sapiens
  sig_peptide (97)...(232): this location contains the signal peptide sequence, MPARRLLLLLTLLLPGLGIFGSTSTVTLPETLLFVSTLDGSLHAV, Run with SignalP
  misc_feature (97)...(3030): similar to gi3300094 in the genepept database release 114, Run with FASTXY 3.3t00, default parameters
ccggctcgacggctcggtcaccgcctcgctgtcgtcgcggcgcccccggccgtcctctgtccgtaccgcccccggagccagggccgagtcctcgccatgccggcccggcggctgctgctgctgctgacgctgctgctgcccggcctcgggatttttggaagtaccagcacagtgacgcttcctgaaaccttgttgtttgtgtcaacgctggatggaagtttgcatgctgtcagcaagaggacaggctcaatcaaatggactttaaaagaagatccagtcctgcaggtcccaacacatgtggaagagcctgcctttctcccagatcctaatgatggcagcctgtatacgcttggaagcaagaataatgaaggcctgacgaaacttccttttaccatcccagaattggtacaggcatccccatgccgaagttcagatggaatcctctacatgggtaaaaagcaggacatctggtatgttattgacctcctgaccggagagaagcagcagactttgtcatcggcctttgcagatagtctctgcccatcaacctctcttctgtatcttgggcgaacagaatacaccatcaccatgtacgacaccaaaacccgagagctccggtggaatgccacctactttgactatgcggcctcactgcctgaggacgacgtggactacaagatgtcccactttgtgtccaatggtgatgggctggtggtgactgtggacagtgaatctggggacgtcctgtggatccaaaactacgcctcccctgtggtggccttttatgtctggcagcgggagggtctgaggaaggtgatgcacatcaatgtcgctgtggagaccctgcgctatctgaccttcatgtctggggaggtggggcgcatcacaaagtggaagtacccgttccccaaggagacagaggccaagagcaagctgacgcccactctgtatgttgggaaatactctaccagcctctatgcctctccctcaatggtacacgagggggttgctgtcgtgccccgcggcagcacacttcctttgctggaagggccccagactgatggcgtcaccatcggggacaagggggagtgtgtgatcacgcccagcacggacgtcaagtttgatcccggactcaaaagcaagaacaagctcaactacttgaggaattactggcttctgataggacaccatgaaaccccactgtctgcgtctaccaagatgctggagagatttcccaacaatctacccaaacatcgggaaaatgtgattcctgctgattcagagaaaaagagctttgaggaagttatcaacctggttgaccagacttcagaaaacgcacctaccaccgtgtctcgggatgtggaggagaagcccgcccatgcccctgcccggcccgaggcccccgtggactccatgcttaaggacatggctaccatcatcctgagcaccttcctgctgattggctgggtggccttcatcatcacctatcccctgagcatgcatcagcagcagcagctccagcaccagcagttccagaaggaactggagaagatccagctcctgcagcagcagcagcagcagctgcccttccacccacctggagacacggctcaggacggcgagctcctggacacgtctggcccgtactcagagagctcgggcaccagcagccccagcacgtcccccagggcctccaaccactcgctctgctccggcagctctgcctccaaggctggcagcagcccctccctggaacaagacgatggagatgaggaaaccagcgtggtgatagttgggaaaatttccttctgtcccaaggatgtcctgggccatggagctgagggcacaattgtgtaccggggcatgtttgacaaccgcgacgtggccgtgaagaggatcctccccgagtgttttagcttcgcagaccgtgaggtccagctgttgcgagaatcggatgagcacccgaacgtgatccgctacttctgcacggagaaggaccggcaattccagtacattgccatcgagctgtgtgcagccaccctgcaagagtatgtggagcagaaggactttgcgcatctcggcctggagcccatcaccttgctgcagcagaccacctcgggcctggcccacctccactccctcaacatcgttcacagagacctaaagccacacaacatcctcatatccatgcccaatgcacacggcaagatcaaggccatgatctccgactttggcctctggaagaagctggcagtgggcagacacagtttcagccgccgatctggggtgcctggcacagaaggctggatcgctccagagatgctgagcgaagactgtaaggagaaccctacctacacggtggacatcttttctgcaggctgcgtcttttactacgtaatctctgagggcagccacccttttggcaagtccctgcagcggcaggccaacatcctcctgggtgcctgcagccttgactgcttgcacccagagaagcacgaagacgtcattgcacgtgaattgatagagaagatgattgcgatggatcctcagaaacgcccctcagcgaagcatgtgctcaaacacccgttcttctggagcctagagaagcagctccagttcttccaggacgtgagcgacagaatagaaaaggaatccctggatggcccgatcgtgaagcagttagagagaggcgggagagccgtggtgaagatggactggcgggagaacatcactgtccccctccagacagacctgcgtaaattcaggacctataaaggtggttctgtcagagatctcctccgagccatgagaaataagaagcaccactaccgggagctgcctgcagaggtgcgggagacgctggggaccctccccgacgacttcgtgtgctacttcacgtctcgcttcccccacctcctcgcacacacctaccgggccatggagctgtgcagccacgagagactcttccagccctactacttccacgagcccccagagccccagcccccagtgactccagacgccctctgagcgagggcggcccctctgttctggtggccccagctgtgactgagggcctggtcaccacaattagagcttgatgcctcccggctttgcagggagaccaggcttcccaaaccaagtgccttgagctgcctgctctgcagcccacagaggacagtgctgaccccaggaagtgggagaagtggcccctcgtgacctacagggaactgggaagatgctggccccaaaagccttacggtcatgatgtctgcaaaggagggcctcagagacagcgcgagtagcacccccagccatctactggataaacttgcttcagactttttaaattcctgcttaatgtcagtctacaggcctttcaggaagggagaggagggaatcgtacattttgcttgcgtgctgggacagctaggctgagatgcaccaagtacagccttcactggagaccggaattgagaggtgggggatgctgaggagggggaggacggagttcagagggtgtcgtcctgcagtatgagatttctcattgatcacagatgtgcccagagtagcccaggtcactgttaactagtgtttctgcagaggcagcaggagccagcccggaattc

SEQ ID NO: 82469 - DNA, 1859 bp, Homo sapiens
  misc_feature (1)...(1859): n = a,t,c or g
  sig_peptide (47)...(182): this location contains the signal peptide sequence, MASMAAVLTWALALLSAFSATQARKGFWDYFSQTSGDKGRVEQIH, Run with SignalP
  misc_feature (59)...(997): similar to gi2695742 in the genepept database release 114, Run with FASTXY 3.3t00, default parameters
acctggtggaattcggcctccctcccctgtcttctcagagcaggtaatggcaagcatggctgccgtgctcacctgggctctggctcttctttcagcgttttcggccacccaggcacggaaaggcttctgggactacttcagccagaccagcggggacaaaggcagggtggagcagatccatcagcagaagatggctcgcgagcccgcgaccctgaaagacagccttgagcaagacctcaacaatatgaacaagttcctggaaaagctgaggcctctgagtgggagcgaggctcctcggctcccacaggacccggtgggcatgcggcggcagctgcaggaggagttggaggaggtgaaggctcgcctccagccctacatggcagaggcgcacgagctggtgggctggaatttggagggcttgcggcagcaactgaagccctacacgatggatctgatggagcaggtggccctgcgcgtgcaggagctgcaggagcagttgcgcgtggtgggggaagacaccaaggcccagttgctggggggcgtggacgaggcttgggctttgctgcagggactgcagagccgcgtggtgcaccacaccggccgcttcaaagagctcttccacccatacgccgagagcctggtgagcggcatcgggcgccacgtgcaggagctgcaccgcagtgtggctccgcacgcccccgccagccccgcgcgcctcagtcgctgcgtgcaggtgctctcccggaagctcacgctcaaggccaaggccctgcacgcacgcatccagcagaacctggaccagctgcgcgaagagctcagcagagcctttgcaggcactgggactgaggaaggggccggcccggacccccagatgctctccgaggaggtgcgccagcgacttcaggctttccgccaggacacctacctgcagatagctgccttcactcgcgccatcgaccaggagactgaggaggtccagcagcagctggcgccacctccaccaggccacagtgccttcgccccagagtttcaacaaacagacagtggcaaggttctgagcaagctgcaggcccgtctggatgacctgtgggaagacatcactcacagccttcatgaccagggccacagccatctgggggacccctgaggatctacctgcccaggcccattcccagctccttgtctggggagccttggctctgagcctctagcatggttcagtccttgaaagtggcctgttgggtggagggtggaaggtcctgtgcaggacagggaggccaccaaaggggctgctgtctcctgcacatccagcctcctgcgactccccaatctggatgcattacattcaccaggctttgcaaacccagcctcccagtgctcatttgggaatgctcatgagttactccattcaagggtgagggagtagggagggagaggcaccatgcatgtgggtgattatctgcaagcctgtttgccgtgatgctggaagcctgtgccactacatcctggagtttggctctagtcacttctggctgcctggtggccactgctacagctggtccacagagaggagcacttgtctccccagggctggcatggcagctatcaggggaatagaagggagaaagagaatatcatggggagaacatgtgatggtgtgtgaatatccctgctggctctgatgctggtgggtacgaaaggtgtgggctgggataagagagggcagagcccatgttttctgacataactctacacctanataagggactgaacccttccaactgcgggagctccttaaacccttctggggagcatactgggggctcttccccatcttcagccccttcctctgggttccc

SEQ ID NO: 82470 - DNA, 594 bp, Homo sapiens
  sig_peptide (314)...(449): this location contains the signal peptide sequence, MLSIRKNHKEDSLFLVHFFLLYFHYIGFLFLFMGTSNQETDWNKN, Run with SignalP
  misc_feature (266)...(206): similar to gi5360534 in the genepept database release 114, Run with FASTXY 3.3t00, default parameters
tgggtcatggttttggcagcgtggaacctgggacatagaggcccccttgatacggctgttcagcaaaccaactttgttgtaaatatttagataaaaatgggctttagagcagccacatctgaagacccacaaggctgaatgttacacagggggagcaccattatttaatctgaacatctggaatccatcatgtgtagggaaggacaagatgtatccctcatttttaaggccaacctccatggataacaattgatggcatggagaccacatgtgtcacagggtgaaagaagaattggatacttaagaatctggtatgttgtcgattaggaagaatcataaggaggactctttatttctggttcatttttttttactttatttccattatattggatttttatttttatttatgggcaccagcaatcaagaaacggattggaacaaaaacccatcctatttggatcaggagcatttgaaggaaagaacgaaatggcacttctcaaccttttttaggggaaaacttctctttgctataactacttgaagagttcaccagaaaaagtttactgaaaaaccccgaaccttccttaagga

SEQ ID NO: 82471 - DNA, 1065 bp, Homo sapiens
  sig_peptide (802)...(667): this location contains the signal peptide sequence, MHSCWTFQDLSLVQLCLPLSCPQQGPVGPGGFLLPVSQVGPPKPA, Run with SignalP
  misc_feature (482)...(701): similar to gi667063 in the genepept database release 114, Run with FASTXY 3.3t00, default parameters
cagcatccgagggacgcggccctcctgcagcccccagccacaccccctgcgtggcccgccttgtcccagaaacgctgacatgacggctgagtgccagcctcgggttttccacgccaggaaccctggaggggaggcggagtgtgccagtttttagacctgtccacggcagcgttgagagggatggaggggacggggtgctggtgtgagtcgcttcagggagtccgccccacacgaagccacctccccagaggccacgccaacagcaccgcccctgctcccctgctcccctgctccgacctaaagtgaaacctgaaacctggctgctttgctgcggtcacccgggcacccagaggccgaccttttgggtcaggggagggaagggagatgcggatgggagtggctctcctgccgagtccggaggcagcggctgaggctccagcccctccctatgtctgcagcgtccgtgtgcctggccctgcgcccctgcctcaacggcggcaagtgcatcgacgactgcgtcacgggcaacccctcctacacctgctcctgcctctcgggcttcacggggcggaggtgccacctggacgtgaacgaatgtgcctcccagccctgtcagaatggtgggacctgtactcacggcatcaacagtttccgctgccagtgcccggctggctttgggggacccacctgtgagacaggtaagaggaacccaccggggcccacggggccctgctgggggcaggatagcgggagacacagctggacaaggctgaggtcttggaaggtccagcagctgtgcatgctgcaaggtagacagcccagagaagccaccctcgaggagtggaggagcccagatgcccagggaaaggcccatatctgggtagggggcaggagccatgaccagtcacacaggcttcctagaccatggcattcggaccagggatggggcctcagaacaggccagtgcccaggtcccaaaccaggccaggatcagggtcagacaggcaccagagcccggatgggagcccgctggggatgtggtggggccgtcagacccccacgaaa

SEQ ID NO: 82472 - DNA, 1927 bp, Homo sapiens; identical to SEQ ID NO: 59991
  sig_peptide (18)...(153): this location contains the signal peptide sequence, MELALLCGLVVMAGVIPIQGGILNLNKMVKQVTGKMPILSYWPYG, Run with SignalP
  misc_feature (18)...(457): similar to gi5771420 in the genepept database release 114, Run with FASTXY 3.3t00, default parameters

SEQ ID NO: 82473 - DNA, 1622 bp, Homo sapiens
  sig_peptide (493)...(628): this location contains the signal peptide sequence, MFIGLGISFLNCPSLFAHFILFCPLPLFGIFISYWFVRLLSINRG, Run with SignalP
  misc_feature (511)...(618): similar to gi142913 in the genepept database release 114, Run with FASTXY 3.3t00, default parameters
gggttgagccacgcgtccggaaaaacaagcctgccacccagagacgtacaacaaaatgcgaactgtagttatttttctagacctttggatagccattaatatggttccacgttaataacagtggaaccatactgtatgttctgtttgtgttttcagtggaaaaacattacagaaatactctgaacaaccttctgtcaagtaaatttttcgagaacttatatgattatagatctgaactaatttatttaatcaatctggtatttgccttcctttttattttctaggttctggcttttataaacattgaaaatatcctcataggtcagtctttgagtgttcttattttcttgggataaagtgaattgctgagtcaaaagaatttgctcattttcaatgcatttgatacatactaccacattgctttcagaaaagttatgctagttttcccaaccagcgtttgatgggcaaaaaaaacctggtgagattgaatttatgtttattgggcttggtatttcttttttaaattgcccctcgctttttgctcattttattctcttttgcccattgcccctctttgggatatttatctcttactggtttgtaagacttctttctattaatagaggttggaaatagcagttatctaggtttttaatgttggtttgataaacactgaattttacttagtttgcattagagagcttactgttaactcttaaacatttaaattccctgttctcagttctaattttcagtgtgaaatcaggtaagatacatttgcaggtgaaaaagtttgaaatgtaaaaagataaccaaattaatttaatatttccttgggaatttgattactttttctgggagaggagttctgggcaacaacataaatactgttatttgtggatatttgcaggttacgtttggtcttcaaataagtcaacattattttctttcacaaaacttggttttctggctttctataatttcccaattaacatttaaataaaagaccaaattaaacaattaaactttatttaatttggtcttttgtttaaatgctttgtggctacctagcttaccttttcagcttttaaggaaaaaaaaaatcagaactttttattttggttcggtcggagacagcctcactctggcccccagcctgtagtgccagcccgtgatctcaacttactgtagcctctccttccagggtgaagaaattccccttgcctaagttccccccctaccccagcattgggattacagccaccggcgccagcccggctaattttgggtccagggttcctcattcccttctggtggcgcgaaccccggcactaagacctccttttccggcgctaactgggggatccgcgccctcctccctccttggcggccctccccccgtctcgttctccgtcactgctccctgcttgcgcggcgcggccgccccacgcctctgctcccctctggcgcgccggccccggcccactagaccctactacctactgcgcctccccgcctcgcccactcaccgatcaccttccccgtcggtccgctccccgtgcgccgttctccctctactatcccgcccccctctcccctattcacgctcacggctagtatct

SEQ ID NO: 82474 - DNA, 1174 bp, Homo sapiens
  misc_feature (1)...(1174): n = a,t,c or g
  sig_peptide (163)...(298): this location contains the signal peptide sequence, MMNSLFLMVVLQYLMLGIELLRQQVTFSFSPFLIDLRDQGSTHTL, Run with SignalP
  misc_feature (102)...(154): similar to gi1788127 in the genepept database release 114, Run with FASTXY 3.3t00, default parameters
tttcgtgatactataaggattgggaggtagagggtgggggcactgaggaagccctgctgccctcaggttaagctccgtatctctctcatttaagggccctgataggagttacttgttctcaaacatgtgtgttggctctttactgtcttttaagtagcatttatgatgaattccctttttttaatggtggtattacagtatctgatgttaggcatagaactgctcaggcagcaagtcaccttttctttttccccttttttgatagacttgagagaccaaggcagcacacacacactcctccaactagctttgcaatttgcatacatttcgattctggtgggctattcatcatttttatagaaatgcttttatgaaattcgatctcatggagtgagttaggagtttctttgttttttgctttatgataacccattgcctcagtaaatatcttaattattcccagaaaaaaataaacccaactgattagacctaatcccttctcaaatcactttactttctttgtcatttcctatccatcctctctctacactcagatgtctttgttttattatgaaatatatttggcatgagtaacaacattaagtaatatgaatcattttatttggttaaatgtctacactcaaagattagtggagaatttggaaaatataacgaaataatactggaacttttgatatttccctagctacttgccatattcaaaagatgtgtctttgaagtgaagagcagaatagtaccttattatagtccatattaaatcatatttatggctttcaacagaagtattgaaaaccagattcagttgctgcacccatcaactcatcatctacattagggattcttcgaaggtatcccttccttggacccaccccccaaggtatgcggccgtctagaggatcaacttaagtaggcgggatgcaagcataatttttataagggcctaaatcaattctggccgcgcttacaccgcggaaggtggacnncccgccnccccctctcctcctctcctccttcgcgcccgcctccgtcctgctccgnccgggccgcccccgtcctttccgtcccctctcgctacgcgccgccccgccccttagtctgcacaacagcnatttatgcccgcctcagtggtctctgtgggcgacctcgccgacca

SEQ ID NO: 82475 - DNA, 3128 bp, Homo sapiens
  sig_peptide (1955)...(2090): this location contains the signal peptide sequence, MGAGCTPVVLGAALWLWRWFSRWGLGGLCWRPCTCTPCHSASPGA, Run with SignalP
  misc_feature (51)...(401): similar to gi4512282 in the genepept database release 114, Run with FASTXY 3.3t00, default parameters
ctccaaggcctttccacttggtgatcattagcgagcacagaggactcaccatggaattggggctgagctgggttttccttgttgctattttaaaaggtgtccagtgtgaggtgcagctggtggagtctgggggaggctcggtccagccgggggggtccctgagactctcctgtgcagcctctggattcacctttagtacctattggatgagctggatccgccaggctcccgggaaggggctggagtgggtctcactgatttataacaacggtgacacatactacgcagactccgtgaggggccgattcaccatctccagagacgaatccaaggacacactctttcttcaaatgaacagtctgagaggcgacgacacggctgtctattactgtgcgaaacttaggggggatgttggggactctctttggcgtcggtcgttttgggcgttctggggccagggaaccctggtcaccgtctcctcagcctccaccaagggcccatcggtcttccccctggcgccctgctccaggagcacctccgagagcacagcggccctgggctgcctggtcaaggactacttccccgaaccggtgacggtgtcgtggaactcaggcgctctgaccagcggcgtgcacaccttcccggctgtcctacagtcctcaggactctactccctcagcagcgtggtgaccgtgacctccagcaacttcggcacccagacctacacctgcaacgtagatcacaagcccagcaacaccaaggtggacaagacagttgagcgcaaatgttgtgtcgagtgcccaccgtgcccagcaccacctgtggcaggaccgtcagtcttcctcttccccccaaaacccaaggacaccctcatgatctcccggacccctgaggtcacgtgcgtggtggtggacgtgagccacgaagaccccgaggtccagttcaactggtacgtggacggcgtggaggtgcataatgccaagacaaagccacgggaggagcagttcaacagcacgttccgtgtggtcagcgtcctcaccgttgtgcaccaggactggctgaacggcaaggagtacaagtgcaaggtctccaacaaaggcctcccagcccccatcgagaaaaccatctccaaaaccaaagggcagccccgagaaccacaggtgtacaccctgcccccatcccgggaggagatgaccaagaaccaggtcagcctgacctgcctggtcaaaggcttctaccccagcgacatcgccgtggagtgggagagcaatgggcagccggagaacaactacaagaccacacctcccatgctggactccgacggctccttcttcctctacagcaagctcaccgtggacaagagcaggtggcagcaggggaacgtcttctcatgctccgtgatgcatgaggctctgcacaaccactacacacagaagagcctctccctgtctccgggtaaatgagtgccacggccggcaagcccccgctccccaggctctcggggtcgcgtgaggatgcttggcacgtaccccgtgtacatacttcccaggcacccagcatggaaataaagcacccagcgcttccctgggaagtatgtagacggggtacgtgccaagcatcctcgtgcgaccgcgagagcccggggagcgggggcttgccggccgtcgcactcatttacccggggacagggagaggctcttctgcgtgtagtggttgtgcagagcctcatgcatcacggagcatgagaagacgttcccctgctgccacctgctcttgtccacggtgagcttgctatagaggaagaaggagccgtcggagtccagcacgggaggcgtggtcttgtagttgttctccggctgcccattgctctcccactccacggcgatgtcgctgggatagaagcctttgaccaggcaggtcaggctgacctggttcttggtcatctcctcccgggatgggggcagggtgtacacctgtggttctcggggctgccctttggctttggagatggttttctcgatgggggctgggagggctttgttggagaccttgcacttgtactccttgccattcagccagtcctggtgcaggacggtgaggacgctgaccacacggtacgtgctgttgtactgctcctcccgcggctttgtcttggcattatgcacctccacgccgtccacgtaccagttgaacttgacctcagggtcttcgtggctcacgtccaccaccacgcatgtgacctcaggggtccgggagatcatgagggtgtccttgggttttggggggaagaggaagactgacggtccccccaggagttcaggtgctgggcacggtgggcatgtgtgagttttgtcacaagatttgggctcaactttcttgtccaccttggtgttgctgggcttgtgattcacgttgcagatgtaggtctgggtgcccaagctgctggagggcacggtcaccacgctgctgagggagtagagtcctgaggactgtaggacagccgggaaggtgtgcacgccgctggtcagggcgcctgagttccacgacaccgtcaccggttcggggaagtagtccttgaccaggcagcccagggccgctgtgcccccagaggtgctcttggaggagggtgccagggggaagaccgatgggcccttggtggaggctgaggagacggtgagccgggtcccctggccccagtagtccgccagggtgtaccagatgctgctctcgagacccttcgcacagtaatatacggccgtgtcctcgactctcaggctagtcagctccatgtagactgtgttcgttaatgcgtccgcggtcaccgtgactctgtcctcaaatctctgtgcttagtttgttgtctgatagacagggatgatccttcccatccactcaagcccttgtccaggggcctgtcgcacccagttgatggcaaagctgctgaaggtgtcttcagaagttttgcaggagaccttcaccgaggacccaggcttcttcacctcagtcccagactgaatcaactggacctcagcacagactccttgcagaacagccaggaggagggcgaggatggcggttgaccccatgatggtggaggacagaaaatgaagccctgagatcccacgaaa

SEQ ID NO: 82476 - DNA, 1033 bp, Homo sapiens
  sig_peptide (457)...(592): this location contains the signal peptide sequence, MCAFLLPFKLLFFLEISLAMKSHFPFTLLILSRVLLKKTLYVLKL, Run with SignalP
  misc_feature (164)...(264): similar to gi3493617 in the genepept database release 114, Run with FASTXY 3.3t00, default parameters
tttcgtggaattatttcatttctcatttcttcttaggttatgcgatctacttaaaattatatagggtagtgtcctcaaggaagtctcctcttccaggaaaggaccagtgtccactgagggaccttcttcaggacatgccccaggtcagttgttggattaggcaggccttgggcgagtgaggcttaatatggcttgggacttgagtttttcttgctttcccagaattcatgagcttttgtcatttagaatgtttcttactcttctgtagttgtcctcactggcaaatcccaccagatattcttcagtgagtatgcttcctgagtgaaatataaaggtgaaggaacattgggcagagcagtattaactacccatggccacatttttgttaattattttggtatttattccttgtgtgggtgtgtaatttttggtaaagttgcattaaaatagtatagcatgtgcgcatttttacttccctttaaacttcttttcttcttggaaatctctttggctatgaaatctcattttcctttcacccttctgattcttagccgagttttacttaagaaaacgttgtatgtcttgaaattaggttggttaattacaattccttcgaatgatttgacttctgtattcaccctgatgatacatagacaaaatcaaaagcatttttgacaaagtaatgctttctcacatatttagcttctttatagacacttacccatcttgttaaaacccaaaactagtgattttacgttgtaaaaagcgtttttcaaagcatgtgggccatgtaggatgtacacgacagtgggaaagacctatcccttttttgaagggagaatcaagcgctcggggagcgaatttggaactggagatgggcacctccaggcgactctttctctgaacaccacgtcgcctgacatcccgggactagagagagggctactttgctcttggtgaagacctcatacgagcccacggccctagcggtgacgagctgttgtccaacttgaagagcgcgctaccttatgcg

SEQ ID NO: 82477 - DNA, 1366 bp, Homo sapiens
  sig_peptide (92)...(227): this location contains the signal peptide sequence, MEFGLSWLFLVAILKGVQCEVQLVESGGGLVQPGGSLRLSCAASG, Run with SignalP
  misc_feature (80)...(921): similar to gi3715490 in the genepept database release 114, Run with FASTXY 3.3t00, default parameters
gcccacgcgtccgcccacgcgtccgtttcccagccctgggattttcaggtgttttcatttggtgatcaggactgaacagagagaactcaccatggagtttgggctgagctggctttttcttgtggctattttaaaaggtgtccagtgtgaggtgcagctggtggagtctgggggaggcttggtacagcctggggggtccctgagactctcctgtgcagcctctggattcacctttagcagctatgccatgagctgggtccgccaggctccagggaaggggctggagtgggtctcaggtattggtggtagtggtagtagcacatactacgcagactccgtgaagggccggttcaccatctccagagacaattcccagaacaccctgtatctgcaaatgaacagtctgagagccgaggacacggccgtatattactgtgcgaaatcccatccggcgtattactatggttcggggagttattcatctcattactactactactacggtatggacgtctggggccaagggaccacggtcaccgtctcgagtggcgatgggtccagtggcggtagcgggggcgcgtcgactggcgaaattgtgttgacgcagtctccaggcaccctgtctttgtctccaggggaaagagccaccctctcctgcagggccagtcagagtgttagcagcagctacttagcctggtaccagcagaaacctggccaggctcccaggctcctcatctatggtgcatccagcagggccactggcatcccagacaggttcagtggcagtgggtctgggacagacttcactctcaccatcagcagactggagcctgaagattttgcagtgtattactgtcagcagtatggtagctcaccgacgacgttcggccaagggaccaaggtggaaatcaaacgaactgtggctgcaccatctgtcttcatcttcccgccatctgatgagcagttgaaatctggaactgcctctgttgtgtgcctgctgaataacttctatcccagagaggccaaagtacagtggaaggtggataacgccctccaatcgggtaactcccaggagagtgtcacagagcaggacagcaaggacagcacctacagcctcagcagcaccctgacgctgagcaaagcagactacgagaaacacaaagtctacgcctgcgaagtcacccattcaggggccttgagcttcgcccgttcacaaaggagctttcaaccaggggagagtgtttaggaggggagaaggtgcccccacctggttccttcagtttccagcctggaccccttcccttccttttgggcttttgaccttttttttccacaggggacctaccctttttgcggttcttccagt

SEQ ID NO: 82478 - DNA, 1191 bp, Homo sapiens
  misc_feature (1)...(1191): n = a,t,c or g
  sig_peptide (541)...(406): this location contains the signal peptide sequence, MAYRGQLLAGFTFDVSACLWTSWRTALTECVAWGICPLGWVVPVL, Run with SignalP
  misc_feature (432)...(258): similar to gi733072 in the genepept database release 114, Run with FASTXY 3.3t00, default parameters
tttcgtggaacctgtgatcgagttacataaagacacacgtaatcataactgagcaaagctcttctctaatatgtaggtgaaaaaattaactgactctgttaatctggaaaatgattgaatgtgtatttgttaaattttaatggaaatatccaaaaaaccaactcagacaagtggtgaacagagtagccgtggagtatttatttcttctgtatatgtatattgcaattgagtgcagaatttgggatacatggattcctttccttcttcctttgtgttctctccccagtatgggaagactctctatgataactaccagcgggctgtggcaaaggctggacttgcctctcggtggacaaacttggggacagtcaatgcagctgcaccagctcagccatctacaggacctaaaacaggcaccacccagcccaatggacagattccccaggctacacattctgtcagtgctgttctccaagaggtccagagacatgctgaaacatcgaaggtaaaaccagcaagcagctgacccctataagccatgttctaaaccattcacattattccagtaactgctcttttaaaaagagaaaataagctgagtgcagtggctcacacctgtaatcccaaaactttgggaggctgaggcaggaagatcacttgagcttcagtttgagaccagactgggcaatatggcgagagcttgtctctactanaaaaataaaattacccaggcatggtggcatgcacctggtttctccgctactggggaggctgaggaatttgacttgttttacccacgaaggttaagcggcagtgatctgtgattgcgccctggatttcaccctggccgaagagtagaaccctcttaaataattacctattcgtcataattgaaatgccgtcccacactgaaagtactcacattatttagtggatgtggaattggaacctaaagttactttgtggatcacaagtagaacccgtttcttcactggttaagaaaatgaagcattccctataacttgggtgaataactttttactttacacagaggtttctgtttaatcaagaatttaccctcttgtaaaccctacaacattaaccagggtgtttcggcgcttaaaaacaacttagcccggtgccangcaagttttataggcactaataaactaggcgtgtcaagccggggcc

SEQ ID NO: 82479 - DNA, 519 bp, Homo sapiens
  sig_peptide (169)...(304): this location contains the signal peptide sequence, MEFGLSWLFLVAILKGVQCEEQLLESGGDLVQPGGSLRLSCTASR, Run with SignalP
  misc_feature (169)...(520): similar to gi4261797 in the genepept database release 114, Run with FASTXY 3.3t00, default parameters
tgcggccgcgttgacccaaaagggggttaagggggccgtcccccctcctaggtgaaaatttggataaaacttttttttaccctttttttttttttggagagaggagccctgccctgggattttcaggtttttcctttggtgatcaggactgaacagagagaactcaccatggaatttgggctgagctggctttttcttgtggctattttaaaaggtgtccagtgtgaggagcagttgctggagtctgggggagacttggtgcagccgggggggtccctgagactgtcctgtacagcctccagattctccttaaacaattatgacatcagttgggtccgccaggctcctggcaaggggctggagtgggtctcaaagatccggagtcgtgatgactataagttctatggacagtccgtccagggccgcttcattatgtccagggacaactccaagaacactctttttctgcaaatgaatcgtctgagagtcgaagacacggccacatatttctgcgtgaag

SEQ ID NO: 82480 - DNA, 792 bp, Homo sapiens
  sig_peptide (350)...(485): this location contains the signal peptide sequence, MSWRTRSMHTHISVSFKGKIRPTSAYLLLFLFFFCYGVSLCCPGW, Run with SignalP
  misc_feature (248)...(497): similar to gi294748 in the genepept database release 114, Run with FASTXY 3.3t00, default parameters
ttcgttgtcctataaaatcccaaaatgagtgttgcttcatgacagtttctctttctgtttttattgatgagttaatctttttctccgatgtgggcagggatttagacatagtggactagtggctgttgcctgtttctagtgaggacttctgctgccctttctgttttgagttcccattctgcaaaccccccctcacatgcggcccctgccgttccctaccaaatatctaggtaagttcagttggaagtggttttttctttctctgaatgctggtgactatcatagagaatttagcacagtctactttgaatttgaaagcttcgggcattggtcttttcttcagtgcttcatgtcctggagaacaagaagcatgcacacacacatttcagtttcttttaaaggaaaaataagacccacatctgcttatctgcttctttttctttttttcttttgttatggagtctcgctttgttgcccaggctggagtgaagtggtggcgcgatctcggcacttggcaagctccgcctcccgggttcacgccattctcctgcctcagaatccggagtagctgggactacaggcgcccgccaccacgctcggataattttttgtatttttagtagagacggggtttcaccgtgttagccaggatggtctcgatctcctgacctcatgatcgcccgcctcggcctccccaagtgccaggattacaggcgtgagccaccgtgcccagccacttaactgttttttaaacaaacatgaacttaaaattatatcaaacagaccatgtat

SEQ ID NO: 82481 - DNA, 946 bp, Homo sapiens
  misc_feature (1)...(946): n = a,t,c or g
  sig_peptide (40)...(175): this location contains the signal peptide sequence, MIVHCTIIPLSFCVHRLRAPLDAYFQVSRTQPDLPATTYDSETRN, Run with SignalP
  misc_feature (292)...(186): similar to gi459443 in the genepept database release 114, Run with FASTXY 3.3t00, default parameters
tttcgtatttacttcaaatcactatagattgtttttgtgatgatagttcattgtactataattccgttgtctttctgtgtacataggttgagagcaccattggatgcttactttcaggtgagcaggacccagcctgacttgccagctaccacttatgattcagagactaggaatcctgtatctgaagagttgcaggtgtctagtagttctgattctgacagtgacagctctgcagagtatggaggggttgttgaccaggcagaggaatctggagctgtcattttagaaggtcagtattttacccaggtttggactcacaaggctaacatccatgaagcttaaatttcggaaggctagaaactagatttgtgctttgacactttcccttttctcccctaaatgttgtggattcctgttttatagtatagagccttcactggccataattatgtagagaggatttgatctgacttacagcttaatgtaatttgtgacccagtgagttagtcactttgtagtggcattttgtattctctttcacttcttcagacatctgagaaagtagattcttttttttcttttttgaggcaaggtctggctctgtcccccagtgacaactggagtgcagcgacaacaatctcagcttactgcaacttccgcttcttgggctcaagccatcctcccacctcagcctccccactaactgggactacaggcacacaccaccacacctggctaattttttaaattttttgtagagacagagtttttccatgctgccccggctggtcataaattcctgagctgaagacattcctgtacctcaggctaccaaagtgctgggattacagaccattgagccacttgcaccccggccctagnaattcttctatattaaaaaggaaaaaggtttggtaaatttcaagcaccctggtcttaggaaccc

SEQ ID NO: 82482 - DNA, 410 bp, Homo sapiens
  misc_feature (1)...(410): n = a,t,c or g
  sig_peptide (43)...(178): this location contains the signal peptide sequence, MGSTAILALLLGVLQGVCAEVSLVQSGAEVKKPGESLKISCQYSG, Run with SignalP
  misc_feature (43)...(396): similar to gi4512281 in the genepept database release 114, Run with FASTXY 3.3t00, default parameters
tttcgtgggatctcagggcttcattttctgtcctccaccatcatggggtcaaccgccatcctcgccctcctcctgggtgtgctccaaggagtctgtgccgaggtgtcgctggtgcagtctggagcagaggtgaaaaagcccggggagtctctgaagatctcctgtcaatactctggacccttctttaccacgtcttggatcggctgggtgcgccagatgcccgggaaaggcctggagtggatggggctcatctatcctggtgactctgacaccagatataacccgtccttccaaggccaggtcaccatctcacttgacaggtccaccagtaccacctacctgcagtgggacagtctgaggccctcggacaccgccatatattactgtgcgagacgcanaggacagccgaa

SEQ ID NO: 82483 - DNA, 1103 bp, Homo sapiens
  sig_peptide (20)...(155): this location contains the signal peptide sequence, MEFGLSWVFLVALLKGLHCEVRLVESGGDLVQPGRSLRLSCSGSG, Run with SignalP
  misc_feature (20)...(376): similar to gi4512282 in the genepept database release 114, Run with FASTXY 3.3t00, default parameters
tttcgtcacaccaccaaccatggagtttggacttagctgggttttccttgttgctcttttaaaaggtctccactgtgaggtgcggctggtggagtctgggggagacttggtacagccagggcggtccctgaggctctcatgttcaggatctggattcaattttggtgattatgctatgaactgggtccgccaggctccagggaagggcctggagtgggtgggtttcatcagaagtgatgcttatggtgcaacagcggactatgccgcgtctgtgatgggcagattcaccatctcaagagatgattccagtagtcttgtctttctacaaatggacggactcaaaagcgaagacacagccctttacttttgtacaccagacactgtaatggtgacatctgcctctcctagctttgatctctggggccaagggacaatggtcgccgtctctgtaccctgcaccaagggcccatcggtcttccccctggaaccctggttcaggaacacctcccacagcacagcggccctgggctgcctgggcaaggactacttgccccaacccgagacggtgtcttgggactcacaccccttgaccatctgcacccacacctctaccggggtccaccttccctatgcgtgtggttcggggggaccccggcacaccccccctccaccggttcgggacggggaactacacccttctcgctgggggggggcccccgcccgagggggtccttaaatgccacccgggcctttcggcttgcacaaaaacccgctgcccctgcgtgtctgcggcccggccttatctatctaaccccccgcccgccccgccagcgggacgttaaaacagattccccgcgggccggtcgtctccgcgtgtaaggtatccgggcctcccgtcgccccggccgcaaagaaaacagactttcctcgggccggcgcgcccgcccctcacgaggcgctcacgtcccgcccgcgggcccgcggcggctaacacctaaccaaccgccgcgcgcccgcgtcggctggaaataccagcactcgtcctcctctcgcgctcccccgccccgcaccctgctctcacctacgctcatcctcgcggcgcg

SEQ ID NO: 82484 - DNA, 384 bp, Homo sapiens
  sig_peptide (48)...(183): this location contains the signal peptide sequence, MAHYKTEQDDWLIIYLKYLLFVFNFFFWVGGAAVLAVGIWTLVEK, Run with SignalP
  misc_feature (87)...(387): similar to gi2447007 in the genepept database release 114, Run with FASTXY 3.3t00, default parameters
tttcgtcccttcgccgcttccggagcccctgtcagggcccagaagccatggcccactataagactgagcaggacgactggctgatcatctacttgaagtatttactctttgtcttcaacttcttcttctgggtcgggggagcagccgtcctggctgtgggcatctggaccctggtggagaagagtggctacctcagcgtcctggcctccagcacctttgccgcctccgcctacatcctcatctttgcgggcgtacttgtcatggtgaccggcttcctgggcttcggtgccatcctctgggagcggaagggctgcctctccacgtatttctgcctgttgctcgtcatcttcctggatgagctggaggcgggagtcctggcccatg

SEQ ID NO: 82485 - DNA, 1404 bp, Homo sapiens
  sig_peptide (92)...(227): this location contains the signal peptide sequence, MEFGLSWLFLVAILKGVQCEVQLVESGGGLVQPGGSLRLSCAASG, Run with SignalP
  misc_feature (149)...(875): similar to gi2911500 in the genepept database release 114, Run with FASTXY 3.3t00, default parameters
gcccacgcgtccgcccacgcgtccgtttcccagccctgggattttcaggtgttttcatttggtgatcaggactgaacagagagaactcaccatggagtttgggctgagctggctttttcttgtggctattttaaaaggtgtccagtgtgaggtgcagctggtggagtctgggggaggcttggtacagcctggggggtccctgagactctcctgtgcagcctctggattcacctttagcagctatgccatgagctgggtccgccaggctccagggaaggggctggagtgggtctcaggttttactggtagtggtggtagtgggggtagcacatactacgcagactccgtgaagggccggttcaccatctccagagacaattccaagaacacgctgtttctgcaaatgaacagcctgagagccgaggacacggccgtatattactgtgcgaaaggccttttgcccccgcggtgggcgtatagggtgtatgaagatagtggcatcttctttgactactggggccagggaaccctggtcaccgtctcctcaagtgacatccagatgacccagtctccttccaccctgtctgcatctgtaggagacagagtcaccatcacttgccgggccagtcagagtattagtagctggttggcctggtatcagcagaaaccagggaaagcccctaagctcctgatctataaggcatctagtttgcaaagtggggtcccatcaaggttcagcggcagtggatctgggacagatttcactctcaccatcagcagcctgcagcctgatgattttgcaacttattactgtcaacagctgagtacttacgtgtggacgttcggccaggggaccaaggtggacatcaaacgaactgtggctgcaccatctgtcttcatcttcccgccatctgatgagcagttgaaatctggaactgcctctgttgtgtgcctgctgaataacttctatcccagagaggccaaagtacagtggaaggtggataacgccctccaatcgggtaactcccaggagagtgtcacagagcaggacagcaaggacagcacctacagcctcagcagcaccctgacgctgagcaaagcagactacgagaaacacaaagtctacgcctgcgaagtcacccatcagggcctgagctcgcccgtcacaaagagcttcaacaggggagagtgttagagggagaagtgcccccacctgctcctcagttccagcctgaccccctcccatcctttggcctctgaccctttttccacaggggacctacccctattgcggtcctccagctcatctttcacctcacccccctcctcctccttggctttaattatgctaatgttggaggagaatgaataaataaagtgaatctttgcacctgaaaaaaaaaa

SEQ ID NO: 82486 - DNA, 1092 bp, Homo sapiens
  sig_peptide (867)...(1002): this location contains the signal peptide sequence, MRAHPHTPRSAAHIILSTWLALGPYLYRTRNCGPLTEEPSLAPST, Run with SignalP
  misc_feature (200)...(68): similar to gi551203 in the genepept database release 114, Run with FASTXY 3.3t00, default parameters
tattgcttgttcgacgatttcgctgcacagactctttgctgcatggctcactacctgtggtgttggaggggtggttttgatgcttcaggactgtctttcctgttctcctcaatgtctctttcaagatatgaagttaaaattaggtactgggattgctcacctgagttttggtccttgagatgatgcttttctgtgtgcagatagttgctaaaatttggtgttcctgctgggggtacaaactatgtaggtttctattctgccattttgttctatcctttatcaactatttattttaggaaaaggaatgtgtgtacaattggagagccatttacaaaatctttactacaaatgtttttgattttataatttgtgataacaggaactatacttttataactctataaacctctgggtgtccctaatacatagaatagtgagagctcgagagttagttttagttgcctttccaggtaggaccatcagaaggaatgacagagcagtttgttttgaaggtagactaaagcaccaaggtctaggtgtcacggaaattacgttttactggatcgagtcttgctctgctcggtctttcccttttaccctacatttcctcctctcgatcttccgtgcagcgtaccacgcccatctgactcgagagctccccacctgcaaacctttatcttccttgttgcggctgcctagcggatcccctcgccaccgaggccagattctgcttgttcagaacttctgcccgtcttccgtcttcttttaacgacgcacacccggccacgcgcggacggacctatcccctcgccccggtccaccggggcggcgctggacttacacccttctcccgcgctcctggggccatgcgcgcgcatccccataccccacgctccgccgcgcacattatactctctacttggcttgcgctcgggccctatctctatcgcactcgtaactgcggtcccttgactgaagaaccatccctcgcaccttctactcagggcgcgcggcgtactaacactactcccgagctcgcggcccgtccggtcgctccgtgccttcatatatcttacacgttcacgcgcggcc

SEQ ID NO: 82487 - DNA, 400 bp, Homo sapiens
  sig_peptide (13)...(148): this location contains the signal peptide sequence, MEVGLSWVFLVAILKGVQCGGQVVESGGGLVQPGRSLRPSCTGSG, Run with SignalP
  misc_feature (13)...(371): similar to gi4512282 in the genepept database release 114, Run with FASTXY 3.3t00, default parameters
tttcgtccaaccatggaggttgggcttagctgggttttccttgttgctattttaaaaggggtccaatgtggggggcaagtggtggagtctgggggaggcttggtacagccagggcggtccctgagaccctcctgtacaggttctgggttcacctttggtgaacatagtatcagttggttccggcaggcgcccgggaaggggctggagtgggtcagtttcaccagaaccaaacgttatggtgcgacaacagagtatgccgagtctgtgaaaggcagattcaccgtgtcaagggatgactccaaaagcgtcgcctatctacaaatggacagcctgaaaaccgacgacacagccgtgtactactgctctagagatgccgctagtttctggttcgaaccctggg

SEQ ID NO: 82488 - DNA, 873 bp, Homo sapiens
  sig_peptide (188)...(323): this location contains the signal peptide sequence, MWPQLLKSFFLIPTQIHFNLTNLPSWRRRELRRFVWVSMPELIGA, Run with SignalP
  misc_feature (190)...(322): similar to gi310705 in the genepept database release 114, Run with FASTXY 3.3t00, default parameters
ctggcgctgtacgaattcggcacgagtgtgccccttgttatccctgtattcaggccattatctgtaatgacagcctggcataattttattttcacaatttgtataattatattctattgagctaaatgatcattataatcattattaaatatttattaagcacttctagctgtgcaaacataataagatgtggcctcagctcttaaaatctttcttcctaattccaacccaaattcatttcaacttaaccaatcttccttcttggagaaggagggaacttcggcgttttgtctgggtttccatgcccgagcttataggagcttcttagcaatgctgtggagcagatgctattgacttcagtttacagataaggaaacaatcagactgaggaagctagtattaataagtagcagagattaagatttgcctgtggttcttttttacacaaagcctctcccactcctttcatgcactgttagccaagtttactagaataggcaacttcctttttaaaaaatcctgtttacattttaggtgccaaacactgtgctaatccagtgggggaaacatatgctcaaaaagatcactctgagaccaggcatggtggctcatgcctgtaatcccaagcctttgggaggatgaggtctgaggactgcttgaggccaggagtttgcgaagaaccctgcccaccataggaaaggccccttctgtacaaaaaatttaaaaactagccagggctgggggcatggtgactacaggctgcagtaagcctatgaatgggccactgcacttccgcctgggtggaaagaaggagaccctggcccttaaaaacaaaacaaaagcgggggccgggttcctaaagccgggggccct

SEQ ID NO: 82489 - DNA, 853 bp, Homo sapiens
  misc_feature (1)...(853): n = a,t,c or g
  sig_peptide (129)...(264): this location contains the signal peptide sequence, MFIFKTKGILLPCQKMLQIVFFFLPKNTLSSMFYFSDCIGVHKYM, Run with SignalP
  misc_feature (303)...(212): similar to gi2316071 in the genepept database release 114, Run with FASTXY 3.3t00, default parameters
cgctacgagattttgttgaatttatcttctcttttctgctaaaaataagtctatgagtcaacatttcacataactcatattgttttctctctgaagattttaaaagacatcaaatttcatttttattgatgtttatttttaaaacgaaaggaatccttttgccctgtcaaaagatgctacaaatagtattcttttttcttcctaaaaatactttgtcctcaatgttttatttttcagattgcataggagtacataagtatatgcatattttaatttatatacatacatatgtatcactgtaacttggaaattaagaatgtcatagaagaatagttaaaggcaatgagaaagtgttgatgaaaaaggaggagcctatggggaaacaaaataattatatgcaaatacccgaaggtaagaaatatggaaaaggcaattgtcttgctctaggttgtcacagacaagagaattgtactaattgggtaagaaataaattgcatgtgagttttttaaaaatatttctattaaaaagttaaagatcattttttctatcatatcattgacctcctttttacaatagctatggattattatttcacctctattttcaagaaaaattagtaaaagttaaagattatatcaacagcttcatggaggtagctgattttgcttatatacacccttattacggtacttggattaataaatggcttctagttttctgaaacagtttacaaatatgcccatattaataaataatttgctataattccattaacattttttacaatatctttatgccaccaggatatcatttctttannnntggaaaggcgcggaattaaaccttcttgaa

SEQ ID NO: 82490 - DNA, 875 bp, Homo sapiens
  sig_peptide (177)...(312): this location contains the signal peptide sequence, MYMWSGLLGSKWTLVYSHFLNMAPASFSHYQASLPLLEHDTLSSS, Run with SignalP
  misc_feature (404)...(264): similar to gi5725938 in the genepept database release 114, Run with FASTXY 3.3t00, default parameters
ccgcgctgcaggaattcggcacgagaaaatctggccaaaggatatggtagaggtaggtttaactgaaggagatcagaggtgagaggtaagtcacaaacgtgtgcaattgaaagttagggagaggagctaacatttgttgagtgtggagtaggcaccagccctgtattaggtgatgtatgtacatgtggtctgggctcctgggatctaagtggacactcgtttactctcacttcttaaacatggccccagcctcattttctcattatcaagccagcttgccgctactggagcacgacaccttatcttcgtccagagttcattcctatcagtgtccagggttcttctgctttttcccttcagtcctggaattctctcagcttcagaaaacttattccctgtgcctccccttctgagctaccactttatcccaacagacttgtttcattggcttacttagttttaaaatttgtaaaattcttcctttcattgaaaatgttttgttttctctctccgtcttcctctctgttccccctactcccatgtgtttttattgagaggagctctttaagaatgtgaccacatcacagatcaatctcaaactccaataagacggctgggcgcggcggctcacgcctgtaattttagcactttgggaggccgaggcgggcggatcatgaggtcaggaaatcgagaccatcctgcctaacacggtgaaaaccccgtctatacttaaaataccaaaaaattacccgccccttggggtggggccccctgtaaatcccaatttactcgggaggctggaggcaggacaaatgggcgtgaaccccgggaggcagaattttgggggggggccccagaaatctggccctcggccc

SEQ ID NO: 82491 - DNA, 868 bp, Homo sapiens
  misc_feature (1)...(868): n = a,t,c or g
  sig_peptide (371)...(236): this location contains the signal peptide sequence, MAPFFLCFPCFASYLFWEELGPPGIVYTALSSVLMDSDRPWPASS, Run with SignalP
  misc_feature (396)...(293): similar to gi895872 in the genepept database release 114, Run with FASTXY 3.3t00, default parameters
agcaattcggcacgagataatgtgtcattgtatactgacactcatgtggaataattaatatttcagtatcttaacttacagatgactcagacactttatatattacttaatttaacatacatgagtctaagattttaaattaatggaaagaatttggaaactgtaacacaagtagcattcctaatgtcttccctcagttattctaggtcccaagtagccatgtagcacccaggaggaacttgcaggccagggcctgtctgagtccatcagaacagaagacaaagcagtatagactatacctggaggacccaactcctcccagaatagataggaagcaaaacagggaaagcagaggaagaagggggccatatagggcttgattctggcctgtagctgctggtctatgcactaagaacatgtctccagacctcatcatgactgcctatctagacccctgaatccagagactctaaaccaaagacataagctcacggtcaaatcaagcaagaatataattatatttcactgataattttgaaaccatttctattttatcaacaatttcaaaactaaatttatttaccaaatatcacatatacataacacatggagacataccaacataagaaacagatcttatagttctcataaaggattttcatttgatggcttttanactttttttttcttttccgcatttggcctatcagtctttcaaattattgggtttaatgcccctaagcaattggtaaactaggggggaagggttaataatgagggcccccttggatggagggaggcccagtatggtcccttggaggggcccggggagggtgttgcggcgaggggcattaaccttctgggccac

SEQ ID NO: 82492 - DNA, 923 bp, Homo sapiens
  misc_feature (1)...(923): n = a,t,c or g
  sig_peptide (184)...(319): this location contains the signal peptide sequence, MFMCRLLLWATGAYGFLGDDVEYTSVLPHQKGKEAWVFICQLPFI, Run with SignalP
  misc_feature (479)...(366): similar to gi1289211 in the genepept database release 114, Run with FASTXY 3.3t00, default parameters
gtcggacgaggtccttcactcaaacatgtttcttgcctatgaagaatgtcttgggccgggcacccccagaagctgaccttgagacaaggatttgggtgcaagtggtttatttggcaggtgcccagaaagtgctgacaggagtgggaaagtgagttaggggagagaaggaagccactacaggctatgttcatgtgcaggttactgctgtgggcaactggggcttacggatttctaggagatgacgtggaatacacctcagtgttgccccaccagaagggcaaggaagcatgggtatttatatgtcagctcccattcattattggctgagggcagctcctagagggcattgggtctgcgtttcaagcctgctgcacataggctgagaggaatccctgagttcgagtcacaggcgcccacagtcatgctcagacagcacatacaggaacagtgactgcagggggcataggtgggacacaaataccaccagttataaagaggaaagatgggaaggaaagacaagaggaaggtgtggagttagattcctggctcatatgtgaacccctggctctcacaacactccctctttttttctttttctttttttttggagacgggatctcactctgttgcccaagcttgggattcaatgggtggtaatcaagggttcggtgggaaaccttttaaccttcctaggggttacattgatccctccccaccttcaaccttccttgagtagcttgggcacttaggagggccacaccattcacccaccccttttgggctagggcattttaaaaattttttttttggagaaaaatacacagccgcacataggcccttatggccctggtaattctcccggccaccttttgcgggagggtcccgcccgccggntggggactcacctcctgccgcgctcccct

SEQ ID NO: 82493 - DNA, 1745 bp, Homo sapiens
  sig_peptide (948)...(1083): this location contains the signal peptide sequence, MLCGNTQLLFTVAIILLYVTCLLHWTFLHLEWRVSEGRHHDPLST, Run with SignalP
  misc_feature (781)...(194): similar to gi4468862 in the genepept database release 114, Run with FASTXY 3.3t00, default parameters
caaagttcatagcaggttgaacatgcttgctgtcattttcacagattctggtctttcttatggggaacctgagttcctgcattaaagttcccccagaagatcaatggaaggtggattccaaagagtgggcaagtgaggaccccttctctgttaccaaggtgaccccaaggaacacagtaaatgtggcggcttatttggcctccccaggacggactggagcatcagtagtgcctgagttcatcaaaggacagatgctcaagacaccttgatcaccattaggtggaattgaaggagccaaaaatgggcgcagtggctcctcagcagagacgctcctgaatgtatagacatgggaaccactttcagcatcaaaaaaggaaacgttctgcatgcccatatccagaaaaatccccactcgctgtaacttgcggtctactaagaggaaagtcagcggcaccgtgctggcagagaggcggcttccatccctcaaactcacagtccagaatccaagctctgtggtcagctggatcttccctttgcagtgaacagattctctgcagactcccaggtcccattctgtgcttgttcccacgtccacctcccagtagtggcggccacaggtaaagcgaggggagcccaggatgcaaacggacacgtcaaatctctcggcaaggtcttgccgattctgtgtgatgagcccacttcggacgctcctgaggtcgtcagaaatgaggaggaagttgttggctgtgtcggcatccaaggtcatatccactgtgaaaaggaaaacaagttgctcagcaagtggacagaagccaaccccatgcctctcttctacttcaaaggcccaaatatctcctgactttagtttctttaattctgtttcttcctccaaaatcaaaactttttcatgagggcaacttccctgactagttcaaattctcataggtatgctttgtggcaatacccaactcttattcacagtagcaattattttactttatgtcacgtgtttgcttcattggacttttcttcatttagagtggagggtctctgaaggcagacaccatgaccccctttctaccaccttgatgcatgaaaaaatgaatgataattaagacaatgcaaatggtcgatgttaaatatgtttctgcttccatcttgtattgctcaactcagtatatagagcatgattccaggcctttgttttccatgtttgtaagcaaattaattgtgcatggttctgacagcaggtagggtatctctgcagctgacaatgtgatgacagaggtgccggtcctggacattaggaggctccaaggccaggaggaagaggggggccttagatgaaagaatgttttccatcctacatgggaggtgagaccttaagcaaaacaatggtaaattttggagtgaagagaaaggtatttgaaagttgtttgttggctgagcgcaggtggctcacacctgtaatcccagcactttgggaggccgagacgggtggatcgcgaggtcaggagatcgagaccatcctggctaacgcgtgaaaccctgtctctactaaaaaacatacaaaaaaaattggccggacatggtggcgggtgcctgtagtcctagctgctcggtagactgaggcaggagaatggcatgaacccaggaggcggagcttgcaatgagcagagatcatgccactgcacctccggcctaggcggcagagcgagactccatctcaaaaaataaaaaaaaaa

SEQ ID NO: 82494 - DNA, 442 bp, Homo sapiens
  sig_peptide (68)...(203): this location contains the signal peptide sequence, MAHMWGGRFVIPRIGCRQCFVTAIAFGLLVEMEYVTWMACLMPSG, Run with SignalP
  misc_feature (77)...(279): similar to gi3258364 in the genepept database release 114, Run with FASTXY 3.3t00, default parameters
gtttggggaattcggcacgagctctctccttgagtcttgtctctcctccgtaggactgaacagatgcatggcacacatgtggggcggacgcttcgtgattcccaggattggctgcaggcaatgctttgttactgccattgcctttggcttgctagttgagatggaatatgtaacttggatggcttgtctaatgcccagtggtacgggggagattctctcgaggtccctgaattgcacacaatgcaaacagcaaaccttgattgtatgtaaattgattaagagggacctatctttctttatccctaaagatgacatataactaggtttctagtgaggaagatggaaaagatgaaattttgaccttcctacgtatactctgtattcagaaatagctcaataaagagtcaaaggttttcttttccaaagattcaagaggctttat

SEQ ID NO: 82495 - DNA, 444 bp, Homo sapiens
  sig_peptide (78)...(213): this location contains the signal peptide sequence, MYVFAGCIGTVWTVTAIVYHLWPNTVISYTCVQVVIPQPYEEDAT, Run with SignalP
  misc_feature (191)...(137): similar to gi2832526 in the genepept database release 114, Run with FASTXY 3.3t00, default parameters
cggcaggtacatactgcacgaggaggactcccctccccagaggagctgaatctaggaaacccataaatattctccctatgtatgtgtttgcaggctgtattggaactgtgtggactgtaaccgcgattgtctatcacctgtggccaaacactgttatatcttatacctgtgttcaggtagttatcccacaaccctatgaagaagatgctactcaccttcattttacaaataagggaaacttgaggatagattaaaaactttgcccaaaatcacagaactaggaagtggcagaaatgctagctgaagtcaagactctctgaatcaaaaacccatactctttcctgtaccctatgccaaacttaatccacactctgctccctcaaaacacatgacgggagggctcgctcaaggtgtatatgctcccatgcctacccaccataatcg

SEQ ID NO: 82496 - DNA, 440 bp, Homo sapiens
  sig_peptide (175)...(40): this location contains the signal peptide sequence, MFSFPHSCRMFFILMITLNMFQKSIGIGRPRNRDQEGRDHRTDPG, Run with SignalP
  misc_feature (227)...(129): similar to gi58936 in the genepept database release 114, Run with FASTXY 3.3t00, default parameters
gaattcggcacgagaaccaatgaaactgggtgatgggcaaggccagggtctgtcctgtggtccctgccttcttggtctctgtttctgggtcttccaatgcctatgcttttttgaaacatgttaagggtaatcatcaaaatgaaaaacattctgcaggaatggggaaaagaaaacatttgttagaatggctgaagagatatgggggagattgtgcgtaatttggaatgaggggctcagaacccaagacccggccctgcttgccatggctctgtaaccttgattaagttacttatactctccaaaacaccgttgcctagaaaatgagaataagaatcataatacctcatttaccgagttgttgggaggaacaaataataggaaaatcgtgttttataatccataaagtattgttcagatatttattatggtacacacaagct

SEQ ID NO: 82497 - DNA, 1101 bp, Homo sapiens
  sig_peptide (70)...(205): this location contains the signal peptide sequence, MCLRRTLLWHLHIAPLVNILSDYKPLGRWNHAPALTAGALHKTTI, Run with SignalP
  misc_feature (993)...(765): similar to gi575952 in the genepept database release 114, Run with FASTXY 3.3t00, default parameters
aattcggcacgagcagcttacttgtagagtccccccttggggctttctggaagcctccagaggcctcccatgtgtttgagaagaactcttctttggcaccttcacatcgcaccccttgttaatattctctctgactacaagccactgggaaggtggaaccatgccccggcccttacagctggagccctccacaagaccaccattcttctgccccagggtcatcccaaagctgcaaacccttaatcactgcactgtctacagtgtaccataaacatgctgtttcctagagaagggaagagaaggagcctcaccttgactccatgctaaccttgattcctaggccccaaagcagcactgcttgggtccactatttaatagcttcttcagcttcccaataaggctcagagctgaccctgggcccaggcaggagagcaaaccttcctatcccttctgggtatcctttgctgtgtaacaaactatcctaaaacttaaaggcttaaaataacaaccatgtgttatttttcataattctgtgggttgactgggcagctctggaagttctgctcaaggtctcttatgaggctttaaccgcatgggggctggagctcttgggtggggctaaaacatcgaagaaggctttactcctggggtgagggccttcacaggggtaattggaaagctgggaccggttggtctcctgggggggtttcccttaggcaagttagacttcttttcagaaaggtgggagtcagagcgatcactagggaggagcacaaacaccagcgtgttcggatgtgggcgctatagaccagtggaggatggagggagaagggggcgggatgcgtctgaagtgagggcaaagaggaaaccgtgttttgaccggtcgagagggagagaggctgagtggggcgaacgagtttacaattgtggggggcggggcggcaggcgatggagggagtgctggggacgacgggcagacggttgagggtgagaccgcctcgggcgggtggggacaggataagatggtcaggaacggcgacgctgtactatggggggcgggggaggagggcctgagtggtcaaggagcgtagaggcacagcg

SEQ ID NO: 82498 - DNA, 1077 bp, Homo sapiens
  sig_peptide (295)...(430): this location contains the signal peptide sequence, MLVFNLSLVLSHSVLEFVMFLYSLDSSHVCPLVVPVTLDLIYLVY, Run with SignalP
  misc_feature (246)...(147): similar to gi4103139 in the genepept database release 114, Run with FASTXY 3.3t00, default parameters
atatccgcaccagatatgcttggcctgcttgcaccacgcagatacttaagtggataaacagtgacagatgtaagtgcataggactacctacactatgtggctggtaggaacactaataaactatctgaagaggacatctgcttctcagctcctcatgacttctgtcatttagaaatgtgggcaagtatttcctgacttgatatgttattaagaaaaactggaaatatagattttttattaattttaaattttctgaaatatgcggcaacagacacggtataaatctagcttggaatgttagttttcaatctttctcttgttctcagtcatagtgtcctagaatttgtaatgttcctgtatagtcttgatagctctcatgtctgccctctggttgtccctgtcactctggatttaatctacttggtttatctaccttgtcagtcttacatattgatctgaatgttatttatttttttcctgagtctacacaatgcctttcctagacatttacttcttagctttcattctattgcattggtacagtttaaactatacttttttaaagctcaatttccatctttttataataagcttgctaactcagaagccacacgttaccaaagatgtattttttagcacacacttaaaaatacagaattggacctttcttgagatttaaacttacttttataatgggggcctgcaaacccgaatgacctgtctgcctacttctaaccgcccccctttacctaaccctttctaaaagcaacctccccctctcagccaacccacccaccgggcccacacaacccacccgcgcattcaagttctccccgagcacctcccgagaaacatcggacccgctggtcccctcccggtcgcccgcttatccacacgacgctccccctgccctccttaccctccctcccggtcatctacgcgccgaccacctatacgtacaagttctaccccgccacacactcgcagttccattcaggctacgcctgtccgtctcgcccgccccgtccccctactctcgtccctaagtcaactctccagtcgtcatccgtatgaggc

SEQ ID NO: 82499 - DNA, 1085 bp, Homo sapiens
  misc_feature (1)...(1085): n = a,t,c or g
  sig_peptide (115)...(250): this location contains the signal peptide sequence, MAVVQALTPLVSAAATASCLTSCSWSLTFPEHSVNYQSHPSETQP, Run with SignalP
  misc_feature (152)...(39): similar to gi3935146 in the genepept database release 114, Run with FASTXY 3.3t00, default parameters
aattcggcacgagctcttgccacctcctgtcactcagctcaggcagtggctcggcggccggggggtccttccaacagggtctgcctccccaggcccttccctctttccctcctcatggctgtggtccaggccctcactcctctcgtctcagcagctgccacagcttcctgcctgacctcctgtagctggtcactcacctttccagaacattctgtgaactaccaaagtcacccttctgagacacaaccttacctgcttaggagcaccaaggagaagcaccaccactggctgacagccaaggccacctgcccagccgcgggtgctgaagggcttccgtccaggggctgaggggaccctggcttgctgcctcggtgccaggcccagtgactgctcttcacccagcagcatgcgtcatctccatctgtgccctgcctctcccaagagactcacccatccctgagcatctgcagcacctgctggaagcctgggaccaccatcaactccaacgtcaactctcacttagcaattaaaaggaactaacagttggtccatgtgacggcatgggttaaactcacagtaattgtgctgacagaaagaatcaaagcaaaaactacacaccatgtgaatgcatttgggtaaatgtctaanaagtaaattaactgggcgtggtggtgtgcgcctgtattccccactaactcggaagctgaagcaggagaatcacttgacccagaggcggaggtttgcatgagccaagacgtgcccctgcccttcagcctgtgacagaacaaactcctctcaaaaaaaaaaaaaactggggggggccggacccatttcccctaagagggggagtccaatccagacccctgtaaaggagggacaggaaaagangctttttttgtacggcagggagaggaaaagacgcggctctaaaagtggaaaaggggggggcgggcaacatgataagtaagggggtaagtgtggcgacgggacgaaggaaagcgaaggagggtgatacgcggtcgacatataggggagggaaggcccgccggatgttttttgaaaggtggctacacgggaaggggacg

SEQ ID NO: 82500 - DNA, 770 bp, Homo sapiens
  misc_feature (1)...(770): n = a,t,c or g
  sig_peptide (721)...(586): this location contains the signal peptide sequence, MYRLSSSMLLRALAQAMRTGHLIGQSLHSSAVAATYKYVNKKEQE, Run with SignalP
  misc_feature (723)...(85): similar to gi1935056 in the genepept database release 114, Run with FASTXY 3.3t00, default parameters
ttttttttttttgggatcagagtttctttatgggctataggggccacaaggctggccaggtggcaaggtcaccggtggcccggtcaccgatacaggtagtcagcctggatgttggccgcgatctcggcctcccacttgtcaccattgttgagtagcttctccttgttgtacagcaactcctcatgcgtctcggtggagaactcaaagttggggccctccacgatagcgtcaacagggcaggcttcctggcagaaaccacagtagatacacttggtcatgtcaatgtcatagcgtgtagtccggcggctgccatctgctcttggctcagcctcaatggtgatggcctgtgcaggacagatggcctcacagagcttgcaggcaatgcaacgctcctctccagatgggtagcggcgcagtgcatgctccccacggaagcgcggactcagtgggcccttctcaaaggggtagttgatggtggcaggctctcgaaagaggtatcttagggtcatgcccagtcctcggatgagttctgtccacatcagaatccgagctgcattgtcagtttcggacttcatgtccacctcagactcctgttccttcttattcacatacttgtacgttgccgccactgcgctgctatgaaggctttgtccaataagatgtcctgtgcgcatggcctgggccaaagcccgtaacagcattgatgagctcaggcgatacatctcgaagtgctgcggcgccgtncntggncganattcctcagagttctc

SEQ ID NO: 82501 - DNA, 864 bp, Homo sapiens
  sig_peptide (50)...(185): this location contains the signal peptide sequence, MIELAFASFLKCASFSLLILFSFSFPLWFFLSCFACSYSFSCLLS, Run with SignalP
  misc_feature (26)...(236): similar to gi2447150 in the genepept database release 114, Run with FASTXY 3.3t00, default parameters
gccggggaattcccttttcatccttgtcttcttggattctttggcgcttatgatagagttggcttttgcctcattcttaaaatgtgcttcattttctttgttgatactgttctcttttagtttcccactttggtttttcctcagctgctttgcatgctcttactcattttcctgcctcttaagtagaatttcaatccttagccccttttgtcaccttcttcctaggcaatcccatgacctttgtactaatgatttgtaaatctctagtcccagcctaggcctttgtgtaaactcctccattaagtgcctactaggagatctgcatgcctagatgttctaatgtgatctcaaactgaacatagtcaaaactcaactccctgtcacccctgtcatgccatccacaccatgccgtgctgcaccctgtcataccgcatgagccaccagaccgtcatgctctgtgacttgtctgtctgcccaattctattttgagcttcttgagggcagggatctcattttttatctctgtatcttcagtggccggcacattgagcctgctcaatgaatgcgtgagagaatggaagtacggaagaagagcgacagcctgacagcgccccaaatgttgctccttactctaaggcctgctgatcacacccaccaaaaactcatgaggcccgtcgaaatgggtctagccctgacaaggggactttttaattcaccggcgcaccccatctcgccctccaggacggacggatgatcgcacctcccccctctcgggctggcacccaacgggctttacgcctggtcgtgcacccaacatcctatgtcccgcccccccccgcggcatttcccccccccgcagacccc

SEQ ID NO: 82502 - DNA, 838 bp, Homo sapiens
  sig_peptide (70)...(205): this location contains the signal peptide sequence, MFCSFPLLILQVYPTWKNPNWHLTFHTSVFSFPKGVRSLARGIPD, Run with SignalP
  misc_feature (422)...(328): similar to gi5139637 in the genepept database release 114, Run with FASTXY 3.3t00, default parameters
gtcatccccaattttaatagcctgctttttaaaaggtaatgcctgtgaaatgggtttgtcacattttctatgttctgttcctttccattgctcattttgcaagtgtatcctacttggaaaaaccctaattggcatctaacttttcacacgagtgtgttttcttttcccaaaggggttagaagtttggctcggggaatccctgaccatctccacagtgcctagcacggagtgaacatttactgaatactgctagcccatttgtagcagcatggtcccctgccctgtggattacctcctgttcatgccctggctggtctggccatgtctggagcacctgtgtggttatgagaaccttggcaaatgaaggaccaggagcaggagagctcttatgagatgaagttgaaggactagaggctgaactactggggagggaccaaatgggatttgggactaatctgtcacatggggagtgtaggcatccaggtaaaagtggcagcctgaacacatgcagtttttgtttttgtttgctccatccccaagccccactgaatgaacagcaaagaggctgggcgcagtggcccatgccctgaatccccagcgctttgggaggccgaggtgggtggaccacctgcaggcaggagatcgagaaccgcctggtcaagatggtgcaacccccgtttctactccactaccataatctcacccgggggccggcggccacgcctccaccccctagccacctttccccgcctgcggtgcccaacaatccttctcccccctccaacacccgtttgccacttgtcctttacacccccctcgtccgaccccacttctcccg

SEQ ID NO: 82503 - DNA, 845 bp, Homo sapiens
  sig_peptide (163)...(298): this location contains the signal peptide sequence, MQQMMWAGLLCPQLEWLQGRACRPCGLLASDAAALWFRGGISAWE, Run with SignalP
  misc_feature (250)...(77): similar to gi1780799 in the genepept database release 114, Run with FASTXY 3.3t00, default parameters
gtcgtggaattccactgtgtctccaccacatttttttgtgccctgggtctgctcatgggaggcagcgttaggaaggaggcggcctcacttttttctgccttccctttatcctgggctttttagttccttggttcccctcccccctttccattccattcatagatgcagcagatgatgtgggcggggctgctgtgcccacagttggagtggctgcaggggagggcatgcaggccgtgcggccttctggcttcagatgctgctgccctgtggttccgtggtggcatttctgcctgggaggactcctgtgcagttagcaacataagacatgaagcatataattgtcacttgtcagtctttttaaatcgctgtgcaaatgaattaacagttcagtttcttataattttagctttccaaatcatgctttcctgtgctgtgatagctcctgcagtccccgttttccagagactgactctcaagaggtctggaaggaccagcctgggcagcacagggaggctccatttctgcaaataataaaacgagttagctgggcgtactggcgcacacctgtggtcccagctacttgggaggctgaggggggaggatcacttgagcccaggagttaaggttgcgatgagccgtgatcactccactgcactccagcctgggtgaccgagctagactttctagagaggggcctggaaggaaccaaccccaactttttctttccccaagaaacccccccgccttttatagaccagacccttcggccctctgtcctcaacactccacacggtaggagggtcaccccatcccgcgcaggcgccactcccggccttcgggatacg

SEQ ID NO: 82504 - DNA, 831 bp, Homo sapiens
  sig_peptide (194)...(329): this location contains the signal peptide sequence, MSVLIWCLIFFPLEYSRPKRGLKVDNVCFSTVALSTGSRISNWSN, Run with SignalP
  misc_feature (179)...(266): similar to gi5764369 in the genepept database release 114, Run with FASTXY 3.3t00, default parameters
attagaggaactcattaaatcttttggaccaagagctaacactgaaccctagaactacctggtttcatgaatgccaaaagagatatttttagtttcacatttgtttaatgaacacaggccctggaaccatcatctgagtatagtaatttgagatataattttaagattactggaagacagtgtaataggcttgatgtctgtcctcatctggtgtttgatattctttcctcttgagtattccaggcccaagagaggcttgaaagttgataatgtgtgtttttccactgttgccctttcaacagggtctagaatttccaactggtctaactgtgaaacttgtcttcttgctgaaatgtttttccttgatttggggttttcttgaaattattgccaaagtcatatgacataaattgtaaatgccacaaaatttattctgctattcttgagataaaacatggaaatctgaaagttgaaggctaggacttgggaagagaacttaagaagctaccatttcaaaatccttaatgaagggattatattacctgcttgctttgaccttgaaagtctcttgaatgatcttgttcatctgtcagacaatccctgcgtcaatgattaataaaaacactctagcctgagggtgggcttgtgctgaaacactgagggaggcaaagtgcagcaggaattagaatttgaattccaaacccaaactatgcctagagcaagggtttctccaccctggatgtgtcacaagccagcaggatgcttttaccccccaccagcaacaccaagggaccccccccaagcccccagtggcacccatcaagccccccc

SEQ ID NO: 82505 - DNA, 913 bp, Homo sapiens
  sig_peptide (60)...(195): this location contains the signal peptide sequence, MKRLRFVLRVFQMTAFITGAHTITNYSDRRLYISPLSHFFMNSGS, Run with SignalP
  misc_feature (317)...(396): similar to gi13970 in the genepept database release 114, Run with FASTXY 3.3t00, default parameters
accgtggtggaattcactgtgtatgcaataatgacccattgtggtttttaacttatctcatgaaaagacttaggtttgttctcagggtatttcagatgactgcctttataactggggcacatacgattactaactatagtgataggcgtttatacatttcccctttgagccatttctttatgaacagtggttcttctgctcaaagtgttctgtctcattcttatgtttctcaaatcttctttaaaaatgtaagcaaatatttttaaagaatttttatgttttccaaaattaggattttagactttagggattttgatctttggggatttcaacattcgggattatggtgttcagtgtgtattttggggggattatgatcagcatcccatacagtggaatatcatttggcaataaaaaggaattaaatattgattcatgctacaacatggtgaacctaaaaaacattatgttcagtgaaagaagccaaacctacaaggcctacgtcctgtgtggctcaacggtacaaatggctgaacttatcaccatcacacccccccacccctctccagccccccactaccgacacacaaccggctcgttccctcactaatcgcgcactaaagcagaccctgaccacctcctcgccgcttcctgaccgccgcacccacactctttgactcccggggtgcactaccccccccacgccaccgttccctgcggcactctccgcctcaacttcccccaccccgacccagcccactccgccctcgccccacccgccgcctccctctctcgtgacccctcgccctaccctctcgcggtcgactcctcgctcgctcgccacgccctcccctctcctgcacacttccccctccactccatatcccctgacgcctccctccactgttccccg

SEQ ID NO: 82506 - DNA, 889 bp, Homo sapiens
  sig_peptide (140)...(275): this location contains the signal peptide sequence, MGLNIPGLWSLSSVLSLTGLTSPVVFLGSREQNPLAKRLALKELL, Run with SignalP
  misc_feature (308)...(384): similar to gi6010258 in the genepept database release 114, Run with FASTXY 3.3t00, default parameters
cctgtggtggaattccactggagagggcactgacaggaggtcagcctaaggacctgctcccgtgtgttctgtcaccagcctacgtctgacttccccatggacttcaaggtccaattgccttagctggaagccactggggatgggactgaacatccctgggctttggtctttgtcatcagtcctcagtttgactggactcacatctcctgtagtctttctgggttcaagagaacaaaatccgctggccaagaggttggcccttaaggagctcctccccttcacacactcccagcagagctcctcagagctgcccttgagaccccccagggcagcgcgaaggccctgccagcctaactctgtgggaggaacaggacatgcagctagatgctagaggctggctctaggacaagtgaggttcctgagctgcagaatggctccagcctcaggcccagaacagcctggttcaccagccggtgctgattaaatccagagaagagacccccatcgaaaggcacacgtcagagaccctccaggcccaagggactctctgagtttggggaaaataaggccggccggaaaaaaccacaaaccagagtccaacgggcctgcaaggcctaagatggtcttaactggggacgcggccgcacgggctcacccccggctcagtggcccgcacagccccagactggcgcccacacataactgcgaccaggcccgcgggccgggcccccaccccagcgcggcgcccccgccccccactcaccttcaggatcgcctcccacttcgcatcttcaacctactccaatcctcgcccctccccgccctgtaaccacccctcggtccacccctcccgctcgccccctccgtctcttcctcaactcgcagaacc

SEQ ID NO: 82507 - DNA, 1652 bp, Homo sapiens
  sig_peptide (44)...(179): this location contains the signal peptide sequence, MAAAAVSGALGRAGWRLLQLRCLPVARCRQALVPRAFHASAVGLR, Run with SignalP
  misc_feature (44)...(1000): similar to gi3252827 in the genepept database release 114, Run with FASTXY 3.3t00, default parameters
aaccgtctcgccaagcttggcacgaggcgtgcccgcttccaaaatggcggcggcggcggtatctggtgcgcttggccgggcgggctggaggctcctgcagctgcgatgcctgcccgtggcccgttgccgacaagccctggtgccgcgtgccttccatgcttcagctgtggggctaaggtcttcagatgagcagaagcagcagcctcccaactcattttctcagcagcattctgagacacagggggcagaaaaacctgatccagagtcttctcattcaccccccaggtatacagaccagggcggcgaggaggaggaggactatgaaagtgaggagcagttgcagcaccgcatcctgacggcagcccttgagtttgtgcccgcccacgggtggacagcagaggcgattgcagaaggagcccagtctctgggtctctccagtgcagcagccagcatgttcgggaaggatggcagtgagctaatactgcattttgtgacccagtgcaatacccggctcacacgtgtgctagaagaggagcagaagctggtacagttgggccaggcggagaagaggaagacagaccagttcctgagggatgcagtggaaaccagactgagaatgctgatcccatacattgagcactggccccgggccctcagcatcctcatgctccctcacaacatcccgtccagcctgagcctgctcaccagcatggtggatgacatgtggcattacgctggggaccagtccactgattttaactggtacacccgccgagccatgctggctgccatctacaacacaacagagctggtgatgatgcaggactcctctccagactttgaggacacttggcgcttcctggaaaaccgggttaatgatgcaatgaacatgggccacactgccaagcaggtaaagtccacaggagaggcactggtgcaaggactcatgggtgcagcagtgacgctcaagaacttgacaggtctaaaccagcgtcggtgagaggaaggggtataagctacaatgcctagaagagaatgagcggacagattgaaagagctttgaaaagtataaggtgccatccacataacctggtgttcacgagaacacactaaaggactcctgagtcactaccacagccacctggaaaccacaaggcatttgatgctaccgttctggtcagggattgggctgcttcttcagttcctaataccagaccaagcctcctgatgcctttctgcactgcaactgtgtgattgaaaaatgagatgttcatccaagcagtcaagccacagaaacccagcatgtccctgtcacaatctcatgggcaccttgatcatgtcttaaccttcccttaaccttggggctcccaagccagagtcaaggtctgacgccacctcaaggtgacagctcatctccagcacagcacaggcgtgtgcacacagaggtgttccttgcagccccctccctctcaggtgtcctgagatgctgctcctgggagccccctcagaaaactgcctcacctgagacaagtgcctgctggacagaggtgtgattccaggcctggtgtcacatgacaccagcatgcattgcaggattattagtgtattttgagtctgtaaaaataataaatatgtttgaagtaaaaaaaaaa

SEQ ID NO: 82508 - DNA, 446 bp, Homo sapiens
  sig_peptide (268)...(133): this location contains the signal peptide sequence, MRPGVSVHLSGPWFCCLCNEIVGLLDSPRVFHLILISEEGNGKVY, Run with SignalP
  misc_feature (127)...(324): similar to gi3243179 in the genepept database release 114, Run with FASTXY 3.3t00, default parameters
cttctagtccagcgtggtggaattaagagacttctcactgatgtctgtgggccttttactgtcttcggaagaagcgttcctgttggattcgagatctcagttgttgggctataagattctcatcatattggtaaacttttccatttccttcctcagaaattagaattagatggaagacacgtggggagtccagaagcccaacaatctcattgcataggcaacaaaaccaaggcccagaaaggtgaacagacaccccaggtctcatggttgactgcgcagctgggctggaacccagagccctttccatatcgctcccatgcctctctgcctattgaatgggcaatttctgaccacgggagccagggcatgttatggcaatttctgaccacggcagccagggactttccacactccgggggggaagcgccactgagaacaagcctggg

SEQ ID NO: 82509 - DNA, 1464 bp, Homo sapiens; identical to SEQ ID NO: 58749
  sig_peptide (288)...(423): this location contains the signal peptide sequence, MRSLGALLLLLSACLAVSAGPVPTPPDNIQVQENFNISRIYGKWY, Run with SignalP
  misc_feature (288)...(1347): similar to gi24479 in the genepept database release 114, Run with FASTXY 3.3t00, default parameters

SEQ ID NO: 82510 - DNA, 445 bp, Homo sapiens
  sig_peptide (198)...(333): this location contains the signal peptide sequence, MWVVQDLMWPWLGFILEWHEPSFTSCCHYTRIFMDTCRLLTLCRE, Run with SignalP
  misc_feature (244)...(177): similar to gi1785641 in the genepept database release 114, Run with FASTXY 3.3t00, default parameters
cctgcgaggtgcaattcggcaagtgggaagcaagattgttctttttgtcttggagagagacgtaatctcatccaaccagcctgggtcaagggtggccagagtcttgcattttcgacgtacacagtgagaacaggcagcatgctcaggtccatggcagatcgcctctgccaacagggacagagcatgcagagaggcagatgtgggttgtgcaggacctgatgtggccctggctgggatttattctggagtggcatgagccttcatttaccagttgctgtcattacaccagaatattcatggatacctgcaggcttcttactctgtgcagggagcagtcagggtcctggcaagaaactgatggaacattcaaacgattaactgaaagagtagtgaagggactacttacagaggcgtgggctgggtcaaaagcaccaattagtgaaat

SEQ ID NO: 82511 - DNA, 1042 bp, Homo sapiens
  sig_peptide (21)...(156): this location contains the signal peptide sequence, MPVPHGPPPVWGYTRLCCLALWVDGETPCVSLTRAGAPHRACRGR, Run with SignalP
  misc_feature (456)...(356): similar to gi3288513 in the genepept database release 114, Run with FASTXY 3.3t00, default parameters
tctgtgcaggatttcctcggatgcctgtgccccatggtcctcctcccgtgtggggctacacgaggctgtgttgcctggcactctgggtggatggtgagacaccttgtgtgtctctgaccagggctggggcccctcacagggcatgcagaggacgcaggtttcactggagagggaagtcactaggaggtccccgtcttcctccgggaggtcctggagatgcagtctccatcatccaggcacagtctgacctaatctgctctcagcctggacaaatgtgggcatcagtgagactgccatccatttagccacccccacaaagggtgctgcagttttgaggactgtttggaacaagtctgggtccaggcggcctctgagaccggagcccccaggtaagaatggatgtgatgggccctggggaccagctgtgtgtccgtgggcaggaccctgcacccgctgagcagacacatcctttctctgaaggctgtgttgatgggtgagggcactggcacagcccattcagagaagagggccccttcagacacaggtctgggctggagaaacaccctctttgcctcaggtggcttggagtaggtttgctgctagcacttgcttggctgttggagacgggccccagcctatcatgagagcagtcaggaaacaccatctgcgtgtccaagccctaggagggcagtccttgagtcctgcaccctggctggccatgcctagggggatttaagctgagcccttcccaagagccagggctgtcttgggtggagaattccttagtccagagcctaccctgtgctggcagggcaggtcctgtgtgcccgtccatcctgctgtgtctacaccacttggcatgagggagggagttggggacaggcgagtgtggagagtctctccaccagagattcggcagagccagggattcgagaatgaaactggggctctcagcgggtcaggctgtgggaccctgtggcttaaaagcaggatggctcattttgcctctagtataactggagaatgggcatgtggagaaaac

SEQ ID NO: 82512 - DNA, 812 bp, Homo sapiens
  sig_peptide (226)...(361): this location contains the signal peptide sequence, MYVAGYLVANSAICQLTQHSLVKLLLQGCFLIGSLHLCICVPMCV, Run with SignalP
  misc_feature (337)...(372): similar to gi551357 in the genepept database release 114, Run with FASTXY 3.3t00, default parameters
atcattacgccaagcttggcacgaggatttgaagttctaaaagtttccattttgcattttggttttgaatgtatagggctttatttatcaaactgcagcgtaattttcccttcagtttgaggctgcgattgtgaaacaaataaattgaaacttaagggcctgttctctccaaatttagttccattatcactttaagaatgcacgctactcaatgatacaaaagggatgtatgtagctggttatttagttgctaactcagcaatatgtcagttaacacagcactcccttgtaaaactccttttacaaggttgttttctcattggaagtctccatttgtgtatttgtgtacctatgtgcgtgtgtgtgtgtgaatatcggatattacatgacagcaagatatcttttaaatatttaagatttacaattttaaagagagaaaacaagaataaagttttgcagaagcttaaaaaaaatttaaaatcagttcacactttgagctaaaatggggatagtagcgatatttcaaatatattaattatatgcctctctcatgactatgagattcttggatggattgacaagcccctcccttaaaggatattatgggcttcacgctacagttgagagatcgtgagggatttaggagactttagacgggcgtttgggggctttttttacacgaaggaatattttggatttaagagaggagactattggaccccacgtgaagagacacttttagtgtgggggtgtagtacgggaacacggagtattatatcatcgcctctaccacgaggacacctacctcgcgg

SEQ ID NO: 82513 - DNA, 908 bp, Homo sapiens
  sig_peptide (161)...(296): this location contains the signal peptide sequence, MQLFTSTQALTGLALPLPADPSGSPQKGTTMCQAMKTAKRQEPHT, Run with SignalP
  misc_feature (330)...(211): similar to gi3091071 in the genepept database release 114, Run with FASTXY 3.3t00, default parameters
cgccttgcttggcacgaggaggggcagatagcatttaggggtctaaactattcttcactgaagaactgcagatgaacaggtattctttggtactgcaaagtaggacactctaatagagaagaggtttaaacaaaagccattcagctgagactgcaggacaatgcagctattcacttctacacaggctctcactggtctcgcactgcctctccctgctgacccctcaggctcaccacagaaaggcaccacaatgtgtcaggccatgaagactgcaaaaagacaagagccccatacatgcagcacgctctgccaggtcttatatgtatgctttacagaatctaaggtctccaacgtctgaccatgttgttccttccttcctcatagtcactgcacactggagggtgtagaggctggcaaggttagtcacctgcccaatgcccacagatcatgaatggcaggctggagcacctctctgggggcaagtcaacatccttctcaccagcacactggaccttaatgtggatgccaaaataaaggcttcctgcaaagcaaaaaactcaaaggaagggtttccgcccctagggtgggggacagggaagcagtctataaactgaggagaccctaaatccaccctggcctcctagaacccagcacagcccccccagccagtgccttggagcgtgggtaccccagcaccccagcacagttggggcccaaagcccacccccgggttcccaagcttgtaactgtgggcaagggccgcattggaaagctctgtcaaggccaccagcaagagggggctccctccctcccttcctgagcttctggtccaacttgggaaacaaggatgggaattatgcaatggggccttatgttttcaaggaaggttttaaggcctttgaacccaa

SEQ ID NO: 82514 - DNA, 934 bp, Homo sapiens
  sig_peptide (127)...(262): this location contains the signal peptide sequence, MGHLLCVWGFTYILPCISLRHSPLQPPGWEGFCRNVSFPLLRASL, Run with SignalP
  misc_feature (202)...(227): similar to gi1360719 in the genepept database release 114, Run with FASTXY 3.3t00, default parameters
tatcgtcgtaaacatcactacgcctagcttggcacgagcctaatacagaccctatctcaaaaacaaacaaaaagagattgctcattggcacttggtccctgaatgtgctaatgagatgtggcattcatgggccatctgctgtgtgtgtggggttttacatacatccttccttgtatatccttaaggcattcacctcttcagcctccaggatgggaaggtttttgcaggaatgtatcttttcctctcttgagggcctcacttgctcctcaccataggaggaaggacggatttatctgattggagagactgtaaataaagactgactggaacatatggaccaggggcgggtctgctgcatggacgttgggctgtgtgggttgctcactctcctgccctcttcttgcctatgcagaactgatttctcacctctgccttcctgtctgttcctggtgggttaggaacgtacaggagagaagggatgaagattagtttctcttaccccctgaagcattatttttcacagggcctctccacctgttcagtgttgagtaagtgctgaatgagtggacagggaaacagccttggaaaagcttactatcccgcacatccctactaagtgatggcaatgaatcaggggagccgggtgtccacaccccaagcgcccacccttggtgggttgtaagaatcccctggttagggagggcatgacggtaaacatctccctccgggttattccctgccatctggctggtttgatcccccttctaatccccctggggggggttccccccttccaatcaggcttgggggaccacaggggccctttggtttactaacctgggccctggccacaaccgttattttatggggacccccgaagccatggggcccaacccttttgggccctctttttctcaacattcatatgcgtgcc

SEQ ID NO: 82515 - DNA, 831 bp, Homo sapiens
  misc_feature (1)...(831): n = a,t,c or g
  sig_peptide (233)...(368): this location contains the signal peptide sequence, MHVLIRTPCSLILCLANSSHASLPGFSASSFLFKESCRLLLNSSF, Run with SignalP
  misc_feature (221)...(275): similar to gi4140564 in the genepept database release 114, Run with FASTXY 3.3t00, default parameters
tgattcactggccggcgggactgggagaacattgtttattctattgacaatatctttcccaccacgagggcaatacccttctgagtacttgaccaatgctctttgaatttcagggcttcccaatttgaatagttttcaaatctcagttttaccagtccagtttgaactttaaagactattcctactcatcttttcagctggtttttcatttgattttataccatttcctcacatgcatgtactgatcagaactccctgctctctaatactctgcctggcaaactctagccacgctagtctacctggattctctgcttcatcttttctatttaaggagtcttgcagactccttctgaattcttcctttctgctgcatgggctagaaattctctcaggggcaattgcaggccaatgcaactcattttgtttgttttccatctctcagggatcactgtccttcaatgcctcatgcccgttgccttgaaaaccattgtttaatatattcatctggacttttaagtgcggccattggaaagataaatctagcccccgggattccatcttggcccgagagcacaggttctgctacatattggtgagccctttttggggggggcggcgcgcgattgtagacgccactaggcgcgtcaacaacatacgagaagaggagaactcgtcgggatgttgtgtacgcgcggnngacgagcccgcgancancgccgccaccccccgggccgggcccgcgccgtcctccaagcatcacatggtgcaggcggacgggtatctacgtgggacggctatatctaggcacgtggaggaccgacggcgtcg

SEQ ID NO: 82516 - DNA, 446 bp, Homo sapiens
  sig_peptide (193)...(328): this location contains the signal peptide sequence, MLYCTSCLFLYINIILSKIARGVRFCPTCKVVSNPIPFVDANEDR, Run with SignalP
  misc_feature (291)...(181): similar to gi2648483 in the genepept database release 114, Run with FASTXY 3.3t00, default parameters
tgaattcggcacgagatgttgttgtttttccttacatctataattttagactttgagaactagaagctaccctgattatctttagaagactaccagaggagtaaagcagatgccctagatctcgttcagatttggtacctaaacaaatgctaaacccatttttcctaacacctatttaggcagtttttcatcatgctgtactgcacctcttgtctttttttatatataaacataatcttgtcaaaaattgcaaggggtgtaagattttgccctacttgcaaagtagtaagtaatcctatcccttttgtggatgctaatgaagacaggagacttctgggtcagagacaaaggacttcattacaaaagtagcagtcactggagtattattagcactttcttgtgctttctcctagagttccagttcccacaggttaacaccaagagag

SEQ ID NO: 82517 - DNA, 457 bp, Homo sapiens
  misc_feature (1)...(457): n = a,t,c or g
  sig_peptide (280)...(415): this location contains the signal peptide sequence, MWREIARRGCLFLLGISLLRSCFSRVEVNEILHSPVNYSTYFPAL, Run with SignalP
  misc_feature (302)...(211): similar to gi930097 in the genepept database release 114, Run with FASTXY 3.3t00, default parameters
natagaacgcctgaaggacnctgcacgagcaacaactttagttgattagttcatcaccaactaagatcacattttatattatgctttggctttttacaaaaagtaggtagtttctaagccctatcttgtaactagtgatttaatttggttagagctggaggttttgctttagtcatgaaaatttccacacaacttaatctggttatctgcctttgcaaagttgtggggaagggagatcggcagtggtggagtggctgaaaactgagtcatcttgactgaatgtggcgtgaaattgcacgcaggggttgcctatttctgctgggcatcagtctactaagaagttgcttctctagggttgaggtcaatgaaatactacattctccagtgaattattctacgtattttccagctctattattatactgcacattctccagtgtattattttcttttgaan

SEQ ID NO: 82518 - DNA, 1790 bp, Homo sapiens
  sig_peptide (572)...(707): this location contains the signal peptide sequence, MTLLWPHTAACLSVTLYLPASSAKYFKRGEGREKFITNPTTRKKK, Run with SignalP
  misc_feature (186)...(542): similar to gi450476 in the genepept database release 114, Run with FASTXY 3.3t00, default parameters
gacggaggtgcgccaaggatccccgtggccatatggcgcgtccgactagcagtctatgcctgcttctctacttcttctctactggtaaaagcgtgcctgtatccatcttacccggcgttgtgcgcatgctgctgccaccgcctcctcatcttctgcccggccaaccggcctgccccgctgcagtgatgtgcgacaaggagttcatgtgggccctgaaaaacggagacttggatgaggtgaaagactatgtggccaagggagaagatgtcaaccggacactagaaggtggaaggaaacctcttcattatgcagcagattgtgggcagcttgaaatcctggaatttctgctgctgaaaggagcagatattaatgctccagataaacatcatattactcctcttctgtctgctgtctatgagggtcatgtttcctgtgtgaaattgcttctgtcaaagggtgctgataagactgtgaaaggcccagatggactgaccgcctttgaagccactgacaaccaggcaatcaaagctcttctccagtgatggatggatggactgataactccggaagaatgactctcctgtggcctcacactgctgcctgtctgtctgtcactctctatctgccagcttcttcagctaaatactttaagaggggtgaggggagagagaaattcataacaaatccgactaccagaaaaaaaaaattgttttggaggaggggcaaaaggaaccatgatcaggcttttactgggattcctgatcaagtaagcctcttccctttctaataaaatatacaccttatacccaagggagagcaaagacaaaatacaccagtaacatttgaccttttcagctccctagctaatttattagattgtgttgaaggtctgattctacaaaggccaactctacatatttggtagccctaactgtctgagcagtagtggctgctgtgatgtaaacttagggtgctgagataagcaattagctctagccttctgccttaagaatgcactctactggggatttcctggcatagttaagagcgctgcctataaggttggtgaccaaatctttcctcggtgactttaagctttatgtgaaagcttagttaaggtgaggaggggcacactcctaaattgctggatgactgaactttggattttctctcccctttcacatggatttcatgtctctttagataaaactgactagttttatttataaaatcttaagttttggaagtctaaaggagaaaccattccagtatgcatatttttttctcctctagattcatacatttatatagcattgaaacactttcaaactccctgctggtagtaaaaggggatttaaaaatagaatcatagccataagcctgttagtatcatatgaagagagaacagttatcttagtacctatggattttctttatttgctgtttgaatggattgaccttggttatgtgttgagaattaaggaacattctttgaaatgcctctctcagacccatcttggaggctgattacttactgcaccaaagctatcactggggtgagatttactgtttggacaaatttagccccatcccttcaaaaatacacttgtaaccagggtttcccagagttgttcattgtttgtgattgcatgtttccttccttcaactgtgttctccctggcattcagagaggagggagaggaggaagaggaaggggagggaagcttcccaagagtagcctcaacctgtgcttctgtgcattattctgagaataaatttctgtttcaaaa

SEQ ID NO: 82519 - DNA, 421 bp, Homo sapiens
  misc_feature (1)...(421): n = a,t,c or g
  sig_peptide (38)...(173): this location contains the signal peptide sequence, MPGFSVLGTILHIFCXXXETVAFYLAKHSFLASEGLTHPLAFGLN, Run with SignalP
  misc_feature (315)...(206): similar to gi1334605 in the genepept database release 114, Run with FASTXY 3.3t00, default parameters
gggagttgccatctgctgttaaggncgataactcgagatgcctgggttcagtgttctagggacaatattgcacattttttgttcngngnaggaaacagttgctttttatttggccaagcattctttcctagcatcagaaggattgactcatcctttggcatttggtttgaatttgagacttttacaaatcatttctgtcttttataggtattcagtaatccaccaaagatccttactgttcaagaaatggctggattgaataacaagacaattggatatgagggaattcatagccctagtgtgcttccttctggtggagaagaaagcagatcaccatctcttcaacttaagcctctggattccagtgttttacagttttccagtaagtacaaatggatcctaggtgaagaaccggtggagn

SEQ ID NO: 82520 - DNA, 1285 bp, Homo sapiens
  sig_peptide (425)...(560): this location contains the signal peptide sequence, MACFTALSLGLPSTTLLWWVTFLKTLSSSFCFPSLLLQKPNPSIT, Run with SignalP
  misc_feature (379)...(294): similar to gi215781 in the genepept database release 114, Run with FASTXY 3.3t00, default parameters
attcggcacgagagaccctgggtcttggactgacagatcccaatacaaaggtcaacatcttggaggatttctaaaattagattcttgtttactcctaaaatgaagctgtgttcttccctctgggtctgcatgaggttaaggggctctcaaaaggtggcagaaaaaacattacttggagatttcacatttctgcataggaatttactaggctctgatgtgtgtgttttaaaattaaaactaagtcttagtgtaaggtttaggccagtctcagttcatccatgggagctgggcagattgctgcccaaacaaaatccagtggcatgtacaaagggggaaatggctgtgggtaggcagccagctgtgcctccctctccccaaatcaaaaacaatcggataattagtcctctgtcccactgtttcccccatggcctgcttcacagctctctcccttggacttccctccaccactcttctttggtgggtcacttttctaaaaaccctgtcttcctctttttgctttccctctctccttttgcaaaaacctaatccttcaataactttcctaaaaatcatggctaggagatacacgctcgacccttgctggcgggaaaaaggcaccattctattgtcacggttgactcatcatttgccggcaatagaatggttggcttcgtgaggcttttttgtttcttttttacgacaaacgctcattcttgctgcccagccctgaaggccgggccctctcgaataatcgggccctgcacccctcgtcgctcgggtagcgcgacgttgctccccgccccgcgcgccaatgcgctgccacgcaatggcctgcggcgccgctccggcggtctaggagaatgtctgacggagtaaccggtgcgacggcgggccgcgccgggcggacgcgccggaggagggggcgcacgcgccgctgcggccgggccgcggcaacgcgcggcacgcggcgcactccggcatgcggggggaagcgtcagacggctcggatccgcgaggacgggcgatcagtggtttaatggtattgtggcggagcgacgcgaccgcgcgccacccgggaagttcgcggcggacccggcgctccgcgtgttactccgcggcatcccggcgcccatccggcgcgacgcgcgggcacccgccgggcggcgcgcgcgcgaactcccgagcgctctgttctcgcgtggatatacacgggcgcattccgccgcgaactcgcgccgccccttcggatactaggtggcgaatactggcgggatcaccgcaggca

SEQ ID NO: 82521 - DNA, 390 bp, Homo sapiens
  sig_peptide (252)...(387): this location contains the signal peptide sequence, MIAFLFGLKVCLWRVAINSNPAVLWLKRKKSRECFQCAFHRILLY, Run with SignalP
  misc_feature (162)...(225): similar to gi5524012 in the genepept database release 114, Run with FASTXY 3.3t00, default parameters
acgctgactacatgtttttgatgggtgatatctgcctgaaaaaacttgaattataattaaactcttataccccatgttaatattagcccactcggtatacagactgttaaaaattatgtcacatcttacttgactctgattaccactgtacatttgtattggaatgggtagatggtatatcttcaatttcatatattaagaaatggacaaacagaaatgaatgatttgcacaaactcacctgattagtgttatgattgctttcttatttggccttaaggtctgtctctggagagtggctataaattctaatcctgctgtgttgtggctcaagaggaaaaaatctcgtgaatgttttcagtgtgcgtttcacaggatacttctttatcctg

SEQ ID NO: 82522 - DNA, 402 bp, Homo sapiens
  sig_peptide (172)...(307): this location contains the signal peptide sequence, MSCILASSLVMLVHLVWKLTLCELLWTDQHAQSTSIYLGEIVGNQ, Run with SignalP
  misc_feature (213)...(111): similar to gi57501 in the genepept database release 114, Run with FASTXY 3.3t00, default parameters
aaaacaaaggagaaagtgaatgaattgagattaatgcaggccacatgctgcagactagtggtggtccagcttcagcgtgcatcagactcatccagagaactcgttaataacatacatgtccctgagctccacagcagactttctgatttagtaggtctggtatgaggtgtgatgagttgcattctggcaagctccctagtgatgctggtgcacctggtctggaaactcacactttgtgaactgctgtggacagatcagcatgcccagagcacaagcatttacttgggggaaatagtgggaaatcaaactgtacgagggaagtccaccagagaagtattaaaaagtaagtgtgctggtgactgtcttcatttatcctggagtggggaatacctagtatgaacc

SEQ ID NO: 82523 - DNA, 417 bp, Homo sapiens
  sig_peptide (30)...(165): this location contains the signal peptide sequence, MPQLCGLLLSVWGLGWLGTEDPKVVDDLLGITWSTPQPELQASDF, Run with SignalP
  misc_feature (207)...(273): similar to gi2944153 in the genepept database release 114, Run with FASTXY 3.3t00, default parameters
agccgcgcctgggctgcagagcgggcttcatgccacagctgtgtgggctactcttgtctgtgtgggggctgggctggctggggacagaggaccccaaagtggtggacgatctccttggaatcacttggtccacaccacagcctgaactccaagcgtctgactttcgcagtaggcttttcacaataaagcttttcactctggaggctccgggtggcccacaaacacctcactggagaaaaccaggagagaagccacaatgtctctgcaggtgccccggctcagccttcaccacaatggtgcggtgtgcagagggggctcctccgagaattctggtgtgcagaggagaagctcctccgagcttctccaagtccccccagtggcacctaccccgggtcccagaggagcccaggctcatcc

SEQ ID NO: 82524 - DNA, 412 bp, Homo sapiens
  sig_peptide (49)...(184): this location contains the signal peptide sequence, MAHISFFCYLPFMYMVGATGPRGIKPLPLSLTTAPPALPLDYSLH, Run with SignalP
  misc_feature (222)...(334): similar to gi1127792 in the genepept database release 114, Run with FASTXY 3.3t00, default parameters
ttgcactcccgtacgaccacgcgccggatggccattttcccatataccatggcacacatttcttttttctgctaccttcccttcatgtacatggtgggggcaacggggccacgaggcataaagcccctgcctctctctctgactacagctcctccagcccttcccttagattattccctccacacgcaagcattttgctgttactcaaactctaagatcattccctcccggcaaagcatcctcacctctgtaccttctacctggcaggcaccttctccatgtcttcaccggggtcctccctccacttcactcaaggcactcactttactgagcatagccctgatcctacttccctgctcttctttctaaaggccatgccacctgccatgccatgaacttgcatctctgcttg

SEQ ID NO: 82525 - DNA, 368 bp, Homo sapiens
  sig_peptide (78)...(213): this location contains the signal peptide sequence, MYFLLLLPSKTLRSPILICHSVNDPQVLVCKPTFLRAYRTQVVKS, Run with SignalP
  misc_feature (165)...(287): similar to gi458686 in the genepept database release 114, Run with FASTXY 3.3t00, default parameters
tctctttccccctgaaacaggctctgcttccctgggcttactcacggagcaccaaaaggcccaacccccaaacctccatgtatttcctcctccttttgccctccaagacactcagatcaccgatcctcatttgccattctgtcaatgaccctcaagtacttgtctgcaagcccacattcttaagggcttatagaacacaggtggtgaagtctccgaaattcatgatggatttaaagctgaaagaactgactggtcataggggtgcaaatatattagaggatggtttccttaagctgctcaaaggatgcacctcatagatggctgcaatcattctttactaactaatgaacaagatctccccaccctgt

SEQ ID NO: 82526 - DNA, 703 bp, Homo sapiens
  sig_peptide (259)...(394): this location contains the signal peptide sequence, MYLHVLVLSHRILLSPYIPSFKSVPPPVFSILQMAPMSILDIDHP, Run with SignalP
  misc_feature (239)...(309): similar to gi2635097 in the genepept database release 114, Run with FASTXY 3.3t00, default parameters
ctaattttggttatattatgcggccttggataaggaagtttcttaggctttcatattccaaattattggactattctaaaaacatttttaagtattttgatggatgtagtctattctaatataatgtctttcaagtgtttgaaagttactacttattcaaaactcaactgtctggcagcttttcttatcctgaactctgtgaagaacttcagggacaggaggtaaaatgtctttgaagagtaagaaatccaaaacttcatgtatttacatgttctggtcttgtctcataggattcttctttctccttacataccctcctttaaatccgtacctcccccggtcttctccatcttgcaaatggcaccaatgtccatcctagacattgatcatcccagaagtctaggaggtgattcttctcatttttttagttctgttgcgcaagccctcaccttttgcccgtttgccctcaggccttttaacaactattccttacagagaccggttttccaaaaggcccccgcattccatcatttcctggtgaaaaaattttaatgggatcctcaccccctctggatggtttaacccctcgagacccccgggaatgttgccttgccttgccttctgttttaattcgaaaaaccttgcttccctcagacggggggggaataaaagttttgggggccccccccccccccccccccct

SEQ ID NO: 82527 - DNA, 355 bp, Homo sapiens
  sig_peptide (69)...(204): this location contains the signal peptide sequence, MVTSERKLLARVCHVCLCLCLGSLGSCSWWLLSTVTPRVSVSKPL, Run with SignalP
  misc_feature (140)...(37): similar to gi2996189 in the genepept database release 114, Run with FASTXY 3.3t00, default parameters
ctcatgttgctaaaatgcatgtttttcacattttatgactctgaaatgggggtgcatctttccaaagcatggtgacttctgaaagaaagctgctggccagggtctgccatgtttgtctctgcctatgcttgggcagccttggcagctgttcctggtggctcctctcaactgtaacccctagggtttcagtcagcaaaccactgaacggccatttgaggaaagattctaagtctagttattgtctgaaaaccttctgttgacatttcctggtaagattgagaaagtgctagtatcaaaacttgcagaacgcttgttggcggctgcagcagctatgctcttgagtgacagagaagat

SEQ ID NO: 82528 - DNA, 732 bp, Homo sapiens
  sig_peptide (99)...(234): this location contains the signal peptide sequence, MFLVFCNIITVITMTSLFLILLSCIFILITCCYKCRYISFSFTFS, Run with SignalP
  misc_feature (93)...(357): similar to gi456385 in the genepept database release 114, Run with FASTXY 3.3t00, default parameters
cacagtttcttccattaaggcattccaagccagtagacgtattcttctgtggccaaggtagctcaatgatttgaccttcttaaatgtgaacatttcatatgttccttgtgttttgtaatataattactgtcatcaccatgacatctttatttcttattcttctctcatgtatatttattttgataacctgttgctataaatgtagatacatttctttctcctttacattttccgtcacaccctccggtttctttgttagcatcctccagtatcttgcccacattctcctacttattactcttcaattccatttcagagtctgttacgtgaacataattacccttatccctcttgcacaaatctttctttaatctgttggatgactctgaaaggattagtttcagtttggggcttgagctgtgtccagacacacaactgctattagttcctaccatagttctacctgggtcagaagaatgagaaaaataatccttactttttcctcctctatgagcaggaggtgcttactttttactgatttgaccagctgaacattttaagataatattcagcactgtagatgaagattagaaattactgcgcaaactttaagtgagaataaaagaatttatgggggtcctcacaaaattttaaaccaaagtatctttcacttatcgggcttctctaaagtaagaccacagccattttgcggggtcatttcaccattacctc

SEQ ID NO: 82529 - DNA, 760 bp, Homo sapiens
  sig_peptide (190)...(325): this location contains the signal peptide sequence, MTAWFCSFLSSHWVIKLPRFLLLVLPFFWGKKFSLGLISQFFSKA, Run with SignalP
  misc_feature (552)...(479): similar to gi5353758 in the genepept database release 114, Run with FASTXY 3.3t00, default parameters
tcactttgttgctcagggtgatttttaactcatggcctcaagtgatctcctgccttggcctcccaaaatgctggaattacaggcctgagccatttcaccccagcctatttcttattctccctacaagggacattttagtgtaaggcaaaaatataaaattatcactcataatgttttttcggaaaatatatgactgcatggttttgtagttttcttagcagtcactgggtcattaagttacctcgttttttgcttcttgttcttccttttttctgggggaaaaagttttctctaggtctcatctctcaattctttagcaaggcatatttttattcatcataccataactatatacatacttaaaagtaaatgacattttgtcttaccatggatttctcacgtatctggtgaagtggtttaaactgtccaattttatgtgcattgaaagcaaaagctagctgagaaaggaaagcttttctcatcaaataggttgaaattactgtcgtaaaacagtgataaataccagataagatatgtgatccttgaagtttaataaatatttttggactgttaatttatattcacttttgggcatgttttttttgagacatggtctctatagcccaggatggagtgcagtcatgtaatcatggctcattgcagcctcagcctcctgggctcaagcgatcttcccacttcagcctcctcagtagctaagactacaggcatgtgccaccatgcctagctaataaaaaaaaaa

SEQ ID NO: 82530 - DNA, 372 bp, Homo sapiens
  misc_feature (1)...(372): n = a,t,c or g
  sig_peptide (109)...(244): this location contains the signal peptide sequence, MFGKRMELTNCILFTVCVLESMDHIFIDLSSKSLKNNFEDYMKFG, Run with SignalP
  misc_feature (145)...(244): similar to gi5814113 in the genepept database release 114, Run with FASTXY 3.3t00, default parameters
gatcttttcatctgagtttctctaattgaggagtgatgtttcttgatggtaggactcttcattcctgctatctggcataattcatgggacacattagatattcagtaaatgtttggtaaacgaatggaacttacaaattgtattctctttacagtatgtgttttagaaagcatggatcatatatttattgatctgtcctccaagtcactaaagaataactttgaagactacatgaaatttggcaacctattaatgaagtctattcataatatttctattaggatcctagagaggccagacataaaataatacagtctacttttattttactttttgagacaggatctctctcatcacccaaggtggactggn

SEQ ID NO: 82531 - DNA, 691 bp, Homo sapiens
  sig_peptide (145)...(280): this location contains the signal peptide sequence, MLFPLLARGRSLWFSHVFSEQVHGPVLVCGLLVSQNCVRTLQNPY, Run with SignalP
  misc_feature (253)...(195): similar to gi2462953 in the genepept database release 114, Run with FASTXY 3.3t00, default parameters
aaatctttctcaaaaggtgtaaccttctgtttcaccccatggatctttcctactaatgaacaaagcccaaacccttttagtctgttttcagcctacctatccagacttatctactaatatgtttcgccacatctaaaacggagcatgctgtttcctctgctagcacgagggaggagcttatggttttctcatgtcttttctgagcaggtacatggccctgtgcttgtgtgtggcctcctagtttcccagaactgtgtcagaactcttcaaaatccctatggaaatcttattcctcaaccatttttaaggctattttggttagttttttttgttttctcgcctattatccattgcctcaggcagctgtgtgacaaatgctaccccatccctggggagaggctcttatcactgggtgaccaataaaacaagtcttttgagtcaggtctttcagggaaccaccagacgggccaaataggggcatttatttaaaaaggaggttggtggggctaactccacaacttgaatgggggtggtttgttaagaataactttgaagtagaaagggtaaggggactaggaaaagttaaaacagcacaaagcttgcgttcttaccaaaactgggatatttttcttccataaatccggcctagggggtgcaaacctttgattattttgcaaatttaaaaaaaaaa

SEQ ID NO: 82532 - DNA, 839 bp, Homo sapiens
  sig_peptide (54)...(189): this location contains the signal peptide sequence, MAKLLACRQNFLALRLGNNYITAAGAQVLAEGLRGNTSLQFLGFW, Run with SignalP
  misc_feature (178)...(243): similar to gi5852824 in the genepept database release 114, Run with FASTXY 3.3t00, default parameters
tggaactgaacagtctattcaacaacaaattgactgacggctgtgcacactccatggctaagctccttgcatgcaggcagaacttcttggcattgaggctggggaataactacatcactgccgcgggagcccaagtgctggccgaggggctccgaggcaacacctccttgcagttcctgggattctggggcaacagagtgggtgacgagggggcccaggccctggctgaagccttgggtgatcaccagagcttgaggtggctcagcctggtggggaacaacattggcagtgtgggtgcccaagccttggcactgatgctggcaaagaacgtcatgctagaagaactctgcctggaggagaaccatctccaggatgaaggtgtatgttctctcgcagaaggactgaagaaaaattcaagtttgaaaatcctgaagttgtccaataactgcatcacctacctaggggcagaagccctcctgcaggcccttgaaaggaatgacaccatcctggaagtctggctccgagggaacactttctctctagaggaggttgacaagctcggctgcagggacaccagactcttgctttgaagtctccgggaggatgttcgtctcagtttgtttgtgagcaggctgtgagtttgggccccagaggctgggtgacatgtgttggcagcctcttcaaaatgagccctgtcctgcctaaggctgaacttgttttctgggaacaccataggtcacctttattctggcagaggagggagcatcagtgccctccaggatagacttttcccaagcctacttttgccattgacttcttcccaagattcaatcccagga

SEQ ID NO: 82533 - DNA, 371 bp, Homo sapiens
  sig_peptide (88)...(223): this location contains the signal peptide sequence, MFLAWFRGHQTYWLSLLYSPWPINAIYESSHTERAAAWSLLKGLF, Run with SignalP
  misc_feature (192)...(305): similar to gi327345 in the genepept database release 114, Run with FASTXY 3.3t00, default parameters
ggcatgagccactacgcccagcaaggtattttctgaaaaggtggattgctgcttcaaaggacctggacccagaggccctgtccatgaatgtttcttgcttggttccgaggccaccaaacatactggctgagccttctgtattcaccctggcctatcaatgccatctatgagagcagccacactgagagagcagcagcatggagcctactcaagggtttgtttcaaaaatatatggaaaacaagaaaaaccaaaagaggaaaccatttctaatgaggagactagttcaattattctgaagtcaagccctgcttatcaaggagttggaccgactgggacatttggggaagccccacagaacaggatgggatct

SEQ ID NO: 82534 - DNA, 1716 bp, Homo sapiens; identical to SEQ ID NO: 58735
  sig_peptide (212)...(347): this location contains the signal peptide sequence, MSDLLSVFLHLLLLFKLVAPVTFRHHRYDDLVRTLYKVQNECPGI, Run with SignalP
  misc_feature (212)...(1589): similar to gi30297 in the genepept database release 114, Run with FASTXY 3.3t00, default parameters

SEQ ID NO: 82535 - DNA, 398 bp, Homo sapiens
  sig_peptide (163)...(298): this location contains the signal peptide sequence, MSWGFYLPLPYSLSYKIFLVYRRKHPSSQPSLSTEGNRADPTDSI, Run with SignalP
  misc_feature (168)...(73): similar to gi3098414 in the genepept database release 114, Run with FASTXY 3.3t00, default parameters
gcgtgtactaggaagctccaagccctgtttcttcatagaaacattaaaaacaaccagaaactaactggacaacttttataggagctctggaaaacaatcaagggtctaaagaaaccaagtgaacacccagttaagaaaaagccactttcaaaatggtagtaaatgtcatggggtttctatttacccttgccttactccctaagttacaagatattcttggtctataggaggaagcatcccagctcccagccttctctctcaactgaagggaacagagcagaccctactgacagtattccaacccatctaggcactacctaccggatgtttctctgccttgtctaactcagatctcaggcagggaaaaagcagcaagaacagctcatgagagcagtgcc

SEQ ID NO: 82536 - DNA, 924 bp, Homo sapiens
  sig_peptide (86)...(221): this location contains the signal peptide sequence, MARCTLTLLKTMLTELLRGGSFEFKDMRVPSALVTLHMLLCSIPL, Run with SignalP
  misc_feature (183)...(276): similar to gi1000498 in the genepept database release 114, Run with FASTXY 3.3t00, default parameters
gcaaaaattgaacagtattctgactcagccttggaggctccatgtcaacatggggactacccttcacagagttactactatttcaatggctcgctgcacactcactcttcttaaaactatgttaacggaactcctgagaggtggatcctttgagtttaaggacatgcgtgttccttcagcgcttgttactttacatatgctcctgtgctctatccccctctcaggtcgtttggatagtgatgaacagaaaattcagaatgatatcattgatattttactgacttttacacaaggagttaatgaaaaactcacaatctcagaagagactctggccaataatacttggtctttaatgttaaaagaagttctttcttcaatcttgaaggttcctgaaggatttttttctggactcatactcctttcagagctgctgcctcttccattgcccatgcaaacaactcaggtatcacttccatataacatgcatcttataaatgactgcagtaacactttttaaaaagccagtgattttgttaaaaaacaaaaaccctcatctcccttcctcccaaaaagacataaaataaccggatgagggggagataaaactgaaacaagttggtcattgaggaaatatgggggtaacattttaaataaatttttgttaaagtgagttttattttgctgttatgtatgtttgtacttacatttttctggttattttaaatcctttcccccacaccttaccatgtgttagaatttggccaataactagattgcttcaccaatggactctggctcaactaactggctaacctgagaacaataagattttttagactcattgaattcaagcaaatgtttaactgtataatagaaaattaaatgttttaagcttacggtacaaatgttcttttcataaaaaaa

SEQ ID NO: 82537 - DNA, 936 bp, Homo sapiens
  sig_peptide (280)...(415): this location contains the signal peptide sequence, MLHPITIPRKYTFCFSLTWNVLFFQVHLSLSYCRLRAPLSQNHDV, Run with SignalP
  misc_feature (579)...(666): similar to gi2921366 in the genepept database release 114, Run with FASTXY 3.3t00, default parameters
ataatagtcagaggacatcaattaggaggctattctagtattccaggcaagaaatgttgatagtttgaagctggtggtagtaatagagatgaaaagaaaagagagaattagatttggggaccaaagatttggcttaattttagagagttaaatagtagaagttgagattttgcaggagatgcaattgatgacaaggtcaaggtcaagcctatgactgcaaatggaattggaagtttggattaggatttgttagctcaaaatggcttatagcggtttggtatgcttcatcccatcaccatcccgagaaagtatactttctgtttttctcttacctggaatgtgctcttcttccaagtccacctgtcactctcttattgtaggcttagggcccccctttcccaaaaccatgatgtggccagtgtactgggtttagcctcttgcagtctgtgctcacatggctcccagcacactgccttaaaatgcagcatttgtcttttcatcccaagtgcctagcaccatgcctggcctattggaagtgaagtgatctaacatggaactcagaaatattttacttcctgtgtgatgaacatcataagcatcatagtgccacatcaaggagcagtctaatctacctttttcactcacttcccaacaacttctttgtatagttagggagtttgcctgctctcaaacactactttgagagcacaggatttagaatacagtcatcaggtactatttccttaggagggtttatttggtctgctttctttcgccccgaacaacttagggacccctttttggggatccacattacctgcgggacatctagccggacttccaccgcaccacgaacgaaaccccacaggaaccgccttttcaggctcctagagcacgcgaaacaggctgcgcctcggtcgacgggcccgcgacccg

SEQ ID NO: 82538 - DNA, 712 bp, Homo sapiens
  misc_feature (1)...(712): n = a,t,c or g
  sig_peptide (97)...(232): this location contains the signal peptide sequence, MSPLPLKSWRFLILAFFLVIEKLQVQKKDSSQSKSHTHTPQRQNS, Run with SignalP
  misc_feature (163)...(239): similar to gi1888497 in the genepept database release 114, Run with FASTXY 3.3t00, default parameters
tgggagaggaaatatatgcatgcatttattgcttcagacttaaccagtcaggatgatactttgttcaattcagcctatgtctgttgagcacctaccatgagtccccttcctcttaaatcatggagatttttaatcctggccttttttcttgtcattgagaaacttcaagttcagaaaaaggattcctcccagagtaagtcacacacacacacccctcaaaggcagaattcagcacactataatctagtttatttttttacttgtcagcgtcctcagccactgctcctcgggagcagaactgtgcctttgtcacatctgtgtccccagcacctagcacagtatcttacacatagtacacaaccagtaaatgtgttaaaggaataagtgagagagtgaataaaatgcaagcttatgtgtgtgcaggacacacaacataatgaattttgaaggagcaggtattgagtatccatcctcaccactgctcttagtgcggactctggaagatgccatagaacatgctggaagaggccacaccgaccattatataggagaggaaactgagatcttgggtgcttcagaaactccccctttttacacctgggaattaggtgccaaggtcttaaaatttaagggctttaggattcagcccggggtccatttttttttcggnaggggaacacccaccacccaccgaaggccggcaaagggtttc

SEQ ID NO: 82539 - DNA, 366 bp, Homo sapiens
  sig_peptide (102)...(237): this location contains the signal peptide sequence, MQLWGFLNLNFPCSSLCFWALGSRGFTLVLAVTPINSTGWAAHLP, Run with SignalP
  misc_feature (246)...(132): similar to gi4457230 in the genepept database release 114, Run with FASTXY 3.3t00, default parameters
ggaagagctagttctacttttgtccaagtctagggctagagaccagtttccaacatacataattttcacaaagtctagaactcaggttcctagacttctttatgcagctatggggttttttgaatttaaacttcccctgctcttctctttgcttttgggcccttgggagcagaggcttcaccttggttttggctgtaactcccattaactctactgggtgggcagcacatctcccccagcatgtcaagatgagattattttccatccaattgttttaatgttgtgggtgttgagtgagtctacatttaatctttggtttcattataaggttcagagcagacagagtgtggggagaacatacacccg

SEQ ID NO: 82540 - DNA, 667 bp, Homo sapiens; identical to SEQ ID NO: 81944
  sig_peptide (458)...(323): this location contains the signal peptide sequence, MEFFSYILTHILSILLVAFLFIVTTFTLKLSTMPSPTLERCPISY, Run with SignalP
  misc_feature (425)...(292): similar to gi727243 in the genepept database release 114, Run with FASTXY 3.3t00, default parameters

SEQ ID NO: 82541 - DNA, 747 bp, Homo sapiens
  sig_peptide (229)...(364): this location contains the signal peptide sequence, MQLCPATTLRSLKVLLPPKLRQVLSLAKCLKQGYVYRGSWGIWPI, Run with SignalP
  misc_feature (192)...(321): similar to gi4323312 in the genepept database release 114, Run with FASTXY 3.3t00, default parameters
ggatatcttctgtttgaaaaatctcatatgcctggcaatactcgtcaccctgtgaataatgttgatgcattcacctaaccagtattataagcccctgctgtgtgtcagacactatgcttggtgctgaaatagacaaggaggggactgcctgtcttggaaggcaaatcccagtctcctaagagacactagaaccacaggcaaccatgctgatctatgcaatgacatgtaatgcaactttgtcctgcaaccaccttgagatctttgaaagttctcctacctccaaaactcagacaagtcctctctcttgccaagtgcctaaagcaaggatatgtttatagaggcagctggggcatctggccaatttattttccaacagacctgctgcttcccctgattccaatactttcttccccaacccaaaccaaggcgttctggcaatggttaaaaacatcaagaattgatcaaacaaaacattataatgaagatataatgaagtattcaatggatgtttcatcaaatgggaagagaactaataaaggatctaccccaaataaccaaaaatatcagcctcagcaccagcagaaattggaagcgttctggtatttatatgtgtttttctcagctggcagatttgttttaggaaactatttgcaaagcctgggaaaaatgtgctctctctgtctgttaaaggaacatgcaggttggttggtgctggttctccatctgacagttctgtctggtggcctc

SEQ ID NO: 82542 - DNA, 605 bp, Homo sapiens
  sig_peptide (169)...(304): this location contains the signal peptide sequence, MILTMCLLLWSVDAEPTPKGLLSIQEMVVTKNAPSFLICLIPFRS, Run with SignalP
  misc_feature (417)...(295): similar to gi1072091 in the genepept database release 114, Run with FASTXY 3.3t00, default parameters
ggcatggataaaaattggatgggaactggctaaagcttcaggcatggataaaaactggatggcaactggctaaagcctcaggcatggataggcatccttaaggtagggaggtcatcagcaagggagtggctactgcccaagggaagccctcagcacatagccccaggaatgattctgaccatgtgcttgctcttatggtctgtagatgctgaacccacccccaagggcctcctgagcattcaagaaatggtcgtcactaaaaatgctccttcatttttaatctgtttgattcctttcagatctgactcttccaacctaggcctcactgatttctctctttccttcaatccagaggagactttcctagcctgggaggtgggtttggatgggtaggattggagggaggaactttgctgtcattattttatttattcattttcatctgctagaagacttcttgcttttcccgagtaccttaaaagacagaaaaacttattttttctttttttctgacccatacttgtctttcatttgaagcaataaacacaaaatggcttagctacttgcagggcagatggtaaatacacagtaaagaaagaagcaga

SEQ ID NO: 82543 - DNA, 360 bp, Homo sapiens
  sig_peptide (142)...(277): this location contains the signal peptide sequence, MLMVLKLVICSIFIGKEGHFVISYLPSFSLNIQDTLKSVHQPCSA, Run with SignalP
  misc_feature (100)...(250): similar to gi2688221 in the genepept database release 114, Run with FASTXY 3.3t00, default parameters
actactttgccgctacacattcttagtgaatagcctccttggcatgtttttgaaaacttaaatgttgctggtaatcatgtcacagcaatctccttggagagcctttgtgtcctgttctcagaagaaatatgccgtttttccatgttaatggttttgaaattagtgatttgctctattttcattggaaaggaaggtcactttgtgatttcctaccttccctcattttctctgaacattcaggatactcttaagtcagttcatcagccatgcagtgcactgtctggttataacatgcctgaaaagccagaggaatgttctatcaaagagcggcatccctattctcagagactgttcttagaa

SEQ ID NO: 82544 - DNA, 377 bp, Homo sapiens
  sig_peptide (155)...(20): this location contains the signal peptide sequence, MLTQFWLGLLYGYGDDSRYMAIVGISAKSKCGQYPNGKYTNKGKS, Run with SignalP
  misc_feature (5)...(148): similar to gi3152967 in the genepept database release 114, Run with FASTXY 3.3t00, default parameters
actagttctgaagcaaggggctcttccctttgttcgtgtactttccatttggatattgcccacacttagatttggcactaatgccaacaatagccatatatctgctgtcatcaccgtaaccatacagaagcccaagccagaactgtgtcagcatagttggcagtagtcatagaaggttctggctatgtaggaattaggaagaacagagtgaaagaaaagtgatccaggaaacaggtggtgacgactgttaagagaatccatgatttcagtggaaagagcatataagattgtccttaaaatcctcatagcctgattggaccctcaacttggtagtgctgattttagaaaatacttgtttttactaaggcatgcagaga

SEQ ID NO: 82545 - DNA, 383 bp, Homo sapiens
  sig_peptide (146)...(281): this location contains the signal peptide sequence, MCTVAPEPCPARGSLLAAVILFLRLPQLSCSPVPSGAMPWARHCP, Run with SignalP
  misc_feature (29)...(199): similar to gi184111 in the genepept database release 114, Run with FASTXY 3.3t00, default parameters
agagaattatgttatatgcagttgatcgggcagcacagtgcgacctgaccaagctcactctgtgccgccctggatatcccacacgtgcacctgttcccacacacgctcctttcctgccctgcgcggcccgctgcggcacagagctatgtgcaccgtggctcctgagccctgcccggccaggggcagtctcctggcggctgtgatcctcttcctgaggctgccacagctgtcttgcagcccagtcccctctggtgccatgccctgggcacgtcactgtcccttgctcacaactttgcaaaaagttaagactctcttcagaaactcctgtgaccatgcagtagccatcatgtcctgccaggcccccgacaaaggatatgatagca

SEQ ID NO: 82546 - DNA, 709 bp, Homo sapiens
  sig_peptide (191)...(326): this location contains the signal peptide sequence, MGISCKLLLLTRVCYLITPLDLERFPFPNTEQVTFPERRVSVFLL, Run with SignalP
  misc_feature (140)...(261): similar to gi407187 in the genepept database release 114, Run with FASTXY 3.3t00, default parameters
gaatattccttttttaaaacatactttaaaaaatcttttcttacctgtgaaagcttatggcacatagtaggcatttagcaaatgttggtttccttccttttagaccgacatttggttgggactggttttaactaccttgaggacttttcttatctcacccatctcaaatgtctcctcccctgtagggtgtatgggcatcagctgcaagttgcttcttctgactagagtctgctacctgatcaccccgttagatcttgagaggtttcccttcccaaacactgagcaggtgacatttccggaacgcagagttagcgtcttcctgctgcctctgagctggtgtttggacacaaggctgcccagagagcctggctgcaggtgtcgacacagctctccacaggacgtggttggcggcagtcacctggtcaccacaactcttctaagcctcccagctcgggaattctggacctcttgcatcctctaaattggatgctgtctgatatttccaaaaggataccatgcttgatgagatcaaaggaggagaggatgactcagaaaagacccagaagagctcacagtgctcttagcaggatgcttagtgacatggagtcctctgacagcaatagtgcttggagacatttttacacctatgggcacaggcacatgcgtacacccccccccccccccccaacaaaacctgctggccgaatgg

SEQ ID NO: 82547 - DNA, 690 bp, Homo sapiens
  sig_peptide (645)...(510): this location contains the signal peptide sequence, MRILFSGWLFVRFPGHCSEKAKKAFLLCPVKGKDLFLTRKGAIRP, Run with SignalP
  misc_feature (90)...(156): similar to gi2688673 in the genepept database release 114, Run with FASTXY 3.3t00, default parameters
cgcaggtcagataaaatcaattgagaccgggacacaccatgagtagtaacggaatccaaggcagcatgtaattacgtgataaaagtattttggtgtttttaaggtttagtatttttaatttatatttctgtggctatcttggtttcttgcatttctatgtatgatttggagaaaattatttccatttaaatttattctggctaacaaaaattaccacttcaataggcatttttatgaggcctcctcaaaggcaatttatgaacttattggcagattacagtttgttggtcaacagtattcctctttttcttcttttaatatagtcactttcaagcttaaaaatatatcttcgttattgaaaaagttcaaaataaagaaaaagtagactatttcaactcattcaaacctattacaccaaagtcacttccatttctatggcaaaatattttccatctttttaaaaatttcatttttcgcaaatgaggttgggcaggtcccaaatatatttgggccttatagcgcccttccttgttaaaaaaaggtctttccccttaaccggacacaaaaggaaggccttcttggccttttcggaacaatggccgggaaatctaacaaacaaccagccagaaaataatatacgcattcaataggaaagaaaagtaaattttttagtggagcccccccccctct

SEQ ID NO: 82548 - DNA, 455 bp, Homo sapiens
  sig_peptide (244)...(379): this location contains the signal peptide sequence, MGRRWLFLIACLRSASILAWATWRNPVSTKNKKLASHDGPHLAVP, Run with SignalP
  misc_feature (273)...(151): similar to gi415833 in the genepept database release 114, Run with FASTXY 3.3t00, default parameters
cggcacgagcgtgggcatctcaatggcaattaaaaccagaccaaatatccaaaacagaacttttgaccctctccctctgcccttaaaattgttatttcatttattcattctacaaatatttcctcagcatatgctcaggcactgtgctgtccactggcacaacaatgtgaacttgggggagacaaattataataaattattaaaagagctataatggatataaagtgtgtgttctgacagaaaatggggagaaggtggctatttttgatagcgtgtttaagatcagcctctatactggcctgggcaacgtggcgaaaccccgtgtctacaaaaaataaaaaattagccagccatgatggcccacaccttgcagtcccagctattcgggaggctgaggcggggagatggcttaagcccaggaggcggaggttgcagcgacccaagatcgcacgaaa

SEQ ID NO: 82549 - DNA, 790 bp, Homo sapiens
  sig_peptide (116)...(251): this location contains the signal peptide sequence, MMASFWEAVVLKLRPWLLWGEERGNKAFLSKEATQMVFQHNGKWL, Run with SignalP
  misc_feature (222)...(394): similar to gi1510183 in the genepept database release 114, Run with FASTXY 3.3t00, default parameters
ataatacctaagagagagaccttaaatacataatcactaaataactaaccctatgattgcgattatgatgaactcagttaagaaatacacagttctgtgagagaacccaaaagggatgatggcaagcttctgggaagcagtcgtgttgaagctgaggccctggttgttgtggggtgaagagcggggaaacaaagcctttctatcaaaggaagcaacacagatggtcttccaacacaatgggaaatggcttggcacactggagttactggaaggaaggtgtctggcttgagtgtgacattcaagcaggagagtcacaggaaatggggctgagaagggagccagggccatttcatgcaggggtttctagagtttacacattgagtgtcatgtgaagccattgaaagatttccagttgaagaatgatgagattagttttgctttgtaacaagatgactcctatttctgtgaggagagcgggtatagagattatatgaagggaaaccaggtaggaaactactgtggaaattcaaatggaataataaggttgagaataggtaacaattgagattaacaatcgggaatgtgcttgagatttacttatgatatatgaattagcgcaggcccgggcgcggtgggtcatggctgcaatcccaacactttgggggggcccaggcaggccagataacctgaggtcagagattcgaaaccagcctgggccaaaacggggaaaacccccttttctactaaaaataccaaaaaattaaccccgcctttgatggcaaggggcctt

SEQ ID NO: 82550 - DNA, 394 bp, Homo sapiens
  sig_peptide (256)...(391): this location contains the signal peptide sequence, MILFHCEKLYALRSFDFWFMLELLSTWPRALGLLCPGLAIEAHEG, Run with SignalP
  misc_feature (178)...(335): similar to gi4155509 in the genepept database release 114, Run with FASTXY 3.3t00, default parameters
tctagagtcataatatatctgtctggaacatagtagattcttaataaatattggaatgaaagtttaatgctttgaaaaaggcttcttttacgtctactaaagttctagctcaggatactggaggggttttatttacttttttttcctcttcatgaaaatctagactcttaaaatccagtatctttagtagataatttgcatttatttattatccaagttttacatcttggcgtttttccagcagggatacctctcatgattctgttccactgtgagaaattatatgcacttagaagctttgatttctggttcatgttagaacttctcagtacatggcccagggctttggggctgctgtgtcctggtctggccattgaggctcatgaaggctgag

SEQ ID NO: 82551 - DNA, 336 bp, Homo sapiens
  misc_feature (1)...(336): n = a,t,c or g
  sig_peptide (166)...(301): this location contains the signal peptide sequence, MQFLLMMTESSSLLLLYTGVLTEYLWAGYCAELSTCRILFLTFDT, Run with SignalP
  misc_feature (201)...(57): similar to gi414401 in the genepept database release 114, Run with FASTXY 3.3t00, default parameters
aagaaantaattcatcagaagtaaggaattccttttacctctattttgatttcttaaagtattctgtgaagatatggcctctcttcgtgatgcagtatagaacaaggcacatgttagaacggaagcagctaacggggaaatgtaacatctgcccagctattttggatgcagttccttttaatgatgactgaatcatcttctctgctattattgtacacgggcgtattgactgaatacctgtgggctgggtactgcgctgagctttcgacatgccgtattttatttctaacttttgatacgaccctttccggtaaaggggagatggggcctcacctt

SEQ ID NO: 82552 - DNA, 345 bp, Homo sapiens
  misc_feature (1)...(345): n = a,t,c or g
  sig_peptide (10)...(145): this location contains the signal peptide sequence, MWLFCAWVSTWGQGCPPGRGQMIYASHHLSVHTTSPHHWLSAWAL, Run with SignalP
  misc_feature (180)...(48): similar to gi4321405 in the genepept database release 114, Run with FASTXY 3.3t00, default parameters
agtacacgtatgtggcttttctgtgcctgggtcagcacgtggggccagggctgcccaccaggcagggggcagatgatctacgcatctcatcacctctcagttcacaccacgtctccccatcactggctttcagcgtgggcccttcaaggtggggccgtctttcctgagctggctcacggggcgtcatctgcgtcttctggccaagctgatgattccacctgctctttttgctctccctggagagtctctgcagagcacaaatcactaacctacacgacacaccctaaaactgaaagtgctgcggtttaactagcccagccctttctcctgcttcccgtggaaggn

SEQ ID NO: 82553 - DNA, 624 bp, Homo sapiens
  sig_peptide (29)...(164): this location contains the signal peptide sequence, MKTLKIFTYYFLSLSNIFILTIGLTCASGPLDFTPVFLLGKGSLK, Run with SignalP
  misc_feature (29)...(110): similar to gi2738429 in the genepept database release 114, Run with FASTXY 3.3t00, default parameters
cgaatatgttcaggaaaaatctttaattatgaaaactctgaaaatcttcacatactattttttatccctttctaacatctttatattgacgattggcctgacgtgtgcctctggcccccttgactttacccctgtgtttctgcttggaaagggctccctgaagtgcaaatatggtcctgttgcacatttgccccctgaagctctggaaagcggtccccaaatcccatccggatgtaactggaaggaaattccaacatcctcctagtccagccgagggggttcccaccacggatttccttttcagggctcccattgcattactggacaacttctaactattgaaaattttccattgggagaattctccgtgtgtcatttttctgtagttccatttaatgcagtgatagttattttttatcttctgtgttttctctacttcctgattaaattatgacctcctcaaatggaagggcaatataaactcatttctttttattatcccacagtaattgtcaggctcagacttctctgtgagcatcaccgactgaccagggtaccgctggctgggatgttacatggagcagttacactagcattttagtttcaaatggatgcagattcagc

SEQ ID NO: 82554 - DNA, 335 bp, Homo sapiens
  sig_peptide (79)...(214): this location contains the signal peptide sequence, MWLFCAWVSTWGQGCPPGRGQMIYASHHLSVHTTSPHHWLSAWAL, Run with SignalP
  misc_feature (247)...(116): similar to gi4321405 in the genepept database release 114, Run with FASTXY 3.3t00, default parameters
ggcccactgatctctgctgggtattatttgccagagcaacaattcaccgttcttccatagagcgtgcccagtacacgtatgtggcttttctgtgcctgggtcagcacgtggggccagggctgcccaccaggcagggggcagatgatctacgcatctcatcacctctcagttcacaccacgtctccccatcactggctttcagcgtgggcccttcaaggtggggccgtctttcctgagctggctcacggggcgtcatctgcgtcttctggccaagctgatgattccacctgctctttttgctctccctggagagtctctgcagagcacaaatcact

SEQ ID NO: 82555 - DNA, 331 bp, Homo sapiens
  misc_feature (1)...(331): n = a,t,c or g
  sig_peptide (103)...(238): this location contains the signal peptide sequence, MLTACFLLRVSRMPWPSFLGIGLYHCHSNLSYQRQSPRVQPSPQR, Run with SignalP
  misc_feature (65)...(126): similar to gi184111 in the genepept database release 114, Run with FASTXY 3.3t00, default parameters
attttgtgaaaagatgaaagctgctccgtgcagggcgcattctgtgcaggtacagaacagatagggaggggcttatgtctccgtccctcctcccccgctcccatgctcaccgcttgctttctgttgcgagtgtctagaatgccctggccctcttttctaggaattggattgtaccattgtcattccaacctctcttatcagaggcaaagccccagggtgcagccctccccgcagcgtggccacagccactcagaactccagagagtcacgccccgggtggacatgtgtgtgaatcatcagcacagcaccctcagatccccaccctgaggcn

SEQ ID NO: 82556 - DNA, 426 bp, Homo sapiens
  sig_peptide (291)...(156): this location contains the signal peptide sequence, MIQAVFMLLFQHTHIIKLCPSEEALPAEVVALSYSVVAAVPLRAL, Run with SignalP
  misc_feature (5)...(86): similar to gi215212 in the genepept database release 114, Run with FASTXY 3.3t00, default parameters
agttatgaccatgcttacgaattcaatgtccgtacccgtacatcgtaatgactgggagaaccatagggcttgccattttaatcaccgtgagggcgacgctgtaccatgttgagaccatcccctgctctgccaacttgctttgtaatgtgagccaaagggcacgcagggggacggcggcaacgacagaatacgatagggccaccacctctgctggaagggcctcctcagaaggacacaatttaataatgtgtgtgtgttggaaaagtaacataaagaccgcttgaatcatgacttttgagatgattgagtttcattatttcttgggccagctggaataagaaccagttctaacccaggtgtgagttgaacatcccaaatttgaaactgaaaatgctccaaaatctgaactgttttgagtgctgacat

SEQ ID NO: 82557 - DNA, 340 bp, Homo sapiens
  misc_feature (1)...(340): n = a,t,c or g
  sig_peptide (79)...(214): this location contains the signal peptide sequence, MWLFCAWVSTWGQGCPPGRGQMIYASHHLSVHTTSPHHWLSAWAL, Run with SignalP
  misc_feature (245)...(115): similar to gi4321405 in the genepept database release 114, Run with FASTXY 3.3t00, default parameters
ggtccactgatctntggtgggtattatttgccagagcaacaattcaccgttcttccatagagcgtgcccagtacacgtatgtggcttttctgtgcctgggtcagcacgtggggccagggctgcccaccaggcagggggcagatgatctacgcatctcatcacctctcagttcacaccacgtctccccatcactggctttcagcgtgggcccttcaaggtggggccgtctttcctgagctggctcacggggcgtcatctgcgtcttctggccaagctgatgattccacctgctctttttgctctccctggagagtctctgcagagcacaaatcactaacct

SEQ ID NO: 82558 - DNA, 345 bp, Homo sapiens
  sig_peptide (15)...(150): this location contains the signal peptide sequence, MWLFCAWVSTWGQGCPPGRGQMIYASHHLSVHTTSPHHWLSAWAL, Run with SignalP
  misc_feature (181)...(52): similar to gi4321405 in the genepept database release 114, Run with FASTXY 3.3t00, default parameters
agcccagtacacgtatgtggcttttctgtgcctgggtcagcacgtggggccagggctgcccaccaggcagggggcagatgatctacgcatctcatcacctctcagttcacaccacgtctccccatcactggctttcagcgtgggcccttcaaggtggggccgtctttcctgagctggctcacggggcgtcatctgcgtcttctggccaagctgatgattccacctgctctttttgctctccctggagagtctctgcagagcacaaatcactaacctacacgacacaccctaaaactgaaagtgctgcggtttaactagcccagccctttctcctgcttccggtgg

SEQ ID NO: 82559 - DNA, 1753 bp, Homo sapiens
  sig_peptide (57)...(192): this location contains the signal peptide sequence, MWPALLLSHLLPLWPLLLLPLPPPAQDSSSSPRTPPAPARPPCAR, Run with SignalP
  misc_feature (426)...(757): similar to gi4678756 in the genepept database release 114, Run with FASTXY 3.3t00, default parameters
tttcgtgctgaaaatctgggtcacagctgaggaagacctcagacatggagtccaggatgtggcctgcgctgctgctgtcccacctcctccctctctggccactgctgttgctgcccctcccaccgcctgctcaggactcttcatcctcccctcgaaccccaccagccccagcccgccccccgtgtgccaggggaggcccctcggccccacgtcatgtgtgcgtgtgggagcgagcacctccaccaagccgatctcctcgggtcccaagatcacgtcggcaagtcctgcctggcactgcacccccagccaccccatcaggctttgaggaggggccgccctcatcccaatacccctgggctatcgtgtggggtcccaccgtgtctcgagaggatggaggggaccccaactctgccaatcccggatttctggactatggttttgcagcccctcatgggctcgcaaccccacaccccaactcagactccatgcgaggtgatggagatgggcttatccttggagaggcacctgccaccctgcggccattcctgttcgggggccgtggggaaggtgtggacccccagctctatgtcacaattaccatctccatcatcattgttctcgtggccactggcatcatcttcaagttctgctgggaccgcagccagaagcgacgcagaccctcagggcagcaaggtgccctgaggcaggaggagagccagcagccactgacagacctgtccccggctggagtcactgtgctgggggccttcggggactcacctacccccacccctgaccatgaggagccccgagggggaccccggcctgggatgccccaccccaagggggctccagccttccagttgaaccgctcactcagtggtcagcgtttcctgcacactttacctctcatgtgcgtttcccggcctgatgttgtggtggtgtgcggcgtgctcactctctccctcatgaacacccacccacctcgtttccgcagcccctgcatgctgctccagaggtgggtgggaggtgagctgggggctccttgggccctcatcggtcatggtctcgtcccattccacaccatttgtttctctgtctccccatcctactccaaggatgccggcatcaccctgagggctcccccttgggaaatggggtaagtgaagggccccagacttcacccccagcccactgctaaaatctgttttctgacagatgggttttggggagtcgcctgctggcactaacatggaggaaaggggactcccattggcccttcccttttctcctaacagtccctttggtctggtctgtcctgggctgtctgtgtgtgtgccattctctggacttcagagccccctgagccagtcctcccttcccagcctccctttgggcctccctaactccacctaggctgccagggaccggagtcagctggttcaaggccatcgggagctctgcctccaagtctacccttcccttcccggactccctcctgtcccctcctttcctccctccttccttccactctccttccttttgcttccctgccctttccccctcctcaggttcttccctccttctcactggtttttccaccttcctccttcccttcttccctggctcctaggctgtgatatatatttttgtattatctctttcttcttcttgtggtgatcatcttgaattactgtgggatgtaagtttcaaaattttcaaataaagcctttgcaagataaaaaaaaaaaaa

SEQ ID NO: 82560 - DNA, 2073 bp, Homo sapiens
  misc_feature (1)...(2073): n = a,t,c or g
  sig_peptide (108)...(243): this location contains the signal peptide sequence, MLLLAAAFLVAFVLLLYMVSPLISPKPLALPGAHVVVTGGSSGIG, Run with SignalP
  misc_feature (108)...(1107): similar to gi296186 in the genepept database release 114, Run with FASTXY 3.3t00, default parameters
aggcgcccgcccgccgcgcgtgattctcgcctcgccgcagcccagccctgcgcgccttgcccggcggcccccgcccggccgctccgggcccctggccccgcggagcgatgctgctgctggctgccgccttcctcgtggccttcgtgctgctgctgtacatggtgtctccgctcatcagccccaagcccctcgccctgcccggggcgcatgtggtggttacaggaggttccagtggcatcgggaagtgcattgctatcgagtgctataaacaaggagcttttataactctggttgcacgaaatgaggataagctgctgcaggcaaagaaagaaattgaaatgcactctattaatgacaaacaggtggtgctttgcatatcagttgatgtatctcaagactataaccaagtagagaatgtcataaaacaagcacaggagaaactgggtccagtggacatgctggtaaattgtgcaggaatggcagtgtcaggaaaatttgaagatcttgaagttagtacctttgaaaggttaatgagcatcaattacctgggcagcgtgtaccccagccgggccgtgatcaccaccatgaaggagcgccgggtgggcaggatcgtgtttgtgtcctcccaggcaggacagttgggattattcggtttcacagcctactctgcatccaagtttgccataaggggattggcagaagctttgcagatggaggtgaagccatataatgtctacatcacagttgcttacccaccagacacagacacacctggctttgccgaagaaaacagaacaaagcctttggagactcgacttatttcagagaccacatctgtgtgcaaaccagaacaggtggccaaacaaattgttaaagatgccatacaaggaaatttcaacagttcccttggctcagatgggtacatgctctcggccctgacctgtgggatggctccagtaacttctattactgaggggctccagcaggtggtcaccatgggccttttccgcactattgctttgttttaccttggaagttttgacagcatagttcgtcgctgcatgatgcagagagaaaaatctgaaaatgcagacaaaactgcctaatcttcttaccccttggaagaagactgtttccaaataatttgaacagcttgctgctaaatgggacccaatttttggcctatagacacttatgtattgttttcgaatacgtcagattggaccagtgctcttcaggaatgtggctgcaagcaaggggctagaagttcacctcctgacagtattattaatactatgcaaatatggaataggagaccatttgattttctaggctttgtggtagagaggtgaaggtatgagaattaatagcgtgtgaacaaagtaaagaacaggattccagaatgatcattaaatttgtttctatttattcttttttgcccccctagagattaagtccagaaatgtactttctggcacataaagaaatcttgaggactttgtttaaaccttccataaaaaaacaattttcggtttctcgggttctctctctctctctctctgtctctctgtctctctgtctctctgtctctctctctctctctctctctctctttctttctttgtgtattttattcaagatgagttggacccattgccagtgagtctgaatgtcactgacagccctgtgttgtgctcaggactcactctgccgctgggggaaactcatggcttctctctctctttgatcccataaagctacgagggggacgggagaggggcagtgcaatgggaaataaagagatattttcccngtagggaaaaggcaatgctttccttgtctttacactcaaatgcttaggggaacgttttcatttcctcattcatggggaaaggcagcctccttaaatgttttctgaagagcggtaaaatctagaagcttaagaatttacagttccttcaataaccatgatgacctgaagttcacctatcccattttagcatctacttgtttttcccatctcttcctttccaattttgcttatactgctgtaatatttttgtaaaaaaaaaa

SEQ ID NO: 82561 - DNA, 1538 bp, Homo sapiens
  sig_peptide (427)...(562): this location contains the signal peptide sequence, MDFLVLFLFYLASVLMGLVLICVCSKTHSLKGLARGGAQIFSCII, Run with SignalP
  misc_feature (619)...(1026): similar to gi5932558 in the genepept database release 114, Run with FASTXY 3.3t00, default parameters
tcctgtctcgacgatttcgcggccgcctccgcggggctgtgggaagcttgggctgtcccgggaccgtcagtctcctcctctgaccctccctttccccttgtgtgtagggccgccgtcccacccccacctcgccggagtccggggcggccccggtgtcccctccgagcctgctgcactccacgtccccctaccagggctccagcccccagggaaatctccgaccaggcccgcccaggagccagatccaggctcctggaagaaccatgtccggcagctactggtcatgccaggcacacactgctgcccaagaggagctgctgtttgaattatctgtgaatgttgggaagaggaatgccagagctgccggctgaaaattacccaaccaagagaaatgtaggctgggtaccctgaatcaccccctgcaggatggactttctggtcctcttcttgttctacctggcttcggtgctgatgggtcttgttcttatctgcgtctgctcgaaaacccatagcttgaaaggcctggccaggggaggagcacagatattttcctgtataattccagaatgtcttcagagagccatgcatggattgcttcattaccttttccatacgagaaaccacaccttcattgtcctgcacctggtcttgcaagggatggtttatactgagtacacctgggaagtatttggctactgtcaggagctggagttgtccttgcattaccttcttctgccctatctgctgctaggtgtaaacctgttttttttcaccctgacttgtggaaccaatcctggcattataacaaaagcaaatgaattattatttcttcatgtttatgaatttgatgaagtgatgtttccaaagaacgtgaggtgctctacttgtgatttaaggaaaccagctcgatccaagcactgcagtgtgtgtaactggtgtgtgcaccgtttcgaccatcactgtgtttgggtgaacaactgcatcggggcctggaacatcaggtacttcctcatctacgtcttgaccttgacggcctcggctgccaccgtcgccattgtgagcaccacttttctggtccacttggtggtgatgtcagatttataccaggagacttacatcgatgaccttggacacctccatgttatggacacggtctttcttattcagtacctgttcctgacttttccacggattgtcttcatgctgggctttgtcgtggttctgagcttcctcctgggtggctacctgttgtttgtcctgtatctggcggccaccaaccagactactaacgagtggtacagaggtgactgggcctggtgccagcgttgtccccttgtggcctggcctccgtcagcagagccccaagtccaccggaacattcactcccatgggcttcggagcaaccttcaagagatctttctacctgcctttccatgtcatgagaggaagaaacaagaatgacaagtgtatgactgcctttgagctgtagttcccgtttatttacacatgtggatcctcgttttccaagaaaaaaaaaa

SEQ ID NO: 82562 - DNA, 1201 bp, Homo sapiens
  sig_peptide (106)...(241): this location contains the signal peptide sequence, MAALTVTLMVLSSPLALAGDTQPRFLWQGKYKCHFFNGTERVQFL, Run with SignalP
  misc_feature (73)...(872): similar to gi307266 in the genepept database release 114, Run with FASTXY 3.3t00, default parameters
agaggggtcatagttctccctgagtgagactcacctgctcctctggcccctggtcctgtcctgttctccagcatggtgtgtctgaagctccctggaggctcctgcatggcagctctgacagtgacactgatggtgctgagctccccactggctttggctggggacacccaaccacgtttcctgtggcagggtaagtataagtgtcatttcttcaacgggacggagcgggtgcagttcctggaaagactcttctataaccaggaggagttcgtgcgcttcgacagcgacgtgggggagtaccgggcggtgacggagctagggcggcctgtcgccgagtcctggaacagccagaaggacatcctggaggacaggcggggccaggtggacaccgtgtgcagacacaactacggggttggtgagagcttcacagtgcagcggcgagtccatcctgaggtgactgtgtatcctgccaagactcagcccctgcagcaccacaacctcctggtctgctctgtgagtggtttctatccaggcagcattgaagtcaggtggttccggaacggccaggaagagaaggctggggtggtgtccacaggcctgatccagaatggagactggaccttccagaccctggtgatgctggaaacagttcctcggagtggagaagtttacacctgccaagtggagcacccaagtgtgatgagccctctcacagtggaatggagagcacggtctgaatctgcacagagcaagatgctgagtggagtcgggggctttgtgctgggcctgctcttccttggggccgggttgttcatctacttcaggaatcagaaaggacactctggacttcagccaacaggattcctgagctgaagtgaagatgaccacattcaaggaaaaaccttctgccccagctttgcaggatgaaacacttccccgcttggctctcattcttccacaagagagacctttctccggacctggttgctactggttcagcaactctgcagaaaatgtcctcccctgtggctgcctcagctcatgcctttggcctgaagtcccagcattgatggcagcccctcatcttccaagttttgtgctcccctttacctaacgcttcctgcctcccatgcatctgtactcctcctgtgccacaaacacattacattattaaatgtttctcaaacatggaaaaaaaaaa

SEQ ID NO: 82563 - DNA, 1057 bp, Homo sapiens; identical to SEQ ID NO: 58885
  misc_feature (1)...(1057): n = a,t,c or g
  sig_peptide (251)...(386): this location contains the signal peptide sequence, MELVLVFLCSLLAPMVLASAAEKEKEMDPFHYDYQTLRIGGLVFA, Run with SignalP
  misc_feature (260)...(501): similar to gi1916010 in the genepept database release 114, Run with FASTXY 3.3t00, default parameters

SEQ ID NO: 82564 - DNA, 981 bp, Homo sapiens; identical to SEQ ID NO: 59668
  sig_peptide (108)...(243): this location contains the signal peptide sequence, MVAWRSAFLVCLAFSLATLVQRGSGDFDDFNLEDAVKETSSVKQP, Run with SignalP
  misc_feature (204)...(312): similar to gi3064163 in the genepept database release 114, Run with FASTXY 3.3t00, default parameters

SEQ ID NO: 82565 - DNA, 1421 bp, Homo sapiens; identical to SEQ ID NO: 59182
  sig_peptide (554)...(689): this location contains the signal peptide sequence, MYLLCWLYIMGVLGASCNWHVGVPFPGTHWPRSQNHLLWVYNHLN, Run with SignalP
  misc_feature (69)...(785): similar to gi5231135 in the genepept database release 114, Run with FASTXY 3.3t00, default parameters

SEQ ID NO: 82566 - DNA, 425 bp, Homo sapiens
  sig_peptide (178)...(313): this location contains the signal peptide sequence, MMPVTVVSPVCLYILSLASLNSVVHKMILCLEILRYKEWEKTQTC, Run with SignalP
  misc_feature (108)...(425): similar to gi733072 in the genepept database release 114, Run with FASTXY 3.3t00, default parameters
gtcatatgattgattattcctgcccaatcatcggcaaggatgatgggattaccgtaactgctttgtaccaattagactcagtgcctcggaactgagcactttgcatcccaaaatgctggttgtttgggaagagagaaggaggtatggctgtgggatgagcagaagacaacatctttcatgatgcccgtcactgtggtgtccccagtgtgcctgtacatactgtctctggcatcattgaactctgtagtccataaaatgattttgtgtctagagattcttagatacaaagagtgggaaaagactcaaacgtgtgtgagatgtataatcattctgattataaaaggcacacctacttggagagtgtaaaggtgtgtgaagaagaaaacaaaaagctcccattatcccacaagccacagggatgaact

SEQ ID NO: 82567 - DNA, 388 bp, Homo sapiens
  sig_peptide (386)...(251): this location contains the signal peptide sequence, MPLDTDAILHRTAEWYVLCLITCIFMYVLYVPYLRSLILLEYLHL, Run with SignalP
  misc_feature (254)...(385): similar to gi4163977 in the genepept database release 114, Run with FASTXY 3.3t00, default parameters
atcctcgactatttatccgtctacaagattatccttggcatactcatgtaccacaacgtaagcacaggcctcctaaatatcagacatcagtcgcaaaacagtctcataggttctacgtgcacatgtctagtaaatgcgtctatggatatgagtatccagttagtcacatataggacttaaattcagtaaatgcaaggctagactcattacttacccagcattcgcttgtataagtatctcaaaaggaaggaggtgcagatactcaagcagaatcagactcctcaaatatgggacatagaggacatacatgaagatacaggttatgagacagaggacataccattcagctgtcctatgtaagatggcatcagtatctaaaggcatgggt

SEQ ID NO: 82568 - DNA, 657 bp, Homo sapiens
  sig_peptide (56)...(191): this location contains the signal peptide sequence, MMCVSLVLTILRCLLPPTHSFKIVRTIVVIVLQCSAIVIIQDGGN, Run with SignalP
  misc_feature (254)...(657): similar to gi551965 in the genepept database release 114, Run with FASTXY 3.3t00, default parameters
ggcaactttatttctatctcaggagttgtcagcctttttctttgaggtacatctcatgatgtgtgtgtcattagttctcacaattctacgatgtctccttcctcccacccacagttttaaaatagtacggactatagttgtcatagttttacaatgctctgcaatagttattattcaggatgggggaaatcaagattttagattatttgaagatgaattggttttcacagctctgctgttcactggctcctggtgggacatttgtggctttgacaatgtttcctcaggggaacatggggaattgataggctttttctcagacccttctggccgtgaagcttgatattctttcctcagtgtcgggacctccttgtgggcaagaagattatttccttagtgttttctggcacatatggatctcagtaaatatttcctgaataagtgcggtcaagaagaagagagtctgccttgcctctggaatgcaagggtggttcaccctgggccagccaggtggcagtggtttttgtgctagctgcgcaatgatttctttcacgggggggaaaaagatttcttttttcccggccagaatcctggtcttcccccacgagacgcgcgccggttctttttataaaggggggcgccttctttttttttgtc

SEQ ID NO: 82569 - DNA, 369 bp, Homo sapiens
  sig_peptide (323)...(188): this location contains the signal peptide sequence, MKGLARWNLCVALGQAFSLRGHRSLSALLLHMGSEPHFHFFFLGP, Run with SignalP
  misc_feature (274)...(366): similar to gi1245918 in the genepept database release 114, Run with FASTXY 3.3t00, default parameters
cgaagctggagatgtgagtggccagaactgagaacgctgaaatctagcggtgtttcttgggcaagcacccagacacttggtctgttgacttttgtactttacaaacacttctcacaaggctggctgtagtttttccaaccaggagccagattagaagtgatacatgtaacatgtgaagagaggacagaaggacccaagaagaagaaatgaaagtgaggctcagagcccatgtgtagtaacagggcagagagactcctgtgcccgcgtaggctgaaggcctgccctagggcgacacagagattccatctggccaaccctttcattcagccaggacttcctgagcatccacgccgagccctatgcagtctc

SEQ ID NO: 82570 - DNA, 381 bp, Homo sapiens
  sig_peptide (229)...(94): this location contains the signal peptide sequence, MWPLLGTIVSLLSTGTAGIPCAASQGAPEYLTARVGSTPTRKKLP, Run with SignalP
  misc_feature (207)...(371): similar to gi1480120 in the genepept database release 114, Run with FASTXY 3.3t00, default parameters
ctctcttacacagtcgactttaaatggtgaaatgggttttatgggaaatgctaaggtgagttttgagaaaatagagtctcgtgacactcccagtggcaatttctttctggttggtgttgatcccaccctagcggtcagatactcaggtgccccctgcgatgcagcgcaggggattcccgctgtccccgtggacagcaaagacacgattgtaccaagtagtggccacattttatctctcacagaaggtgtcctaaatagatgtgaacatccctcaaaagtggattggcagagtttcccagaaggagtctcccgttttttgagtgaattttcctattacccgatgccagggttaggaatcccagcattttctgaaagactggc

SEQ ID NO: 82571 - DNA, 404 bp, Homo sapiens
  sig_peptide (154)...(289): this location contains the signal peptide sequence, MASHGGNTLEIVQSMGCMLVVLLLWVLVCVLFLDGFLGVVLYRAP, Run with SignalP
  misc_feature (201)...(393): similar to gi557242 in the genepept database release 114, Run with FASTXY 3.3t00, default parameters
agaagagctaaactccagagtctgtctcagaaaaaggaaaacagctgaaatataggagactgacgcccaggccaggaacaggcaggagagatggaagccgcccagagaactgccactccatagcctgtgggcatccaggggtgagcggcagcgatggcgtcccatggaggaaacacactggaaatcgtgcagagtatgggatgtatgcttgttgtattgcttctgtgggtcttagtctgtgtattgtttttggatggcttcttgggagtcgtattgtatcgtgcaccttgctacttttattcatctatgttgtagttctgcgtgctacttatgctcggttttgtcttttacgttccagcttattaatatgttgtgctgatcttctatgcgttatatgctgtgcg

SEQ ID NO: 82572 - DNA, 2247 bp, Homo sapiens
  sig_peptide (1720)...(1855): this location contains the signal peptide sequence, MWLFRAPMPAPSLCAFLLTSQLLEYEPRSGEQVPLLLKMKRSKLA, Run with SignalP
  misc_feature (91)...(1915): similar to gi4895182 in the genepept database release 114, Run with FASTXY 3.3t00, default parameters
cggacgcgtgggggcctggagcccgctctaggtgggtgtcccctcggtgcttcccagctgccgtctgcaccagccatggactgctacacggcgaactggaacccactcggggactctgccttttaccggaaatatgagctgtacagcatggactgggacctgaaggaggaactcagggattgcctggtggctgctgcaccctatgggggccccattgcactgctgaggaacccctggcggaaggagaaagctgctagtgtgaggccagtgctcgatatatactctgcttccggcatgcctctggccagcctgctgtggaagagtggacccgtggtgtccctgggctggtcagctgaggaggagctgctctgtgtgcaggaagatggtgctgtactggtttatgggcttcatggtgacttccggagacacttcagcatgggcaatgaagtgctccagaaccgggttctggatgcccggatctttcacactgagtttggttccggagtggccatcctcacaggggcccacccgcttcaccctcagtgccaatgtgggtgacctcaaactccgccggatgccagaggtgccaggtctgcaaagtgcaccctcctgctggactgtgctgtgccaggaccgagtggcacacattcttctggctgtggggcctgacctttacctcttggaccatgcagcctgctccgcagtgacgccccctggcctggccccaggagtaagcagcttcctacagatggctgtctccttcacctaccgacacctggcactcttcacagacacaggctacatctggatggggacagcatcactcaaggagaagctatgtgagttcaactgcaacatccgggcacctccaaagcagatggtctggtgcagccgtcctcgtagcaaggagagggccgtggtggtggcctgggaaaggcggctgatggtggtgggcgatgcacccgagagcatccagtttgtgctggatgaggactcctacctggtgcctgagctcgatggggtccgcatcttctcccgcagcacccacgagttcctgcatgaggttccagcggccagcgaggaaatcttcaaaattgcctcaatggcccccggggcgctgctcctggaggctcagaaggagtatgagaaagagagccagaaggcggacgagtacctgcgggagatccaggagctgggccagctgacccaggccgtgcagcagtgcattgaggctgcaggacatgagcaccagccagacatgcagaagagtctgctcagggccgcctccttcggaaagtgtttcctggacagatttccacccgacagcttcgtgcacatgtgtcaggacctgcgtgtgctcaatgctgttcgggactatcacatcgggatcccgctcacctatagccaatataagcagctcaccatccaggtgctgctggacaggctcgtgttgcggagactttaccccctggccatccagatatgcgagtacttgcgccttcctgaagtacagggcgtcagcaggatcctggcccactgggcctgctacaaggtgcaacagaaggatgtctcagatgaggatgtggctcgagccattaaccagaagctgggggacacgcctggtgtctcttactccgacattgctgcacgagcctatggttgtggccgcacggagctggccatcaaggtgtgggtgcccagccctccacagacactctgatgtggttgttcagggcccccatgccagctccttctctctgtgccttccttctcacctcacagctgctggagtatgagccacgctcaggggagcaggtaccccttctcctaaagatgaagaggagcaaactggcactaagcaaggccatcgagagcggggacactgacctggtgttcacggtgttgctgcacctgaagaacgagctgaaccgaggagattttttcatgacccttcggaatcagcccatggccctcagtttgtaccgacagttctgtaagcatcaggagctagagacgctgaaggacctttacaatcaggatgacaatcaccaggaattgggcagcttgcacatccgagccagctatgctgcagaagagcgtattgaggggcgagtagcagctctgcatacagccgccgatgccttcttaaaggccaagaacgaatttgcttccaaggctaccgatgtatacatggcggttcttaatgttcgattgttccccttaataatgctctgtggtgtcattccg

SEQ ID NO: 82573 - DNA, 727 bp, Homo sapiens
  sig_peptide (12)...(147): this location contains the signal peptide sequence, MRVDTLALFTTLWWKTFWSLTVLYDICARCSVYALCQAKEVSFYR, Run with SignalP
  misc_feature (495)...(0): similar to gi2197085 in the genepept database release 114, Run with FASTXY 3.3t00, default parameters
ggcacgaggtgatgagagtggatacccttgccttgttcacaaccttgtggtggaaaacattctggtccctcactgttctgtatgacatttgtgctaggtgttctgtctatgccctttgtcaggctaaagaagtttccttctatcgctagttggctgaacatttttataatgagtggatgttggattttatatttaaagttttactgcattccttggtaggattatatgttttttctcctatatcctgttgatatggtaaattacattgattagtttttgaatgttggcctgactgtaaattagtggaataaaacccacttgatcatggtataggacccattttatataattgttagatttgacttgctaaattttgttaaggattctttccatctatgttcataagaatattggtctatagctttctgtaatggctttatctggctttgatatcaaggcaatggtggctttataaaaagagttgggaaggattgaaattaccttcttcccttactttttcgatagaactcgccccggggaagcccatcttgcccattttcgggtatttcttgggaaagaacttttactttctaactgttaatcccaaaccaatgactaaacggcagccttcccctcttcctcgtctattgagaccccgcaccacaacttttccccgtttgtccccagccactagccccaactccgggcgtttcgctcacttccctcg

SEQ ID NO: 82574 - DNA, 469 bp, Homo sapiens
  sig_peptide (88)...(223): this location contains the signal peptide sequence, MGLPWLGTRQLTRVAGVGSGKRLLTLGILTPLSRILLCNIHFLLP, Run with SignalP
  misc_feature (277)...(460): similar to gi563377 in the genepept database release 114, Run with FASTXY 3.3t00, default parameters
gggcagcgaaggggccgggccccagactgagcctgtgggaaggccactggaagctcagcctccgggtggcatgactttgccccttgcatggggcttccctggttggggaccaggcagctgaccagggtggcaggtgttggctcagggaagaggctgctcactcttggcatcttgacccctttgtccaggatcctgctctgcaacatccacttcctgctcccgatctccctgaaggggctgctgcttgtgggcctgctctgcactgtgctgcaagtgagcagtgctaagggggcctccagggggaaataaagtcacagcctgagccggggaaccgcagctcccacaccatcaacaccctcggagggggcaagcagaacctctggcctcctatcaggtaataagcagcaattgcagttccccaggagacaagggtccctgcagagatgaaatatccctcatcctggcctca

SEQ ID NO: 82575 - DNA, 755 bp, Homo sapiens
  sig_peptide (268)...(403): this location contains the signal peptide sequence, MGLCGMWVLTAFLCEPMGFRHRVCPHRCVRGSGRGSGCECVTMWP, Run with SignalP
  misc_feature (542)...(746): similar to gi288145 in the genepept database release 114, Run with FASTXY 3.3t00, default parameters
tgcctgcttcatgctggggacacagccgtagaggctccatggcccagtggaggggacagactcatcctcagctagcgaccagccggggtaggcgcctggggttagaggagccaggctgggagggctgacgtgcgggaggcaggtttgcaagtgtgactgcccacctggcttcaaagccagctgctctatgaccctgcctcggccctgcctgtgtgtggttgtggccgagtggccctgcacatgcgtgagtgtgtggacgtggtatccatgggactctgtgggatgtgggtgttgactgcattcctctgtgagcccatggggttccgacaccgtgtgtgtccccataggtgcgtgagaggcagtgggagaggctctgggtgtgaatgcgtgaccatgtggccatgcgggattaatgccatgactggggggttctgggtgtgattgtgcgtctcttgttttgatcagaacccacttagggccaggtgcagtggctcacacctgtcatcccagcactttgggaggctgaggcaggtggatcacgaggtcagaagttcaagaccagcctggccaacatagtgaaagtccgtctctactaaaagtacaaaaattagctgagtgtggtggcaggcacctgtaatcccagctacttgggaggctgaggcaggagaatcatttgaacccaggaggcggagtcgagatggtaccagtgctctccagcctggatgacagggcaagactccgtctgaacaaagaaa

SEQ ID NO: 82576 - DNA, 409 bp, Homo sapiens
  sig_peptide (214)...(349): this location contains the signal peptide sequence, MPFANIFSVCNLFFHLFLNSVFQRAEVLILIKSKLSIFTFVDYAF, Run with SignalP
  misc_feature (370)...(392): similar to gi56590 in the genepept database release 114, Run with FASTXY 3.3t00, default parameters
ttttgttgaaaatcagttgaacatatatgtgatttcaatttgtattttcctgatggtcagggaacattatttcatatgcctgtttgccatccatccatcttctttgatgaagcatctcttcaaaatcttttgatcattttgtaatagggttgttttaatatgattaagttctgagagttccttaaatatcctggatatgttacttgataagacatgccttttgcaaatattttctcagtctgtaacttgttttttcatctttttctgaacagtgtctttcaaagagcggaagttttgattttgatcaagtctaagttatcaatatttacctttgtggattatgcttttgatgcttccagagtggctcctgcatttccatgacacaatcccatctttttattcaagtact

SEQ ID NO: 82577 - DNA, 1776 bp, Homo sapiens; identical to SEQ ID NO: 63170
  sig_peptide (923)...(1058): this location contains the signal peptide sequence, MGVLLVSMVVLFIFAILCIFIRNRILEIVYASLGALLFTCFLAVD, Run with SignalP
  misc_feature (84)...(1776): similar to gi238267 in the genepept database release 114, Run with FASTXY 3.3t00, default parameters

SEQ ID NO: 82578 - DNA, 418 bp, Homo sapiens
  misc_feature (1)...(418): n = a,t,c or g
  sig_peptide (38)...(173): this location contains the signal peptide sequence, MALGVPISVYLLFNAMTALTEEAAVTVTPPITAQQGNWTVNKTEA, Run with SignalP
  misc_feature (79)...(330): similar to gi1707866 in the genepept database release 114, Run with FASTXY 3.3t00, default parameters
cccacgcgtccgaaagaaagttaagcaactacaggaaatggctttgggagttccaatatcagtctatcttttattcaacgcaatgacagcactgaccgaagaggcagccgtgactgtaacacctccaatcacagcccagcaaggtaactggacagttaacaaaacagaagctgacaacatagaaggacccatagccttgaagttctcacacctttgcctggaagatcataacagttactgcatcaacggtgcttgtgcattccaccatgagctagagaaagccatctgcaggtgttttactggttatactggagaaaggtgtctaaaattgaaatcgccttacaatgtctgttctggagaaagacgaccactgtgaggcctttgtgaagaattttcatcaaggcatctgtagagatcn

SEQ ID NO: 82579 - DNA, 2180 bp, Homo sapiens
  sig_peptide (438)...(303): this location contains the signal peptide sequence, MLCNLFCYFAILLFLLITSVKKFQGEMNQTPYLSHCYPDTSELPF, Run with SignalP
  misc_feature (1521)...(2181): similar to gi4456989 in the genepept database release 114, Run with FASTXY 3.3t00, default parameters
ccggtttgctgttaataaatatgtgggtaaatatctgtttggggctctcagctctgaagactgtgagacccccaatttcccacttcacacctctatatttctgtgtgtgtgtctttaattcctctagcaccactgggttagagtctctctgactgacctggtcttggcaagtggtgtccatttgtgggggctcatatccaggtcgaagggtcaccagagcaatggttggaatgggaaactagctggaggacacccgagtactcttaaagcaatccctgtcgtgcgtaagaaggggagctcggaagtgtcagggtaacaatgggacaggtatggggtctggttcatttcaccttggaactttttcacactggtaatgaggaggaacaagagtatagcgaagtaacagaagaggttacagagcatgtttatttgccagctaaagctaaagcagcaaaggaaggagagattcatccctacccttctgcaccccctccttattattttgaagaaaaagagtggccagaccctccagatctttcttttctggaggacactgggtgaaaagtagttgccccagtgactgagcaatgccttgagcaactgctcttagttctattcaggcaggaattcagcaagctagatgagagggcgatttagaggcttggcaattccctgttagaatacaccccccagatcaacagggaaatattatagttacatttgagccttttccttttaaattatttaaagaatttaaacaagctgttaatcagtatggaccaggttctccttttgtaatgggactgttaaagaatgttgctgtttccagttggatgattcctactgactgggatgctcttactcgagcttgtctaactcctgctcagttcttacaatttaaaacttggtgggcagatgaagcttccattcaggctgctcgcaacacccaggcccaacttcaaattaatataactgcagaccagcttttgggtgttgacagctgggcagttttagatgtacaagtggtcatgcaggatgatgccatagaacagcttaagaggacgtgtgcattagagcttgggaaaaaaagtcacttcaggtggagagcaataaccttcctttagtgctgtaaagcagggaccaaaagaaccatatgacgattttatagctcggttacaggagtctcttaaaaaggtaattgcagatttggctgctcaagataaagtgttgtggttattagcttttgacaatgctaatcccgattgccaggctgctctgccacctattagagggaaagcacatttagttgattatatcaaggcctgtgatggtattggagataatctgcataaggctactctgctagcccagcatggttatactaaaaaagaatgtagaaacaatcagcgagtcaggccaccagataagggaaaaaagaaaactgctgagcctgaaatatgtccaaaatgtaaaaaaggaaaacattgggctagtcattgtcactctaagtttgataaagatgggaacctgatttcgggaaacgacatgaggggcccatcctgggccccattccaaacggggcatttccagctcaggccattccctcatccctgtacaatatctgtccccatcacagccagtagtgccacagtagatttatgctgcacaaaagctgtgagccttctgcctggggaacccccgcaaaaggtcccaacaggagtctgtggacccttgccagcggggacgataggattccttctaggaaggtctagtttaaatttaaaagggatacaagtacaaacaggagtcattgattcagattacaatggggaaattcaaattgttatatccacttctgttccctggaaagcagagccaggagagcatatagcacagctcctgattatgccatatgtggaaatggggaaaagtgaaattaaatgaacaggaagatttggaagcacaaataaacaaggcaaagcagcttattgggtgaaccaaattactgataaacatcctactggtgaaataactattcagggaaagaaatttaaaagtttggtagatacaggagcggacatttcaatcatttctgtacagcactggccatctgcatggtcaattcaacctgctcaatttaacatagttggagttggtaaagcccttaaagtatatcaaag

SEQ ID NO: 82580 - DNA, 866 bp, Homo sapiens
  misc_feature (1)...(866): n = a,t,c or g
  sig_peptide (150)...(285): this location contains the signal peptide sequence, MPPRPPQSHLPALGWLLLTYLAELSEGWTFVAVLKGALPASKVLC, Run with SignalP
  misc_feature (673)...(866): similar to gi930265 in the genepept database release 114, Run with FASTXY 3.3t00, default parameters
gctgctgacaatcctatttagcatatgcaaatcttttaacatagagaactgtcaccctgaggtaacagggtcaactggcgaagcctgagcaggccagggggcttggctgccccattccagctctcccatggagcccctccaccgggcgcatgcctcccaggccacctcagtctcacctgccggctctgggctggctgctcctaacctacctcgccgagctgtcggagggctggacatttgtggcagtgctgaagggggcattgccggcgagtaaagtattatgtttcttcttgtcaccccagttcccttggtggcaaccccagacccaacccatgcccctgacagatctagttctcttctcctgtgttccctttgagtccagtgtgggacacggtttaactgtcccagcgacatttctccaagtggaaatcctatttttgtagatctccatgctttgctctcaaggcttggagaggtatgtgcccctcctgggtgctcaccgcctgctacacaggcaggaatgcgggtgggaggcaggtcgggctgcccgcccagctggccggaaggagactgtggtttttgtgtgtgtggacagcccgggagcttttgaaaaggggcctggggctggctgcaaccgggtggttggcggtggcaagtcccttcctacccaaccccacctgtccccggctcgcccttcccaacatcccaacccgcgcccgccccacgggcgccccccaccccagacccagccgccagccaacccccgccccacccccaagacacccgcgcccctgcccagcgcctccccgcacctcccgcctccctaacactccanttcaccactcagcctcccgggctgcccatgc

SEQ ID NO: 82581 - DNA, 1044 bp, Homo sapiens
  sig_peptide (55)...(190): this location contains the signal peptide sequence, MKVSCFQHLSLTMKMSIELCVVVPYDFIFFIYLFTVLFMFCLIYS, Run with SignalP
  misc_feature (820)...(1020): similar to gi1334504 in the genepept database release 114, Run with FASTXY 3.3t00, default parameters
cacccttgtcaaggtgaaatgtgaaagacagaagtttatttaatgtagaggtaaatgaaggtgagctgttttcagcatcttagtttgaccatgaaaatgtctatagaattatgtgtagttgttccgtacgattttattttcttcatttatttatttacagtcttatttatgttctgtttaatatatagtttgattctggccattttaaatatttgacacagaagagactatattggaatatttacagctttataagtctttcatcagattagctgttgactttttgtaatacaaaaagtttcagacaagtattaaagaataaaatctgtctcaggctggtagttagcagttgtgaccaagatgcttttggttgttgtatttcacaaaatttcctcatttctaacatgagagatgaacttattttaatataatcctttttctacactttaaaagtcagcaatagtgttatgtatttataggcagctcttaataatcttgtcatatttgtactaacccaaatgattcacagtgacaaaacattttaataacttgatcacaaaaccatatggacaaatatgaattttaatattataaatactatttttaaaaggtagaatttattcgcacagggtaaaaagaatgtaatatttagttctcaagtttgaattatcagtatattattacaattttgtatatcagaatcttaagtgttacaggtacaaaaagaatattgctagccaaatgaacaaagtttagctaaatctctgtagcatgcaaatcaaataaattaaaattttttgctattgctttatctatattgtcttaaatatcaaaagctcaggactgaacttaatatttaatcaggttaaattctggaacatgttctgttttaatttgtcttgtttgtaaacgtatgcaaatacatcacatagattaactggtttcctgcactttccatgtgtttgtgggtggaaaaaaattcagtggtttttttttaaaaaaaaaaagcaaaaacaaagctacatattgcctaataaaaaaaaa

SEQ ID NO: 82582 - DNA, 724 bp, Homo sapiens
  sig_peptide (254)...(119): this location contains the signal peptide sequence, MQCEKYLLILFCLLQKYFQCLAFLHSLGVLFIITIDTIIFICTIL, Run with SignalP
  misc_feature (12)...(318): similar to gi2635608 in the genepept database release 114, Run with FASTXY 3.3t00, default parameters
attgttccatgaaagtaacaaccaggtttgtctcattcatcactgtacccctaatcctgtgtaactgcctagcatataataagcactcagtaagtgttgatagaaagaaccaaggcattaatatcgtacaaataaaaataatagtgtcaatagtaataataaagaggactcctaatgaatgtaagaaggctagacattggaagtatttctgtaataagcaaaatagtatgagcaaatatttctcacattgcatttttttcctcagggatgtctccatttgtattcttagcaatttttttccaagtagtaaaggtatgtaaggtatatttccatttctttttccatgagaaaataggatgaagtgagttatatgtaatacccctccatctctataaagttttttcagattgaaatataccccattagtgattttgctaaccaagtttattcatttccaaaatgtctagcaatgccactagttacaagaggacaacctagccatcagtttactctctcgtgtgacatttcataagatgtttgtttctttcttgtggcatttatagcttcttccttgcattatagtcatttgtggacatgtcttctgtcccctattagggaactctcagctcatcacactgctagttgatattgggagtgtcagtcgtttggtctctagagcccagattcaaaggtgtaagcagctttacattcccagaatttgaaa

SEQ ID NO: 82583 - DNA, 956 bp, Homo sapiens
  sig_peptide (199)...(334): this location contains the signal peptide sequence, MSRAGMLGVVCALLVWAYLAVGKLVVRMTFTELCTHHPWSLRCES, Run with SignalP
  misc_feature (852)...(15): similar to gi3063706 in the genepept database release 114, Run with FASTXY 3.3t00, default parameters
actggctttgcaccccttctgaggtcacagttgtgtcccttgaaaacttgggcaggagcacctgactggcccagcttgggtcatgccctaggcccagcagtgcgggaggccaggaaagtaggcttggggaggctggcctctcctccagtttgaagcatggcaggggttccgggggaggctgctggggggcctgcgagcatgtccagagcaggaatgcttggggtggtgtgtgctttgctcgtctgggcttatctggccgtggggaagctggttgtgcggatgacgttcactgagctgtgcacgcatcatccatggagtctgcggtgtgagtccttttgccgctccagggtcacagcctgcctccctgctccagccccctggctgaggcccttcctctgccccatgctcttctcagacaggaatcctgtggaatgtcatctctttggggaggccgtctctgaccctgtatgcaaaggccttctcccacattatttttggcaccccactttcttccccgtgaaagcaaattgtttggtgtctttctgtcccactacagtataggcccggttcagacagaggccttgtccactaggcctgcgctatctctgcggagcccagccaaagcaggggccaggcgaatcttttgttaaaagaacaatgcgcgctgggcacagtggcgtcacgcctgtaatcccagcactttgggagtccgaagctggaggatcacttgaacccaagagtttgagaccaccctgggcaacataaggagaacccatctctacacaaaattagctgggcgtggtggtgtatgcctgtagtcctagctacttgggaggctaaggtgggaggggtggctgaggtgggaggatcacttgagcctgggaggttgtagcagtgagagccatgatcgcgctactgggcaatagagcagaacccagtctcaaaaaaaaaaaaaa

SEQ ID NO: 82584 - DNA, 870 bp, Homo sapiens
  sig_peptide (516)...(651): this location contains the signal peptide sequence, MWSLWIWVDQHQARLIPSPQVLLLLLRETPSTAAAVAGWLVVASM, Run with SignalP
  misc_feature (419)...(867): similar to gi3874984 in the genepept database release 114, Run with FASTXY 3.3t00, default parameters
ttcaggtggagtctgttagtttttgagaaagagttagggcgagtttaaggcactgtggcagctgtgagataaagtctggttcctccccagctggctcaggaaatgttcgcggatacaacggcggccccctctgggcatacctgcctgtggagcggagagtggacggtgtgagggggaccgggagaggcaccaaatctggcctgggggcccgagaagcttcctctcagtgaccacaatatgaatgggaacagcaagatggcaaaagcttgctgagtggtacagcgccagcctgggtagtggcctccccagcaagttgcatgtcactagcttcctgtggctgtcactcctgggcccaggcacctccgaagatcagcacctcctcatgggctcaagcgaggacaggagcccgtcacccatgagctctcaagggcagagccactgtcctgtctcgatggctccaccgtgactccagtggactttggacagtggggagcaggcccaacagggccactcggatgtggtcactctggatttgggtggatcagcaccaagctagactcatccccagcccccaggtgctgttgctgctcctgcgtgagaccccatccacagctgcagctgtggcagggtggctagtggtggccagcatggccctgctgcagctccacgctgtggggggcgtggccctgaccagcagccaccccttcatgtgggccacaggggaggagcttaggaagccgccttggcaaggttccgcaggctctgcgtctggtgtggaagagctcacggggaagcactcctgcccaggacccgaggagccggccaccgttcagaaggccccagcttgaaggcctggagagccgcccagct

SEQ ID NO: 82585 - DNA, 904 bp, Homo sapiens
  sig_peptide (232)...(367): this location contains the signal peptide sequence, MWICRVKQAWLPPLLSPLGPPTPWDPFYAAPSPPVWVGSGYWYRG, Run with SignalP
  misc_feature (351)...(71): similar to gi2662600 in the genepept database release 114, Run with FASTXY 3.3t00, default parameters
gctgttgagctggccgtggagtttatgatgtgctatgggaatgatggtctgtagactgatgttgggtcaggggcaggggcagcaggggtgtggtggagtgagcgtagggctgggctgctgtgggagccagttgctgctgccgactgatccctggagcctggaagctgcaggtgtgccgggctccctgtttctctgccgggccagtggctgagacctgagtctccatcaaccatgtggatctgtagggtcaagcaagcctggctgccacccctcctgtctcctctagggcctcctactccttgggaccccttttacgctgccccctcacccccagtctgggtgggcagtggttattggtaccggggtctgttgtcccctccagatggaggacagggatcttttccacctcacctgtgtccccagtgcccagtacaggcccaggcacaaataggcccttacttcagagaactgggtgaaccaccaagtgagacaaagtggtatctgaactcccacagccaccacagggcagcaggaactcagaggcggctacgatgtctgcaacatcttctgggaggaggtgggcctgggattgggtcagaaagcccaaacgaaggtccaggccaagtgactcatgcctgtaatctcagcactttgggaggcaaagatgtgaggatcacttgaggtcaggagtttgagaccacccgggcaacatagagagaccccatctttacacaaaatttaaaaatttggctggcacggttgtgaccccctatagtcccagttgcttgagaggctgaggctggaggatcacttcagccccggagctcaaggttacagtgagctatgattgcaccactgcactccagcctgggtgacagagtgaggccttgtcttaaaaaaaaaa

SEQ ID NO: 82586 - DNA, 766 bp, Homo sapiens
  sig_peptide (70)...(205): this location contains the signal peptide sequence, MGLPHSYEDCILFGILAVLCFTVLLMNILAVYSFFNCFYHSPCNE, Run with SignalP
  misc_feature (325)...(0): similar to gi1335199 in the genepept database release 114, Run with FASTXY 3.3t00, default parameters
ggcacgagtccttaaataggatcacatggtttctcaacgcatacagtgaagatttccttaccggttcatatgggtctacctcattcttatgaggactgcatactttttgggattctggctgtgttgtgctttactgtcttgttgatgaacattttggcggtttactcattttttaattgtttttaccattctccctgtaatgaatattcttacgcatacatcttggtacaagctgagtcaaagggtttggatattttaaatgttggtaggaactgccagagtgccctctgtaagggttttaccagttgaaactcccaccagccaagtccccaagatcctcgtcaacacgggctgttaggcacctttaaaatttggagtgctttggtgtatttcgactcatgggggccttgctctgtcagcgaccccctatgattgataggacccaaatatccggcctccctcatccgacgggggtcctgcttttttcgatcaggaccctctgggagcgcgggttgtcacagtttttccccaccttcccttgggaggtgttcccctataatcaatgcgaccctccagcccccggggccggaatggttcccccaaccccgcacggcccatccggcctcccccctccccccctccgccggcgacggatgtcccacgcccctctatattcgaacgacgatgacacccgtacacgcacgagcgcgaccgctccccacgtctcatccacttccacctaccgttcagcggcgtcgacttcacg

SEQ ID NO: 82587 - DNA, 375 bp, Homo sapiens
  sig_peptide (178)...(313): this location contains the signal peptide sequence, MWLRCSLGVRAAQARSLAKLPLGLIQHLARPPGLGLRCISIRDPG, Run with SignalP
  misc_feature (141)...(367): similar to gi4261850 in the genepept database release 114, Run with FASTXY 3.3t00, default parameters
ggcacgagggcagacacgtctaagtgctttgcattaataaaaatgacaacagtcagcacttaggagcaccctgtataaggcagacgctttgcatgcactggctcattcagccttaaagtagccttaggtttgggactgttctcgttgccttggtgcagatggggtagctgaggtgtgatgtggctgaggtgctcactcggggtcagggccgcccaggcacgttccttggcgaagctcccactgggcctgatccagcacctggcccggcctcccggccttggcttacgctgtatttccatccgggaccccggattccaccagctgctccccatccctgcctgaacacacccaccagctcagaccccatgtctgtcc

SEQ ID NO: 82588 - DNA, 491 bp, Homo sapiens
  sig_peptide (184)...(319): this location contains the signal peptide sequence, MVTWLSFFWVSLTVTMGPTPHTHLPNKHTCHKHVCIGLPLDNTLW, Run with SignalP
  misc_feature (159)...(439): similar to gi552415 in the genepept database release 114, Run with FASTXY 3.3t00, default parameters
caggaagcactgtgttggcacctcaatgcctttttgtcttataggcatgactaatccatagggagtagactaaaggtcttcttttattcacaatcagcttgctctgaacctgtgcttagtataccttcctggtctctggagacaatggaaacaggataagcaggtcagacagaaaaactgcaaatggtgacttggctttcctttttctgggtctcactcaccgtcaccatggggcctacaccacacacacatttgccaaacaagcacacttgccacaaacacgtatgcattggtctaccactggacaacacactatggctctatccgctacttgaatactctgacctaacactctcatgcacacgtgtgcattcacgtacacactttctctgtcacactttgttcaaacataaacatataacctgtccatacacaaatgactcttcaaaaaatataccccatccataaataagcacaaatttcctcgtgcc

SEQ ID NO: 82589 - DNA, 765 bp, Homo sapiens
  sig_peptide (1)...(136): this location contains the signal peptide sequence, MPFIFSCLIAVTRTSSAVLNRIVRGDILAFLMDFRVYILLLSVCI, Run with SignalP
  misc_feature (589)...(763): similar to gi1335198 in the genepept database release 114, Run with FASTXY 3.3t00, default parameters
atgccttttattttttcttgcctaattgctgtaactagaacctccagtgcagtgttgaatagaatagtgagaggggacattcttgctttcctaatggattttagggtttatatccttctactatctgtatgtatatttttatcctagctcagctccgtatggtgctttgtataagcctttacgttataatgaaacaaatcaaaattccttttacaactgagaatgtcaaaaactgaaccaaggattgtcttcactacagcctatggtttttcacatgaagtattcacttcaaaaatgacctagggatggttcctttgacaggcccctttgtatgcagctttactgcattctgtcatgagacagcaccactagtttttgattccagtaatacaatgtcacatctggcagggatttttaaattcatctgtttatcacatatttattgagtgcttatcaaataccaggcataattgatggtctggggaaataccggttattaagatgcttaaagtcctgctagaggctgccagagtaagacaatgacccatgtagcacctttagactatctccccacgtgctaccttttttagaagtgggttttcaaatacacttaccaacggaccggccgtggccatgccttatgccgcacacctagctcttccccaactctgcgagactacggaaagggcattgcctgacccttgaacttgtctcccccgcgccccccgggtagcccctatctgacaacttcacccacgccgccgc

SEQ ID NO: 82590 - DNA, 402 bp, Homo sapiens
  sig_peptide (254)...(389): this location contains the signal peptide sequence, MLLTVCLTFFLYSGYSQEVVCYTLGNIPQMPSAPRLVRAGITWVT, Run with SignalP
  misc_feature (240)...(404): similar to gi4589584 in the genepept database release 114, Run with FASTXY 3.3t00, default parameters
ccacacgtcacctcattcacgtggactcaagatgcagaacccaaggatacagaaggccaactgtatattgtcctgtgacttggtgtgtgtgtatagtagaagatcatggggtggggggatggggaagctgaaggtggttatagggaatatcacacacagcatccttacctggctttgcttactctacctgctaggctgagttgggtagtgtgcaggctgagccttcctcttttaaaatgccaagcctcttcacatgcttctaactgtgtgcctcactttctttctctacagtggttatagccaagaggtggtgtgctacacattaggaaatatccctcagatgccttctgcaccaaggctggttcgagctggcatcacatgggtcacgttgcagtggagtaa

SEQ ID NO: 82591 - DNA, 943 bp, Homo sapiens
  sig_peptide (837)...(702): this location contains the signal peptide sequence, MSRNLRTALIFGGFISLIGAAFYPIYFRPLMRLEEYKKEQAINRA, Run with SignalP
  misc_feature (587)...(933): similar to gi5104510 in the genepept database release 114, Run with FASTXY 3.3t00, default parameters
ttttttttttttagaaataaatcattttaatgtctattttttcacttctattaattgattattgatttctacacaagtgtatgcatctagtttgacttgcttcatatttattttccaacatggtgcaatcttcagcatgaggtgcacgaagtaccttgtcctcaaagagctttatcaactcgaacattttcgaagagctctataaggcagctcagcatggcagttttttactgaaatctcttatctggaagatggcagaagagacccggaccttcccgagcccactggttgcttgtattcatatcacagctcgcttgagtaagtggtaacgacagaataataagcagattgctcctccaaacccagctgggtgagatagcttcatttttggaaaatcaactgaatcatgaaaaccttcctaatggtataatttgttccagagttcttttgatacttaagaagggaaatattaatccttgtgcacagtcttttattacaagcactcttatttatggtattacagagttttcttctccagccgtcattctctggtgaggtgactggctgtaccccatgcagaatcgaaagcatgaagaaatctcctttcttaatcagagctgatgacagccctctcatttcctgccaaatggatcagaccacacttttaaccctggtggctgcacatcctcttgaacaattccagcccgatttatagcttgttccttcttgtactcctccaatctcattaggggccggaagtagatgggatagaaggcggcgccgatcagggagatgaagccgccgaaaatgagcgcggtgcgcaggttccgggacatggcgtcaggccccgggctgccctgacccgccgaccgcccggcactctcggaaaccaggttaccgacggccgggccgtgaccccgctcggaagaggtggagaggcttt

SEQ ID NO: 82592 - DNA, 279 bp, Homo sapiens
  sig_peptide (99)...(234): this location contains the signal peptide sequence, MQAWRSFVMGVEVLMYIVAVRCRAVFATSLWQPWCYTRAGGQFNV, Run with SignalP
  misc_feature (217)...(14): similar to gi185246 in the genepept database release 114, Run with FASTXY 3.3t00, default parameters
gataaaacaggggaaggagggaacaggtagggctggctgcaggaaagcttgcaggtatggggtacacagttaaaagggagtgtcttctgatagtcttgatgcaggcctggaggtcgtttgttatgggggtggaggtcctgatgtacattgtggcggtaagatgccgtgctgtctttgccaccagcctgtggcagccctggtgttacaccagggcaggtgggcagtttaatgtatctcaggccagatgacctgccctgcccacctggtcgacgcggccgc

SEQ ID NO: 82593 - DNA, 782 bp, Homo sapiens
  sig_peptide (202)...(337): this location contains the signal peptide sequence, MHKYLCVFEYLSNLSKCMRLYLILLASICMYLCVARRVFLFASVS, Run with SignalP
  misc_feature (47)...(782): similar to gi862343 in the genepept database release 114, Run with FASTXY 3.3t00, default parameters
aactaaggaatgagaaaggaaagtcggtatataaatggagtgtgtgaatgtgtgcatgtgtgtttgcatatctgtgtgcatatttgtacaagtatgtatctgtgtgaatgtatgtagatctgtgtatgtaaatattttcttagcatctatttggccaccagggcttttctcctgagtgtgagtgcataagtgcatgtgagcatgcacaagtatctttgtgtatttgaatatcttagcaaccttagcaaatgcatgcgattgtatttgatcttgttagcatccatctgcatgtacctctgtgtagccagaagggttttcctctttgcctcagttagtacccagggcaaaagcttaatgtattctactcagaaagtagttaaataagactgtttctctaatatatattttagttgtaggaattaggaagtagcatcatagatgctcctacactaagctggccctgcttcctatgttaaatatgacacatctgaggccctgggagaggaagtgatttgcccagtctcacacaatgagttagagccagagtgaagtcaaaacccagtctctggatgtacaagcaaggtctttttctagtcccaaatggccttttgtggtggtccagggactgccgggagcagtcgtggaactgcatcatttacagaaggtctgatctttgagtcagagtcacagaagaattgagaatagctgttgggccttgggctgctggactgagatgacatgtggacatcaggatgacaaggcttctgaagcagaggctgggg

SEQ ID NO: 82594 - DNA, 357 bp, Homo sapiens
  sig_peptide (83)...(218): this location contains the signal peptide sequence, MCFLIHYLPQMFFCQSTYVFSVSEFNVKITIEYVLVFVVFCIIML, Run with SignalP
  misc_feature (77)...(359): similar to gi436923 in the genepept database release 114, Run with FASTXY 3.3t00, default parameters
tgttaaaggatatacaaatataaatttgtagctcaagggattttcacaaaattaaacacaccagcaatgcagagcactccttatgtgttttctcattcattatcttcctcaaatgtttttctgtcagtcaacatatgttttttctgtttctgagtttaatgtaaaaataaccatagaatatgtacttgtttttgtcgtcttctgcataataatgcttgttttatttatctttgttgcatgtagctttagttttgtttttttatttctttaagggatgtcattatttgaatgtgccacaactaatttctactttatattgtcctttaattttaaaaaattgtttttaataatgctatt

SEQ ID NO: 82595 - DNA, 2171 bp, Homo sapiens
  sig_peptide (2021)...(1886): this location contains the signal peptide sequence, MAGRTTAAPRGPYGPWLCLLVALALDVVRVDCGQAPLDPVYLPAA, Run with SignalP
  misc_feature (1270)...(2171): similar to gi537433 in the genepept database release 114, Run with FASTXY 3.3t00, default parameters
ctgctttggggcgggaagggctgactgtgcccagcacgtagctgtgacctccccggggtgggcagtgccccggctcaaggtcagcgagatgcccatcactggctgcaccctcagctccagcactgagaccttgtcgtccgtcacagccagcgcctgctcccccaggatggagtcagacagtggggaacgcacctcaatggaggtgacaccgggctcccggcccaccacgacacggccaccctccagagaggctacacgcgagtccagcacgcgggcgtgtggcgccacgaggtgggacacgtctagcagccagtcggggccaagcaggtgcgtgaggcggcggccgccgtccagcgggtgggccgcgaagggggcgaggaagcgcacaccggcccgctggtactgcaggtggcagccacgggcgcgccgctcggcctcatccgacgcctctgcagcgggttccgcaggcccttcagcagggccaggtaccctccagccgcggacctgctcgagggtggtgtcggtgagctcgatacgcagcggtagcaggggggcccacacggtcagccgcagcgaggcgcggagccggccgccaccagaagtccactcgcaccccccgggcgccccggctctccttgccagccacgaacacggcatcacaggcctcagacacctgcaggacctgtgtgttggcagactcgcagccgacatgctctgtcacctccaccaaggcccccccgccgtccacagtgacaaggcgcacggggacatgctggggcactccagtcagtggtgctgtattcaccagctcctcagccttggccagtgggataagggctctgatgtcccgctcagacaccaggatttcccacaccattttgtccttctctgcttcaggggcctggcctgggtactccagctgccacgtgacggggcgagtgaccgctacgcccccaccagtgctattctccaccacaaagtccacccataggaactcagacagttcaaggggactgctggaatctggctctgtgagcccagcacggtggcaggtgatgagggtggtgtggtgcctggagcccttgaagcggtccagcttggcagtccagagtgtgggctgggctgggcgggcggctgtcacatgcagccccttcttcaccttgatccgcagggtcaggaggctggctgtgaagttgtgccgaagcaggagggtagcactaaagagctggccgggccgcactggcatgtcaggcacccgcagagtcacagcctcgtccagaggtacctcctggtactgcggggggtctgctgggcgcagctccacaccccccactgggagggcctgctccccagggtcgttctcctcgccggagccacagcccccagggccctcagctgcaggctcaagcgtgtcaggccagctcggcccgtgtggtggaggcctgtgagaaccagtgcgagggaagctccagctccaccacgcaggcgcccagggatggctggaagcggcaggcttggtgagcagtgcctgcagggtgtgtggcatggagccgggcacagggcaggctgccagaccctggtggccaatcctgccctttgaggtggaagagaacccgggcgtagggctctgctggagtcacagccgcttccactgaaacggcccgcacgtcccatgggactggccgttggtggggctcagtgactcgaggggggaccacctgctgagtggcaaaaggtgggtaggaggcccggagaagtggctgggccctgggccagggctgtaggagcagaaaggtctcagatcgggagctcagagaggagttggcaggtgggtagtggcccacctgctgcacacggaagtgttcaggggcgtctaggagctccagggctgccggcaggtagacagggtccaggggagcctggccacagtccactctcacgacgtccagggcgagggccaccaggaggcagagccaggggccgtagggcccccgaggggccgctgttgtgcgaccggccatccgcgcgcacatccttcccacagaaggcggggacgaggcgggcggctcaggtggccccagtcccgcacggcatctcccgcacccgctccgcgccgtccccacctggcccgctgggtcccggccgccgccgccgccgccgccgccacgaaa

SEQ ID NO: 82596 - DNA, 424 bp, Homo sapiens
  misc_feature (1)...(424): n = a,t,c or g
  sig_peptide (300)...(165): this location contains the signal peptide sequence, MMLGWGWKALLLKSLAFPTQGYPEGYEELLTKVTGADLTWSPGDG, Run with SignalP
  misc_feature (294)...(401): similar to gi1944209 in the genepept database release 114, Run with FASTXY 3.3t00, default parameters
cccttgactaatggcaggcagtttcattggcttgggtcttttacataaaagccaagcaaaaataagagcgactgaattttcatgtggggcatgataaagttgatttcattttcaaattcacaatactgctttgtcttcctggtgccaggaacctggaattggattccatctccaggtgaccaagtcaaatctgctcctgtcactttcgtaagtagctcctcatagccctcaggatacccctgagtggggaaagcaaggctcttcaggagcagagccttccatccccaacccagcatcatctcctgctgttccctgtcacggttccagccacactcacntaatcagtgaccatgctgagccatggtcccgcctctctgcctttgcccctcccattcctactgcagggagtgcctttcctttccac

SEQ ID NO: 82597 - DNA, 689 bp, Homo sapiens
  sig_peptide (349)...(484): this location contains the signal peptide sequence, MNWQHSTMYLFFAVSGIVDMLTYLVSHVPLGVDRLVMGCGKYSWK, Run with SignalP
  misc_feature (97)...(691): similar to gi309074 in the genepept database release 114, Run with FASTXY 3.3t00, default parameters
cggacgcgtgggtcgatgcacctgcttctgggcggacgcacttggcgcgcggcgcgggctgcagacggctgcgaggcgctgggcacaggtgtcctgatggcaaatttcaagggccacgcgcttccagggagtttcttcctgatcattgggctgtgttggtcagtgaagtacccgctgaagtactttagccacacgcggaagaacagcccactacattactatcagcgtctcgagatcgtcgaagccgcaattaggactttgttttccgtcactgggatcctggcagagcagtttgttccggatgggccccacctgcacctctaccatgagaaccactggataaagttaatgaattggcagcacagcaccatgtacctattctttgcagtctcaggaattgttgacatgctcacctatctggtcagccacgttcccttgggggtggacagactggttatgggctgtggcaagtattcatggaaggtttcctcttctactaccacgtccacaaccggcctccgctggaccagcacatccactcactcctgctgtatgctctgttcggagggtgtgttagtatctccctaagaggtgatcttccgggaccacattgtgctggaacttttccgaaccagtctcatcattcttcagggaacctggttctgggcagattgggtttgtgctgttcc

SEQ ID NO: 82598 - DNA, 886 bp, Homo sapiens
  sig_peptide (859)...(724): this location contains the signal peptide sequence, MAFLLYHLVYHIPPMAPVSFVFETKSRSAAQAGVQWHDPGSPQPL, Run with SignalP
  misc_feature (169)...(20): similar to gi299471 in the genepept database release 114, Run with FASTXY 3.3t00, default parameters
gcccatatcgttaattcgcatgcctgtggtcccagctactcaggaggctgaggcgggagaatctcttgaacctgggaggcggaggttgcagtgagccgagatcttgccattgcactccagccggggcaacaagagcaggactccatctaaaaaaaaaaaaatagtcctacccctcaggaaactgacatggtatgtaggtttggaccaaacctaaataaaatagcttcagttaactattaaattataatttaggaaccagaaggaacttatttataacaaaaactttgaattgccaaaatttttacagattttagcagagcagagtaaattaataacatctgattgcatgtttccttttcattttccataaagaaaagccttaaatcaagccatttttttttccagagggtaatgtactagggctacaaataaattcatttagcccaataaaggtagtcttaacagtagccagagtcatctgggaccattgtagcatcttaaacacagattctaagaaatgtttagaaactataaagaacaaaatagttatgtcttcatctgctgaaggaattctaatttgcacatgaataagacacacagcccctttgactaacctgatgaagataaaacagtgtcctgagtcaaggtgaagctctttgagatgggaaaaaaatgcaaatttgatattgaggccatggcaggagaatcgcttgaacctgggaggcagaggttgcggtgagccgggatcgtgccactgcactccagcctgggccgcagagcgagactttgtctcgaaaacaaaagatactggggccataggaggaatgtgataaaccagatggtagaggagaaatgccattatgtgcaagaataaatgtagagtgca

SEQ ID NO: 82599 - DNA, 1624 bp, Homo sapiens
  misc_feature (1)...(1624): n = a,t,c or g
  sig_peptide (51)...(186): this location contains the signal peptide sequence, MWRLPHSQFIHIVILPLKVFLFLFCFLRWSFSLVAQAGVQWRDLG, Run with SignalP
  misc_feature (1047)...(1461): similar to gi347221 in the genepept database release 114, Run with FASTXY 3.3t00, default parameters
tgctattcatgtgttgagttttatacttctttatggatggtgtatgtgaaatgtggagacttccacattctcagtttattcacattgtgatactacctttgaaggtttttttgtttttgttttgttttttgagatggagtttctctcttgtcgcccaggctggagtgcaatggcgcgacctcggcccactgcaacctccacctcccaggctcaagcgattcttctgcctcagcctcccaagtagctgggattacagacactctccaccacacccggctaatttttatactttcggcagagacggggtttcaccatgttgaccaggctggtctcgaactcccgacctcaggtgatccacctgcctcggcctcccaaagtgctgggattacagatgtgagccaccatgcctggccctgttttgttttcttgttttttttatttatttttatttttatttttatttatttatttttgagacggagctccgctctgtccgcccaggctggagtgcagcggcgcgatcccggctcactgcaacctccgcctcccaagttcaagctattctcctgcctcagcctcctgagtagctgggattacaggtgtgcaccgtcaggcccggctaatattttgtacttttagtagagatagggtctcaccatgttggccaggctggtctcgaactcctgacctcaggtgatccacctgcctcagcctcccaaagtgctgggattacaggtgtgagccaacatgcctggccctaagacaatttaaatacagcaaactttctggtttggtcaatgtggtaatgcatgaatctagagatactgaatcttatctttactgctgattttatgctatttcccatagaatagcagaaaacaagtatcccttagtcaaaaataagaaaatccacaggctgtatgagaatcttataacatgtttatccaggaatgcttatatgttggttccaaagagtcattgaacaatttctcataaaatctttggataagagggagagatgagggttgcgtagggatttaatgaagtgggtgtctaacccttccaaagctgttttcaaaggttgctcattgatggatctatgctggtgtgaaatcacagtttctgtcctcattttaccttatgtgacattttaataaatttctgatttgaggatattggtggcaggttaagaaaatttgcaaatgacctgccactggaagaagtagctcttgtatgagaagacaaagttggtaccaaaagggatcctgacaaatttggacaatgggctaaacctaataaaatgaaatgtcacctgtctttctaaaccaatccgtcccaaataatgggagagataaagtctagaattttaggttttacaaaaaaggttttgttggactataagctgactataaagatagcagccgaaaaaggtaaaggacttagggccacattactaagaaacgaacagactctgtaattgctaatacactgtttaaaataaaggtcgtggtggngctgcttcattctactgataagaaagaccctgaataaagcccttccttttagaaacactcttcctttattttactttccactcctacgaagtataaaagcccttatggga

SEQ ID NO: 82600 - DNA, 718 bp, Homo sapiens
  sig_peptide (47)...(182): this location contains the signal peptide sequence, MCFLIDFCLHTLFSCAHCLLFDHLLFLFSNSLSSSPNFVSENLAC, Run with SignalP
  misc_feature (66)...(535): similar to gi3947744 in the genepept database release 114, Run with FASTXY 3.3t00, default parameters
atgggacaaggctctaaatggactggaggcctcttttccattatagatgtgtttcctcatagacttttgtcttcacactttattttcttgtgcccactgcctcttattcgatcatttgttatttctattctcaaactctctttcttcttctcctaattttgtttctgaaaatttagcctgtatcttacaatctactatataccaggcagtgctccactctctccttacttttttaactacagcctatcaaccaaagtttattctatggttgacttcctctcaggaaaaagactgagaggaatagacaaaactttgtaaagaaatgtatgggatggttgtgggagggaaatcacaatgagtgcatttggaaaaatacataaactacctgtcttcttatgttcatgatcatattttaaactagaatggttaacagctgtgtctttcctgaattattataagctagttttatagtgaataacattctatatttgttcagcgtattttagataatgaggtaggaaaaatttctgtagtatatttattcctgctaaaatagattatggtctatagaatctggttatccgctatttaaaatgtttcctacatgtttgagggtttcaaaagtgtccttttcatttgtgaaatttaattctattctctagacataatctcagtgttatatcattacagagagtactttagtgaacagtcaaatagg

SEQ ID NO: 82601 - DNA, 505 bp, Homo sapiens
  misc_feature (1)...(505): n = a,t,c or g
  sig_peptide (146)...(281): this location contains the signal peptide sequence, MMSFLWANVHTATCLGLRLTTGMGAVHSPLTTGMGELSGRGDWSS, Run with SignalP
  misc_feature (204)...(501): similar to gi499346 in the genepept database release 114, Run with FASTXY 3.3t00, default parameters
tgaggggnnnnnnnnnaatttccnnttttgcncggcctggcgaattcggcacgagcaaatatatcagctcattcaaagaacatatgagtagctgttgagtaatcaggagatgtttctcatttggattcaggaattcagatctataatgatgagctttctgtgggcaaatgttcacacagctacctgcctgggtcttaggctcaccactggaatgggagctgtccactcaccactcaccactggcatgggtgagctgtcagggagaggcgattggagctctatccaagttgagggatgctcagatgctaccagtcacacaaagttcacagccatctgcagcaactctagcttgtttgaactcatggctacaggaacttgagccctgctccagcatctcaccaagacagaagcccatcaacagcagcaccctgtatacgatgacagttttagcttatctttgcaacagacactgccaggcatataagttgaactgcaacaacagaat

SEQ ID NO: 82602 - DNA, 2342 bp, Homo sapiens
  sig_peptide (1296)...(1431): this location contains the signal peptide sequence, MHLALTTVLLWAWGSLQAFEIVEKENIFQRTPCPAFLMFENAAYL, Run with SignalP
  misc_feature (1663)...(2299): similar to gi3044086 in the genepept database release 114, Run with FASTXY 3.3t00, default parameters
atgagggctgatcacgtggggccggctgaccgggcagcggagctggggatcctatgcagcctggcgagcactgggcgcttcaccctgaacctaagcctgctgagccgggcagagagagagagctgcaagggcttgtttcagaagctgcaagccatgggcaaccccagatccgtgaaggaggggctcagctgggaggagcagggtctggaggagcagtctggtgggctccaggaggaggagaggctcctgcaggagctgctggagctgtaccaggttgactgatgcggcaagctaccctcagaggtcccagtggtcactggaggcagttttttggttgttgtcttgggggttctgcaggaccataataagaaacccacacctggttcccttctcaacttggaattttcagagcaaaaacaggaatcaagtcttccccacttctccagtccctcagtgtctcgctgttttgaactgtgtgtatccatggacagtcaagagctcaggaagttgagagcggttttgtttcccacccttagagtctgccaagcctctagcccactggccttgagagatgagtgtgtgcccaaccaaatgctggctataccagttacagcctccactcataaaagggaaaaagcaaaatctttatggtaaacaaacactgatctccacagctcttaacaagaatgtttatagccccaaaccaatgaatggacatgtaatcaacaaatgatcaaatactacatcatttgaggtgttgaattttcccctagagactcagttcttgtgcaggttgggcctgggaaagtcccaagccatcagctcaggtccagccagcctcccggatggccagatatgcaggagggtgggtttccttcatcccccagggttgatgaaagacttttccaccaggctggcagggcagggcctggagcactgaggcagagatctccctgcccgagcacctcggcccgcccttctcattccggtttcctttgacccattcttgggtgagcgccagtgttctagaaaggggagtaaaggccaggttctagaatggctttccccccccaccctgagatcaggtctggaatgttagaagggcatcttgtacatccactgggaataaattgccttgcacttggcggcttcctctgcagattgttgctgcttttcctggctgcataatcctttcctcatccagaggcttccgcttagcagagctttctaggagccctatgagcctttaatgccctggttttgccctgcccctctgacccctgcctccttcaggtatgcacctggccctcaccactgtgctcctgtgggcatgggggagtctccaggcctttgaaattgtggagaaggaaaacatttttcagaggaccccctgccctgctttcctgatgtttgaaaatgcagcctacctggccgacatgagctttgagcttccctgtcactgcaaacccgaagaggtgccagctgtagtctggttctaccaaaagcacctaggtagcagccacaccaaagtgctgacggactttgatgggcgggtgctgacggaggcagcccaggtacgtgtgggcagcgacatgctgacccgcttcagcatccgcatgttcagcttgttggttttcagggctcagtctgaggactcaggcctgtacttctgcggcacccgcaagggggactacttttacgcctacgatgtggacatccagaacagtgagggaatggtggccactttccaggacaagggccaggagccctttgcagatgaatactatgggcacctccatgtcttcaccaccttctgggaatggaccccctgtgaccgctgcggagtgcgtggggagcagtggcgcatcggcctctgctacctgcagagcccagacctctccccacgctacctcaaggccgtgcccgatgtggtgtcttgtggctcaagggctgtgccaaggaagctgcggaccaaggccagggaccacacgcctgaggtgctggttcggagctgcttagtaccctgtgagaagacaaagaccatccgggagggcgtgctggccatcattaactatgtgtccaaagtgggcagccggccctgggtgccccaggtgcccattcagttccaccagcagagactgggccatggactcatcatctcctgtcctggggcccggccagagcatgcagtggcctgggacaaagaccgccagcacctctaccgcacacagtacctgaagggtgtcaacaggtccatgagggtgttcattgaccacggcaaccagctccctcgtgctagctggcgtaatcaggtcatagcggtttcaattcgagtacacacg

SEQ ID NO: 82603 - DNA, 651 bp, Homo sapiens
  sig_peptide (116)...(251): this location contains the signal peptide sequence, MCAHLVCVKWCLVILICIFQNTNEVEQLILCVLLIPLSSSMTDLF, Run with SignalP
  misc_feature (247)...(2): similar to gi182221 in the genepept database release 114, Run with FASTXY 3.3t00, default parameters
aggtaatgcaaaattattttccaaagttgcaccaatttgcagtcttgccaacaatgaatatgagttcctgttgctcagaatccttgtcaacatttgaatattgtctaacttcaaaatgtgtgcccatctggtatgtgtgaaatggtgtctcgtgattttgatttgcatttttcaaaatactaatgaggttgaacaacttatcctgtgtgttttgctcattcctctttcctcttctatgacagacctcttcctatctttgtgtgtgtgtgtattttgctattaagcttttagtcttttcttactgattgaaggcggggattataaagtctgttctgcacaataatccatattgattgtctaggcacaaatttattttcctattctgcagctcgccttttcccattctgtattttcctagtcctagcttatcttttctcattctggatttcttcttttttgacatggagcctccgcttttgcgtccaagctgggcggcgtggcccggacctgcctcactgcaatgtccgcctgccaggtgtaatcgctttctcctcgctccaccctgcgggtagttcgaggctcactgctttaacctctcgcccccaccacccttcgtgttctgtccccgccgtccttctcggagggctcacc

SEQ ID NO: 82604 - DNA, 478 bp, Homo sapiens
  misc_feature (1)...(478): n = a,t,c or g
  sig_peptide (171)...(36): this location contains the signal peptide sequence, MGSASHALSWGRWVVGGWVLGTGEGFACSISFIAHSNSEVGTVSL, Run with SignalP
  misc_feature (101)...(478): similar to gi1296429 in the genepept database release 114, Run with FASTXY 3.3t00, default parameters
caccctatactgatgcagggactctgctcctacttcagggaaacagtgcctacctcagagttgctgtgagcaataaatgagatactgcacgcaaagccctcaccagtgcccagcacccagccacccaccacccacctgccccagctcagggcatggcttgcacttcccatctcatgtccaatcctctttcctgctgctctcagcctccctgaaggctgaccctttctggctttctcagagggattagttaaaatctttccgttgtaaagcctgcattgtttggggtttaccaagttatagtcccaaccccaacccccagtgctggcccctcacccctgggtcacaagtctgggcctcaagacaatcaaacaagcatttgatgagcctctcatgcgtgcaaggcacanctttcctnnnnttnnnnngnnnttnctagtcntacctagtatcccctgtatnggcaaccccgggaactact

SEQ ID NO: 82605 - DNA, 743 bp, Homo sapiens
  sig_peptide (324)...(459): this location contains the signal peptide sequence, MLGMISMLLNALKLLVYLTECCMALEERVHSVLIGWSVSFKRIQR, Run with SignalP
  misc_feature (400)...(165): similar to gi56588 in the genepept database release 114, Run with FASTXY 3.3t00, default parameters
gtggtggaattccctgcagcaggagcacagccacgctcctcccatggagaaactgctacgaccccaacataggcaggaagtaggaaattcaagaagcaggcaaatgggaaggatacacatctctatctgttcgtatgttagtattctgattttaagagtaatcgttgtctcttcatttttattcatttcaaaggactttctaatttcccttgtcatttcttctttgatccgtgagtccttcagaagggtgtagtttaatttcaaaatatttggggatttttcagacactgattttctgtttagctctgttgcggtcagagaacatgcttggtatgatttcaatgcttttaaatgcattgaaacttttggtctatctaacggaatgctgtatggcacttgaagaaagggtgcattctgttcttatagggtggagtgtttcatttaaaagaatacaaaggcaattaaaccaagtgggcttgatagagttcttcaagatggtcctctgcagcaacacagatggaactgaaggccattatcctaagtgaagtcagtcagaaacagagactcaaatactgcacattctcatttacaagtgggagctaaacaatgggtacacatggacatagggagtaaaataatagacactggaaactccaaaaggcaggaggatgggagaggagtaagccatgaaaaatcacagattgagtacaatgtacactaaaagcccagagttcaccactatg

SEQ ID NO: 82606 - DNA, 1322 bp, Homo sapiens
  sig_peptide (313)...(448): this location contains the signal peptide sequence, MFFFNYASSYRIFLTLPLGLQSLKFLHSALLQKKNCQLLVYTLQI, Run with SignalP
  misc_feature (921)...(1322): similar to gi555375 in the genepept database release 114, Run with FASTXY 3.3t00, default parameters
tagctactagaaaatttaaaattacatttgtgggtcgcactctttttgttgggcagcactggtctagatcaggagttggtaaactatggcctatgggccatatccatattgctgcctgtttggggatggcctgagagtaagggtgatttttatagatgaacatttacaattgattcagtcaaatggaacactaactttgaatcccagttaagtgaaatgttttctcaacccccaaaattccattattttcattagtagtacaaaaaattgtactcagttatattttgaatttgtcaaaaatgttatggaaaaatgtttttctttaattatgcaagtagctacagaatatttttgactttgccacttggcctgcaaagcctaaaatttttacactccgcccttttacagaaaaaaaattgccaacttctggtttacaccctacaaatttaaccaagagatacctttggatcgcccctgggctctctctatccctgaggaggtaaaatattatctcactccactctcagctatctgttcaaagatcagaatcctatgagaggggacagtccaaagatagaatctgaaaaacaaaagtaaacgttaaagaaatggagaatgggaacttacctggttggcactgtagttagtggccatgatcttgtgctgtttacactcgttgcttggcaactgcagaaggccgacctcctgggactaccaatgagcagaggctgcctttctcttctgcttattattattcacttccttggctcacactgcccccatttgttttctctggaacttagattcatttttattttacagacgggaaagactgagtaaatgtgagaaaattagctgaatagccactactttttttctggcataacctacccctgcttaagaacttccacgggcctttgattggggtttttaaccactttaacaaaccatgtaaccctgagagctatgcttgttggacaacatggtgtaatgtaccacaggctgtagagccagatactggggtttgaatccttattcaacatgggaacataggagctatatgacattaaacaactgtcttgtcttcactaaatttctatcaactcatttgtattgtggggataatagagcctgcttttacagggtaagtgagataaaatgaataaagtgtttagacaatatcatagcatagtaggtattcaatcctggtgagatcctgtttataaggcccactactttgtcttatcaggcagaataacaaaggtacaatatttaaaaagcaactagctcaaatctgtccccagaaggaaaaacatattttg

SEQ ID NO: 82607 - DNA, 425 bp, Homo sapiens
  sig_peptide (169)...(34): this location contains the signal peptide sequence, MGLISEHFTMTILLTWLSSKRKDMTYSILICKLGQEHRRQGIFSP, Run with SignalP
  misc_feature (73)...(413): similar to gi207010 in the genepept database release 114, Run with FASTXY 3.3t00, default parameters
tttttatgggcagaaaagttaaatattttcaaattgggggaaaatattccttgcctcctgtgctcttgtcctagcttacaaatcagtatgctataagtcatgtcctttctcttggaagacagccatgttaacagaatggtcatggtgaagtgctcagaaattaaacccattggccccagaagcagtaatgactgctccttgggcttgcccagggatgtttttcatgagatggttttaccacattaagcctgaaaaagcacagcccctgctcaagcaaataagctgacaaatggagagtgagaacgagagggtgcaaggggagccgtcatccaaaaggtcctgctgtggtggtcaaagcggggaccccagcccagcccaaacccccaccagccatgaaggagcccacgcgtccgcggacgcgtggg

SEQ ID NO: 82608 - DNA, 607 bp, Homo sapiens
  sig_peptide (209)...(344): this location contains the signal peptide sequence, MLYLFFASIEMIIFFLSFIRERGGIILIDFYKGKMSIWVFFLIFQ, Run with SignalP
  misc_feature (300)...(2): similar to gi1335198 in the genepept database release 114, Run with FASTXY 3.3t00, default parameters
tactatctcaaacagaagtgaacaaaaaaatcatccttgtctttttcctgatgtttcaggagcaagagaaatgttttcagtctcttaccattgggaataatgttagctatggtgttttcgtatgtagactttactatgttgaagtaattttctcctattcttcgtttactgagtgtttctaacatgaaaggctatttaattttgtcaaatgctttatttattttttgcatcaattgagatgatcattttttttttgtctttcattcgggaaagggggggtattatcttaattgatttttacaagggaaaaatgagcatctgggtatttttcctcatctttcaggaataagagaaatattttcagtcttttaccattaagagggtaaattgattgttgcatggtgacccatcattgcattccagggataaaccttaaatggtcatgatgcataaataaatttaacgggctatataattatgttcgctagcattttgtaaaaaaaaaatgcatcgccatgcataagggatattgtttaaaaaattttatttttctagggcctttgtctggctttgcattggggaaatgctgagtcatacaatgggtttc

SEQ ID NO: 82609 - DNA, 852 bp, Homo sapiens
  misc_feature (1)...(852): n = a,t,c or g
  sig_peptide (241)...(376): this location contains the signal peptide sequence, MVLHGLLCLNMAALESLDFEHAVTGQLLLRCCSKLGCKKTFDLYV, Run with SignalP
  misc_feature (233)...(852): similar to gi4760909 in the genepept database release 114, Run with FASTXY 3.3t00, default parameters
aataaataaacacattttttccctcctgggaaattatgaattctttgtttgatttttcaatataattgttagtttcgaagacatcacagatacgtttcccaagacatctctggattttgctcctctcccaagtcagtatctcctgagggcgtatcttatttctgtctgaaccatggggtgaatgaggcttggcttttcatcctttgaaatgctttgtaatgaatggaaaacaagctgcagatggtcttacatggacttctctgtttaaatatggcagccctggagtctttggactttgaacatgcagtgacaggtcaactgctgctaagatgttgctccaagcttggttgcaagaaaacgtttgacctgtatgttggcttggcaaatattatccacacatgtggcccagcagcacctgctaatgggcaaagagctgctgtatgaacagcaacacaaacttaccaacacagtgaagcacgacgtgtggggctggggttgactctcctccctctcctggtctccttcagactgggactgattccagcccctcccacttggtctgtctgtatctcttgcccacaggctgaggccgtggccagcctgcggcagcctcttcttcataattttatttgcatgacctgtttttgaatcaagccaatggtaggaagcatcctttacttttatgnttctctgtttcctgtgagaatggcttttctgttttcaagtagtggtttccctttagttactttgtagctggctacctaaaaaaatttactggctaccgagtcaggggagcccgggatctttcccaaacaaatttcaggggcccctgaacccattcagttggtaccc

SEQ ID NO: 82610 - DNA, 1524 bp, Homo sapiens
  sig_peptide (385)...(520): this location contains the signal peptide sequence, MGLGQPQAWLLGLPTAVVYGSLALFTTILHNVFLLYYVDTFVSVY, Run with SignalP
  misc_feature (478)...(1503): similar to gi2088706 in the genepept database release 114, Run with FASTXY 3.3t00, default parameters
atttgccctcgctgcacgaattcggcacgagcttcccttcccgtcttccttatcaataccaacaaagaggaagctaaggcctgggttgggtaactgcctgacgttttactgtaagtgcattgtgtgcccaagctcagggttgtcccgtctagaccattaaagtcacacaatgcaatttaagaagacaatgaggcaatctcagcactttgggaggccgaggctctctgtttcctcgagtcactcccagattagtggtgtctagctcagcactgtttctgttatacttcattcataattcccagcgctgttggacgaggatgggaagaccgcctgtggccatgagccctccccggtgctcctggggctaaggctggggctgcagccatggggctgggtcagccccaggcctggttgctgggtctgcccacagctgtggtctatggctccctggctctcttcaccaccatcctgcacaatgtcttcctgctctactatgtggacacctttgtctcagtgtacaagatcaacaaaatggccttctgggtcggagagacagtgtttctcctctggaacagcctcaatgaccccctcttcggttggctcagtgaccggcagttcctcagctcccagccccggtcaggcgccgggctctcctcaagggctgtggtgctggcccgggtgcaggccctgggctggcatgggccgctgctggcgctgtcgttcctggcgttctgggtgccctgggccccagctggcctgcagttcttgctgtgcctgtgcctctatgatggcttcctgacgctcgtggacctgcaccaccatgccttgctggccgacctggccctctcagcccacgaccgcacccacctcaacttctactgctccctcttcagcgcggccggctccctctctgtctttgcatcctatgccttttggaacaaggaggatttctcctccttccgcgctttctgcgtgacactggctgtcagctctgggctgggctttctgggggccacacagctgctgaggcggcgggttgaggcggcccgaaaggacccagggtgctcaggcctggttgtggatagcggcctgtgtggagaggagctgcttgtaggcagtgaggaggcggacagcatcaccttgggccggtatctccggcagctggcacgccatcggaacttcctgtgtttttcgtgagcatggacctggtgcaggtcttccactgccacttcaacagcaacttcttccctctcttcctggagcatctgttgtccgaccatatctccctttccacgggctccatcctgttgggcctctcctatgtcgctcgccatctcaacaacctctacttcctgtccctgtgccggcgctggggcgtctacgcggtggtgcgggggctcttcctgctcaagctgggacttagcctgctcatgttgttggccggcccggaccacctcagcctgctgtgcctcttcattgccagcaaccgcgtcttcactgagggcacctggaagctgctgacct

SEQ ID NO: 82611 - DNA, 772 bp, Homo sapiens
  sig_peptide (264)...(399): this location contains the signal peptide sequence, MFMWEVGRALALTWRLVSGMVASPGSMNSLCSGGVSGLGLWPARP, Run with SignalP
  misc_feature (757)...(772): similar to gi3875169 in the genepept database release 114, Run with FASTXY 3.3t00, default parameters
ggaggcaggagggggagtgggcagctggacaggaagtaggtttgggcaccaggcggaacctggccttgggcagccctggggactggctgcagcaggaagagggggtggaggagccgtggcggaggccaacccggggcctgggaagggcacctgtgagcaggctgctctccaggaggcagccagggcacctgtctcacctccgtgctgcctttccctggcattcctgcgaccaagacactcatcaatgccactcagagctcggaatgttcatgtgggaggtggggcgggctctggccttgacctggcgtttggtttctgggatggtggcgtcacctgggagcatgaactccttatgttctggcggggtctctgggctgggtctctggccagccaggcccctttccacccacctaaactttagcagcctccagccctaggctcagcacccctccctgtgcttcagcagcccctcttggcacctctgccactctggcacccctgggattttcccctttgcgggcatcctgggtactctgtgtgtgcccttggccagtcagcaggcccggtgggcttagtccagggctgctagctctcctgttggcctctagtggagagggcacaggggtcctgcctgctgggggcccagggctggggccggcccaagtccctgtcttttgcgggtgaccagcggaagcgggaccggggaaaaaaaatggggaccggcttcttattacacaaatgccaacctgggtctcacatggaaattccttgg

SEQ ID NO: 82612 - DNA, 641 bp, Homo sapiens
  sig_peptide (21)...(156): this location contains the signal peptide sequence, MENQPVRRRALPGLPRPPGLPAAPWLLLGVLLLPGTLRLAGGQSV, Run with SignalP
  misc_feature (309)...(53): similar to gi190672 in the genepept database release 114, Run with FASTXY 3.3t00, default parameters
tttcgtaagcaggcccccagatggagaaccagcctgtgaggaggcgggccctgccaggcctcccacgccctcctgggctccccgcagccccctggctcctccttggcgtgctgctgctgcccgggaccctgcgactggcaggaggacagtcagtgacccacaccggcctgcccatcatggcctccctggccaacacagctatctccttcagctgcaggatcacctatccatacactccccaattcaaggttttcacagtcagctactttcatgaagatctccagggacagaggagccctaagaagccaacaaactgccaccctggactgggcacagagaaccagagccacaccctggactgccaggtcacccttgtgctgccgggagcatcggccactggcacctactactgctctgtccactggccacactccacggtgagaggcagcggcaccttcatcctggtcagagacgcagggtaccgagagcccccgcagagtccacagaagctcctgctctttggcttcaccggcctcctgagtgtcctgagtgtagtgggcacggccctgctgctctggaacaaggtgcaggaatggcttgatgcaggtcttgtaggcatttgccatgtttccctggagagg

SEQ ID NO: 82613 - DNA, 480 bp, Homo sapiens
  misc_feature (1)...(480): n = a,t,c or g
  sig_peptide (86)...(221): this location contains the signal peptide sequence, MGSRCSTLSTVGCRFPSSLSSWLLPFLSCPLCLLYPNFSVRAPFR, Run with SignalP
  misc_feature (321)...(481): similar to gi4106405 in the genepept database release 114, Run with FASTXY 3.3t00, default parameters
gggagttagagggtcgnnnnnccccgaaaattgcnngacggaagaacnnnnanangcgntccccacggagtcccagcgtgtatgcatggggtcacggtgctccacgctctcaaccgttggttgcaggttcccgtccagcctctcaagctggctgctcccctttctcagttgtcccctgtgcctcttgtaccctaacttcagtgttagagcacctttcagggggaatggcgtaaaaaagccttcctttccagtagacagagtgccctggccagcagaggccaaacacattcccattcagctttgtttcatgctggatctggccccaggcctgcacctggccctggcagtgggcgcacgttaggtgggattgctgaagacaatgggtgactgaggcagttacaggtgtcagccccagatgaggctccccaacctgtaccctttaccctggagcttggcccatctctcacagcccagtggtgt

SEQ ID NO: 82614 - DNA, 2812 bp, Homo sapiens
  sig_peptide (1208)...(1343): this location contains the signal peptide sequence, MAPLSTFASLCPCVALSDPTLLSLALSSWVTPRMGMAPSLSPPCC, Run with SignalP
  misc_feature (1140)...(2002): similar to gi1209103 in the genepept database release 114, Run with FASTXY 3.3t00, default parameters
atggcggagctggaggctgtggccgacgatctagacgccgtcatcgacgacctggactacctcccgggccactttcacctggagatgcagttgaacttcgagccgcgctcgccggccccacagcgcgcccgggacctgaagctgcagcgggagggtctgcggcaggagctccagctggcggccgccccgcagcgccccgctgtgcgtcacctcctgggcgctttcgcattctacctggaggagctggacgaggcccgcgagtgcttcctcgaggtggcccacgagcacccgggcaacctcaatgcctgggccaatctggcacacgtgtacgggcggctgggccaggaagaagaggaggaggcgtgcgccgcacggctggccgacctcatgggcctggcagaggagcccgaggccgccggggacccccagctccgcgccgctcgctgcctggccgagcagggctacgcgcatggcttcgacgtcggctggcccagccccaaaaggaccgtgcgcgggggcttgcggcaggcatcgcgctctacgacaaggcgctaggctacgggcagcagatcccgatggaggagaaaaggggctggtatttcaccatggcaacactctacatcaggctagatggcatcttcctggagctgggcagtgaggagcagaagagactgcctgccttcaaccgcacgctggccctactccggcaagtgctgaagtccgaggacccccgccaccgaggtggggacccgggggatgggtgggacagcagcctctgtcccctgccaacagcccgctggcattgcatccacctctggcattacctccccttcttggctcctgtttcttcctccttcgctctgtcccctacactcatctgtgcacctcaaggagcccacataccttgcccaagtgaacatgccaactacaagtcactgtgactgcaggcttgcccgtctgcagctcatgacctggagggtgagaggtagtttcccctatttccacctatttatggtcagaagattgaagcctctgttggagaggagtcgagtcatttttttgcagggccagacagcaagagcagggactagaaccaccagagctggtgagagctgaagtcagaagagacctacgtacctgaaatgaggtcccccgatgacacattgagcacagaataagcactaaaatgggttcactaacccctcacatggcccctctctccacctttgcttctctctgtccctgtgttgccctcagtgatcccactctactatcccttgctttgtcttcatgggtgacacctaggatggggatggccccttccctctctccaccctgctgcttcctagagaccctctcccacccttcacccccagccctggcctggtgctacctcgggatgctgctggagcggaaggacaccttctccaccacccccatgggcgtccatgactgcgggtactcagggaccgaccctctagactgcttcggcaaggtacttgcccccagccacacccaccctctaaactgagaaggagcctggcaccccagcctctccacctagaacccaggcttctctgggtatcaacccccaccgcgtggcccacccaggaagtacacttactccagaccttgctctccatcctctcttcattcaaaacaaaagagaccctccccatacccagtctggccccagcccatttctccagccttgaaatagacccttagactttttcccttgagaccttcattcacagtattccctctgccaggagttccctacctctccacccccagtggcatagtagaaagatgggtttagctggtgtctccttgccagccctgcccataggctgtgtgaccctaaggcaagtcacttacaacaggaagcagtcaatgacaatagtgggggtaagtgttattacccaggtagaaaccctgtactttgtaaggttgggggatgggggttgcctctggcccttcctctcacctgccctaggaagatgggagagcatacactgggaaggaggggtctgactgggctctggaaggctttactggatgtgaccggtgatgtggtcgtgggccaggctctcaggagttgagtgccaataggttgtgccccaaggtgttggggcttcgtgatgtgacaacttactggcaggtggataagggtggatatgggtaaagggcaccatgttgatacggctgtatccaaagatggggttcctgtggttcagcactgtttagccagctctggctaatgaccaagcaagtggtttgtttttgcactcctcccttacctaggccattgagattgccaagaaccaacctcccatcctgaatcgcctggcaaaaatcttctacttcctgggaaagcaggatatggccattggaacctgcaacatggccctggatgtcctacgagatccagagctcaactggcaggcgtactgcacaagggccaagatccacatcagagcctacctgcatgacctcaagcgggccaagatgggtctcgggggcatgcctgacaggaaccacctggcctgtgccaaggctgaccttgaggaagtggtcagggtgtgcccaggcttcaaggcgtacctggacatcggccaggtctactactatatgggcgtggacgcggtgcaggaacttgctggcggtggacgaaggcggcgctgaaccaggcccttggtgttcctggccaaggcggggcgagtcggagctgggtgccacgctgcccgagctgcgagctgctgcgcggcaagtgcctgcgcatcaagggcgaggacgccaacgcggccgc

SEQ ID NO: 82615 - DNA, 925 bp, Homo sapiens; identical to SEQ ID NO: 79729
  sig_peptide (42)...(177): this location contains the signal peptide sequence, MGCDGRVSGLLRRNLQPTLTYWSVFFSFGLCIAFLGPTLLDLRCQ, Run with SignalP
  misc_feature (534)...(0): similar to gi6678 in the genepept database release 114, Run with FASTXY 3.3t00, default parameters

SEQ ID NO: 82616 - DNA, 608 bp, Homo sapiens
  misc_feature (1)...(608): n = a,t,c or g
  sig_peptide (170)...(305): this location contains the signal peptide sequence, MYFANFVGFLTLCLQIFSSVLQPFSLSGTLTTQILDLLVLVHSAE, Run with SignalP
  misc_feature (70)...(608): similar to gi4731213 in the genepept database release 114, Run with FASTXY 3.3t00, default parameters
atccaccatcattcaaattattcttcccttataagtagtagaaggatttctgtgactgttttcaagaatttttactttgtctttagttctcagtatttaattatgatttgtcttggaattgacttctttattgtttaagctttgctcatcttcttaggtatgtaagtttatgtattttgccaattttgtggggtttttgactctatgtcttcaaatattttcttctgtactacagcctttctctctctctgggactctaacgacacaaatattagaccttttagtattggttcactcagcagaaacgctgatctctctcccatccagattcctccgtgctccagggtttctcaggcctcggcacttttcacatcttgtttcccttacctagcctccccttcctgtttccccaccccactttcctgctgcctagcaagcttctactcatccttgaaaatccacttcaggaatgtcatgctttgtggcctgtctttgatcacctagagtgagttaattccagcctccaacccttgtaaagtccgtgtgtgcttattgacctttttgtactttaatttgctggggcctgggtcaanggtcttttgaacctc

SEQ ID NO: 82617 - DNA, 418 bp, Homo sapiens
  sig_peptide (118)...(253): this location contains the signal peptide sequence, MTCFVTVLFCINIRDYVLFFKESLRNEQFLDFMRNKTQFSEFCCI, Run with SignalP
  misc_feature (348)...(0): similar to gi2052185 in the genepept database release 114, Run with FASTXY 3.3t00, default parameters
tttgttttttgtaatgaaacatactttaatataatactttagtatttagtataatactttagtattttcattttataggaagagattaaacactctactagggcatagttactgaagatgacatgctttgtaacagttctattttgtattaatataagagactatgttttattttttaaagagtctctaagaaatgaacaatttctagattttatgagaaacaagacacagttctctgaattctgctgtataatcccttcctttaaatccctggaagattaaatttgcaaatggaagatggcatagcacgttgagacccctcataacagaatatgcaaaattccattattcatttttatggttatcccaagaatattgatttgttaaagattaagaacatacatttttgcacctttat

SEQ ID NO: 82618 - DNA, 396 bp, Homo sapiens
  misc_feature (1)...(396): n = a,t,c or g
  sig_peptide (383)...(248): this location contains the signal peptide sequence, MNIFVQVLWNITFHLTWINTKAWGFWVVYYVFNCIGNCQAVVRSS, Run with SignalP
  misc_feature (165)...(396): similar to gi1196431 in the genepept database release 114, Run with FASTXY 3.3t00, default parameters
nttacatgatgcccttttagaaaatgtcatttgtggctctataaaatattttaggagtgaagagcccaggaatttataaaatacctacagttttctgagcttgtcctggattattttagcttgaacataatttatgtcatttaaaaaaattatccagcaaggggaaaaagagaaaccataccagttctggtgaggatgtggaacagttggaactcctgtctgttgctgatgggaatggaaaatgtggagctgctgcggacaacagcttggcagtttcctatacagttaaatacatagtatacaacccagaaaccccatgccttggtatttatccaagtcaaatgaaaagttatattccataaaacctgcacaaaaatgttcatacccacgcgtccg

SEQ ID NO: 82619 - DNA, 855 bp, Homo sapiens
  sig_peptide (459)...(594): this location contains the signal peptide sequence, MSSVNRDNWTSTFPIWMPLISFSCLIALARTSITMLNRSGESAHP, Run with SignalP
  misc_feature (484)...(855): similar to gi1335205 in the genepept database release 114, Run with FASTXY 3.3t00, default parameters
ctaattctgtgaaatataacattggtaatttgataggaagttgcattgactttctagattgctttgggcagtatagtcattttaatgacattgattcttcccgcccatgagcaagggatgtttttccatctgtttgtgtcatctacagtttcattgttttataattctcctttgtatttcaccatcttaaatgtattcctagatagtttatgtttttgtatggctattgtaatgggattttcaccatcttaaatgtattcctagatagtctatgtttttttatggctattgtaaatgagattgagttttttatttggttttctgcttgaccattgttggtgtatagaaatgcaactgattatggtgtgttaattttgtatcctgagactttagcaaagttattgattaggtccaggagtcttttggaggaatcatttgggttttttaaatgcaagattatgtcctcagtgaatagagataattggacttccacttttccgatttggatgcctttaatttctttctcctgcctgattgctctggctagaacttccattactatgttgaataggagtggtgaaagtgcacatccttgtcttggtccagttcttaaaggaaatgctttcaattttttccctgttagaatgatggtgcctgtggctttgtcaaaatggctcttagcattttcaggtgtcccctttaaaggcccccgcatcgatacggttatcttaaaacacgccggtacttatcgccccgtgagctgactaatagtatagacccgactcgccgcccccatttggggttggcacgagaccacctctcgttcccaggttcgccggccagagtgcacacccc

SEQ ID NO: 82620 - DNA, 439 bp, Homo sapiens
  sig_peptide (28)...(163): this location contains the signal peptide sequence, MAGHWAFGPPVSGLVFLLSLAPSAPGIWSWILGLQRGSPEFRGSG, Run with SignalP
  misc_feature (242)...(2): similar to gi4927382 in the genepept database release 114, Run with FASTXY 3.3t00, default parameters
tggggacggaggcaaagccccggcgagatggctgggcactgggcttttggcccgccagtctcaggattagtttttttgctgtccttggcaccttcggctccaggtatttggagctggatcttggggctgcagcgcgggtctccagagttcagaggttcaggatgctggaggaggggggtccgtgccttgagtgcaggggataccagagattccgtagggaagacctgtttgacctgctcctggctcttcatttttgaagtgaatatggagacagagaagacatgtccagaggacacggaggaagaagcattattaatatctattaatatgcacatgagagttttgagtgtcaaactccaagagattagggaatgatatttattcatccaggatgtaatctcctcataaatcatagccagactttaatgtaaaaaaaaaa

SEQ ID NO: 82621 - DNA, 818 bp, Homo sapiens
  sig_peptide (130)...(265): this location contains the signal peptide sequence, MRPWLRHLVLQALRNSRAFCGSHGKPAPLPVPQKIVATWEAISLG, Run with SignalP
  misc_feature (274)...(818): similar to gi3928676 in the genepept database release 114, Run with FASTXY 3.3t00, default parameters
ctacaccacggtggagtaattcaacaccggctcgagccggggccactcagccctgctctgctcagctgaagcagaaaacagagaccttttgcattactttggttcaagagcaagacaggaggcgactgcatgagaccatggctgagacacctagtcctccaggcactgaggaactccagggcattctgtgggtctcatgggaagccagcacctctacctgttcctcagaagatcgtggccacctgggaagccatcagcctgggaaggcagctggtgcctgagtacttcaacttcgcccatgatgtgctggatgtgtggagtcggctggaagaggtgaagcctgttctgtcctaaagtccatctggggcatctgaggctgccctcatgtaccacaatgagactcaaggctccaagcatgttgatgaggaaatttggacctgggaattttgctagttctaaaatgtaaactgttggcatttgagacttaggaaaaaattctgagtcagggttgggagccttagacatgcttgttccttctctgaagcgtcctgcattcttgagcccaaatcacacagtgagacagttatgtcccttccgattcccttccagttggtcatcaactgaaggaggaagctttggttagcctgcgactacgggatttgatggacgcgcctcaactggccagccccttctcttttttaccaaggacacagaaggcccgcgcgcagtacgatactagaacccgatcccccgtgatctttgggtacagccggccaaggcgactatcaccatgatcccgaccgggtcggtcgaggccg

SEQ ID NO: 82622 - DNA, 846 bp, Homo sapiens
  sig_peptide (118)...(253): this location contains the signal peptide sequence, MCKTISFLLSWCATFERRLEEGAFLSMGTCFCHAGEKANLKGSGS, Run with SignalP
  misc_feature (339)...(68): similar to gi48380 in the genepept database release 114, Run with FASTXY 3.3t00, default parameters
ggggccaaagaaagatgttctcctataaaaaggaaaagaaaaaaaggaaatccatcttaccctctaggtgaaaaacacaaataaaatgtccgcgggaatattaaatgcttttccaaaatgtgcaaaacaataagcttcctactgtcctggtgtgcaacgtttgagaggaggctggaagaaggagcattcttgtctatgggcacctgcttctgccatgctggagagaaggcaaatctcaaagggtctggtagttaggatgattggatagagtgatatctctatctcagtctaaaggattggaagtactacacattcttccttcatacagtccaccttttctgagcacctgttagcagccaggcagtgtagtaggaatgaggagataatcagttagccagaccacccctgcactcatggatcttatacaaaaacagaggtaaaagacaatcaacaatggactgattccattacaatgatggtgttagaagaagaaatagtactaggaatttacatagtggtgaaatctgacctacttcattccatgagcaggtgacaccgagctgaacattgatgcataagcagaaactgacaaaaggaagccattgccaccattgataggaataagaaataactattttccaaaatttttatgttatcaaattatttttccacacaggggttttggctttgccttttttaaattttgaagactgaagttttcaaaaaactccattggaattggaaaaaagggccctcccctcttttttttttctgaaggctttaataaaacaatcccaaaatcctttttatgggaccttatattcgccgcttttaaaagcggtaacc

SEQ ID NO: 82623 - DNA, 1524 bp, Homo sapiens; identical to SEQ ID NO: 82610
  sig_peptide (385)...(520): this location contains the signal peptide sequence, MGLGQPQAWLLGLPTAVVYGSLALFTTILHNVFLLYYVDTFVSVY, Run with SignalP
  misc_feature (478)...(1503): similar to gi2088706 in the genepept database release 114, Run with FASTXY 3.3t00, default parameters

SEQ ID NO: 82624 - DNA, 2851 bp, Homo sapiens
  sig_peptide (1093)...(958): this location contains the signal peptide sequence, MLMWMLTLWGCASVTGTLLRSNTVPWPFSTMDHRWPSNMSTWMKS, Run with SignalP
  misc_feature (303)...(2854): similar to gi3716028 in the genepept database release 114, Run with FASTXY 3.3t00, default parameters
ggatttcgtcccagtcccacaaggagcttggatgtgcggacaagcagggtgccaatcgtgtttaaggagaaactaacaatgaaaacggactcgttgatggaggaaaagttggaatgcagcctctggtgctgtttgagcgatccctctaccccgggtcgctgctgtgttctggaaaggcgcattgtaccctggatgcagcaggaatcctattcatcttcttcaccgatatggtctgtggactctgatgagccaaatctgacatcagttctggaacgtctagaagatactaaggacaacagttcgcttccttctttggttagaaccacccggaggtgactgtggccatggctctgactgacatagacctgcagctgcagttctccatgtcccaacccgaagccctccttctcctggcagcaggcccagctgaccacctcctgctgcagctctactctggacacctgcaggtcaggcttgtcctgggccaggaggagctgaggctgcagaccccagcagaaattctactgagtggctccgtcccccacaccacagttctgactgtctcagaggactggcccacattgtcagtcaatgggtttctgaatgcctcctctgtagtcctgggagcccccctagaagtcccctatgggctctttgttgggagcactgggagacttggcctgccctacctgaggggaaccagccatcccctgaggggttgcctccatgcagccgctctcaatggccgcagactcctccagcctctgacccccaataagcatgagggctgtgctgaagagttttctgccaatgatgatgtggccctgggcttctctgggtcccactctctggctgccttgcctgcctggggcactcaggatgaaggaaccctggagtttacactcaccacacagagctggcaggcacccttggccttccaggcagcaggctggcatggggacttcatccatgtggacatatttgagggccacctgtggtccatggttgagaagggccagggtactgtattgctcctcaacagtgtgcctgtgactgacgcacagccccacaaggtcagcatccacatcaacattcaccagctagaaatctccatggaccagtaccccacatgtactttgaaccgaggagtcctcagctacctggagccacgcccgcttcatccacgatggccctgaggacacctctgaccagctggtgctggaggtgtcagtgatggcttggttgcccatgccctcatgcctgcggaggggccaaacagacctcctgcccatccaggtcaaccctgtcaatgacccaccccacatcatcttcccacatggcagccttatggtgatcctggaacacacacagaagcctctggggcctgaggttctccaggcctatgacctggactctgcctgtgagggcctcgccttccagctccttggcaccccctctggcctccccatggagcaccgagaccagcctggggagccggtgactgagttctcctgctgggagttggaggccggcagcctagtctatgtccactgtggtggccctacacaggacttgacattccgggtcagcaatggactgcaggccagccccccggccatgctgaaggtggtggctgtccagctggccatacaaatccaccgcagcacagggctgcatctggcccagggctctgccatgcccatcttgcctaccaacctgttggtggagaccagcgccgtggggcaggatgtgaccgtgctgttccgtgtcaccggaggcctgccgttcagggagctgcagaagcagggggctggtggggtggaggatgctgagtggtgggtcacacaggcgttccaccagcaggatgtggagcagggccacgtgaggtacctgagcactgacccacagcactacaccgaggacaccgtggagaacctggatctgcaggtgcaggtgagctgggaaatcctgagcaatctgtccttcctagtgaccatccagagagccactgtgtggatgctgcagctggagccactgcacactcagaacacccagcaggaggccctcaccacagcccacctggaggccaccctggaggaggcaggcccaagccccccaaccttccactgtgaggtggttcaggctcccaggaaaggcaactttcaactacagggcacgatgctgtcagacggtcagggcttcacccaggatgacgtacaggctgcagaggtgacctatggggccatggcacgtgcctcagtggcagtggaggacaccttctgtttccatgtcacagctccaccatatttctccccactctgtaccttctccatccatattggcggtgacccagacatgcctgtcctcgtggtgcccgagggtggtgggtgtgtcctctctgctgaccagctcttcatcaagagtctcaacagtgccaggtacctctatgaggtcatggagcagccccgccatgggaggttgacttggcgtgggacacaggacaagatcactatggtgacatccttcaccaatggagacctgatgcatggccagctgaccatcagctgcgtcttccatgtggcctggggtaggtggcagctgctgactacagacaacatggccttcagcaatgctgattcgggctttgtggatgcccagctggtgctgacccacaaggacctcctctctggcagtatcatggccacggatgagcccatgcagcccatctgccgcttcatccaggaggggcctcaggaagaggcgagtcctgttcacgcactcaggctgactacagctggatcctgctgcaggtgtccgacaggcagcaccaggccatcatggtgctggaggt

SEQ ID NO: 82625 - DNA, 410 bp, Homo sapiens
  sig_peptide (57)...(192): this location contains the signal peptide sequence, MSTCHVTAGQALCLACMVLALCREGQGGIGKSLHRSSTGRWQKEA, Run with SignalP
  misc_feature (115)...(374): similar to gi552415 in the genepept database release 114, Run with FASTXY 3.3t00, default parameters
ggaggcaggagaggtccgggcgccgcgcgccggggctggcagggagggggacagacatgagcacctgccacgtcacagctgggcaggccctgtgcctggcatgcatggtgctggcactgtgcagagaaggccaagggggcatagggaagagtctgcacaggtcgtccacaggtaggtggcaaaaggaggcctcactcaggcttccacacgctcacagacacaaggaggcccaatgccacctgcccaacacacacccagcgctcagctcacacacacatttactgatgttcacagaagttcctcacttgagtacacaccccctctccaatgtcctcacatatggtctcacacactatttcatacacactctaatcccaacatggggcacacatacaccaccactaatggac

SEQ ID NO: 82626 - DNA, 993 bp, Homo sapiens
  sig_peptide (65)...(200): this location contains the signal peptide sequence, MDEKSNKLLLALVMLFLFAVIVLQYVCPGTECQLLRLQAFSSPVP, Run with SignalP
  misc_feature (104)...(993): similar to gi4678771 in the genepept database release 114, Run with FASTXY 3.3t00, default parameters
gatttcgtggggaagggagccgccgccgcagccgccgcctttgtggagtacttttgtcgggaacatggatgagaaatccaacaagctgctgctagctttggtgatgctcttcctatttgccgtgatcgtcctccaatacgtgtgccccggcacagaatgccagctcctccgcctgcaggcgttcagctccccggtgccggacccgtaccgctcggaggatgagagctccgccaggttcgtgccccgctacaatttcacccgcggcgacctcctgcgcaaggtagacttcgacatcaagggcgatgacctgatcgtgttcctgcacatccagaagaccgggggcaccactttcggccgccacttggtgcgtaacatccagctggagcagccgtgcgagtgccgcgtgggtcagaagaaatgcacttgccaccggccgggtaagcgggaaacctggctcttctccaggttctccacgggctggagctgcgggttgcacgccgactggaccgagctcaccagctgtgtgccctccgtgggggacggcaagcgcgacgccaggctgagaccgtccaggtggaggatttttcacattctatatgcagcatgtacggatatacggggttctccaaacactaacgcaggggccaactctccgtcattcacaaagacccggaacacatctaaaagttggaagaactttcactacatcaccatcctccaagacccaggggcccggtccttgagtgagtggaggcctgtccttaaaaggggcacattggaaggccttcttgcatgttggccatggaaggcccccccccctctgaaaaagttgtccacctggtaccctggtgaagaactggtctggcttgccccccttcaaaagattataggcctggcccttttaatctacccctaaaccaccccggttgtgccttgtctttagctaccttttatatttatggggtgggtcacactctcttccaccatcttccc

SEQ ID NO: 82627 - DNA, 1343 bp, Homo sapiens
  sig_peptide (747)...(882): this location contains the signal peptide sequence, MLAIHVGLVLLFSLSFNCLNLEDLFSVIVCHKMYLKIVEVIQKRE, Run with SignalP
  misc_feature (413)...(1018): similar to gi836765 in the genepept database release 114, Run with FASTXY 3.3t00, default parameters
cggcacgagcggcacgagcggcacgagtttcaagagaaaacgggaaatctgtgccagttgttcaaatacgagtttggagatgagaaactatatttgtcgtacaaagctggcagacagataccctcagagctgccaaatgctgttaaatcaactgagagaaatcacaggcattcgggacccttcctttctccatgaagctctgaaggccagtaatggtgacattactcaggcagtcagccttctcactgatgagagagttaaggagcccagtcaagacactgttgctacagaaccatctgaagtagaggggagtgctgccaacaaggaagtattagcaacaactgaagcatttaaccaagatgggaatcactgtaggtggagcagatttgagatggtagatgaagagatcagtttggggaatactaaatttgaaatgcctgttagacattcacggcagaagtgtcagaaagatggtggagacccaggtgcacagttcagaggagaggtccaggctggagaagttatagaccttactcatgataacaaagatgatcttcaggctgccattgctttgagtctactggagtctcccaaaattcaagctgatggaagagatcttaacaggatgcatgaagcaacctctgcagaaactaaacgctcaaagagaaaacgctgtgaagtctggggagaaaaccccaatcccaatgactggaggagagttgatggttggccagttgggctgaaaaatgttggcaatacatgttggtttagtgctgttattcagtctctctttcaattgcctgaatttggaagacttgttctcagttatagtctgccacaaaatgtacttgaaaattgtcgaagtcatacagaaaagagaaatatcatgtttatgcaagagcttcagtatttgtttgctctaatgatgggatcaaatagaaaatttgtagacccgtctgcagccctggatctattaaagggagcattccgatcatctgaggaacagcaggtacaaaagaagccttgttcttgagtttgaagtcatgccttgtcagtgttaatgcggtactgcttcatttcaactgcgtaacaagctgtgaacatgactaagcaggactatggatgctcgtttctgacttttgttttgcctacagaacaggtggtgagagagaaagcatgtgtgtgtgagagagtgtgcgtgtgttgcacgggggctggcagttctaaagagaagatgaaatagtagtagaaagaatgtagaattataccggagctattgatgtataaaggaggagattgcaaaatacctcaatgagctgtaacaaaagggataccacgaaaga

SEQ ID NO: 82628 - DNA, 573 bp, Homo sapiens
  sig_peptide (432)...(297): this location contains the signal peptide sequence, MPLCWLASLRPMPRILGWGAFMLPWAIHPPTPRTTNSHGNFASLP, Run with SignalP
  misc_feature (558)...(572): similar to gi5731758 in the genepept database release 114, Run with FASTXY 3.3t00, default parameters
aaataaataaatagtaggaggtggtagggcatgtttcaacactggtgggaatgacccagtgagatagggacatgggagaggagcattgctaatgtagaagggagaggagagagttttccttgagtagcagagggggattggacttcaatgcatgtttcatccatagtaacaggaaggaaggttttggacaagaatcaggtaggtaagtacatgaggtgttggaatcttagagtggtaactcttctgattgctttaattttcttggtgacataagcaagtaaggaaggcatctgagagggaggctggcaaagttgccatgggaattggttgtccggggagtgggaggatgaatggcccagggaagcatgaaggcgccccaccccaagattctgggcatgggtctcagtgaggccagccaacacagtggcatgtttttctctagccagggttcagctgcacagatgtgggtatggagtaggtggagaattgggtctaactagggctggcttttgtcgagtgagtgcagtgtatctagagtgggcaagagggtagccattcctctgccctcaaccc

SEQ ID NO: 82629 - DNA, 634 bp, Homo sapiens
  misc_feature (1)...(634): n = a,t,c or g
  sig_peptide (117)...(252): this location contains the signal peptide sequence, MLVSTLLFFFKIVLAILRPVSFQMNFKISLLIYTKKPTCVLVEIA, Run with SignalP
  misc_feature (519)...(11): similar to gi1174092 in the genepept database release 114, Run with FASTXY 3.3t00, default parameters
atatagttttatttttgtactttcaatgctatttcacttatttatatgtctatccttatgcgagtaccacactatctttagtactgttgctttgtagtaagtttttaaattggggcatgttagtttcaactttgttattctttttcaagattgttttagctattttgaggcctgtgagtttccaaatgaattttaaaatcagcttgttaatttatacaaagaagccaacttgtgttttggtagaaattgcaccgaatttgtagattatttcagggattatcataatctcaacaatatgaaggcttcagttcagatccatgaacatgggatattttttccatttatttagatcttcgatttctttcagtaatgttttgtagatttcagagtttttgatacttttgctaaattttttcctaagcattttattacttttgttgctattatatatgaaattattttcttaattttacttttgggttgcaggttgctagtatgtgggaagacagtggactctgtcctgggnttatatttaaaaacatcagcccccccccatcttcattagtttttagtgggtttttttagagtttntgtttatgagagcgtgtttacccacttctctcccatctccacc

SEQ ID NO: 82630 - DNA, 422 bp, Homo sapiens
  sig_peptide (199)...(334): this location contains the signal peptide sequence, MWLGGRGEANLSCPFLALGVFLTSECLAFLLLKVRVRILGPAVQG, Run with SignalP
  misc_feature (256)...(10): similar to gi1247390 in the genepept database release 114, Run with FASTXY 3.3t00, default parameters
gggtcgacccacgcgtccggtgaaaggagaggatctgtgtcatattgtggagcgctttagctgccacactgggagctaaaagttcactcctgaggccctggaggggtgaggcatgtggggaggctgactcagcctgggcagagcaggagacagcatcaggaagaggtgaggaccgaggctgaggatgcaggagcggggatgtggttggggggtcggggggaggcaaatctgagctgtcctttcctggccttgggtgtgttccttacctctgaatgtcttgctttccttctcttgaaagtgagggtgagaatactaggacctgccgtacagggtgttggcaggagcgagcaagagagccccatacagcctggcacatagtgagccctagaacatgttgatgatgaccagggcagaatctgggt

SEQ ID NO: 82631 - DNA, 1358 bp, Homo sapiens
  misc_feature (1)...(1358): n = a,t,c or g
  sig_peptide (368)...(503): this location contains the signal peptide sequence, MGVLVVLTVLWLFSSVKADSKAITTSLTTKWFSTPLLLEASEFLA, Run with SignalP
  misc_feature (374)...(1107): similar to gi790585 in the genepept database release 114, Run with FASTXY 3.3t00, default parameters
tttcgtggcgcgtgtcggcctctcactggcgcagcctgcactgccgctgccgcctcgccccgccctgccctggcgttgtctctggcactgtggcggactgaccacggcccgggcatgggctgcaagggagacgcgagcggtgcgtgtgccgcgggtgcgctgccggtgacaggtacccaggggtggcgtgaggaggcctcgtggacaaagagagggtttggggcacaaggcgaccctgtgcccctgtcacattgagcttccgcctctaccgtgactcagtttaccctctggtgtcccatcccttcccctattcgcgagcgccccgagttgccctcagtggtcttcttggcaaggagtttgctataaaatgggagttctggttgtactcactgttctgtggctgttctcctcagtaaaggccgactcaaaagccattacaacctctcttacaacaaaatggttttccactccattgttgttagaagccagtgagtttttagcagaagacagtcaagagaaattttggaattttgtagaagccagtcaaaatattggatcatcagatcatgacggtaccgattattcctactatcatgcaatattggaggctgcatttcagtttctgtcacccctccagcagaatttgtttaaattttgtctgtcccttcgttcttactcagctacaatccaagccttccagcagatagcagctgatgaacctccaccagaaggatgtaattcgtttttttcagtgcatggaaagaagacttgtgaatctgatacccttgaggctcttctactgacagcctctgaaagacccaaacctttattgttcaaaggagatcacagatatccctcgtctaatcctgaaagccctgtggtgattttctactctgagattggctctgaggaattttccaattttcaccgccagcttatatcanaaagcaatgcaggcaaaatcaactatgtattcagacattatatatttaatcccaggaaggagcctgtttacctctctggctatggcggggaattggcattaaaagcatggtacaagggcaaggtgatactaagtgaaggaactgaggaaacccccgtgatggtgagaagatcttatgtgagtcaggcccctttggacttcagaactgtccccgcctcgtggtcgtgaaatcatagccttttgaagcccctcaccggaccttaagtcccccgttcacccgttcgcaacgcctcacttcggctctcccggccctttgcgcgacccatcccaatttctccccgtgctcgcacgcccgcggcaactagtcggccctcaggtgttgccgtcttttctcgtacataccccctctctcggc

SEQ ID NO: 82632 - DNA, 893 bp, Homo sapiens
  sig_peptide (44)...(179): this location contains the signal peptide sequence, MEPLLPPKRRLLPRVRLLPLLLALAVGSAFYTIWSGWHRRTEELP, Run with SignalP
  misc_feature (869)...(0): similar to gi545688 in the genepept database release 114, Run with FASTXY 3.3t00, default parameters
tttcgtcgggcgaccccgcctgcggctgggggaacgtggcctcatggagccactcttgccgccgaagcgccgcctgctaccgcgggttcggctcttgcctctgttgctggcgctggccgtgggctcggcgttctacaccatttggagcggctggcaccgcaggactgaggagctgccgctgggccgggagctgcgggtcccattgatcggaagcctccccgaagcccggctgcggagggtggtgggacaactggatccacagcgtctctggagcacttatctgcgccccctgctggttgtgcgaaccccgggcagcccgggaaatctccaagtcagaaagtccccgtccaccctcccacctctctcttgccgctagttcctggaggccacgctgcggtccctgacagcaggttggcacgtggagctggatcccttcacagcctcaacacccctggggccagtggactttggcaatgtggtggccacactggacccaagggctgcccgtcacctcacccttgcctgccattatgactcgaagctcttcccacccggatcgaccccctttgtaggggccacggattcggctgtgccctgtgccctgctgctggagctggcccaagcacttgacctggagctgaacagggccaaaaaacaggcaaccccggtgaccctggcactgctcttcttggatggggataaagcgcttaaggagggggggccccaggactcccctttacggttcccgggaccctggcccaacttatggggtgtataaccttacgaacccgggccccccacggatccaggttattgagcctcttttcgttccttgaaacccgcggaagcccccaaatcccctctttttaagacccatttctttcccccgggcc

SEQ ID NO: 82633 - DNA, 969 bp, Homo sapiens
  sig_peptide (263)...(398): this location contains the signal peptide sequence, MTLVLFLVLALMITICILSYHSHLLINSNLIPVKYRNFPSILLHF, Run with SignalP
  misc_feature (739)...(969): similar to gi288145 in the genepept database release 114, Run with FASTXY 3.3t00, default parameters
taccgtgtggtggaattcgataaccgaatcttcttctttacccagtctgtctgacagtctctgacttttcatttgggttttcattataacatttaatgcaattattgatatagttttacttaaatttaccattttgctatttgttttctatatttctcctgtcttttttgatgttgttattttctgcatccttaactggcttcctttgtgttaaataaatattttccaatgtagatttttagtttttctctttttcagctgtatgacattagtactcttcctagtgcttgctctaatgattacaatatgcatcttgtcctatcacagccaccttctgattaatagtaacttaattccagtaaaatacagaaacttcccttcaatattgcttcattttcttcatctttggttatcattttgtcatatatctcacatgcatatatgtcataacctattaatatagtattgaattactttgtaataaacttaatgtcttttgaagttattaagaaaatactttgggaaataaactatagattcttttatcttaactcacattttatagtatttccattttgtttaggtttattatgaatttgggtaaatctttggaggaaattaatttcaactgaagaaattttaaaaactatttttgggaagaaatatttatgggaagaaatattttgcaggggctcacacctgtaatctcagcaatttgggaggctggggcaggtggatcacctgagatcaggagttcaagaccagctggccaacatgcagaaaccccatctctactaaaaatacaaaaattagctggacatggtggcacgtgcctgtaatcccacctacttgagaaactgaggcaggagaatcgcttgaacctgggaggcagaggttatactgagtcgagatggcaccactgcactgcagcctgggcaacagagtcagactctgtctccaaaaaaaaaa

SEQ ID NO: 82634 - DNA, 1665 bp, Homo sapiens
  sig_peptide (1457)...(1322): this location contains the signal peptide sequence, MMMILVVLRLRRLLMVEVVKPKQHLLLFLGLPFLQYLESIFHHLL, Run with SignalP
  misc_feature (1251)...(1633): similar to gi4456074 in the genepept database release 114, Run with FASTXY 3.3t00, default parameters
ttggtttatccttgaactggaaatcaattctacatgatttggaaagaaaacaaacacatctttataattcagagtgtgtattttgaaggtgtaatatgatttatccaatgccagtgtgggtttgtcatgttctttttattcaatgtcaactggttccgtagctattaaagcacttaactgtttctgtgcacaggagaggaacagttccaaactggacaggcttctttggcggatgacttgatcgagccttttctgttcttttatatactctatcaattcatctcttgttcttttcactgcctcttccacagccttttcacttagtttctgctcttctattattgctgccttaacagtttcctgacttatttttctttgttcttgtatagctttttgaatttcctgagatactttttcttgatcttttgcatgttctgtcttccataattccctttcttcagcatgcgctttttctaaattttttctttcttcttctacgacttttaaaactgcatccttcattgcttctttttcaagctttgcagcggatactaatgcctctttatttctttgcctttcttcctccaaacacttttccaatatttccttctgttcttgagattgctgaatcaaagcttcctttattttttcttttaacagttccttctctgtatctagcatttcaaggagcctctgatgctgagcatttagcaactcctcacacttgtgtgcctgtttctcaattgcagaaatgtactgtttttcaatagcttctacttgttgcttaactgaagactgcagtagtgccttatattcatccacaataatgctgagggcttcgtgaccagctttcctcatgtcttccaattcttgtttatgtttttcctgaagttctttgtatctatcttgaaaagaaatggcctcttgctctttttcttttagaaagcctttttctaagacattatgcttttccatcaatgattccacatcctgtttaattctctgtttttcttcttcagatactttgagtttaatctccagacttgaaattttttgctgaagctgtatgttagatacattggctccaggatcctcagaatcatccacaagggcaattgttccattacttttttcatcagttaaacccaatggaaaaagtgagatatccagatgagtgtgtgttgattgctgaatctgtgcttttggaatagtttgactcacaatgctatttgctgcatgtgtattctctggtgatgaaataatggcatcagaagagaggcagccaatggaagaagagtggtcacggtccagtacaatctcaggagaagatggtgaaagatggactccagatactgcaggaaaggcagcccaaggaatagcaggagatgttgtttgggtttcaccacttccaccatcaaaagtctccgcagcctcaaaaccaccaaaatcatcatcatccattcttcaagtggcacctgctcccctctctcgctctccgctgccgccgctgcgccgctcacccacgctgcccggtgagccacccccagcacacagacccctacgcgtacacccgaggcacggccccaggcccttgaggggagaccgcggcccagccacacaggttggggtagcccacgcaccacccggcttcgaacacctacgaaa

SEQ ID NO: 82635 - DNA, 572 bp, Homo sapiens
  misc_feature (1)...(572): n = a,t,c or g
  sig_peptide (244)...(379): this location contains the signal peptide sequence, MNTHWNILPVERSCPLWISSELSYCSIKLLFILLTLHLPAYLILP, Run with SignalP
  misc_feature (305)...(2): similar to gi940355 in the genepept database release 114, Run with FASTXY 3.3t00, default parameters
tgcagagaggaaaaacccattctaaggcctcctctctgctgagagctgcagagacgacaggatgacctgcctgcagagatgagccacccactctagggcctcctgtctgctgagagctgcacagacaacaggacaatcaggtacagagaggagctacactctctgttgatagctgaacacttgtcaggcaagtgttctagcagaacttgcctagcagagaggagctatcctctctgctaggagatgaacactcattggaacatcctgcctgtggaaaggagctgtcccctgtggatttcctctgagctgtcctattgctcaataaagctcctcttcatcttgctcaccctccacttgcctgcatatctcattcttcctgggcacaagataagaactcaggacctgccaaatgaggctaacagagctgtaacacaaacagggctcagacatgctctgtatcagtccatttcatgctggtgataaagacatgcctgagactgggaagaaaaagaggttttatagttccccatggctggggaggcctcacaatcatggcggaacgnaacgagcag

SEQ ID NO: 82636 - DNA, 844 bp, Homo sapiens
  misc_feature (1)...(844): n = a,t,c or g
  sig_peptide (136)...(271): this location contains the signal peptide sequence, MWGLLIPCILGCMKLPHNLLMLFSLETFLTLRFILDSFYSYVFKP, Run with SignalP
  misc_feature (363)...(111): similar to gi2072966 in the genepept database release 114, Run with FASTXY 3.3t00, default parameters
ctctgacttctggcttgcattgtttccagtgagaaatctgctactatttttatcttagtgtctctgtagtgtgtcttggttgcttttaggattttctcttttcattggccttgagtccctccttcttcccctcacatgtggggacttttaattccatgtatattaggctgcatgaagcttccccacaacctactgatgctcttttcattagaaacatttcttactctgcgtttcattttggatagtttctattcctatgttttcaaacccaccaataaaagattctgcaacatctgacctgccattaatcccgtccagtgtatttttcatctcctgtattgtagttttcatctctacaatcccaacttgagcctttggttataacttacatgttgctcctgcactgtttgaacatgcagaatggctagtggggcagtgagctgaggagaagggacagaggggaagctcggctgttgggtctacgggtatgatggagaccatgcagctgaaagtaaaccgtcaccccttctgcttcagtgtgaaaggccaggtgaagatgctgcagctgatgaggctgngccttagggtgcgnggggtggtggaatctgcttgtgggcgggagatgtggctatgtggctataaaggatgaagatgaacgccctgtttgcttttcagcctcgcttggatcaagggtaaaaagccggttgtgccctcctggtgaagaaagaagagataaggacttgcctccctttcgaggggctgggaaaccttaaccctcaaaacactgggggccgggccttgttggtccctgggccccaaaccttggggggcgacccgggagggg

SEQ ID NO: 82637 - DNA, 772 bp, Homo sapiens
  sig_peptide (83)...(218): this location contains the signal peptide sequence, MMAGIRALFMYLWLQLDWVSRGESVGLHLPTLSVQEGDNSIINCA, Run with SignalP
  misc_feature (86)...(770): similar to gi1223888 in the genepept database release 114, Run with FASTXY 3.3t00, default parameters
ccttcccgggtcgacgatttcgtgaagtagctcttatggctggagattgcaggtttatgactgatcctatttgggaagaacaatgatggcaggcattcgagctttatttatgtacttgtggctgcagctggactgggtgagcagaggagagagtgtggggctgcatcttcctaccctgagtgtccaggagggtgacaactctattatcaactgtgcttattcaaacagcgcctcagactacttcatttggtacaagcaagaatctggaaaaggtcctcaattcattatagacattcgttcaaatatggacaaaaggcaaggccaaagagtcaccgttttattgaataagacagtgaagcatctctctctgcaaattgcagctactcaacctggagactcagctgtctacttttgtgcagagatccctgaacagagatgacaagatcatctttggaaaagggacacgacttcatattctccccagcctgagtcaaggttattgcaatagcactaaagactgtgtaacaccaatgcaggcaaatcaacctttggggatgggactacgctcactgtgaagccaaatatccagaaccctgacccttgcgtgtaccagctgagagactctaaatccagtgaccaggctggctggctaattaccggatttggatcttcaaccaaggtgccccaaggtaggattctgtgtgtaattacagacaaactgtgctaaacatgaggccatgactttagaacacagggtgtggctggagcacat

SEQ ID NO: 82638 - DNA, 920 bp, Homo sapiens
  sig_peptide (573)...(708): this location contains the signal peptide sequence, MCLLCCECLFHLWKRINWWQGFCSFYLLLWVGLLSFPPDPPWKSF, Run with SignalP
  misc_feature (187)...(920): similar to gi2773198 in the genepept database release 114, Run with FASTXY 3.3t00, default parameters
ccttcccgggtcgacgatttcttggcgggtacccgtgcgcggtgggctgatcgcggctctcttaccttctcgggcagcccagtctttgccatccttgcccagccggtgtggtgcttgtgtgtcacagccttgtagccgggagtcgctgccgagtgggcgctcagttttcgggtcgtcatggctggctacgaatacgtgagcccggagcagctggctggctttgataagtacaagtacagtgctgtggataccaatccactttctctgtatgtcatgcatccattctggaacactatagtaaaggtatttcctacttggctggcgcccaatctgataactttttctggctttctgctggtcgtattcaattttctgctaatggcatactttgatcctgacttttatgcctcagcaccaggtcacaagcacgtgcctgactgggtttggattgtagtgggcatcctcaacttcgtagcctacactctagatggtgtggacggaaagcaagctcgcagaaccaattctagcactcccttaggggagctttttgatcatggcctggatagttggtcatgtgtttactttgttgtgagtgtttattccatctttggaagaggatcaactggtggcaggggttttgttctttttatctcctgctatgggtaggtttgctctcttttccgcctgaccccccttggaaaagctttacacccgcgattctttttcttgcctgggggactggctcttcccccggccgccatcgcttctcgctccccacagaccgccgcccgtctgctcactcgccctttttatcaacccttcagcactcgatccgtactttattccactccccgatacgttcatcacgtttcgcattcgtctcctctctccactcgtacacttcaatcccttctctgccc

SEQ ID NO: 82639 - DNA, 404 bp, Homo sapiens
  sig_peptide (330)...(195): this location contains the signal peptide sequence, MIAIFVLFPALRGKLLTTLKMLSLVGFLWIFFVRVKKYHSVPRWK, Run with SignalP
  misc_feature (97)...(405): similar to gi1335198 in the genepept database release 114, Run with FASTXY 3.3t00, default parameters
ccgcagtcacttctgatgaaagagaaaaagatgcgtccgccttcctcacaattaaaaacatttggtcgtcaaaagttgctgtaatttcgattaataaagggcaaagatcatatgatcgtctcaatagtggcagcacaatgagcatgatagtatccagctctcattcaaagcagtaattgccgaaaaagctcttttccacctaggcacagaatgatacttcttcacgcggacaaagaatatccacagaaatcctacaagactcaacatttttaatgttgttaaaagctttccccttaaggctgggaataagacaaagatagctatcatcacctctactgaacattttgctggcagtgctagccagtatagaaagaaggtgagaagggagaaataaagggggtatg

SEQ ID NO: 82640 - DNA, 1372 bp, Homo sapiens
  sig_peptide (548)...(683): this location contains the signal peptide sequence, MSHCGLLFLVVTWLLSFIFLVCKMRITFLFCLLTVDMKPNKVLYM, Run with SignalP
  misc_feature (865)...(1120): similar to gi288145 in the genepept database release 114, Run with FASTXY 3.3t00, default parameters
cccctcatataacctgaaatattatcccttttttttttttttacttcctgtaaatacctgtaagacagtcggccggaggattgtattttcaatataatctcctcattattcccttcttgatggttggactgtgtctacaatgtcagagcatataggcattacatactatgctgtaccctttataaaatcacttaagttttaattctgtggtttatatttaatgttcatcatctgcttttagattgatgtcttttcagtcaattctgaagcttgttttctagtagaattctcaggaagagcttagaacagctatagtcccggttttttgcatgttttaagtttgtgctgtttatacctgaaggtcatgtcagctaaataagaaatccttggttcatattttttaatttaattatctaaagtctgttactccattgtcatcctacataaagtctcatgctggtctcatttctttcccttggggagtgacctggtcatttttcctggacacccagattttttctatacattccaataattttagtttaatatgtctcattgtgggttacttttcctggttgtcacttggcttttgagctttattttccttgtctgtaaaatgagaataacttttttgttttgcttgctcacagtagatatgaagccaaataaggtattatatatgaagtgctttaaatgtattattttactatcttgttatcctttaaagtttcttgttattaggaactttgaaatttagacagcctgagcaacatggcaaaaccttatctctaccaaatacaaaaattgtctggtccattgggtctcacgcctgtaatccccagtactttgggaggcccagggtggatggatggcttgagtctaggagttcaagactagcctgggcaacatagcgagatcccatctctagaaaaaaaaaagaacacaaaaattagctggacgtggtggtacatgtctgtggtcccagctcctccagggctgaggtggagtgtcccttgagcctgggaggcgaatgttgctataagcctaaatcgtgccactgccttccagcctgggtgacagagcaagaccctgtttcaaaaaaaaaaaaggaaaaaaaaactttaaaagccttttttttaaagggggagggacttggagtaagtgcctgtcggaaaaaaaaaaaaaggggctaccccagggggtttttttggcccaaaagagaaaaaacctttccctggttccctggggaaaagcaaattttttcttttatttaggggggaataaaaccggattgaaagaaaggggcctttttgaagaaccctaaaaaaaaaactccattgaaatataattttaaaaccttttgccgggccgg

SEQ ID NO: 82641 - DNA, 748 bp, Homo sapiens
  sig_peptide (361)...(496): this location contains the signal peptide sequence, MHQPCAFFNVIYASRVWIISLCTFLLQQMSAHHLSKITDKELKVP, Run with SignalP
  misc_feature (104)...(748): similar to gi3881038 in the genepept database release 114, Run with FASTXY 3.3t00, default parameters
atttctcttgatgcccttttcacccggaaatggaagctggttagcaggccttctgttatctgtcatttgtttccaaccctgcagagctaatgctacaccaagcctggcttcagtgcagatagagtgtctgtgttccagctcactgctcatgatgcagacttgccaactgatgcatacaaagtgttgagaaaactatttaagattctacttacagtaactggccagtgtgtgtgtcagtcatattggcccttaaacatggccctgggctgtaacctttagctgactcttcagcttgacacaatgttgcagccgcattggatgggattcacttctgaccaccatactacccttaagtgtgaaatgcaccaaccatgtgcattttttaatgttatatatgcctcaagggtatggataatttctttgtgcacttttcttctgcagcagatgtcagcacatcatttgtcaaaaatcactgacaaagagctaaaagttccagctgtccctagtcattcagttagctccaataagcaagaagcctctgataagcatagtaccaggtccctcaagaaagaaatataggagaaataaaagagaaagtccttgcttttgaggagtttgtgacttaatggcaggggggagtctcaacagccttattgaagagatttcagcatttaaaatgtatattttatattggatgtgtgcactaacaacatagaagtgctgggggcacatacaggacaaatgaacc

SEQ ID NO: 82642 - DNA, 1192 bp, Homo sapiens
  sig_peptide (34)...(169): this location contains the signal peptide sequence, MRVLCAFPEAMPSSNSRPPACLAPGALYLALLLHLSLSSQAGDRR, Run with SignalP
  misc_feature (127)...(897): similar to gi5870624 in the genepept database release 114, Run with FASTXY 3.3t00, default parameters
cgtccacgcgtccgcttaaatcagagggattgaatgagggtgctttgtgcctttcctgaagccatgccctccagcaactcccgcccccccgcgtgcctagccccgggggctctctacttggctctgttgctccatctctccctttcctcccaggctggagacaggagacccttgcctgtagacagagctgcaggtttgaaggaaaagaccctgattctacttgatgtgagcaccaagaacccagtcaggacagtcaatgagaacttcctctctctgcagctggatccgtccatcattcatgatggctggctcgatttcctaagctccaagcgcttggtgaccctggcccggggactttcgcccgcctttctgcgcttcgggggcaaaaggaccgacttcctgcagttccagaacctgaggaacccggcgaaaagccgcgggggcccgggcccggattactatctcaaaaactatgaggatgacattgttcgaagtgatgttgccttagataaacagaaaggctgcaagattgcccagcaccctgatggtatgctggagcctccaagggagaaggcagctcagatgcatctggttcttctaaaggagcaattctccaatacttacagtaatctcatattaacagagccaaataactatcggaccatgcatggccgggcagtaaatggcagccagttgggaaaggattacatccagctgaagagcctgttgcagcccatccggatttattccagagccagcttatatggccctaatattgtgcggccgaggaagaatgtcatcgccctcctagatgggttatgaaggtggcaggaagacaggaaatgcagttacctggaacattctacattgaggcccgcgggccaaggggagggactcctgaaaacccgcctgtgaaacacacttttgtgccgattagagaaatcagaaaggggtaaacataccccccagaaagaaaattgggcttgaagtggggggccactccactgaggccaacacacattgcgttctatggtggggaatttaggtggaccctctgaatggcgccgctccggcatggtgccgggcggcgctcgtgttggcacgggaacacgcccgtgcgccgagagtcgccggcacacccagcgtgtggtgttgtgggcatctggtactacggagtcccgacccagcgtcg

SEQ ID NO: 82643 - DNA, 432 bp, Homo sapiens
  sig_peptide (185)...(320): this location contains the signal peptide sequence, MSRPQDLVLLLLVGWPGTAGYSKGTGDSRQQLQSTPANFSLAKGT, Run with SignalP
  misc_feature (219)...(421): similar to gi5705931 in the genepept database release 114, Run with FASTXY 3.3t00, default parameters
gtcgagaaaatgcagccggacctggcttggttccaggaacaacaagaataaagacttgctgggttcccaccacacatgttgtcgtgagctcactacacaccctgtccctggagcattgggatgcagcctggagccaggaagatgacagtgttgtgcacagctctgcactggtaatgcactatgcatgagtcgccctcaggaccttgtgttactgctgctggttggctggccaggcactgctggatacagcaagggcactggcgatagcaggcagcagcttcagtccacacctgccaacttcagcctagccaagggcacccacatcagcacgtccacagcctgaggtcccctgggttccaccaaggacctctaatgcaagctgatatggggccctgtggccagcagggacccctactagaccatccagacttt

SEQ ID NO: 82644 - DNA, 1142 bp, Homo sapiens
  misc_feature (1)...(1142): n = a,t,c or g
  sig_peptide (539)...(674): this location contains the signal peptide sequence, MLLKQTLAKLLSFPIFLELGPFPAWSHTQPCLRTGCLRVKLSPFW, Run with SignalP
  misc_feature (328)...(9): similar to gi19521 in the genepept database release 114, Run with FASTXY 3.3t00, default parameters
tttcgtgggggagatttggggtcagctgggcgattcactgggggcctatggaggtcgctgtagacttggggtgcagcacgggcggggcaaggggacgcgaggttgcccttggccccaggggagaggggcccctgggaggccgtgtggaggatttgtctgcagcgattaggactctgctgatgaatgatttggatgcctttgggtgagcattggaggccagcggggtgaatgatgaggcttctgcgggggcctgcgttggagggcttaggggcttgcttgtgtgggttccattcactggaaagcctgccggctgtgacagtgttggatttcaccagagccctgtgctcctggaaaacagcgaaggttgaggaatttcccacccttttgggttccagcaaatggctcactgcaaagatctcccgttccctatatgactttggtcagcctccaggatgccccttgttcacacagacctgccacgttgccgtcgcttgcctcatcggtgactggctgaactccaccgagcggtcggagcaaaatgcttcttaagcaaactttagctaagcttctttctttccccattttcttggagcttggcccattcccagcctggagccacacgcagccttgcctgagaacaggctgcttaagggtcaagctttccccgttttggtggctgggtcgccgccctttccccttcctttggccaggcttgcgctttgtttaacttggtcccacccctctgtggaaagagaaaacccttttttgcttttgcaagaatcccctggaatgtcgtggcattaacggcgtttctccgaacaaccccgtgctatctccttctccaacgcatttgatggggttattttgacgcacgtcacaagccacttcggacgccgcttttttttctttcggctaccgatgtatatattgactaccgagcaacgacgtagttacgctttaccacgaacgactcgacgacgtgggcacatggacgtatcactctcgaaagaggacgtgnttacctcgcagcgagtgacgtgtagtgcggaacgaacacggcggacgttcgcacacccgtacacacgtaccgaaggttggatcgtcggtaccactgatcatgcccggcagttattcacgttcgt

SEQ ID NO: 82645 - DNA, 4389 bp, Homo sapiens
  sig_peptide (817)...(952): this location contains the signal peptide sequence, MLVGAVAVPWAHTLCTQWAQRFLLCTCWESLLQVPARLPRNQRPF, Run with SignalP
  misc_feature (1628)...(4386): similar to gi470674 in the genepept database release 114, Run with FASTXY 3.3t00, default parameters
tgagccaccacgcctggcctctttgctccagtcttggtatttagaaaacggaggtgaaaacacaatcaagaggagggggcatttatccacatctggaccaggcaggagggaagcaaggttccagccgcaaggggtgtggagggctgagatcagctgctgctctccaaaaccagggatctgcgggactagcgagtaagacatacgtggggtccgcagtgaaaacatttattttacaacagtaatctttattttaggccaacattcagacatacaagacggagatcaccatgcggaaccagcctggcccttagatgtgtgtgctcgagccaggatcagccggagtctgacagcgcctgcaccccaacacggtcggattccaggacgccagtgacaaaaccagtgcatggacaagcagcttccatgcgtgtgcatttgatttttaaaaacaatacatatttcagtgttaacttcccccctcacctggcttgaaacattttccccattttccagggaaacaaactctaccaaaaggtgccgcctgcaggaccccgggcccagccccttctggaggtggtgctgtgtggactcctctggggccgacccggggccagcacagggccccttcccaggccgcccttcagatgcagctttgccactgaccgtatctgctgctcagaaaatcagctttcatgtttcaaggcagggaagggcttccagtcccctcctcgatttcacaccgggacacacacctgggtcaggtgagcatgacacacagccccccaggatgggcacccccaccctgcagagcagaggccaatgctggtgggggccgtggcagtgccctgggcacacaccctctgcacacagtgggctcagcgcttccttctgtgcacctgctgggaaagcctcctgcaggtccctgcccgactcccaagaaaccagaggccatttcagagccacctttaattgtacttgtcacttcaccaggggacagcagcatgaatgacactcctgctgcgtgatatatacatatacacatatgtacacacacggacacaccacagcccacactcacagcatgtgacgacgcaaactgttgctggtaaggacagtaaaaatgtagcttttgccaattccacaggagaatgatttacaaccaaaataacagacacaggccagtcctgcgccacaggggttcacagctctgaatactgggaaagggtgagatcagtcatttcgtgtcccctcacgagatgtccccacagtaggatgcactgagtcagagctaagggagggtggacaagcgctgaactctgcccgcagcacccggaccctccagtggcagcctgcatgctggtgcccttccttgcagcacaagcctcgcccggaacagaacgcctgagagcagcctcgacggcgtgaggctccagggcctcttctggatggcagcagccgacgtgaagacgaagcttttcctgctgggcacgtgtgcatgccagttcctttttctagtaggtccccactgggtgctggctgcactaacaacatagagaactaggaaagttcacaaacactgagcagtaatatctaaagcagtttaaaaataaagccaaaaggaagacaaaaaaatcccacgtcactgagtggagacaaatctatacagcagcagctgccgtgaaagggcccgcagggccgctcctacgcctcctgcaggtcggaagcagtcagtgctgcccggaccccctcgtgaaccggacaggcctcaaagcacgaccccagagggcccctggcagcccccagcagcggcgtccaaagggacattctgtgcccatggccacacttgctcacagcattgtctgcggcccgagagtgaggagtcggggtcccgtcactgccaccagcaaaagcaggcaggggtgctgggggcgtcctgatctgttagcacgtggacagggaggcgcggaagctgccccaggactcaccacctcttttaattatagggaaacagtccactcaagaaagagagaaataaaacccgggaggatctttttccttaaattaagacaaagccttaaagccaacagggcagagcgctgaaaacggttctgcttctaggtcaggcagggggaggaactccaggccccgagtgtctgggcttcccgggggtcgtctaatcacaatcaccaccgtgagaatggccacaaccatgatttattaggttttacagattctgcaggggactgggttccacaaacctccagacctgctcctctttcccaccctaccccaccttccgcagggagctgcatggttctacaaaatggtccactggactctgtaactgaaaagccacctggcaaggggcccactctgatgggtaccgaagggccttggagtgttctagccacagagctgtgtgcaggcccaacagagggcctggtggggctgagctagggcccccgatgggcagctttctaccttaggtccaagcttagaacctggctcttggccagtctgcggaaaaataactcacgtcctaagctacatctacaaaaattgcaaaggctgagtacagccagcatctcaggctgaacttgctgctgcacgaagcggcacggaggcaccccactgtctcgccacctcacctttcaggatgggccaaacaatgaatttcttattcttttaggagaggtctgattttgataaattatttctaatttaatatcacagtgcatatctctcctcttgtcaaaggtcttcgtgatcattttagtgagaagaaacaaagaaaagtgggacaaacaaagctgcccaggacctagtgctggcagccggctcatggtccacatgcggatctgcagtaggggtcagctgggggccctcaaccagcaccctgttcctaagcacgtccagatgtatcctcatatccatgtcccttttggcagcttcctggtcaacctgaacctacccttctgcacagcctcgggtggctgctgagggcaatgagtgagctggggccacgggtcagcaggcaggcagggaagggggcttcaggaggctcatctggttggtccgagccagagccatcacacacagcctcctcctcagctttatctctacagggacctctgcaactctgcagcggccaccatggacattctgcagaaaccaggcccactggagtctgcagcatggcgccaaaggcaggcccagcacatcccatgagctacggagtgcgggcagctctgagccctcagccagcacagggacatcagacccgttccccctgctcccctatgcagggcgccacccacaaggtctaggacacgcaagagactgacttcccatggtccacatgtggattccgtagtctggctgctggcctcccaagggacccacaatggtccacgtgtggattccgtggcctggctgccggcctcccagggacccacaatggtccacgtgtggattctgtggcctggctgccggcctcccagggacccaaccctcctgagccagagggtccctctggtccagtcagtccttcctccagggacctaacgaatctggctctgcctgaatcatcgatgacggggcaaaggcgagtggggcagatgggagctctggcaaacacaggaggaggggtcgtgggagagcccccgtccccagtagctgggtgctcacacatgcacaatctactctctgactgtggctcattgggctggtcctatcatctgtggttctaaaggtccaaaaagggctatggaaaggacaggtgtgctggaaggaatgtggagaacgacctcaagatgggaggggggagactggccccatcaatccagctcagagcccgggaaaagtgcaggaacacagacaaataaccccaacacggcgaaggacacacctccgagaaccagaacggcagcgtccacacgacgagacgaccaggcgagaaacaccgcggaggacacggtgtcaacctcggaaggggcctcctatgctttccacaccaaattctcccacgggagaaaccctgccacaaggcccaggaaaccacagacccccaagccaaccatgcccagcacagacaccaaggaatgacagtgacgccggtgacgccaggaggacgcggccccgcctctcttctggcaggtgagatcagagtcctactgcagcctcaaggctgggagcacagagtgtggaccagaccccgaggccaagacggtaacacagctctgccaggcagcacctgcctccggcccctcaagcacaggggccatggtggaagccaggtggtgcctggcgttgaaggtggctcctcctggctacagtcactgtcccctggatgacaggccacacccagcactgatgggcatttgggttttccag

SEQ ID NO: 82646 - DNA, 418 bp, Homo sapiens
  sig_peptide (102)...(237): this location contains the signal peptide sequence, MCCVICSKQYVLLSILLCLLASGSVDFFLLPHSVLADDDGIKVVK, Run with SignalP
  misc_feature (19)...(418): similar to gi17786 in the genepept database release 114, Run with FASTXY 3.3t00, default parameters
atcctggctcttggaacttccctttcaactcccttctctttcctggttttggggttaatcttgacacattgaaccttgatatctgactgcctgggtcggtcatgtgctgcgtcatttgcagtaagcaatatgtcctactgtccatcctgctttgtctcctggcatctggttcggtggatttcttcctgcttccgcattcagtccttgcggatgatgacggcatcaaagtggtgaaagtcacatttaataagcaagactcccttgtaattctcaccatcatggtaagccttacggtttcattccctgggttgtgcacctgccaggctgggacccaggacacttacacttagttcctgacttgccctgatgtaggccaccctgaaaatcacgaactccaacttctacacggtggcagtga

SEQ ID NO: 82647 - DNA, 560 bp, Homo sapiens
  misc_feature (1)...(560): n = a,t,c or g
  sig_peptide (382)...(517): this location contains the signal peptide sequence, MGFVGTWACIAPCGASHMSVLLHNRSQCVQEAGXMRLRPAGGALH, Run with SignalP
  misc_feature (211)...(470): similar to gi3250887 in the genepept database release 114, Run with FASTXY 3.3t00, default parameters
ccgcaccgcctggagttaccgggacgacccacgcgtccgaattaatagaatctttgtttttaagagggtgtgaaattagttcgggaatatagtggtgttaattttaaatgtggacagtagattattttgaactaatatcctggaaatcacatttagagtgaagagcatattaatccagtttgcttctaaggataaataaagccagagaaacccctggaaaataagacttaacacctcactcctgttggtattaaaaagcctttcataatatgtgcctacaaattaataaaattgtaaacctttagcggccagatgcctggctgagccctgggcacagagatccatggggccaagtgcgtgctccggcacccggcgcctgccatgggctttgtggggacgtgggcctgcatagcaccctgcggggcatctcatatgagcgtgctgctgcataaccgctcacagtgcgtccaggaagctgggngaatgcgcttgcggcctgcagggggcgccctccaccgcgtgcaggaattggcctgcttgcgaccaagccttttcccagg

SEQ ID NO: 82648 - DNA, 580 bp, Homo sapiens
  sig_peptide (113)...(248): this location contains the signal peptide sequence, MANVFVLRNSFLTKMVKISCCVIFVKFYGIAFYIRCVIKLVLIFA, Run with SignalP
  misc_feature (253)...(6): similar to gi439877 in the genepept database release 114, Run with FASTXY 3.3t00, default parameters
gcacatattttcttttgcattgtggtttatcttttcactctctttaggattttctttttttgtgtagacattttaagttttaatatagtccaatttattaacttttccctacatggctaatgtttttgtcttaagaaattctttcctaaccaagatggtgaagatatcctgctgtgttatctttgtaaagttttatggtattgccttctacattaggtgtgtaattaaactggtgttgatttttgcttatagagtgaggtaaggaccgaattttattttttctatgtagatacccagttgtcccagcaccatgtactttaaagaccgaccttttcttactgctttgcaatgcttccatcatataatggatgtccgtacgcacatagtatatttccatgacattctcttaggttaaatttttaggagaattgttagagcacaacaaatgattatttattaatgcttattttgaaattacaaaatttgtgcacatttatttttcaattttttaattgtagtaaaatacacataaaatttactgtcttgactattttttatatcccgtgaagattcaccatcg

SEQ ID NO: 82649 - DNA, 540 bp, Homo sapiens
  misc_feature (1)...(540): n = a,t,c or g
  sig_peptide (237)...(102): this location contains the signal peptide sequence, MQAFRLLTSLLVLHLMYLTGFIILGFYFHLFSHKFLIFILXXXXX, Run with SignalP
  misc_feature (199)...(532): similar to gi57053 in the genepept database release 114, Run with FASTXY 3.3t00, default parameters
ataaaacgattgttttagcctggaaggcaaaaacttcagttaacccaccctgggcccctaccctccagcctggggggcagtgtaaaacctttttcnnnnnnnnnnnnnnnnnnnttaagatgaaaattaaaaatttgtgggaaaaaagatggaaatagaaacccaatataataaaacctgtgagatacatcaaatgtagtactaaaagggaagttaatagcctaaaggcctgcatcaaaaaaatagaaagcttacatattaaggacctgacatcacatttcaaagaactagaaaattaataacaaatcaaatcccaagttagaagaggaaataaataaaaatcagaacagaaccaaatgacatgaagtccaaaaacaataaaaatgcccaacagaataaagagttggtttttcaaaaagacaaaattggtaaattgctagctagattacccacaaatagaatagaaatctaaataaacaaatcagatataaaagaacagacattacaatggatacaacagtaatacagcggacgcgtggg

SEQ ID NO: 82650 - DNA, 2564 bp, Homo sapiens
  sig_peptide (437)...(572): this location contains the signal peptide sequence, MLIGLLAWLQTVPAHGCQFLPITSVTATVYHLPVHQLKGRSRVQK, Run with SignalP
  misc_feature (2345)...(2564): similar to gi288145 in the genepept database release 114, Run with FASTXY 3.3t00, default parameters
gaaatatcagcatctggggtcctggcaagcaaggaagcttccaagtaaaaaccagagagaagggcacacttttctttcttcattaggaaatcttattgcacaggaaccacccccacccccaccccccacaccttcccaaggcagcatcccagtgcagatagagtgggaaaggtcccagaagggggctcactcacctctaggcccagagaggctttctcctcactttatacactgcaaaaacagaagaattgtgtcaataacaccctctgtagtggagaaacttaaaaagctggttaggaagctctcgtgtatatttagagacaattacaagaaagctggacttgccgctgtggtctcaggagaaatgagtgttcttgatgacaggcaaagggacatcttagttgtccagaagcggcactcttccctggaagccgccatgttaataggattactagcctggctccagacagtgcctgctcatggctgccagttcttaccgatcacatctgtcactgccaccgtatatcatctgccagtgcatcagcttaaggggaggtcacgagtgcaaaagaacctgacccttgacaatgagggagaagggacatggaccacctgtctggaattcctggaatcactggcagggtggaggctgggctggggagttagccgcggtgtgcgtgaatggctctgtctccagcaagtctctctccatcaaaccccaggtctgccccataagcaagatctttaacagatggatgtctccatgagaaaacccaaggcgagaagcccagagccatggcggggttgcttgacgtcctcatggagtcactctgccccacatgctcaaatcttccctctggccccacatccctaggagggcctgacccctgtaaagatacaggaggcagctccctggcctccaaatggcccatggagatggcagtcgggagacagggttctgtgtttgctgcggtgaagggaggagaaggcaggaggaaaaaggatggcttctagccctgaagaggactccagcatcccaggcaccgggtgcttctggctgcagttttccctatggaggcccctcagcctccagccctaacataaatgtcggttaaattcagttttcaagcctctctcccttttcagtgtcagagcagtagatggtccagggcattggaggcctcgaccactctgcattgcagattacagtgacttcctcggggttgccccatcttggtctcctgtggtttcttcatcagctttttttttaccagcatctctcaaataacaatgaagatagatatgcccattagtgtctgattaaggagcaaaggctggatttctggccacagcgagctgcactctccctcctgcctcagccggggtccgtcttagcagtttggaaaggggaaaaagatgccggtcctcactgcttaagttttgtgtccaggtgccactagacttgcatgcacactaactccttacaatcaccacacagcatcatcgccccagtgcacagatgaggaaccagaggctcagaggagtgaagttgccttcctgaggtcacacagcatgaaagtgatgagctaggatttgaatctgggaagttgggctctagagccagactgtactgccttctgccacactgtactgccttctgtgactgggtggcacctccagggcacatttacacaaggccctgaatctgcagaggctgtttctcaagatgcccgtcatggtgtggcctgggccagctctggcttccacaggtccctgactgtcctcagagtggaacatgctcaacctcccgcccactgctctctctctgcccagatttcaggggtgccggtccccaaggcctgcccccttctttaagactgaactcaagtctccttggaaggccccggtgaagctcccagagactggttttcttgggatgcaggcagaaggggaccctccctggccaacacccaggagcccagcagaagcacccacacgtagaaagaggctcactacagccagaagtgcagagtcagagtcctgggaccatcttgttctgcaaggtgaccccaggctccccaggacaggggagagtgatcgtcctcattcagactctagctggggcctctgtactggcttctccctgggtggggttgcctgttacatagctgtgcctcagagaaagggtcctgcattttctggaatgttctctgtgcttaccccctctgtgtgcccctccattgctcctctacaagcaattaggtgattcaaaagagcaacttaggctgggtgcagtgactcacacccgtaatcccggcactttgggaggccgaggcgggcagggacaggagttcaagaccagcctggccaacatggtgaaaccctgtctctacaaaaaatacaaaaattaaccagacattgtggcatgtgcctgtaatcccagctactcaggaggctgacacaggagaattgcttgaaccaggaggcggaggctgcagtgagctgagattggccactgcactccagcctgggcaacagaacgagactctgtctcaaaaaaaaaa

SEQ ID NO: 82651 - DNA, 1142 bp, Homo sapiens
  misc_feature (1)...(1142): n = a,t,c or g
  sig_peptide (195)...(330): this location contains the signal peptide sequence, MRLSISLKFLQPLKAGAGICWDLLMVKCLLSNIPYCVSMVSWPCN, Run with SignalP
  misc_feature (15)...(1142): similar to gi1742063 in the genepept database release 114, Run with FASTXY 3.3t00, default parameters
tggttagacccacgcgtccgctggtattggttgtagattgccccaggcttagaggtcaattcttttgtttgggggcttagaattttatttttggttcacattatcctgcaataatcatactcatcatagctaccatttattgaggtatgaggaatagtcttaccccatttgggaggtgagtaaactgaggtttgatgaggttaagtatctcactcaagttcttacaaccactgaaggctggagctgggatttgttgggatctgttgatggtaaagtgtcttctttccaacattccatactgtgtttcaatggtcagttggccatgtaacttattttccttattttctttccagttaaatttatcgcaaatttttcatgaagattctgcattagagaataataaatattgatcatctacataattgtgtgactcctcacattttataaggctttcttatgactcttttctccctttgataaatatctcaggactttctccacccccttattctgattactccctttcccttcgcccattttagaaaaaaacttttccgttgttgcattgttaactagtatcttgtggaaatttaggatggccttaaaacatttgtgaaacattatccttttgctagntcattattttatgagtgtgagtaggaggaagaaattgccgagggaccaaaatgtaggaagataaccagttttacacagagtcacagtctacgaaataggaacttttgatggagagagaaagatctctgatgtcagaagtgcagagacaccaccatggactgaacttgggagtaagacatttgacttggcagggatgggggcatcacccccaaggttggcttctttaaggaagtccaaaaccccgcttgggctggctctcgattatcgttaactcgcgtttgcccatgcccctctactatgtacatcgtcgcagacatgctctttctcttttaacttgacccctatcgctcccttttcgttttgagtctatttcgtcggcccacagcggccgtgttgcgcggtaccgtgcgcatgtctgccacatcctccccacctatcgtttgtacttcatatcctcccgcggtcctcgttctacctgcggcccctctacctcttgtactgttgcg

SEQ ID NO: 82652 - DNA, 756 bp, Homo sapiens
  sig_peptide (617)...(752): this location contains the signal peptide sequence, MQKPRNICSCFFSCSLFGVFCWLFFVAFGWFLAALTPLDPFDLIV, Run with SignalP
  misc_feature (292)...(758): similar to gi1181245 in the genepept database release 114, Run with FASTXY 3.3t00, default parameters
attgaacgacattaagatagcaggcttttattttcctaaatattgcattttacagcaactactactcagatactttcagtactacaccctcaaaaaaaatccatgaagcgatgacttagagaagcttcctcactgatcagagtccatcatttttacacctcagactttgaactatctttttactaatgggttttgagacagtaaaatgtcatttcttgaactgggccttgaagaatcttacaggcttggtgatatatatggctttcctaaaacaggctgcagctgaaattgatatcatgttttatttttgctcttcaaaccgatgggacttctgtggccattttatatacctttattgaggacttgtcatgctattttgtgtcttgtttcttttgagtggactgtttgatcagccacccatccacctccgtttttcatgtcgtctctgtgtaatgcctgcatgtaatcctttgaacttggcaagattttatttcactcccatttttcctttgttttcttttcctcttaacccttctctactgatgagaattttaattttagaattgctaaccatcccttcttctggatgaatagattaaatttaaagaggacagatatgcaaaaaccaagaaacatttgttcatgtttcttttcttgtagcctcttcggggttttttgttggctgttttttgttgcttttggttggtttttggctgccttgacccccttagatccttttgatttaattgtaatctc

SEQ ID NO: 82653 - DNA, 722 bp, Homo sapiens
  sig_peptide (316)...(181): this location contains the signal peptide sequence, MVHCLICMWTCWPTGAILHRVCRTHWPRGVSHTHVWMHWPTCVVS, Run with SignalP
  misc_feature (285)...(722): similar to gi4995988 in the genepept database release 114, Run with FASTXY 3.3t00, default parameters
cagaagtccacaaacactcaggacaccaccccagtaggccagctcgtccacacacaagagacagcactgctcctctagcacagcatgtccacacacacgtatcacgccagtaggccagtgtgtccacatatacgcgtgcagcacagcaccactagcccagtacatccacaaacaatcgtgacaccacacaagtaggccagtgcatccacacatgcgtgtgcgacacacctctaggccagtgcgtccgacacactctgtgcaaaattgcaccagtaggccagcatgtccacatgcatatgagacagtgcaccattaagccagtgcgtccacacacacgtgacattacactattaggccggctacgtccacacactcatgcaaaattgcaccactaggccagcacatccacacacacacgtaaaattgcaccattaggccagcgcgtccacatgcacgagacactgcaccacaaagccagcgtgtccacacacacgtgacactgcaccactggatcagcacatccacacactcacgcgacactgcaccattaggccagcttgttcagtgaccaaacaaccacctgtcatctgatgtctttgaaaaaaatccaagtcacaaaaggatgttgtatttgacacttacaaaatcaaattcaaggtaaaagttttataaagcagctaccactttttatgaccactttaaagaaaacgcctcaggagaag

SEQ ID NO: 82654 - DNA, 780 bp, Homo sapiens
  sig_peptide (117)...(252): this location contains the signal peptide sequence, MGVMAMLMLPLLLLGISGLLFIYQEVSRLWSKSAVQNKVVVITDA, Run with SignalP
  misc_feature (123)...(728): similar to gi4929655 in the genepept database release 114, Run with FASTXY 3.3t00, default parameters
cccacgcgtccgggattttcttccaaaaatgcagacccattttaattaagtttgtaattaaccactggggagggcaggccccctggattcggtctgctttcggagacactaacaagatgggagtcatggccatgctgatgctccccctgctgctgctgggaatcagcggcctcctcttcatttaccaagaggtgtccaggctgtggtcaaagtcagctgtgcagaacaaagtggtggtgatcaccgatgccatctcaggactgggcaaggagtgtgctcgggtgttccacacaggtggggcaaggctggtgctgtgtggaaagaactgggagaggctagagaacctatatgatgccttgatcagcgtggctgaccccagcaagacattcaccccaaagctggtcctgttggacctctcagacatcagctgtgtcccacatgtggcaaaagaagccctggattgctatggctgagtggacaacctcataaacaatgccagagggaaggggaaggggcctggccctaagattgctctggagctcgacaaaaggaccgtggatgccatttactttggccccatcccattgaggaaagccctgcttcccaacatgatctcgcggagaacaggccctatcgtgctagggaataatatgcgagggaaggtcggaactccgaccgatctaattcgcgtgcttcaaacacggatgcctgggctttttgcctgcccctggccaaagggaggataccacctggctccccacaaaaaggcccatttattcc

SEQ ID NO: 82655 - DNA, 781 bp, Homo sapiens
  sig_peptide (44)...(179): this location contains the signal peptide sequence, MRYKCVLSKILWFCPWKYVWKNSFFNLEGMFMFIEVTCRHYSTCG, Run with SignalP
  misc_feature (264)...(614): similar to gi2662463 in the genepept database release 114, Run with FASTXY 3.3t00, default parameters
aaatttaaacatttagatttgctagtctaatatttacactacaatgagatataaatgtgtactaagtaagatattgtggttttgcccttggaaatatgtgtggaaaaacagcttttttaatttagaaggtatgttcatgttcattgaggttacatgtaggcattatagcacttgtggcatttttaagtaggcattatttaccagaatagtcttccaccagtaaaacagtacctttaagttgtattggcccataacaatttggtatatgcttgcttatcttaatttgatcttgtagacccaaaaaaggcatttatattcagagcatctagaatgtacatcacatttttatttttcatttttaaagcttctacgcagattttggaccactcaatctggcaatggtttacagatattgctgccagatcaataagaaattacaggccattacaatggtaaggaagaaaattgttcattttactggctctgatcagagaaaacaagccaatgctgccttccttgctggatgctacacggttatatatgtggggagaacccccagacgaagcctatacaacattaatctttggggagacaccctatattcccttcaggcacacatatgcacgccgccgccgacccgctaacccaaacccgccccacacatcttgaagtctgctggccaacagacaaccgccctcacccctcttccgatgccgccaactcctcgccgacggtctcatccccccacacacaatgccccgttcaccgcgctccccccctc

SEQ ID NO: 82656 - DNA, 869 bp, Homo sapiens
  sig_peptide (106)...(241): this location contains the signal peptide sequence, MQTKGGQTWARRALLLGILWATAHLPLSGTSLPQRLPRATGNSTQ, Run with SignalP
  misc_feature (256)...(799): similar to gi3874763 in the genepept database release 114, Run with FASTXY 3.3t00, default parameters
ccctgggcagggtattgggcaggaaggagactcctcacatgatccagtttaatcctcctcttctcccttcctgaagctgcacgctgcagtaagagcacagcagaaatgcagacaaaagggggccaaacatgggcgagaagggctctgttgctcggcatcctgtgggccactgcacatctgcctctctcagggacctccctgccccaacgtctcccaagggccacaggaaatagcacccaatgtgttatttctccatcatcggagtttcccgaagggtttttcacgagacaggagcgcagagatggaggcatcataatctatttcctaattatcgtttacatgttcatggccatatctattgtctgtgatgaatacttcctaccctccctggaaatcatcagtgaatacataggcaataagaaagaaatgcaagttttaattccaggcagaattgtttctaaattgaaaaaattaggattcaaataattctcccttggattgtctcaggatgttgcaggcacaactttcatggcagcgggcagttcagctcctgaattagatactgctttcctagggggatttatcacaaagggagatattggcattagcaccatccttggatctgcaatttataatctccttggcatctgtgctgcctggggttggtatctaatacgggctcaacactataatgtggccccctattcagagactgggagcggacacaattagggcggcacaggtcttggtatatatatgacaaccagtttattgggatgaaggggcttactgcttttgaaaaaaggaaggaaagtttgggccccgctttgcacctagccaacccaatcttataaaaaaacccgctctgc

SEQ ID NO: 82657 - DNA, 394 bp, Homo sapiens
  misc_feature (1)...(394): n = a,t,c or g
  sig_peptide (246)...(381): this location contains the signal peptide sequence, MIFFIKAPLYLLQSMMDCLYARRIPCITDCAMAEIEKLGQKYPVA, Run with SignalP
  misc_feature (52)...(397): similar to gi4680709 in the genepept database release 114, Run with FASTXY 3.3t00, default parameters
acccaagtgtttggctggaccatgcccatacccatgataacatggatggatgcgaccatgaagcgaatgcttactctcaaagaactaggcttaaacaagctgataaaataaaacctatcccttgccaatggaccgatcccacctcattactggaataagaaggtccccctcacccttcctgcttatttttccagtataatacacgggtgggcccaccttaccacatcctcggtggtacccactttatgatctttttcattaaagcccctctgtacttattgcagtcaatgatggactgtctgtatgcgcggcgtatcccatgtataaccgattgtgcaatggctgaaattgagaaattggggcaaaagtatccagtggctctaaggattgccan

SEQ ID NO: 82658 - DNA, 781 bp, Homo sapiens
  misc_feature (1)...(781): n = a,t,c or g
  sig_peptide (306)...(171): this location contains the signal peptide sequence, MGYKKLYIMVILLSTVLYEKHSGFLSYSCSDFPSKTLKFTFKSNQ, Run with SignalP
  misc_feature (54)...(781): similar to gi3023048 in the genepept database release 114, Run with FASTXY 3.3t00, default parameters
ccgtccggaattcccgggtcgacgttctgaatgacagagcatggatgagttacatttattggtgctaatgtctttaggttgtattctgaagctgtatgaggattctgaagttatggtgcctcaattttgtaaggcatacataagaagtaagatacaaatgataaggaattttgattgctcttaaatgtaaatttaagagttttggagggaaaatctgaacagctgtagcttaggaaccctgaatgcttctcataaaggacagtacttagaagaatgaccattatataaagtttcttatatcccattagagaagaagtttggataattatattgttttaaaaaaatttacatgccataacatgttgcctgcatgaagttacactatttgattgaagattaagcattaggcttctttccgtgacagtctttaacatccttgccaatgatgaccactagtcatctgtttctagcacaggcctctccttgattgagagttatttgttgcctcatctcactaggcagagatccttccttgaaaacaggtctctctcacccatcttgaccctcagcatctggtacagtgcnctggcactctttagccttttcattgttgagtggaaccctatgggctctgactgagggatactttggctagtcaccaaaatcttgttgcttttgcaatcgatttatctttgtgaaattggaagggggccccccccctttataaataatttgttttaaagttatgataggggggggggaggtccccccccccccccct

SEQ ID NO: 82659 - DNA, 423 bp, Homo sapiens
  sig_peptide (12)...(147): this location contains the signal peptide sequence, MGFLHQLQLLLWKNVTLKRRSPWVLAFEIFIPLVLFFILLGLRQK, Run with SignalP
  misc_feature (12)...(420): similar to gi2969966 in the genepept database release 114, Run with FASTXY 3.3t00, default parameters
tttcgtccgccatgggcttcctgcaccagctgcagctgctgctctggaagaacgtgacgctcaaacgccggagcccgtgggtcctggccttcgagatcttcatccccctggtgctgttctttatcctgctggggctgcgacagaagaagcccaccatctccgtgaaggaaggtgagtgcggcaggaggccccaggcacagccgggggagcgcggcacctcgcacgcctgcgctgtgtgtgcacatctgcacacgggtgtcctgctcccggagtccctgaggtgcggcgcctgctcccctgtgtggtcctgggccgtgcctcctggctgggctgtggaggtcggggctggcctgtggccgcgaatgatgatgccaacgcctcttcctggtgatgtgggcactcactggtctcctctgttctgtg

SEQ ID NO: 82660 - DNA, 1590 bp, Homo sapiens
  sig_peptide (644)...(779): this location contains the signal peptide sequence, MSVLTHPGQQAFRRILSPFLCSLSFLAWILDRTVTPIFVTPYALL, Run with SignalP
  misc_feature (690)...(815): similar to gi2394432 in the genepept database release 114, Run with FASTXY 3.3t00, default parameters
aggagggtacagacgagtttagatgatggcagcttttgttacataatgtggatttggggagttccaatgcattgtttttttctacaacattgaaaatattgactaactgggtctttctttactttctgggtttgctcacccccaagttgtactgtcccttcccttgaccttttaggttgattgtacttgagacaaagcttatttagcatctaaacaatctgtacaaatggacacttataaagaaccatttattcatctgttgattttcattcattattttcatcaattacaatttttcctctcctgcatcagaggaaatcacaaaagacctgacagatttacgtagtcaactgagtgcgtaggttgctcaattagtagtacattagtgagtgctaattgataagagatcattttttttcttatataaggatatttatgacattgtaaatgccctttggaccaactcaggacaaggtacaaaatggggcccatggatggagctgtgagcccagctcaccactgttcaactctcttctctgaaacaaattgtccatggggaccctcagcatctgggggcaaaagggccaagtacacaggggtctctgcaccttcttctgggctcttggtggccttgggtcccgccatgtcagttctcacccaccctgggcagcaggcattcaggaggatcttgtcccctttcctctgctcactcagtttcctggcgtggatcctggacagaacggtgacgccaatcttcgtcaccccgtatgcgctgctgggccagccctccttctggtgcactcccttctttgtatcctccacaaacttgttcatgagccccaccagctcctcctcagtgatggtctcactgcggaacttctgctgcagctctgggctgcagcttttaagggctctgacgctcatgatgctagatacgttcaccactctcccttggggttttattagagggagtaattctgtgcacacatctcgggtaccaaagaaatttgttttcatcgtcacttcagcttgaatatgaaagggtgtgggatcagcaaccttgaaggcgatgcccgcgttgttgaccagcacgtccaggcccccgtactccttgcgcaggaagtcgcgcagggcgcggatgctctgcagatcgtcgatgtccagctggtggaagcgcgggctcaggccctccgcctgcagctgctgtacggccgcctggccccgcgtcacgtcccgcgccgtgagcaccacgtcccccgagaacagccggcacaggtcgcgcacgatggccaagccgatgcccttgttgcctccagtcaccagcgctacatggatgccggacgacatggctgaacggggcgcgcggaacacctgcgtggagaacagacctggctcaggcccgggagccccgcagcgtgttccagagactgctcgagtctggcggtcgtgggcgcgcacccgtgggttacacgcccggcgcgcacccgtgggttacacgcccctagcggggcggggctgaaccatccctacccctccccaccggaacctcgccggggtgcggagcaggcggagagccagcccacgcgtccg

SEQ ID NO: 82661 - DNA, 1121 bp, Homo sapiens
  sig_peptide (177)...(42): this location contains the signal peptide sequence, MVYEVFINKANILLLLFLRQSLAVLPRLECSGAISARCNLHLRIP, Run with SignalP
  misc_feature (876)...(1123): similar to gi1710216 in the genepept database release 114, Run with FASTXY 3.3t00, default parameters
gcccccccccccccccattgtagacctatggaagtctggtggaattcggagatggaggttgcagcgagctgagatcgcgccactgcactccagcctgggcaacacagcgagactctgtctcaaaaataataataacaaaatattagctttattgatgaatacctcatacaccataaaagctagtgtttatagtatagtcacagagctgcacagccatcaccacaatgtaattttagaatatttctgtcactccataccctttagccgtccccagctcccccctcacccaggcaaccactaatccacttctgtctctgtaatttttctgttctggacagttcatatgcatggaatcatataaagttttttccatatctgcttttttcttaagttgacatataataattgtatccatgtccgcttttaaaatgcaatttgactttcacagtttagctgaatgctttcactttcgttattttaatgagagttagtgtaaggaaaatgagaatttaccaaatttttaaatcatgtcacctggtattttatctttacactcatgctttcaagtgaaaattccagtgcattattttcctcaagagaaagcagtggcagataagtactttctaatttttttatatgtcactcaagccgttggaagcttcataggtaaagcataacttaaatataagtttattctaactaatcccaatatgtggcctcaaaacataagtccataaatgtcatttctaagattattttacataaatactcaaatttgttgtcatttttgtagccaaagctaagtagaggatggggcctgtgaatttagaaccatcctagtgataaatatcaaatatttagataaaaacctaaatatttacccctctagctttatggagccattaaataataacatttttctccttctcttcatagagtttatagacaaaactagaaaattcaggtatttggtatatacttttttgttttttttgataccatcttggtcttgtcacccaggctgtagtgcagtggcacaatcaccactcatcgtagcctcaacttcccaggctcaggtgatcctcccacctcagcctcccaagtagacagaactgtaggct

SEQ ID NO: 82662 - DNA, 2812 bp, Homo sapiens; identical to SEQ ID NO: 82614
  sig_peptide (1208)...(1343): this location contains the signal peptide sequence, MAPLSTFASLCPCVALSDPTLLSLALSSWVTPRMGMAPSLSPPCC, Run with SignalP
  misc_feature (1140)...(2002): similar to gi1209103 in the genepept database release 114, Run with FASTXY 3.3t00, default parameters

SEQ ID NO: 82663 - DNA, 369 bp, Homo sapiens; identical to SEQ ID NO: 82569
  sig_peptide (323)...(188): this location contains the signal peptide sequence, MKGLARWNLCVALGQAFSLRGHRSLSALLLHMGSEPHFHFFFLGP, Run with SignalP
  misc_feature (274)...(366): similar to gi1245918 in the genepept database release 114, Run with FASTXY 3.3t00, default parameters

SEQ ID NO: 82664 - DNA, 1245 bp, Homo sapiens
  sig_peptide (988)...(1123): this location contains the signal peptide sequence, MLSGWVQCPLLQRVHFYAFSVGPFHRKIWGDVSFPLTFYFKNLQT, Run with SignalP
  misc_feature (341)...(1014): similar to gi2230873 in the genepept database release 114, Run with FASTXY 3.3t00, default parameters
tgtactgacatccctggggaattttgggttcttttgccccccatttgttcacaaaacatttatggggccccatgcaggaaaggatttaaagggagcactccagaatgttgaggctttttttgaggtcgtgcaactgcttcgacccgtctcatattctcgtccatatacactgctgctggacacagctaatcggcattatcactatctctacttctatcataacaacggttaccgccgtgttcgcactcttcggcacgagtcgcctcaatggccgtctcaaaaccctgtacactgggctcactcccatctgcgtctcgccacggtgttcccacacacttcgagtgaagaacaggagtgtgaagaggatggttcagagacagagactggtggccaggaggacctagaagatttacaggaggaagaggaagtgtcagatatgggtggtgacaatcctgaagtgggcaagaaagctagaaactcaagcaaatttgagctgaggaaaagcccagttttcagtgatgaggattctgaccttgactttgatatcagcaaattggaacagcagagcaaggtgcaaaacacaggacatggaaaaccaagagaaaagtccataatagacgagaaattcttccaactctctgaaatggaggcttatttagaaaacagagaaaaagaagaggaacgaaaagatgataatgatgatgagtcagttaaaagttccagaaatgtgaacaacaaagatttttttgatccagttgaaagtgatgaagacatagcaagtgatcatgatgatgagctgggttcaaacaagatgatgaaattgctgaagaagaagcagaagaaggaagcatttctgaaatatgaatgaaaaaaattacatctttagaaaaagagttattagaaaaaagccttggcagcgtcggggggaagtgacagcacagaagagaccagagaatagcttcctggaggagaccctgcactttaaccatgctgtctggatgggtacagtgccctcttctgcaaagagttcacttctatgctttttctgtgggtccatttcatagaaagatttggggcgatgtttcttttcccttaactttttattttaaaaacttgcaaacacagaaaagttgataaaatcatacagtgaacatctgtattctattcaactggattcactagttcacattttgtcatatttgtggtctcttttccccatatggaagattgtatatttgccctttt

SEQ ID NO: 82665 - DNA, 714 bp, Homo sapiens
  sig_peptide (101)...(236): this location contains the signal peptide sequence, MTGLFLHHNPGILLAPSVLDLLFPGSHIFIFSLFLSLCPCFGDTI, Run with SignalP
  misc_feature (145)...(714): similar to gi1177607 in the genepept database release 114, Run with FASTXY 3.3t00, default parameters
agataatctatcagttccatttatttcccagaggcatatcttaggaactttctatccacctgttcccatctggagtggtagctctttagtcacaactgttatgactggactctttcttcaccacaaccctggaatcctcttggctccttcagtgttggatcttttgtttcctggatcccatatcttcattttttccctttttcttagtttatgtccttgttttggtgacactatactagtggctccctcagacaaggtatataaagatacatttataataaaaatatatccatattgcatatttgagaatttcttcacatttttatttacttgattgtttatgttattggagttgaaaattattttcacttagaattttgctcagttttcttctattcttgagagtttctgttgaagtgctttggcattctgattcccagtcgtttacacatggcctattttttctgtggaaatatttaagattttctctttatttctgatctaagtttttatagtgatgtgtgttgctttgactttgattattatttttatttagttagtttttgagatagggtctcgccctgtcacctagacaggagtgcggtgacacaattatagctcagtgcaacctcaaattcctgggctcaagctatcctcccacctcagtctatgagtagctgggaccacagacacgcaccaccaggcctggctact

SEQ ID NO: 82666 - DNA, 705 bp, Homo sapiens
  sig_peptide (369)...(504): this location contains the signal peptide sequence, MQKKWREEGKTAGGVVSGTFALAGSWLCLAFVFATSRPLLCMPED, Run with SignalP
  misc_feature (24)...(705): similar to gi1345111 in the genepept database release 114, Run with FASTXY 3.3t00, default parameters
catgactaaactttggcttacagatgacctatcttccatttggcttccactatttgctccttgtcagcaatttctggctagtggcggcctcaggataattacagactctctatttttctcacccctctttttcttctcttttcctcatgtttaacatagttgtgggctttattagagttgggaatgtgacttataaaatcaactgtcttcaaaacttgggtcgtgtccatggagtatttcaggccattcagaagggaagacaataggattgccttcctagaatgtaagtttttttgagtaaacaagacccaatgaggcaggtgacaacagtgttccaaggcccctctctctttggatattatattcatatgcagaaaaaatggagagaagaggggaaaacagctggtggtgttgtgtctgggacctttgctttggcaggaagctggctgtgtttggcatttgtctttgccacttctagacccttgctgtgtatgccagaagacaaatgacagaacaaaagtatcacataccagcagagaaagcctgccacagatgccacagagtttatctttcagacagatcccattcttcccgacaaatctgaaccccaaagtatttcagctatggattacaaactagtgacaagtcttttggctttctggccagtttggaggggttcaattattttagcaaaccggttgggcc

SEQ ID NO: 82667 - DNA, 708 bp, Homo sapiens
  sig_peptide (395)...(530): this location contains the signal peptide sequence, MCALHMLLPLSKFFRALSLALLPRLECSGLISAPCNHPIQGSSNS, Run with SignalP
  misc_feature (176)...(25): similar to gi1499555 in the genepept database release 114, Run with FASTXY 3.3t00, default parameters
cggcacgagactgcatagggctcggcgtggtggttttccaaagaaaggttatgaggaagcccaacaggcagagctatgctaattacatgtgggaccacagtaaacgcagacacacttccctcaggactagaggctcgtgtctgcttcacaaagccacaactcaacactttccacaggaatgtctcacttctacataagatcaaatgaaagacattgttcctcctagcttcccatgagatggctaaagagggttagtcagctcgtaccattcggttatgactccattatctccaacttccctcttttcactatgctactctgtttccggggcatcttctggatcttgccttttccagatacacattccatagctcccacctatgatttcatcctaatgtgtgctctgcacatgctgctccctctgtccaaattcttcagagcactcagtcttgctctgttgcccaggctggagtgcagtggcctgatctcggctccctgcaaccaccccatccagggctcaagcaattctcctgcctcagcctcccaagtagctgtgattacaagtgcacaccaccacacccagctaattttcgtatttttagtcgagacagggtttcgccacgttggccaggctggtctcaaactcctgacctcaaatgatccacctgcctcagtctcccaaagtgctgggattacaggcatgggcca

SEQ ID NO: 82668 - DNA, 690 bp, Homo sapiens
  sig_peptide (69)...(204): this location contains the signal peptide sequence, MYFRYKSFIRYDLQVCSLFILFFLISCHMLTPIFMLSIVYFEEQK, Run with SignalP
  misc_feature (402)...(0): similar to gi439877 in the genepept database release 114, Run with FASTXY 3.3t00, default parameters
aatgtctgttgaaattttatgagtttttttcatcgagatattttatttttgaagtttgacaggtctttatgtattttaggtacaagtcctttatcagatatgatttgcaagtctgtagcctttttatactcttttttcttatttcatgtcacatgttaacacccatctttatgctctcaatagtatattttgaagagcagaagtttcaaattttgatgaagcccaatttatcaatttatactaatatggattgtgctttttggtatcttattgaagaaatctttgtctaacctaaggccacatacattttctcctatgctttcttctaaagggtttataattttaattatgtttccatctttttccctggggggtggattcaaagtgtgggaagaagaattctaagatggccccaatgatttctgctccctggcattatgtctgtgattatatcatggaatattgcagaagggattttgcaaatgtaattaaagctactaatcacctcattgtccccccctccaaaatgagattatttggggggggccaaccccgatcccccggggggttaaaagcccagcatttttttcagtttagtggaaaatagaaaaccgccccccccccccacgatggacttggtgtggggttgtgggttgaatttgagcgggcccccactacgggagggggacc

SEQ ID NO: 82669 - DNA, 847 bp, Homo sapiens
  sig_peptide (90)...(225): this location contains the signal peptide sequence, MFQILLLYTVPLGTSLQHSLCLLFNYLFWINSQKLNYWVKGCKYF, Run with SignalP
  misc_feature (308)...(2): similar to gi1196431 in the genepept database release 114, Run with FASTXY 3.3t00, default parameters
tttatcatttttcatagctatataatattccattgggttgaaaatcagtaacttacttaaacattcctttattatttagcatttaggttatgttccagattttgttattatatacagtgccattaggaacatctttgcaacatagcttatgtcttctttttaattatttgttctggataaattcccagaaattgaattactgggtcaaaggatgtaagtattttcctgacttttgggtccttactgccaacatcccctccaaagaaaattataccaatttacaattccactgacaatatgtgagtgagaacatgtgtctctttaaacaagtatttgccattgtaaaagttcaccagtctcaacttattaagcaattgccagcatccaatttccatacaagtcttttgttaaagtattaataggtcaaatatccttattttgggtagtcatgtgatgaagggagagcccagacacaaagaagctctccgaattatttaaatgttcagtgccttctccagcctagctagcaaactgtagaaacatttgactggctactacagaaacaaaagcctaacttgagcataaggaactgcatttaattgaataaacaaacatcaattctaagtcatttgttttcacactttcagggataacaaacattgaatgcatctttttattttgaggtttcctgaaaaccaccatatacgtgcccaacaggtttttgggttttgcttttttttttttttccaccaaaagggaccggcttaaccgcccacggcgcgacgccctgtcctcttccatttttaaaaaggggggggataaaagaaaacttatccccggggggggc

SEQ ID NO: 82670 - DNA, 422 bp, Homo sapiens
  misc_feature (1)...(422): n = a,t,c or g
  sig_peptide (158)...(293): this location contains the signal peptide sequence, MLLPGFIAHALCLTTAGERWPQILTYICCLKTPPMGSVTTSMRRI, Run with SignalP
  misc_feature (90)...(422): similar to gi4102759 in the genepept database release 114, Run with FASTXY 3.3t00, default parameters
cagacacctgccactggcagacttggccaggactttgttcaccaaacgaggaaagcatgcaaatgcctccgaatcaaagatgacgaatgacacaagctcagaaactatcttggagtcagcttgtatgcatggaccttacaaaggcttaacactttccatgcttctgcctggcttcatagcccatgcactctgccttaccacggcaggcgaaagatggccccaaattcttacgtacatctgctgcctaaagacccctcctatgggttctgtgactacttcgatgagaagaatagggcagaagagatgatgagaacttaacatctggcagaggccatttcctgtcttttgaaactttctggtanaggcctgagccacgtatgaagtgtgaatcttcacaccatgcacgagaagccacatgttat

SEQ ID NO: 82671 - DNA, 795 bp, Homo sapiens
  sig_peptide (270)...(405): this location contains the signal peptide sequence, MHPLLSHTLAFLQWGLCRPTLSSQECWGDQTQHQVLGVTKSDGVK, Run with SignalP
  misc_feature (217)...(2): similar to gi5802816 in the genepept database release 114, Run with FASTXY 3.3t00, default parameters
aaaaaatctcggccaattctctcccattcctccaactctatagtcccttgttctgggaaccatgggcaaaactgctttactgcactgaagagtgagtgataacaaattctgaggactaactttcactctccatcttcataataaatgccttaagaaatttcgataagcagaatgtctgctttcactttgtctcattgttaccctggttcttccaagtgctcagctttcctactgagcttcttttagacatcctcaggtgtcctttgacgatgcatcctctgctttcacacactctagcgttccttcagtggggtctttgtcgccccacattgagcagccaggaatgttggggtgatcagacccaacaccaggtcttgggggtgacaaagtccgacggagtcaaaggattgagaagtagacagtttgagagagaaaggtgggataccagggggccatcaccattgtggaggctgtgaaggccctgagctctgggagcccatgctatttattggtaatccaacaaagaaacaagtggtgagaatgtggaggtggaaaggacacattgcattaagcacatgatttacagctgtaatggtttagcatttatatggaacatgttctgctacttgagataatgggagtaggagcctaggaaggctagaagcaaaaagccagcaagtctagatacattccagaggacatgtcagacatggaagccctgcctcagtttctcccgacactcagctttttcccaacaattgtcttagcaaaaactcagagctctgttctcctcat

SEQ ID NO: 82672 - DNA, 1212 bp, Homo sapiens
  misc_feature (1)...(1212): n = a,t,c or g
  sig_peptide (97)...(232): this location contains the signal peptide sequence, MWGAPALQCIVFFRWTRSKCLPDTGNVCTKTQRKKAAGRLGVAGG, Run with SignalP
  misc_feature (371)...(19): similar to gi5420389 in the genepept database release 114, Run with FASTXY 3.3t00, default parameters
gtgttcgcagaatttccgggacgtcgacttcgttgtattgggaaagctcagcggaggaagagctcctgatgagtgagtggtgtagctatctgcttcatgtggggcgctcctgctctgcagtgtatagtattttttaggtggactaggagcaaatgcctgcctgatacaggcaacgtttgcacaaaaacccaaaggaagaaggctgctggtaggctaggggtggcaggtgggattgcccttgggctttaaagaaggctgagaaaacttacttccagagtgggaggcaggaggagtgagccttggaacaatagtggagtgtttgtggtggacggacgggagagaggaacacttgagggcatgaacttacttctgtctctttacttgaaaaagcaatccactgagctaagaccctaaaatacatcaacccagagggcttcctttcgagtttttagtttttagatcattcggtatcctcaatgcaaagatgtgataaagtcaagctcaggactacttggggaccaattctcatcctcctcatgtgttacaattccttagcagttgctttaaaactaacatttttctaatcttgaaatatttaataaagcagctttctgctaaagagctgaaagcattntacgaaccttatcttgaggatatccgcgcatattttattattttaagtcattttttttagcctacagaatttcatcaacttctttccttcaggtacacggaaagcaacctcccttccccattttatagaagaataaacaaatcttcataatgtttacataatttacccaagtcacttgggagaatctggaatcaaacgcaggtctgctggttccaaaaccttctcccctgtggcattaggtatatcacatggactcttaagtaagcctcaaaatctacaaaagtgcagtgatctgcccagactggccagccacaatgtcaggggggaagggtgggataacccacatgcccggagacaatggcggagacaaacagggatcttctctcttctgagtccaaaacaaaacttggggtctccctggggggcacccacagcggcccacccctttcgtgtttcaccagcatgggcggaagtggcagcttcttgttctcgtggcgggagcggacacagagcgtaccgacactatctttttctaacaacggtccttttgtggcgcgagcggcggccaacgaagccct

SEQ ID NO: 82673 - DNA, 390 bp, Homo sapiens
  sig_peptide (157)...(292): this location contains the signal peptide sequence, MLTLERSVGLLLRALGSHGRILRKRVTWHNWPWGTFLLSSVRSWG, Run with SignalP
  misc_feature (271)...(0): similar to gi385227 in the genepept database release 114, Run with FASTXY 3.3t00, default parameters
tttcgtcacatgcaaaaattatcaaggtgagaaaaactactggacgagagggaatggaggtggctctgcatgcaactgtggcttctacagggtgtgggaacaagaatggtggcaggtgaggctggcaaggcagcagggcccaggctatggaggtaaatgttgaccctggaaaggagtgtgggcttgcttctgagggcactggggagccatgggagaattctaaggaagagagtcacctggcacaattggccctggggaacattccttctgtctagtgtgaggagttggggaaagagggaaaaggctggaagcagttccctttggttgagtgacagaggccaaccacctgcgctatccaggtgggggcatgccggggacggggcaggattt

SEQ ID NO: 82674 - DNA, 1138 bp, Homo sapiens
  sig_peptide (129)...(264): this location contains the signal peptide sequence, MSLGSINHFLFFIQLLVLKNSYCMLLKMKQNKKLKKIMCLLFLML, Run with SignalP
  misc_feature (20)...(1138): similar to gi606881 in the genepept database release 114, Run with FASTXY 3.3t00, default parameters
tttcgttatacatgtattttgtaaatagatagtttatcctataggagagtggttataatctttctgtacttttaaaatttcttaaccatacatatgtttatttacatatttataatgtcaaaagttatatgagtcttggttctataaaccattttctgttttttatacaactacttgtcttaaaaaatagctattgtatgttattaaaaatgaaacagaataaaaaactcaagaaaattatgtgtttattattcttaatgctatcaagttatcatttaatatgaggtatattttttattttgcttacttatattcagtcagaattaatgatggaatcttcccccaccacctccctaccccaatactccagtaacttattaatttattacaaagaatgaccaaaatgacttaaataagtagttatctcctgagcgtccttgacctttctttatagtttaattgtggtcccttgaaccagagggtgatctgcaggcattttctttgttatcagaatgtgtgaaactaggtttcaggactgtgtcagagaactttttaatcatgatgcactttttgtcacaagaaatacttcctcgtggaatatttcaaagacggtgatttatttttaattttttaatttgagacggagtctcgctctgttgccaggctggcgtgcagtgtggtgcagtctcgaatcactgcaacctccaactcccggttcaagggaatctcctgtcttaactttttgagaagctggaattacccgtgtgtgccaccatgcctggcttaattttttttggattttggcacaagagcaccctccccgcgtggccaagctgtcctggacctccgacctcatgggaacaccctgcctcgcctcccacaattacgaaccacagttgtaccccccgccctggaacaaaggaacctcttctttttatcccccccaccgttccgcactttaccagacccctcactcccgggtgctcgcctgcgctctcaccaccacaccctaccggcctttctctctcggccggaccacccgtcatgtgcctcttctctgcacgccgggcggcgccctccttaaaccctctatatcacttccgctcgccacgccgcgccccctcgcacgcaatacccc

SEQ ID NO: 82675 - DNA, 389 bp, Homo sapiens
  sig_peptide (141)...(276): this location contains the signal peptide sequence, MLAWRLLCPWGPGLPTTTARSGERTERRERVRTASPRKILFKTQP, Run with SignalP
  misc_feature (112)...(389): similar to gi5104923 in the genepept database release 114, Run with FASTXY 3.3t00, default parameters
tttcgtccctctgtaaggacgttttgtggtggagccaggcaggagatgcaaaggttggtccccaggatgtgcaggaaggaggctgagtggggagggccaggaagccgaaggcctgagcaggacccggggcatcacctctgatgcttgcatggaggcttttgtgcccatggggtcctgggctccctacaaccacagcacgatctggggagagaacggagagaagggagagggtgcgcacagccagcccccgtaaaatcctcttcaaaacgcagccacccaggggttctagcacagacagatgcccatggggcaggcagtgcctgcatgggacaggcacctgccatatgcccaacagataacaggacaactgtttacccatccctggtatt

SEQ ID NO: 82676 - DNA, 400 bp, Homo sapiens
  sig_peptide (78)...(213): this location contains the signal peptide sequence, MFMPGTVLRILLALPYLILTKQVQFFLFSDEIMAWKVVAPGLELS, Run with SignalP
  misc_feature (153)...(393): similar to gi4584441 in the genepept database release 114, Run with FASTXY 3.3t00, default parameters
tttcgttttgcctttacatagttatcagctaaacctttgaattaaaaaaacaaacagtatctaagctttattgagcaatgtttatgccaggaactgtgctaaggattttactagcattaccttatttaatccttacaaagcaggtacaattttttctattttctgatgaaattatggcatggaaagtggtggcaccggggcttgaactcagtgctgtgactccagactccacactctttaaccattacactatactatcctgacattaatattctatatgattaagcttgcggagaagtaaattgaggtttgatatgactttacaccgttttaatcaatactgtgggtttatggaaaggcacagtgttatcaaggtgtataatattggggagggtatgga

SEQ ID NO: 82677 - DNA, 897 bp, Homo sapiens
  sig_peptide (101)...(236): this location contains the signal peptide sequence, MPAPPLPGGWNTWGPSLSLPLLLLGAVAMALGVRPPGQVGLSPIA, Run with SignalP
  misc_feature (889)...(674): similar to gi3089162 in the genepept database release 114, Run with FASTXY 3.3t00, default parameters
cgcgtggtggaattccctcaacaaggaggtaggtgggagtgggggcatctgagaccatcagcactggccgtcggggtcaggggcagagagaggcacagggatgccagccccacccctgcccgggggttggaacacgtggggcccaagcctttccctccccctgctcttattgggtgcagttgccatggcgctgggtgtcaggcccccaggacaggttggcctcagccccatcgctacggcgtccaccgtgggggtccccaggtgtctgcagactgctttccgtggcgatgctgggtggcatagctgtgcccagcagggagcttgtgtcgctctgcacccctcagagcggagactgggcatctccgatgaggcccacagcaggtcccggtggggtggagaggacagcccctccccactcaccggcccgcccctgtccccctccccaccggactgcctctctttgcctcgcctcacacccctgcgtctcccccctcctcccttccccttcctcggccccatcccgtccctccctccccccccttcccccccgcctcagccccccgcgaccgccccccccccttcccttcgattctaatgtcgtcccccctcacgcctagcaccctgcactaccccaatgctttctctgtccttcccccccgccacccccctttcttgctccactcctccccctacccccccctcctttccgccccccttcccgtcccttctcattccctctccaccatgaccccctctctgcggtgtcggcccgctcactgatgttcgcccgtgcccccaccccacttaattcttcatccgaccctcgtacacggccgctcgcgccactcctccccgtccgctcctctgtctctacgaacactcgccccggcacccccg

SEQ ID NO: 82678 - DNA, 870 bp, Homo sapiens
  sig_peptide (133)...(268): this location contains the signal peptide sequence, MTNYFFFFSNPCISFLGLFTSAFLGDFFSAMVNISDDTGHSYLIP, Run with SignalP
  misc_feature (555)...(42): similar to gi1335205 in the genepept database release 114, Run with FASTXY 3.3t00, default parameters
tacgcgatcgattggcacgaggtggcacgaggtgattttatatatggaccttgggtccagcaatcttgctaagttcacttatgatttctaatagatactttttggtcttctatatacataattaaatgatctatgactaattatttttttttcttttccaatccctgtatttcttttttgggtctttttacatcagcttttttaggggacttcttcagtgcaatggtgaatataagtgatgatacaggacattcttaccttattcctgacctcagagggaaatttttcaatatttcaccattaagtacgatgttagctatacgtttttggatatatcctttagcaggttaagagcattctcttttatttctagtctgctgagagtttttatcatgagtttttgtctgctgagaatttttagtatcagatgctttttctgcatcgagatgatcatgggtttatatttttcttctttaatctgttattttgattttcattgattgattgtttgaatgttaaactagccttgcattgctggaacaaattccacttggtcatgatgtgttatcctttgggtatatctctggatttaatttgctaatattttgcatctgatttttgtgtctatttttatgaacaatattggcttgtgattttttcttataaggtccttgtcaggtttctataacaagaataagctggcctcataaaatgaatcaggaaggatttcctcattttctgtgctctgaaagagtgataagaataaggggtactattattttcttttaaagggagggaaagttttaccagggaacccttttgagcccggaacctttctgtaggaaaaaagtttttaatttcctttaaaaa

SEQ ID NO: 82679 - DNA, 609 bp, Homo sapiens
  sig_peptide (107)...(242): this location contains the signal peptide sequence, MGTAALGPVWAALLLFLLMCEIPMVELTFDRAVASGCQRCCDSED, Run with SignalP
  misc_feature (186)...(609): similar to gi2145054 in the genepept database release 114, Run with FASTXY 3.3t00, default parameters
ggccagcaacaagttagtattgcagacatgggccaaggagccagaggccatgcagtggctcagggtccgtgagtcgcctggggaggccacaggacacagggtcaccatggggacagccgccctgggtcccgtctgggcagcgctcctgctctttctcctgatgtgtgagatccctatggtggagctcacctttgacagagctgtggccagcggctgccaacggtgctgtgactctgaggaccccctggatcctgcccatgtatcctcagcctcttcctccggccgcccccacgccctgcctgagatcagaccctacattaatatcaccatcctgaaggcccagcgagcgcagcatcatgcagagccagagtgtgatgctggacctggcctacggggaccgcgtctgggtgcggctcttcaagcgccagcgcgagaacgccatctacagcaacgacttcgacacctacatcaccttcagcggccacctcatcaaggccgaggacgactgagggcctctgggccaccctcccggctggagagctcagctgatcctgcccctgcctgaccccgccaagccctaccgtccagcgatgacaaaaataaaatggt

SEQ ID NO: 82680 - DNA, 566 bp, Homo sapiens
  sig_peptide (484)...(349): this location contains the signal peptide sequence, MSAITLLLPSLIRLSAETESQISCKARCSQYGEPGCSARARPQGK, Run with SignalP
  misc_feature (347)...(557): similar to gi5104411 in the genepept database release 114, Run with FASTXY 3.3t00, default parameters
cctccatgacccaaactgtttaaagggactattaactaatgggcttaagccagagtaagaggagattatatgaaatgggctttcaattccttaaatcataccaaatcaatgaaaattattttgggaaagaggccttcgaatatttgtttattggcttgatgatatattttcctggttcataggaaaggtgtgtgggacccactgatttccaaagcatcagttcatccctcatgacctatgggcggaagaccctttgcggcagccctgtgactgtgactgtgtacttcccctgaggtcttgctgtggcacagcacacaggctcaccatactgtaaggagcgtgaccgtgttcttcccctgtggtcttgctctggcagagcacccaggctcaccatactgtgagcagcgggctttgcaggagatctggctctctgtttcagctgagagacggattaagctgggtaacaacagggttatagcactcatgtctatgtatatctcgagatagtcataagatttcgaccctcctagtcttgaaccctgagaaagttacatcagtcccaccct

SEQ ID NO: 82681 - DNA, 999 bp, Homo sapiens
  sig_peptide (130)...(265): this location contains the signal peptide sequence, MRRTAFILGSGLLSFVAFWNSVTWHLQRFWGASGYFWQAQWERLL, Run with SignalP
  misc_feature (241)...(928): similar to gi3877350 in the genepept database release 114, Run with FASTXY 3.3t00, default parameters
ggcacgaggagatgctgatcctacagcactcccgctgtgcctcagcagtgagctgggtgtaaaggcaggaggcttgctggggtctgacacttccctgccctcctccaggagggacacatctggggctctatgaggaggacagctttcatcctgggctctggacttctctcatttgtggccttctggaactcagtgacatggcatcttcagagattttggggtgcttctggctacttttggcaagcccagtgggagaggctgctgactacatttgaagggaaggagtggatcctcttctttataggtgccatccaagtgccttgtctcttcttctggagcttcaatgggcttctattggtggttgacacaacaggaaaacctaacttcatctctcgctaccgaattcaggtcggcaagaatgaacctgtggatcctgtgaaactgcgccagtctatccgcacagttcttttcaaccagtgcatgatatctttccccatgggtggtcttcctctatcccttcctcaaatggtggagagacccctgacgccgtgagctacccaccttccactggttcctcctggagctggccatcttcacgctgatcgaggaagtcttgttctactattcacaccggctccttcaccacccaacattctacaagaaaatccacaagaaacaccatgagtggacagctcccattggcgtgatctctctctatgcccaccctatagagcatgcagtctccaacatgctaccggtgatagtgggcccatttagtaatgggttcccacttgtcctccatcaccatgtggttttcctctggccctcatcatcaccaccatctcccactgtggctaccaccttcccttcctgccttcgcctgaattccacgactaccaccatctcaagttcaaccacggctatggggtgtcgagcgagtttcacgaacttctcggtaatcacacggaggacgagtcatcctggattctgagatacacg

SEQ ID NO: 82682 - DNA, 603 bp, Homo sapiens
  sig_peptide (333)...(468): this location contains the signal peptide sequence, MLTELLLLCVLVLCVFMSRGSCLFATIREFWPPWVGCGRGENPSV, Run with SignalP
  misc_feature (26)...(277): similar to gi403460 in the genepept database release 114, Run with FASTXY 3.3t00, default parameters
ttttttttttttggagacagttttgctcttgtctccccggctggagtgcagtggcatgatctcaactctcaactcactgtaacctccgcctcccggatactcctgcctcagcctcctgggtagctgggattacaagcacccaaccacgcccagctaatttttgtattttcggtagagacgggatttcaccatgttggccaggctagtctcgaactcatgacctcaagtgatccgcccacttcggtctcccaaagtgctggggattacaggcatgagccacggcgccttggggccccaaatgctcttgaaaccggaaaccccagggatgggagatgctcactgagctgctgcttttatgtgtgctggtgctatgtgtgttcatgtcccgcggcagctgtctttttgctactataagggaattctggccaccctgggtggggtgtggtcggggtgagaacccaagcgttggaactgtagacccgtcctgtcgactgtgtgcccctgggcatgtgtaagcctcagtttcctcatctgtaaggggggcaatgatgcctacctcacaggggtgttgtgaggattaaatgtaaggaggatagtggcaac

SEQ ID NO: 82683 - DNA, 374 bp, Homo sapiens
  misc_feature (1)...(374): n = a,t,c or g
  sig_peptide (327)...(192): this location contains the signal peptide sequence, MVAATPPGIARWALVISFPPVTPTAPHMCAAQPWGRHGSAEGTTQ, Run with SignalP
  misc_feature (194)...(374): similar to gi1478061 in the genepept database release 114, Run with FASTXY 3.3t00, default parameters
ncaaataactgtaaggaaccaagtatgactaagtgcagcagttaaggagagtggcttgagcatgaggcagggcccagatctatcaggggtccctatattccatgtaaaggatttctaactttattctaacaacaagagaaggagtttatcccagctctggcaagatggtgatgaccgtggtgctggcagctgggttgtgccctctgcagagccatggcggccccagggctgcgcggcacacatatgaggagctgtaggtgtgactggtgggaatgaaatgaccaaggcccagcgggcaattcctgggggtgtagccgcaaccatcttctgtcggatcctggaccatcgcctcccagctcgtgccgctcgtgccg

SEQ ID NO: 82684 - DNA, 344 bp, Homo sapiens
  sig_peptide (34)...(169): this location contains the signal peptide sequence, MVWHVRKSSFVWLLQLFSFISCHSVISVSPVHVPWTQCAVIPPYT, Run with SignalP
  misc_feature (121)...(344): similar to gi1944209 in the genepept database release 114, Run with FASTXY 3.3t00, default parameters
gctccctatgccccaggattaagtccaaacaccatggtgtggcatgtgagaaagtcttcctttgtctggcttctgcagctcttcagcttcatctcttgccactctgtcatctctgtgtccccagtgcatgtcccatggacacagtgtgcagtcatacccccatacaccagctgtcctaaactatttgcaatacagggaggaaggttctagatagccagatggcttcattccgtagctttgttccttccctctgtttgggatcctcttgacaagcacagaaccatctttctaggctccattaaagcataccttttctgaaagacccttcctggtcgacgcggccg

SEQ ID NO: 82685 - DNA, 425 bp, Homo sapiens
  sig_peptide (172)...(307): this location contains the signal peptide sequence, MQCAWTTLVIAPALTWSLPYHEGHSKLTYIRSGTNRRILLTCTDS, Run with SignalP
  misc_feature (77)...(221): similar to gi1633566 in the genepept database release 114, Run with FASTXY 3.3t00, default parameters
ggcacgagcggcacgagggctctttattcgtgagttttccatttacctccgctgaacctagagcttgagacgccctatggcgtccgcctggacccaaccggcggccttgagcgctgagcaagcaaaggtggtcctcgcggacgtgatccaggcgttctacgcacccgcagaatgcagtgcgcatggaccacactcgtaatagcgcctgcactgacatggtcattaccctaccacgagggccattcgaagctgacctacatacgaagtggcactaatcgaagaattttgctaacttgcactgattcatggacaggcaaatctggaattatgcagaactaattctcggcacatggagcaggactcaaaagaactagacaatctcgtctctctcttgcggggatataagcggtcgtggatcaacgccc

SEQ ID NO: 82686 - DNA, 715 bp, Homo sapiens
  misc_feature (1)...(715): n = a,t,c or g
  sig_peptide (380)...(245): this location contains the signal peptide sequence, MAATMVSIASFRLFLMSCTLVAFSPSLLLLAACGSSSPPSPLNPL, Run with SignalP
  misc_feature (50)...(715): similar to gi311337 in the genepept database release 114, Run with FASTXY 3.3t00, default parameters
cccggggcgacccacgcgtccgccgcgccccgccgccgacgccgccgccatgggctgcctcgggaacagtaagaccgaggaccagcgcaacgaggagaaggcgcagcgtgaggccaacaaaaagatcgagaagcagctgcagaaggacaagcaggtctaccgggccacgcaccgcctgctgctgctgggtgctggagaatctggtaaaagcaccattgtgaagcagatgaggatcctgcatgttaatgggtttaatggagagggcggcgaagaggacccgcaggctgcaaggagcaacagcgatggtgagaaggcaaccaaagtgcaggacatcaaaaacaacctgaaagaggcgattgaaaccattgtggccgccatgagcaacctggtgccccccgtggagctggccaaccccgagaaccagttcagagtggactacattctgagtgtgatgaacgtgcctgactttgacttccctcccgaattctatgagcatgccaaggctctgtgggaggatgaaggagtgcgtgcctgcttacggaacgcttccaacgagtaccagctgattgactgtgcccagtacttcctggacaagattcgacgtgatcaagcaggctgaactattgccaacgntcaggacctgcttcgctgccgtgtcctgacttctggaatcttgagaccagttccagttgacaagtcancttcacatgtttga

SEQ ID NO: 82687 - DNA, 448 bp, Homo sapiens
  misc_feature (1)...(448): n = a,t,c or g
  sig_peptide (174)...(309): this location contains the signal peptide sequence, MWLLPALLLLCLSGCLSLKGPGSVTGTAGDSLTVWCQYESMYKGY, Run with SignalP
  misc_feature (174)...(449): similar to gi5706456 in the genepept database release 114, Run with FASTXY 3.3t00, default parameters
tctgacgcctctgaacnccttcggaatctccggtcgacctacgcgtgcgcctcactggaagcacgacacctgattggacaacagcaccttggacgaccctagctccgttacatatacttggattgcagctggggcctagatttgctgaggacggaggccaaggagacaggaacatgtggctgctcccagctctactccttctctgcctctcaggctgtttgtctctgaagggccccggctctgtgactggcactgcgggggactctctgacagtgtggtgtcagtatgagagcatgtacaagggatataacaagtactggtgccgaggacagtacgacacgtcatgtgagagcattgtggagaccacaggagaagaaaaaggtggaaaggaatggccgcgtgtccatcagagaccacccggaggctctcgccttcactgtgaccatgn

SEQ ID NO: 82688 - DNA, 626 bp, Homo sapiens
  sig_peptide (345)...(480): this location contains the signal peptide sequence, MVCRPVFPCRRRFCPRPFLVGLVVAICLFYQTLTLRGSRKLTAAA, Run with SignalP
  misc_feature (517)...(0): similar to gi2338706 in the genepept database release 114, Run with FASTXY 3.3t00, default parameters
tgagatgaattggagtcatacgactgggtgtttccttccgagtggttttcatcagcaatccattaggaaatcatggaaactttttttttcctggctaaaaggatgaaaactgagtcatccacttttgactgtcatccatggaagagctcttattaaaagcctcagactttcgggacctatgattctttggcacaaccttttggaaaattcttaagcagggatgaagcaaacttgattggagttggggaaaaagaagacagattagtatttttcatgctgacaaaaaatagctgctatgacttttcccgcaacgtggacaggggccaagtgaagctgaactggtcatggtctgtcgcccagtgttcccttgtcgtcggcgattttgcccccgacccttcttggtgggcttagtggtggcaatctgtctcttctaccagactctgaccctccgagggtcgaggaagctcacagccgctgcccctggggctgtcccacacacatccactgaaacccaggcaagcagatgcaagaaaggattctctcaggacaaacagtgcttccttctctctggtaatgcccaggaaaccagaaaggtaagactctcataagcttaacggagacagttt

SEQ ID NO: 82689 - DNA, 757 bp, Homo sapiens
  sig_peptide (296)...(431): this location contains the signal peptide sequence, MHMCAFLHVWTCACMHLCVCVCAETGKGVKVLVREPGSFLFPNLS, Run with SignalP
  misc_feature (180)...(757): similar to gi1333929 in the genepept database release 114, Run with FASTXY 3.3t00, default parameters
gcgaaggagacagcagagaggaagctcaccatggttgtcgctctccatcccatcacgctagaatcatgtgtccaagggctcaccctggaggtgcacagcacaggtcagcctggccaggggcgaaggagacagtagagaggaagctcagggccttaggggaggccgggtgcaaacccgttctgcaccaagtgcactcggagtttgtgggtatgggtgtgtacccctgcaggtgtgcacatgtgtgcttgcacgcacatatttgtgcactcctgtgcgtatacatgtgtgcttgtgtatgcatatgtgtgcattcctgcatgtgtggacatgtgcgtgcatgcatctgtgtgtctgtgtgtgtgctgagacaggaaagggggtgaaagtgttggtgagggagcctggaagttttctcttccccaacctctcttgctctaaggagggatggggttgggggcagccattattgaaggtgatcggagaagaaagattttctgactcagaagtgactgccagtgtagcacaagcagtgtcccttgtgactgtgattctacagttctctgatcctcatgtttcctttagaggaaagaggaaaaaaggaactctgtggtgggtattgggagggaaaagaaaatagcctggtggaggcaggagggagtcgagtgtgagtaaggagcacctgcagcttttggaagtgaaagcagagagagggaaaggtagctaagacatccaggaggatcaaggggcagcgtgagag

SEQ ID NO: 82690 - DNA, 1660 bp, Homo sapiens; identical to SEQ ID NO: 80823
  misc_feature (1)...(1660): n = a,t,c or g
  sig_peptide (365)...(230): this location contains the signal peptide sequence, MAFLLSTLLNHYLACKHSSELWLQSSLNNLGKKKDKAYIFTVLAL, Run with SignalP
  misc_feature (177)...(0): similar to gi5690333 in the genepept database release 114, Run with FASTXY 3.3t00, default parameters

SEQ ID NO: 82691 - DNA, 465 bp, Homo sapiens
  sig_peptide (328)...(463): this location contains the signal peptide sequence, MVWVVLLSLLCYLVLFLCRHSSHRGVFLSVTILIYLLMGEMHMVD, Run with SignalP
  misc_feature (293)...(466): similar to gi950412 in the genepept database release 114, Run with FASTXY 3.3t00, default parameters
tgaccgcgttgcggaattcggcacgagcgccgctctgggagccgctgctggtcccggccttgcggcctgcgggggaggctgcccggaggaggcagcggcggcggcagcgcgtcctcggtccccaggaccacggcttctttcctgccagatctatccatctggccatccatccgtgggggtctgcaatggccacctttagccgccaggaatttttccagcagctactgcaaggctgtctcctgcctactgcccagcagggccttgaccagatctggctgctccttgccatctgcctcgcctgccgcctcctctggaggctcgctgcacatggtttgggtcgtgctgctcagcctcctgtgctacctcgtgctgttcctctgccgacattcctcccatcgaggcgtcttcctatccgtcaccatcctcatctacctactcatgggagagatgcacatggtagacacg

SEQ ID NO: 82692 - DNA, 471 bp, Homo sapiens
  sig_peptide (163)...(298): this location contains the signal peptide sequence, MLGPTVFNIKFVFLITALGALPSSLPHAHSAAWTLLPGPPAQQHS, Run with SignalP
  misc_feature (186)...(471): similar to gi4775290 in the genepept database release 114, Run with FASTXY 3.3t00, default parameters
tgtctattgtcccctctttgtgtccatgaatacccaatgttgagcttccaccgtcgcatcagaccatgcggggtttgcttttctctgtctgcgttaattcgctgaggatgatggcccgcagctgcatccgttgctgcagaggatgtgattttgcgcttttctatgcttgggcccactgtctttaacatcaagtttgtgtttcttatcacagctctgggtgctttacccagcagcctcccccatgcccactccgcagcctggacgctgctgccggggcctccagcccagcagcacagcactcgcctgtggaccttttcaaatatggctggtgtggagctgtgcccagggccccagccagcgggtcctgctgcccctgttgggaggacgccgcctgtcctctctgctttcacaacaacctcttccttcgggtctggctgtggcgtcacctcctccagggagctgccccggcgc

SEQ ID NO: 82693 - DNA, 353 bp, Homo sapiens
  sig_peptide (142)...(7): this location contains the signal peptide sequence, MNFLKSFLIPWSLLLPRRAGADGPWGWDRQEVARKAWQGSGQSHP, Run with SignalP
  misc_feature (179)...(353): similar to gi1345535 in the genepept database release 114, Run with FASTXY 3.3t00, default parameters
cagccctaaggatggctctgcccactgccttgccaagccttcctggccacctcctgtctatcccatccccagggcccatctgcccctgccctccttggcaaaaggaggctccaggggattaaaaacgacttcagaaagttcatggtaagaggcactgcccaggcggggcccagcagtgccagcaccagccaccatactcggacatgggcctcaattcttcaattctgggcctttccagatgtagaggagcctacccagggcctgtatctgtcggtccagtgcccgctgccgccttctcccatccccagtcctcactctccctaaagattacagagggctcccacctcgtgccg

SEQ ID NO: 82694 - DNA, 478 bp, Homo sapiens
  sig_peptide (335)...(470): this location contains the signal peptide sequence, MGRFLDEQWVYFIILLLLFFFRDSLALSPRLECSGAISVHSKLRL, Run with SignalP
  misc_feature (360)...(480): similar to gi1710216 in the genepept database release 114, Run with FASTXY 3.3t00, default parameters
ctgaagcgggagatcattctgtgaaatttgggctcctttttacctttgaaaaaattcactctaggcccccagttccatcttccttttcttttgggtgtagcagcgttgattttctgcaggtattttgaacatcagcagctgaggcaactgaacatgtttctgtgctgtcttgcacccacttctctttggaagcttcctatgtattactgcacaccttttccatgcctcctctgtcctccgcttcaaccttccagagatgctccagggtatcagtgggtcccatggaagactgtctgaaccaagacaagataagatggaaagcctcccgaaagacatgggtaggttcttagatgaacaatgggtttattttattattttattattattatttttttttcgagacagtctcgctctgtcgcccaggctggagtgcagcggcgctatatcagttcacagcaagctccgcctcccgggctca

SEQ ID NO: 82695 - DNA, 356 bp, Homo sapiens
  sig_peptide (5)...(140): this location contains the signal peptide sequence, MIFACECVLRLLLILNVSFLGAVSEETTNALETWGALRQDINLDI, Run with SignalP
  misc_feature (5)...(357): similar to gi1197500 in the genepept database release 114, Run with FASTXY 3.3t00, default parameters
taagatgatctttgcctgtgaatgtgtactccgcttgcttctgattctcaatgtttctttcttaggtgcagtctccgaagagactactaatgccttggaaacctggggtgccttgcgtcaggacatcaacttggacattcctagttttctattgagagaacatattgacgagctcatatgtgataaaactttagactctaaaaagattgcacacttcagagctgagaaagagactttcagcgaaaaagatacatattgctatttaaaaatggaactctgaaaattaagcatctgaagaccgatgatcaggatatctacaaggtatcaatatatgatacacaaggaaaaaatgtgtt

SEQ ID NO: 82696 - DNA, 923 bp, Homo sapiens
  misc_feature (1)...(923): n = a,t,c or g
  sig_peptide (298)...(433): this location contains the signal peptide sequence, MAVQQQFIIVVLRLVFPVAGTTRAPLHWVGAIPGWEWPPGDDAYP, Run with SignalP
  misc_feature (391)...(923): similar to gi156066 in the genepept database release 114, Run with FASTXY 3.3t00, default parameters
tctttattctgtctaccactgcactccagcctggctgacagagcgagattccatctcaaaaacaaaaacaaaaaagatggatgggcagggagtggaggctgtgggtagtgattgctgtccatgacccctgtctgtgagcacctgctctctaagctgagggaatccctggtgtcatcccagcagtggcgtgttccatgctgctgtaggccaggaacatggtgcagccgaagtggacggccatccagtgatgacttggccccagtggacagctgcccagtgatgggacatctggagtagatggccgtccaacaacagttcattattgttgtgctacgtctggtgtttccagtggctggaaccactagagctccgctccattgggttggagccattccagggtgggaatggccaccaggagacgatgcctacccttctcttcttgcaccaagtcagcacccatactcaggcgaggccctgtgtctcctcctcctccccagcatagtcttgctggagtcatgtagaaaagtcatggaaaggggcttgtgaagggatacgctgccttcttcctgggctctcctggtatcccactggtactcagtcattctccttccaaactgaggtgtgtgcatacatataatttgctggcccttaaaaaccacgtgtaggcctggctcctgtagtcccagcaatttgggaggccgaggcaggaggatcacctgaggtncggaattcgagaccagcctgaccaacgtggagagaccccatctttactaaaaaaaaacaaagttggctggtggtgtggtgcatgcctggggcccccctactcaggggcctgaggccggagaaacctttgaaccccggaagcggaaattgaggtggtccgaggtctgccattgcattccacctggcaaaagagggaaacc

SEQ ID NO: 82697 - DNA, 528 bp, Homo sapiens
  sig_peptide (50)...(185): this location contains the signal peptide sequence, MLWLFQSLLFVFCFGPGNVVSQSSLTPLMVNGILGESVTLPLEFP, Run with SignalP
  misc_feature (41)...(431): similar to gi4100319 in the genepept database release 114, Run with FASTXY 3.3t00, default parameters
aacattgactgcctcaaggtctcaagcaccagtcttcaccgcggaaagcatgttgtggctgttccaatcgctcctgtttgtcttctgctttggcccagggaatgtagtttcacaaagcagcttaaccccattgatggtgaacgggattctgggggagtcagtaactcttcccctggagtttcctgcaggagagaaggtcaacttcatcacttggcttttcaatgaaacatctcttgccttcatagtaccccatgaaaccaaaagtccagaaatccacgtgactaatccgaaacagggaaagcgactgaacttcacccagtcctactccctgcaactcagcaacctgaagatggaagacacaggctcttacagagcccagatatccacaaagacctctgcaaagctgtccagttacactctgaggatattaaccctttaccccattgttgggaacgggatttgggggaataaaaactttttgacgactctcgcccgtgggaatgtgaagctggatggactccatgaatg

SEQ ID NO: 82698 - DNA, 415 bp, Homo sapiens
  sig_peptide (99)...(234): this location contains the signal peptide sequence, MEPRLFCWTTLFLLAGWCLPGLPCPSRCLCFKSTVRCMHLMLDHI, Run with SignalP
  misc_feature (64)...(418): similar to gi1504040 in the genepept database release 114, Run with FASTXY 3.3t00, default parameters
tttcgtgccaccatcaccaccactgcggttgctgctgcagctgcggctgctgctctccctccggctgcttcttcgcgtggccagcagcgaatggagcgatggagcccagactgttctgctggaccactctctttctcctggccgggtggtgcctgccagggttgccctgccccagccggtgcctttgctttaagagcaccgtccgctgcatgcacttgatgctggaccacattcctcaggtaccacagcagaccacagttctagacttgaggtttaacagaataagagaaattccagggagcgccttcaagaaactcaagaatttgaacacactgtacctgtataagaatgaaatccatgcactagataagcaaacatttaaaggactcatatctttggaacatctgtatattca

SEQ ID NO: 82699 - DNA, 506 bp, Homo sapiens
  sig_peptide (53)...(188): this location contains the signal peptide sequence, MSPTASWAFLSLPLWYWGLVAGEGRGNAAPVPFQSQAFHLCLLSF, Run with SignalP
  misc_feature (139)...(506): similar to gi1143538 in the genepept database release 114, Run with FASTXY 3.3t00, default parameters
cgtgctggtgcatgtggaatacccaagtgtggttgtcacaggcatcacatacatgagtcccacagcatcgtgggcatttctctcattgcccttgtggtattggggattggtggcaggtgaaggcagaggaaacgctgcccctgtgcctttccaaagccaagccttccacctgtgcttgttgagcttcaagactcaattttgcaattatcagattccctttccccaaaatctccctgctgctgggtcactcccatccacatacaaataggcttcagtatatgtcatctttaacaaaagaggaaagctcttcctctattgtacaccctgctccggtttttacccgccttttttactcctcttcacaatataatttgagtagttacctgtgttccttctccattttctcacctcaccttttctcctcaatccacttttgctgggttttcatcccccacccccttttccccccactacttcactgactgctcttgtctaggtcgtcactg

SEQ ID NO: 82700 - DNA, 794 bp, Homo sapiens
  sig_peptide (113)...(248): this location contains the signal peptide sequence, MRSSLAPGVWFFRAFSRDSWFRGLILLLTFLIYACYHMSRKPISI, Run with SignalP
  misc_feature (113)...(644): similar to gi4580997 in the genepept database release 114, Run with FASTXY 3.3t00, default parameters
agtacccactgttgtggaattcaaaccccgctgacagccagtccagcccgggacacgcgcccagctctgtagcctcctccgtcgactcagccttaggtaccggtcaggcaaaatgcggtcctccctggctccgggagtctggttcttccgggccttctccagggacagctggttccgaggcctcatcctgctgctgaccttcctaatttacgcctgctatcacatgtccaggaagcctatcagtatcgtcaagagccgtctgcaccagaactgctcggagcagatcaaacccatcaatgatactcacagtctcaatgacaccatgtggtgcagctgggccccatttgacaaggacaactataaggagttactagggggcgtggacaacgccttcctcatcgcctatgccatcggcatgttcatcagtggggtttttggggagcggcttccgctccgttactacctctcagctggaatgctgctcagtggccttttcacctcgctctttggcctgggatatttctggaacatccacgagctctggtactttgtggccatccaggtctgtaatggactcgtccagaccacaggctggcccttttggggggacctgtggtggcaactggcccccaaaggggaaatcggtagttaataaggggggaaccggacccccccccccccccctttgtttattgtcccgggccctcccagataccgcccgctatgttgcctgaaaatgtttcggagcgcccctcgcattgtccccttcgcagcaagggctattatatatctct

SEQ ID NO: 82701 - DNA, 402 bp, Homo sapiens
  sig_peptide (49)...(184): this location contains the signal peptide sequence, MCECARACAYAALTCRLLSEVFVCTQASELRGPPVLPPLPSEPRP, Run with SignalP
  misc_feature (145)...(402): similar to gi200549 in the genepept database release 114, Run with FASTXY 3.3t00, default parameters
gtgcgtgcacgtgtgcgtgcatgtgtgcgtgtgcatgcgtgtgtgtgcatgtgtgagtgtgcgcgtgcgtgcgcgtatgctgcactaacctgccgcttgctgagtgaggtttttgtctgtacacaggcgagtgagctcagggggccacctgtgctccccccgctaccctccgagccgcgcccctgtctcaggcacctctcggacctcgctgtgtttcactgcctcctgcccacagacccaggcctgccgggccggacccgtcccagcctcccctccccaccccatgcagcccccagggggatagcccatgggcccctgtggaccctccctccccaagtggacacatggctgtgcaggccaggaggcccacagatggactgagtgctgggaaggggcggctgc

SEQ ID NO: 82702 - DNA, 737 bp, Homo sapiens
  misc_feature (1)...(737): n = a,t,c or g
  sig_peptide (294)...(429): this location contains the signal peptide sequence, MPTLSLLCVSLPFYTNARTQGLILNPYPRAATPEPPVPRHMTLTV, Run with SignalP
  misc_feature (375)...(737): similar to gi1345539 in the genepept database release 114, Run with FASTXY 3.3t00, default parameters
gtaatgtcctcgaggccgccgtcccccaacactgtcctcctggctcccgctttctgcacggccccttggcaatcctgtccatgggcggtggcttcaaaactcaactgcacggacatgaaccaccttctcctgacggaccccagaacctgctgacaacctgagcccccgagccccttagccgcagcaccccagagggcccggcctccctctaccacccctgcttcactgtctctgagggacggaccctcctccaggtgacttgtactggcagcagggacaaccttgaccctcagatgccgacactttctctcttgtgtgtgtcccttcctttctacaccaacgccagaacccagggcctcatcctgaacccctatcccagggcagccactcctgagcctcctgttcccaggcacatgacactgacagtcgtttcccacaggctcccattctccccatgcagcccttccccaaggctccccacgtggcctccgccctccccgcctccaggctctccacgggccccgccctctccccaagcacgcggaccccaccctctcctggccaggccatacttcacccgcccggcccctctctcctgtcccggcacagacacctcacactggccttggttccctgacaaatggagtggaagttccgaggcatgggtgcagctggcactcctggatcccggnctcccctccaagcttctctctctggtctcccctcagacctaaagg

SEQ ID NO: 82703 - DNA, 938 bp, Homo sapiens
  sig_peptide (148)...(283): this location contains the signal peptide sequence, MLGAAPNWDGPEVVLLLFIVSLLVIFILFVPSLYLFSPPFPNILS, Run with SignalP
  misc_feature (144)...(15): similar to gi311928 in the genepept database release 114, Run with FASTXY 3.3t00, default parameters
cgtcgtggaattcggaggatggaaccccatcagggggcccgggaaccactgagctgttaaaataaagtttgcaaacaaagaccagctgctggaagtgggtgtgccagggagtgcgcagagacacacggtgagaaaagaacaatggtaatgcttggagccgcccctaactgggatgggcctgaagtggtattgttattatttatagtatcattattagtcattttcatcttatttgtaccctccctctatctcttctctccaccttttcctaacattctatcaccagttttatgtctcccattagcaactttgtagctgtaaacaatttacttacaactttcttataccctcagttgtacccagtatttcttaacttccctctttaaaaaatgacaatattaatcctccttctcctttgttcagtgcttcacatctcaactgctaccttcgtgccttaaagtttgtactaattggtattgataacaagatatttagttctcaaatttacatgttgtgtatatattttttgtcctgataaagagactactgagagccagtaagactgaaagaatgggcatcttcatatactgctagtttgagtgtgaattggtacaatttgcatgcagtgtggctctaggtataaaacattttgagatgttgataccctctgacctagtcattctactcctacaaatatcttaaggaaataaaatcaaatgtgggcagttttacgtgaaggaggatgttctttgtagcataatttacatgaagaattagaaacaccctaaggtccatcaactaggggaggacagcagagggaacagggcagcgccaggagggctcggcagccacagcaggggctaggccggcatctggcaggatccaggttcttgtgggacaaaggatcttatagaagcaagggggacacaggctgtccg

SEQ ID NO: 82704 - DNA, 659 bp, Homo sapiens
  misc_feature (1)...(659): n = a,t,c or g
  sig_peptide (177)...(312): this location contains the signal peptide sequence, MKFVKRQGPCWRLCMVALEVVLAQGCGSGWHRSGCLLCAPQARVI, Run with SignalP
  misc_feature (233)...(0): similar to gi64238 in the genepept database release 114, Run with FASTXY 3.3t00, default parameters
ctggactgtgtgctctaactctgggggacttgtattgggccccaactttgttttctagctgctcaaggtttgcagttcactgtgctgggggaactgaggtacagcatctgcagcagagtgctggcagatgcaggggtgcctgcttccctgcaggcattcactacagtgacaaggcaatgaagtttgtgaagaggcagggcccctgctggagactgtgcatggttgcattggaggtggtgttggctcagggatgcggttctggctggcacaggtctgggtgccttctctgtgcccctcaagcaagagtaattgctaatggtgtgagaggatccactgtgctctgagcagtgttactgcaagggtggggcactggcaggggtggggcttgctggctctgtgcccaccaagcctccatttgcagtggctatcancaaggtagagggagcagactgcactttatgtgtgggaaggcaagttaaaaccaaattcccaccccatggccagaccccccccacccaaggcaaaaagttgaacttctggggcgaaagatttggccccctcggccgaagggaaacttgcagcatgctgaaaggnggggccagctggacgcattggcaattgcagacttggcctaaattgaaaactcttcccccataaat

SEQ ID NO: 82705 - DNA, 889 bp, Homo sapiens
  sig_peptide (101)...(236): this location contains the signal peptide sequence, MPSWIGAVILPLLGLLLSLPAGADVKARSCGEVRQAYGAKGFSLA, Run with SignalP
  misc_feature (101)...(820): similar to gi4877643 in the genepept database release 114, Run with FASTXY 3.3t00, default parameters
tttcgtcgcgccgctgcctctggcgggctttcggcttgttgtgttaggtgaagagcgcaccggccgcggggggtaccgagctggatttgtatgttgcaccatgccttcttggatcggggctgtgattcttcccctcttggggctgctgctctccctccccgccggggcggatgtgaaggctcggagctgcggagaggtccgccaggcgtacggtgccaagggattcagcctggcggacatcccctaccaggagatcgcaggggaacacttaagaatctgtcctcaggaatatacatgctgcaccacagaaatggaagacaagttaagccaacaaagcaaactcgaatttgaaaaccttgtggaagagacaagccattttgtgcgcaccacttttgtgtccaggcataagaaatttgacgaatttttccgagagctcctggagaatgcagaaaagtcactaaatgatatgtttgtacggacctatggcatgctgtacatgcagaattcagaagtcttccaggacctcttcacagagctgaaaaggtactacactgggggtaatgtgaatctggaggaaatgctcaatgacttttgggctcggctcctggaacggatgtttcagctgataaaccctcagtatcccttcagtgaaggcttccttggaatgtgtgagcaaataccctgaccagctcaagccatttggagacgtgccccggaaactgaagattcaggttacccgcgccttcattgctgccaggacctttgtccaggggctgactgtgggcagagaagttgcaaaccgagtttccaaggtaattgaaaacgtgctttctttctcattggtgttccttgtttattctgtttttaaaaccaatgtttaaaaaaaaaa

SEQ ID NO: 82706 - DNA, 784 bp, Homo sapiens
  sig_peptide (66)...(201): this location contains the signal peptide sequence, MDSPWAGLLWLLPTLWSSFPAPACWPSSSSSSPVCAANGAMSASR, Run with SignalP
  misc_feature (155)...(787): similar to gi2459993 in the genepept database release 114, Run with FASTXY 3.3t00, default parameters
tttcgtcctcatcctccttgcggccgtctccgcctccggctgcctggcgtccccggcccaccccgatggattcgccctgggccgggctcctctggctcctccctacgctgtggtcctcatttcctgctccggcctgctggccttcatcttcctcctcctcacctgtctgtgctgcaaacggggcgatgtcggcttcaaggaatttgagaaccctgaaggggaggactgctccggggagtacactccccctgcggaggagacctcctcctcacagtcgctgcctgatgtctacattctcccgctggctgaggtctccctgccaatgcctgccccgcagccttcacactcagacatgaccacccccctgggccttagccggcagcacctgagctacctgcaggagattgggagtggctggtttgggaaggtgatcctgggagagattttctccgactacacccccgcccaggtggtggtgaaggagctccgagccagcgcggggcccctggagcaacgcaagttcatctcggaagcacagccgtacaggagcctgcagcaccccaatgtcctccagtgcctgggtctgtgcgtggagacgcttgcgtttctgctgatttatggagttctgtcaactgggggacctgaagcgttacctccgagcccagcggccccccgagggcctgtcccctgagctaccccctcgaaacctgcggacgctgcagaggatgggcctggagatcgcccgcgggctggcgcacctgcattcccacaactacgtgcacag

SEQ ID NO: 82707 - DNA, 475 bp, Homo sapiens
  misc_feature (1)...(475): n = a,t,c or g
  sig_peptide (76)...(211): this location contains the signal peptide sequence, MGWAPLLLTLLAHCTGSWAQSVLTQPPSESEAPGQWVNISCTGSG, Run with SignalP
  misc_feature (100)...(478): similar to gi434046 in the genepept database release 114, Run with FASTXY 3.3t00, default parameters
agagattagaatagatnaccataggccagagaggaggaattcgcacaggagccagcactcaagacaatctccagcatgggctgggctcctctcctactcactctgctcgctcactgcacagggtcctgggcccagtctgtgctgactcagccgccctcggagtcggaggcccctggccagtgggtcaacatctcctgcactgggtctggctccaacctcggggcaggttttgatgtacaatggtaccagctaattccaggaacagcccccaagctcctcatctttaataacaatcgtcagccctctggagtccctgaccgattctctgcctccaagtctggaacctcagcctccctaaccatcaatgatctccagcctgaggatgagtctgaatattactgccttgctatgacagcagcctcactggtgtcttcggaactgggaccaaagtcacctgcctgagtcagcccaaggc

SEQ ID NO: 82708 - DNA, 1979 bp, Homo sapiens
  sig_peptide (551)...(416): this location contains the signal peptide sequence, MASKASSLLFSPVLGFTLLKSLSFCFCSSNWRLFLSSSKSFCCCS, Run with SignalP
  misc_feature (36)...(1979): similar to gi5733726 in the genepept database release 114, Run with FASTXY 3.3t00, default parameters
tttcgtggcgaaggcagcggcaggtcgggagcaagatggcgctgcggccaggagctggttctggtggcggcggggccgcgggagctggcgcggggtccgccgggggaggcggcttcatgtttcctgttgcaggtgggataagaccccctcaagcaggcctgatgccgatgcagcaacaaggatttcctatggtctctgtcatgcagcctaatatgcaaggcattatgggaatgaattacagctctcagatgtcccaaggacctattgctatgcaggcaggaataccaatgggaccaatgccagcagcgggaatgccttacctaggacaagcacccttcctgggcatgcgtcctccaggcccacagtacactccagacatgcagaagcagtttgccgaagagcagcagaaacgatttgaacagcagcaaaaactcttagaagaagaaagaaaaagacgccagtttgaagagcagaagcaaaagctcagacttttgagcagtgtgaaacccaagacaggagagaagagtagagatgatgctttggaagccataaaaggaaatttagatgggttttccagagatgcaaaaatgcaccctactccagcatcgcaccccaagaaaccaggcccttccttggaggagaagttcctagtatcttgtgatataagtacatctgggcaggaacaaattaaattaaatacttctgaagttggccacaaagccctaggcccaggttccagtaagaagtatcccagtttaatggccagtaacggggttgctgtagatggatgtgtaagtggtaccaccactgcagaggcagaaaatacttcagatcaaaacctgtcaattgaagagagtggtgtgggagtatttccctcacaggatcctgctcagcccagaatgcctccttggatttacaatgagagtttggttccagatgcctataagaaaatcttagaaaccacaatgactccaactggaatagatactgccaaactgtatcccattctgatgtcatctgggcttcccagggaaactcttggacagatatgggccttagctaatcgaactacacctggcaaacttacaaaagaagaactttataccgttctagccatgatagcggtaacacagaggggcgttcctgcaatgagtcctgatgctttaaaccagttcccagcagctcctattccaactttaagtggcttttctatgactctgcctacaccggtgagtcagccaactgtgataccttcaggtcctgcgggctccatgcccctcagccttggacagccagtcatgggcattaaccttgttggaccagtgggtggagctgcagcccaggcttctagtggtttcataccaacctaccctgcaaatcaggtagtaaagccagaagaagatgacttccaggattttcaagatgcttctaagtcaggatcccttgatgactcattcagtgatttccaagagttgcctgcttcttcaaaaacaagtaactcccagcatggaaacagtgccccttctttgttgatgccacttcctggaactaaagcattgccttcaatggacaaatatgctgtgtttaaaggaattcagctgacaagtcctctgaaaatactgttccacctggaggtaaaaagttggtaaattcataaacttgtgaatgctaaattgcatactatttaaattgtatgaatctttaagtggtggtcttctgtgctaaatatgtaaaatgcctgtataccacatgttaatagtgtttggttaaaccaatctgcctcacttcctggagctgtgatttcaagattcctaaccttaactgagcttctgtcctttctatcatagatcctggtgataaatatagtgctttcagagaacttgaacagacagcagagaataaacctttaggtaagtttttgagtcctcaaaaggataaattatttccatttttaataaaaaaggggttttcgatggtta

SEQ ID NO: 82709 - DNA, 368 bp, Homo sapiens
  sig_peptide (216)...(81): this location contains the signal peptide sequence, MKQGGGDWTIYWPSTCFFPRLLSCLSYLAVQLLSAEYFLLSEVTY, Run with SignalP
  misc_feature (187)...(368): similar to gi1336449 in the genepept database release 114, Run with FASTXY 3.3t00, default parameters
caagtaggggtttaggaaatatcactaactatgtgaggtaatgaatgaacaactaaacaaatgcacataaatggtatacgttacttctgagagaagaaaatattctgcagagagaagctgtacagccagataagacaaacaagatagcaagcgtggaaagaaacaggtggagggccagtaaattgtccagtctccccctccttgcttcatggaaccaacctccaactgatccatggactattaggtttaacttttactgtagagcttccagatcagagcatagtattgcagaaacagcaaaacatttggggaaattcagggggaagaaatcattacaaaaaaacaaaacaaacctacatagcaactgc

SEQ ID NO: 82710 - DNA, 402 bp, Homo sapiens
  sig_peptide (63)...(198): this location contains the signal peptide sequence, MFLWWVSGTLWDWRPRGMSGKTDLPRPPAQTCCSQLTQRLPIRRG, Run with SignalP
  misc_feature (325)...(361): similar to gi53861 in the genepept database release 114, Run with FASTXY 3.3t00, default parameters
acacctacttgtttgaaatgaatctaaaatgtctgaaagttgagtgagatgtttcttaagaaatgttcttgtggtgggtgtcaggcaccttatgggactggagacctcggggaatgtcaggaaagacagatcttccccgaccccctgcccaaacctgctgctctcagctgacccagaggcttcctataaggagaggggccaccaaggagagcacagtgcggcttttctaacctaggagggttttttgtcttacggcaggttttgcttaacaaacgggactgtgggatgggaaatgataccatcctattcttttgttgtgtttgctggtgcaatctgatttctatctgcaagtgcacagtttttaaccatagagagcttatttatctcttttgaaaaaaaatt

SEQ ID NO: 82711 - DNA, 1028 bp, Homo sapiens
  sig_peptide (248)...(383): this location contains the signal peptide sequence, MRTHTRGAPSVFFIYLLCFVSAYITDENPEVMIPFTNANYDSHPM, Run with SignalP
  misc_feature (248)...(1017): similar to gi6002669 in the genepept database release 114, Run with FASTXY 3.3t00, default parameters
accggatggagttccgggtcgacccacgcgtccgggctgcagcagcgcattctggggcatggttcggcgggggcgcggagggctcggttcggagggggccgggagcccgggcgccctggagtgaggaggaccgggagctggctctggaggctgcggaggcgacgccggagagaacgaagcctcggctgggagcggatctttcgaagatggtttggctgccttggagatttggagatctgatgccacgatgaggactcacacacggggggctcccagtgtgtttttcatatatttgctttgctttgtgtcagcctacatcaccgacgagaacccagaagttatgattcccttcaccaatgccaactacgacagccatcccatgctgtacttctccagggcagaagtggcggagctgcagctcagggctgccagctcgcacgagcacattgcagcccgcctcacggaggctgtgcacacgatgctgtccagccccttggaatacctccctccctgggatcccaaggactacagtgcccgctggaatgaaatttttggaaacaacttgggtgccttggcaatgttctgtgtgctgtatcctgagaacattgaagcccgagacatggccaaagactacatggagaggatggcagcgcagcctagttggttggtgaaagatgctccttgggatgaggtcccgcttgctcactccctggttggttttgccactgcttatgacttcttgtacaaccacctgagcaagacacaacaggagaagtttcttgaagtgattgccaatgcctcagggtatatgtttgtaaccttaatactaggcgcggatggcgattcaaatacctgcacaatcatcagcccaccaactgtatggctttgctcacgggaagcctagtcctgatgaatcaaggatatcttcaagaagcctacttatggaccaaacaagttctgaccatcatggagaaatctctggtcttgctcggggaggtgacggatggctccctctgtcgactgtttgc

SEQ ID NO: 82712 - DNA, 400 bp, Homo sapiens
  sig_peptide (157)...(292): this location contains the signal peptide sequence, MLVIVCIFLTLIVQQVIYSHWRRFNRYKRYGVYLSPIMFHSYWLL, Run with SignalP
  misc_feature (263)...(400): similar to gi164730 in the genepept database release 114, Run with FASTXY 3.3t00, default parameters
ctttgtaataggtgagtgagatcactagcaagcctcttgattagtggagacttgtattctcttctggggaatgagaatcagagactctgctgttgaaggagcaaaacttttgtgatttttgaaaaatttgcttctgaatggtcatccttgacaaatatgttggtaatagtgtgcatttttcttacattaattgtgcagcaggtaatctattcacactggagaagattcaatagatataaaagatacggagtatacctctctcccatcatgttccacagctactggctccttgtgtatgtctttccagacatagcctatgctcatgtaaacattctgtacgtgttctttttgtttgtattcctaaagatgaggacccattgtatactctgcaccagctccc

SEQ ID NO: 82713 - DNA, 637 bp, Homo sapiens
  sig_peptide (228)...(363): this location contains the signal peptide sequence, MCLTSTLCRVLLGQLRDSVENILTLFKFAVTSVALGSCPSESALG, Run with SignalP
  misc_feature (250)...(89): similar to gi2653351 in the genepept database release 114, Run with FASTXY 3.3t00, default parameters
taaacagccatccgagggaggtgacttttgtctacagaaaaagcaagaatgtggcagcctgcacagccccaatacacatcttccttggcaatgtgagctgaagccagcatgggcaagtccggcccagctctgagcgcttggccctgggaagccagcggcacccccagcccttcgggccctgttactgtcccctggcaggaaggctcacgcctgtgggcagccagggaatgtgtctgacctccaccctatgtcgggtgcttctgggacagcttcgtgactcagttgaaaacattctgactctcttcaagtttgcagttacatctgtggctcttggaagctgtcctagtgagtcagccttgggttaagcctgaggagaccaagctccaacacctttgtgcactcatgtacgtgaattcttgcttgcagtgaatgagacctgaacaaccctattgggtgccatgtcctgcgtgtggcccaggcgtaccttttcttgtagattcacatgagaaacccgtcacctatccatgtgctctgaaaggtggactgaggtctaatccctttctgtgccagattttctgagggttggccttagcacctacgagatgaatagagcatggagacaccctgaccatttagt

SEQ ID NO: 82714 - DNA, 729 bp, Homo sapiens
  sig_peptide (452)...(587): this location contains the signal peptide sequence, MLIAMGALLLCLIGMCNTAFRSSVPNNQNWPSVWSIVQVATWWLG, Run with SignalP
  misc_feature (203)...(583): similar to gi4127539 in the genepept database release 114, Run with FASTXY 3.3t00, default parameters
catagaggaaacaagggagagactttccctctttgcattgacatttcatcattagatgtgttgccagttggcaccacccttcctgctctgttctgctattgtcccctcatgatttgtcctcttgtgtgtcaccccctagtctgactgacagtactccacaagcttgcctgccatgggctgtcgggatgtccacgcagccacagtcctttccttcctgtgtggaatcgcctcagtagcaggcctctttgcagggactctgcttcccaactggagaaaattacgattgatcacattcaacagaaacgagaagaacctgactgtttacacaggcctgtgggtgaaatgtgcccggtatgacgggagcagtgactgcctgatgtacgacactacttggtactcatcagttgaccagctggacctgcgtgtcctccagtttgccctacccctcagcatgctgatcgccatgggtgccctgctgctctgcctgattggaatgtgcaacactgccttcaggtcctcggtgcccaacaatcaaaactggccaagtgtctggtcaatagtgcaggttgccacctggtggctgggctgctatttttcctggcagagctcaaaggtagcagtggagtgctggagccaagtggtactggcccacaagaaccagtgtgtacatctcctcccaactgcccaacctgtgacatcatattggttgcttggaattggccagggtga

SEQ ID NO: 82715 - DNA, 463 bp, Homo sapiens
  misc_feature (1)...(463): n = a,t,c or g
  sig_peptide (390)...(255): this location contains the signal peptide sequence, MWGSWLWICWHIGARRIRGCHVSEWGLQENLPEDRSGLVCWAPHG, Run with SignalP
  misc_feature (312)...(463): similar to gi2108256 in the genepept database release 114, Run with FASTXY 3.3t00, default parameters
ctgccattaccagggcagctggagatctgtgtggtcagaagctgtaatatgtgggcctcagagagctctcagcattccatctgtggcatctgcctctcactcagcagcacacgtctgccccattcccctccacctcctcctcaggttccactctatccccatggggcctcggtgccctcatgtcgtggctttctgccacccagcctacaggacctgggctatgcttccaggacacagccctcgagaaacaaatgaccatgaggggcccagcacaccaggccactcctgtcctcgggtaaattctcttggagcccccattcgctcacatggcaccccctaatcctcctggcccctatatgccagcatatccagagccacgacccccacatgcatcttgactgtgcccccccacctgcctcctccgaattcctccgcacttgctagtgatcncagttcagctctt

SEQ ID NO: 82716 - DNA, 1303 bp, Homo sapiens
  sig_peptide (383)...(518): this location contains the signal peptide sequence, MVLYWFMGFMVTSGDTSAWAMKCSRTGFWMPGSFTLSLVPEWPSS, Run with SignalP
  misc_feature (91)...(1167): similar to gi4895182 in the genepept database release 114, Run with FASTXY 3.3t00, default parameters
cggacgcgtgggggcctggagcccgctctaggtgggtgtcccctcggtgcttcccagctgccgtctgcaccagccatggactgctacacggcgaactggaacccactcggggactctgccttttaccggaaatatgagctgtacagcatggactgggacctgaaggaggaactcagggattgcctggtggctgctgcaccctatgggggccccattgcactgctgaggaacccctggcggaaggagaaagctgctagtgtgaggccagtgctcgatatatactctgcttccggcatgcctctggccagcctgctgtggaagagtggacccgtggtgtccctgggctggtcagctgaggaggagctgctctgtgtgcaggaagatggtgctgtactggtttatgggcttcatggtgacttccggagacacttcagcatgggcaatgaagtgctccagaaccgggttctggatgcccggatctttcacactgagtttggttccggagtggccatcctcacaggggcccacccgcttcaccctcagtgccaatgtgggtgacctcaaactccgccggatgccagaggtgccaggtctgcaaagtgcaccctcctgctggactgtgctgtgccaggaccgagtggcacacattcttctggctgtggggcctgacctttacctcttggaccatgcagcctgctccgcagtgacgccccctggcctggccccaggagtaagcagcttcctacagatggctgtctccttcacctaccgacacctggcactcttcacagacacaggctacatctggatggggacagcatcactcaaggagaagctatgtgagttcaactgcaacatccgggcacctccaaagcagatggtctggtgcagccgtcctcgtagcaaggagagggccgtggtggtggcctgggaaaggcggctgatggtggtgggcgatgcacccgagagcatccagtttgtgctggatgaggactcctacctggtgcctgagctcgatggggtccgcatcttctcccgcagcacccacgagttcctgcatgaggttccagcggccagcgaggaaatcttcaaaattgcctcaatggcccccggggcgctgttcctggaggctcagaaagagtatgacaaagagagcctgaaggcgggccgaataccttgcggaagatccccgagctgggcccagctgaccccggcccgggcaacaagtgaattgaaggctgccggtgccttgagcccccaccctaccttgcggaacaagtttgctttagggcctcccccattc

SEQ ID NO: 82717 - DNA, 1938 bp, Homo sapiens
  sig_peptide (1676)...(1541): this location contains the signal peptide sequence, MALRHLALLAGLLVGVASKSMENTAQLPECCVDVVGVNASCPGAS, Run with SignalP
  misc_feature (1571)...(1815): similar to gi2447036 in the genepept database release 114, Run with FASTXY 3.3t00, default parameters
ttttttttttttgagtaatgccgactttatatcagcacacccagtgcccccacgttcccgctggcccaggtcccggagaccatgatggcacccacagtggacttcgcaaaggagcgtggggaccccgaaggccaggccacccctcagatgggggtcccatgctaaagcagacggtgccggtgccgcaggctgtctgagacccacggtggagcccgggcctggcgtgcgggaggcggccacgacggcgcctttctcccaggaactccgggagggaccccaggactcagcgccagggcagccttggcaggtgcagtgaggcagtgacttgtgggggttagatgtgggcctgccccacgtgggcagggatcagccaggcatgggggtccagcggatccgagcggggccacagagctctggaggacttttctgcacaatgaatttctgcttaaaaacagagatcaagaggaagctctatcctgcagctccggaaatgggtggctgcgtgcttggggtctccgccacgcgggaggacagcccagaggcaccctggtctcaggcagctggttcctaggctgtgtcctccccactggccgggcaccggctggaacggcacgaggaccagcctcactgttctcagaggggtctcgggccactgggtgtggtggtgctggaggagtcctgcccgctgtgggctctggagggcacggcagcagagcccctggcttttctaggcagagcggcacctgccccatagatcgtgccagctttggctgcaggcgctggggcctcaccgtgtttcctgggggggcccggacccccaagggcctcgatctgaagctctgaggtctcatggatgcctgctcctggtccgataaacgagatggctgtggtggggaggagcctcaggcggcccgggaccctttggcgtccgtcgctgggaggcggagggacccagagccgaggctgtgctcaggactgtcccgggcgccgggcgatgccaacactttgtgctggttcccgccaaggggtcggcctccgggtccctgccgccaagtgcgtggcgtggtctcggcctccaggtcagacattgctgatacgggcctcccccgggaaggcagcgggatccgtggccctgtccaggggccgctcccgcctgacgtagcgcggcttccgtactgaggactgtggcggggggatcattgcagccgttcgccaggctgcagggccggagctttgtttcttctgtagcaggccctggggagtttactggagcgcttgaggtagaagaacccagctacggagaggatgaggccggagctaatgaagaacgtgcccaggaagagggaggcggccacgcgcggagccccaggatgtggccgcccgggggtccctgagcttctgttcatggggaatggcgcacccgggccagcaaagcttttacactcggagccgttgtaggctgggagggttccgttcccacagcggacgcagctggcgctcccgtccgcgttccagcgcctgtaacagcctggaccacacagacttgcgcctgggcagctggcgttgacgcccaccacatccacacagcactcgggcagctgggccgtgttctccatggacttgctggcgactcccacgagaaggccagccaggagggcgaggtgccgcagcgccatgccaggagcagatgcgcagagcctgcccctccaggatggggactaccgacatcagccctttgcccgcctgggtgttcaggggttagctctgggagctcatgggctcagctgagccctgcagaccccggcccagtcctagaagtgaaatgcgtgccgacaagagcacggaatataactggagtccgctcgctgaggttctgtgaagtacatttaatctccagaggaaccacccggcacgaaatcgtcgacccgggaactccgc

SEQ ID NO: 82718 - DNA, 620 bp, Homo sapiens
  sig_peptide (136)...(271): this location contains the signal peptide sequence, MEQLLGIKLGCLFALLALTLGCGLTPICFKWFQIDAARGHHRLVL, Run with SignalP
  misc_feature (154)...(601): similar to gi1707054 in the genepept database release 114, Run with FASTXY 3.3t00, default parameters
aaagaagataccaacagcctcctgaaactcacgagagtggacactccagtgttgaccacctaagataccactcctgctccaaagattacagatcccttgtcattctgactcctgggcttaccctacaccccagagatggagcaactactaggaataaaacttggctgcctgtttgccctgttggctctcactctgggctgtggccttactcccatctgcttcaaatggttccagattgatgcagccagaggtcatcaccggctagtcctcagactcctgggctgtatttctgctggagttttcctgggagcagggttcatgcatatgactgctgaagccctggaggaaattgaatcacagattcagaagttcatggtgcagatcagcaagtgagagaaattcttctggtgatgctgattcagctcatatggagtatccctatggagagctcatcatctccctgggcttcttttttgtcttctttttggagtcgctggcattgcagtgctgtcctggggctgctggaggatcgacagtgcaggacgaagaatggggtggggctcatatcttcgaactccacagccatggacatttaccctcaccctcaaagggtcccctcc

SEQ ID NO: 82719 - DNA, 851 bp, Homo sapiens
  misc_feature (1)...(851): n = a,t,c or g
  sig_peptide (47)...(182): this location contains the signal peptide sequence, MLSMLRTMTRLCFLLFFSVATSGCSAAAASSLEMLSREFETCAFS, Run with SignalP
  misc_feature (68)...(854): similar to gi3357909 in the genepept database release 114, Run with FASTXY 3.3t00, default parameters
cgagtgtccacaggaagggaactatcagctcctggcatctgtaaggatgctgtccatgctgaggacaatgaccagactctgcttcctgttattcttctctgtggccaccagtgggtgcagtgcagcagcagcctcttctcttgagatgctctcgagggaattcgaaacctgtgccttctccttttcttccctgcctagaagctgcaaagaaatcaaggaacgctgccatagtgcaggtgatggcctgtattttctccgcaccaagaatggtgttgtctaccagaccttctgtgacatgacttctgggggtggcggctggaccctggtggccagcgtgcacgagaatgacatgcatgggaagtgcacggtgggtgatcgctggtccagtcagcagggcaacaaagcagactacccagagggggatggcaactgggccaactacaacacctttggatctgcagaggcggccacgagcgatgactacaagaaccctggctactacgacatccaggccaaggacctgggcatctggcatgtgcccaacaagtcccccatgcagcattggagaaacagcgccctgctgaggtaccgcaccaacactggcttcctccagagactgggacataatctgtttggcatctaccagaaatacccagtgaaatacagatcagggaaatgttggaatgacaatggcccagccataccctgggtctatgactttggggaagcttaagaagactggctcttattactcaccggatggtcaacgggaatttggtccagggatccctcaaattcccngggttaataccggaaagacaggccaccccctttgtgcttggaataaagtt

SEQ ID NO: 82720 - DNA, 496 bp, Homo sapiens
  misc_feature (1)...(496): n = a,t,c or g
  sig_peptide (373)...(238): this location contains the signal peptide sequence, MRAWCIWLGVWGASRQGWSGDLGIPHSLPECHEGPGFGWCFCPLR, Run with SignalP
  misc_feature (294)...(496): similar to gi3093373 in the genepept database release 114, Run with FASTXY 3.3t00, default parameters
atgggaccctgccacgctcctggagatcccntgctgcttgctgctaggcacgcggtgctcactcaaggcaggatctgcccgcaccccagtgctctccaggcaggtgcccgaatgggaaagaggcaggccagcggtgcagcagggcaaaggcaggctgaggcgggggcacaggcctccaggcccccagagcagcacacagggtggagccacaggccctgccctcagacaccacgccctcaagggacagaaacaccagccaaagccaggcccctcatgacactcaggcaatgagtgaggaatgcccaagtccccactccacccctgtctgctggcaccccacactcccagccagatgcaccacgcccgcatgccatctgtcctgctcctctccaggctctgcatgggatctcacagctgcatctcatgcctcccgtcgacccgccaattccagnccgggnggtcgtgcctaaccctttcaagtttttcatacccaccg

SEQ ID NO: 82721 - DNA, 995 bp, Homo sapiens
  sig_peptide (181)...(316): this location contains the signal peptide sequence, MVFPVMYNLIILVCRACFPDLQHGYLVAWLVLDYTSDLLYLLDMV, Run with SignalP
  misc_feature (118)...(995): similar to gi538129 in the genepept database release 114, Run with FASTXY 3.3t00, default parameters
gtacatgcgtgcaattctcgggtcgacgatttcgtcttcgctgtagacgatttcgtcgcttggagtggaagagtgggtgtggaggggcgaggctatcacgaaaagagaggaggaatcagtaggaagttgctgcctgtcctggacccatctggggattactactactggtggctgaacacaatggtcttcccagtcatgtataacctcatcatcctcgtgtgcagagcctgcttccccgacttgcagcacggttatctggtggcctggttggtgctggactacacgagtgacctgctatacctactagacatggtggtgcgcttccacacaggattcttggaacagggcatcctggtggtggacaagggtaggatctcgagtcgctacgttcgcacctggagtttcttcttggacctggcttccctgatgcccacagatgtggtctacgtgcggctgggcccgcacacacccaccctgaggctgaaccgctttctccgcgcgccccgcctcttcgaggccttcgaccgcacagagacccgcacagcttacccaaatgccttttgcattggcaagctgatgctttacatttttggccgcatccattggaacaactgcctatacttttccctatcccggtacctgggctttgggcgtgaacccatgggtgtaccccggaccccggcgccaacctgggttttgaccgcccgggggggccccgtaacctcttataagctttttaattttttccaccccctggatacctggattatacaggggggcgaataaaacccggccgcccagtcccagggaaacaaaaaagaacctctcttcttgtgggggggcgactttttctagttagcgccggtcaatggggtttcccccccccccctccttgggccttcccaggagagctttgtgcccttctcaaagcacgagagcactgtgcgaaatgggcgctctttctttccccaaagaactttgcgcccttgggttcc

SEQ ID NO: 82722 - DNA, 860 bp, Homo sapiens
  misc_feature (1)...(860): n = a,t,c or g
  sig_peptide (58)...(193): this location contains the signal peptide sequence, MGLLGVLWNTTLHMCRMRLQDTGQKIRTGSCELHGSQSSHSTGNL, Run with SignalP
  misc_feature (162)...(0): similar to gi3135041 in the genepept database release 114, Run with FASTXY 3.3t00, default parameters
caagaataccagaaagaatggagtcctggagagaaagagctacttatataaatctgcatggggctccttggagtcttgtggaataccaccctgcacatgtgtaggatgagactgcaagatactgggcagaaaataagaacagggagctgtgagctgcatggttcccagagctcacacagcaccgggaaccttcgagttctgcccagccacaatggagagaccttgcattgagtcaagagcccaggagggccgtgcctgagatgcatggctaaaagagctttttaggaaaggttactacagacctaccatgaccagggtgaaaaaacaagcctcagaagcatgaaggtgatccacaagcaacttaggagttgaaagaaaaagagagagagagagaggagggaggaaggaagggcggaaggaaaagaaaccagtactctttaaaggaagataacaaaatccagacactcaacaatgtgacattaaaaagttccatatccagtgaaaacagtcactggatatgttctagattttaaaagactaaaaagggctggaggccaggtgcagtgactcacgcctgtaatcccagcactttgggaggctgaggtgggcagatcacttgaggtncggagttcgggaccagcctggccaatatggtgaaacctcgcctctactaaaagtgcaaagattaaccgggtgtggggcacacgcctgtggcccagctactcgggaggctgaggcatgagaattgttgaacctgggagcagatgttgagtgagccgaaatataccatggattcagcctggcgacgagcgagatgttcaaaaaaaaaaagaaaaaaaaaagacgccgggggtgccgcg

SEQ ID NO: 82723 - DNA, 900 bp, Homo sapiens
  sig_peptide (91)...(226): this location contains the signal peptide sequence, MSLVKLFNLLVFSYRRGAVITIKIEVKIKVTYVKCQAHGERLING, Run with SignalP
  misc_feature (193)...(53): similar to gi1017807 in the genepept database release 114, Run with FASTXY 3.3t00, default parameters
tttcgtggtatatgcataagaaaaatgaagtgcatgaactttatattcagaaagaatgggtttgaatcctgagtcttgtgcttgttagctatgtccttagtcaaattatttaacttgttggttttctcatatagaagaggggcagtaataacaattaaaatagaggtaaagattaaagtgacatatgtaaagtgccaggcacatggtgagaggctaataaatggccactatgactactcagcctgccacgtcataaagctgatgttctgtgcagaggaaaagaaacctcatcaatagtaagagccacatctatcaggagaaagctgtcagtctctgaagcatgttcttttttcaagcccagagagactccacttcaccaccttatcttgcccaaggctccaagcgtatgttcctgatgcttctttaaatccccaaagtgcgaaggcatgcctgatatatttgacattcagtaaatattaatgaatgatgacttttctgtggtgaaatgcaccccactttcactgttcctttcggatttgcacttacttggatacttgtggatgattctgaagagctggttgttcacatctgtctctgttatgtggcagagatatttctcatttaacttgacagggtatttcaagatggagaacaccctgtagaagccattcatctggctctccaggaattccacgatgctgggggttgctaagtcccctttctgtccggtccagccatggcacaaatgggcctgagggacctagccttttggaaaggcctgtggcgcccatccttctacatcaattctgggaaaattggacccgggggcatttcaaagagcttctaattataagcttaattgtacttttcacctcgttgcactggggggggaagggtgcc

SEQ ID NO: 82724 - DNA, 403 bp, Homo sapiens
  misc_feature (1)...(403): n = a,t,c or g
  sig_peptide (302)...(167): this location contains the signal peptide sequence, MCIVACAGARVLLLPLEQAPPFPGYPPSRVGLDTSSLPPEGPGGP, Run with SignalP
  misc_feature (167)...(403): similar to gi2961551 in the genepept database release 114, Run with FASTXY 3.3t00, default parameters
gggctaagcacagaatgtgaacagaactcctatgtctcctgtgccccagagatggaaggacagtggtggacacagccatcggtgtaaaaacgtcaatatatagatacatccatacttacacactgtgagaaaaagaacagcagaacctaagacagaacatcggaaggggccccctggcccttcaggtggtaatgaagaggtatccagcccgacccgggagggaggatacccagggaaaggaggagcttgctccaggggcagaagcagcacacgtgcaccggcacaggcgacaatgcacatggccttccaggaccaccggccagtgggctcagggctcagtgagagaggaagaggaggatggcaaggcaggcaggccactccacacaaggccagnnnaggcccc

SEQ ID NO: 82725 - DNA, 966 bp, Homo sapiens
  sig_peptide (226)...(361): this location contains the signal peptide sequence, MGDYRNVRLLGSFSFISVTISRVIFLLSLLQPSGVGILFADSGGT, Run with SignalP
  misc_feature (365)...(0): similar to gi190475 in the genepept database release 114, Run with FASTXY 3.3t00, default parameters
tccatcctatttgtgatacttccctgactttacatctctctttatatattatgagctcatttttgcccccctcttgctcatctaccttctggtgaggatgttcttttccgcatatggcttttttatccccttggaacagtcctttgctagttaatggaatatttaatgagacatttgggagggaaagatagcccttgcctagtccagccttaggcaatttgggggatgggtgattacagaaatgtcaggctcttgggcagtttttcctttatctctgtcacaatcagtagagtaatttttcttctctctcttctacagccatcaggagttggtatcctctttgcagattctggtggaactggatacacacatcactgcctttgggtctaatcctttcatgtccctcaaacctgaacaggtctattccagtcccaacaagcagccagtatactgcagtgcatactatatcatgtttcttggaagctcctgtcagctggataataggcaattagaagagaaagtggacggcgggatttaaatagatcataactggacatctggaaaacggggagtttgtgatgaaattaccctgctaatgccaggttcttgcaaactttgaaaaacattatattctaaacctcatttactgtttgggtaaaaattctaagctgaatgagagtttctgtataacataactggtttctttctttttttgagatggagtcttgctctgttgcccaggctggagtgcagcggcatgatctcgactcactgcagcctccgcctcctgggttcaagtggttctcctgcctcagcctccctagtagctgggattacaggtgcacaccaccacacctggctaatttttgtatttttagcagacagggtttcaccatgttggccaggctcgtatcaaacccttgaccccaggtgatctgcctgcctcagcctcccaaagttctggga

SEQ ID NO: 82726 - DNA, 401 bp, Homo sapiens
  sig_peptide (224)...(359): this location contains the signal peptide sequence, MIESVATVLILNVLVIASLMLNSHLLGDSKGWLLPLEAFCFLISL, Run with SignalP
  misc_feature (297)...(401): similar to gi60968 in the genepept database release 114, Run with FASTXY 3.3t00, default parameters
gggttgtcagcataaaagtgaatcacccatgagcctttttctcccccaaggcatttcatttagtcaacttggtattaatttagttggtactctttagttgactcgaacactgtgtgtgttgatggtgtgagctgatgtttattaagctgttaatgttttacagacttgatgggttcccatttggatctgtgtgctctttcctttagcagcagggctattattcatgattgaatctgtggccacagttttaattttgaatgtactggtgatagccagcctcatgctaaacagtcatttgcttggtgattctaaaggttggcttcttcccctggaagcattttgctttctcatttcacttatgttgcattcttagtcatgaagagctctcttgtctgtcctgc

SEQ ID NO: 82727 - DNA, 1803 bp, Homo sapiens
  sig_peptide (645)...(510): this location contains the signal peptide sequence, MWPGRIMTVTVVLLCCSTASIWPCLSHSASPSRTCPNFVGRSTRS, Run with SignalP
  misc_feature (347)...(0): similar to gi2337968 in the genepept database release 114, Run with FASTXY 3.3t00, default parameters
acgtatcaacaaaggatcctttattgaccagagcaggaccgtggcatttatatatttatatttatatatatatatatatatatacatatatttttatatatatatatatatatatatatatatataaaagtttgaagatctggcaggcagtgatcctattgtccgcccaccacccccagcactgatttcctgctccctgcacggggaagggggaggatgactgctccacccaggccacagggccacactcccctgcaaacagaggaagaaaggggcttttctgtagccaccccctgcacatcagaaatcaacaagtattctctcaaagaaaaaaaaatacagaaattgaaacatttaaatatgaaaaaccaaagggaagtgagtgggaagaggcaagagaggaaaggaactggagtttcttgggaagggactcccatgtctcccttcccatttatgggcttggggtctggggtacgaggctcacacagtgagtttgcagtgacacagctccttgtagatctgccgacgaagtttgggcatgtcctgctgggtgaagctgaatggctgagacagggccagatgcttgcagtactgcaacacaaaagcaccacagtcactgtcattattctgcctggccacattcattttgaagtaacctttccagccctggtggaaatccagtcggtctttctttaccgcctctgcctgtagatacttggcaatatgcttagggcagcggcggtttagggtacgctgcgagtcaaaataggtgatggtgcgtcgcctcacatcaacagagatgagggaccaatgcacctccaggtggatggggattagcagtagctccttattgaagatgtccacgtttttggtccaccttttcaccccatcataacccttggtacggagtttatcaatagaagaaactattgaagaaatgcacctttttcagggactgtgtccatgaccaggtctccatacatgttcatcacctggtcattgagccagttctgtccatacaaggtccccaagtcatccatggtcagcacgtgccgcttataagccactcggaagcccctcaccatggcattgcctggcatccgctggtaagactggatcagctgcaacaccaggcccttcctggaaggggtggaaaactcctgctggaaaatgtcctccagcttctctactacctcatcagtgctgaggggtatgaggctgccataccgtttgaaggaattcgtccaagatgctctgtacgcaggtcacatgctcctctcgcagggggctgtgctggccggcttttctccccaggcctctctgcctcttctgccatgcccaaatctgagccctgaaaaagctcctgggccacatggtccccgatgctgcacacattgctgatgaggatgctggcatcagggggtgccaacgtgcgctccccttctggcccagattgtcccccaaaaccgttgggcagagtacatgaaaggaggcccgagtcagggtccagaggagactttggagtccacctgagtccatcttcctccatggggggcccagagggcactggtggagaccctctcaccccatcctcagccatgagagcacctagcagacccagccggggtggaggtggcccccggggggagtcaaaacgacaacagggggatggcacctgtggcgtcgcacccccttgctggggtgaaagatggttcttggggtgtgcgaggccccgccgccggccccggtggcgcccccaaagcttccagtggaatgtcagcgaggtgcttttccacgcgtcgc

SEQ ID NO: 82728 - DNA, 399 bp, Homo sapiens
  sig_peptide (280)...(145): this location contains the signal peptide sequence, MGLALRSILMLSFPFLSCREIGMRMFGIFAEFKTNKHTRTVLRLL, Run with SignalP
  misc_feature (146)...(399): similar to gi1872140 in the genepept database release 114, Run with FASTXY 3.3t00, default parameters
ccatccggacatgagggagagagagaaaaatctaggtactgttcctttacggagactttggctgtgtccacacagatacaagcggcaaaggtttctcaggtgttgggactacatgtgccagtcagagtcctaacatgctgtgaccaacagcctcaaaactgtcctggtatgtttgtttgttttaaattctgcaaaaataccaaacattctcatacctatttccctacaggaaaggaatgggaatgataacattaaaatacttctcaaagcaagccccatttcaggccttacttttgaagtaaaaaagtacactttgaaacaacaatggatgaaatggcagctttgaggcctgccattttcccaaatggaccactgattccctggaagtggtttactcac

SEQ ID NO: 82729 - DNA, 745 bp, Homo sapiens
  sig_peptide (81)...(216): this location contains the signal peptide sequence, MQPALPLYSSSLLCHLSSCMLYSRNIGLTCTPCFLPLLMLFLSQE, Run with SignalP
  misc_feature (15)...(745): similar to gi606881 in the genepept database release 114, Run with FASTXY 3.3t00, default parameters
caaagattagctaatattcttgtgtggttctgctttacagtcttcagttgtttcctcattgcctgcagaataaaggctctatgcagcctgccctcccactgtactcttccagcctcctctgtcacttgtcttcatgcatgttatattctaggaacattggacttacctgtactccttgcttcctgcctttactcatgctgtttctcagccaagaaaagcttcacctttcctgttacatacctactcatccttcaagatccaattcaaatgtcagcttctccttgaagccttcattgacctttccagccagaattaatggatccctcacagtacttatattattccgctctattagagcacttaacacattgcattacatatacctgtaagtattctctcttgctggtccctgaattccttgagggctgtatccaactatctagaaaagtggttcccaaagtatggtctgggcacccctggggatcctcctttgaaaccctttcagagggtccttaaggccaaaaatatttccataataattctcagcttttttaactctcattttctcatgtatgtacagtgaagtcttctggaagatacatggtgtgtgaactgtcaacagaatgaatgcaaaagcagatagatacgagattctagctgttttatattaagccagatactaaagacatttggaaaaaatgtaagacaatgccacttttctcactaagctctctatgtttgaaac

SEQ ID NO: 82730 - DNA, 1123 bp, Homo sapiens
  sig_peptide (123)...(258): this location contains the signal peptide sequence, MPVFLAFSSICLACLFPFGTLSWREEMRTDLCHCCFLPTVLFSCH, Run with SignalP
  misc_feature (252)...(1123): similar to gi439865 in the genepept database release 114, Run with FASTXY 3.3t00, default parameters
taaatccatgccctccttcctcctaacccttctatgttgatgattccgcccccacattttcattaagggtcatcttgtgtagcagtctcctcccagaaccccaaatgggagatggatcaaagatgcctgtttttttagctttttcttccatctgcctagcatgtcttttcccttttggaactctatcctggagagaggagatgagaacagacttgtgtcactgctgcttccttcccactgttctcttctcctgtcatgaagacaccagaagtctaggccgggtagactttccatttcctcttccactttcctttgggcatgatggcaggtgtgatactgggaagggggaatctgcttgctgataaggaaatgtgtgttgggagatattttaaaaaatataatccttggctgggtgcggtggctcatgcctgtaatcccagcactttgggaggccgaggtgggcagatcacctgaggtcaggagttcaagaccagcctggccaacatggtgaaaccccatctctgctaaaaataccaaaaaaataaccaggtgtgggggcatgtgcctgtagtcccaactactggggaggctggggtactagaatcgcttgaacctgagtgggggaggttgcaatgagccccgatcgtgccactggactccagcctgggtgaacaaatgagactccatctccctgccaaaatgacaggtaaaacaaaaacaaaagggggggccccttttagggacccaactctaatccgctgggagggcaaggataagctttttttttgcgcccccaaatcgaattcctgggccggggtttacaaggcggaatgtggaaaaacgcgcctctccgtcgttcgcgcccgctcagcggcactgtgaccgcgagctctcctatgccgcccgctcctaccacagacggggttggcgagcagcgagcgactgtgtactgcacgcggcggtcgtcgcggacccatattgacgtcttatcccttcagtccctttgcgccttgtcggcgacagatcttgcacccggccgaccgatccgcctagaatttcatgaatatgctggagcgacgcccccacgccgtacgccccatcgcggggaacccgcgaggaaccg

SEQ ID NO: 82731 - DNA, 469 bp, Homo sapiens
  misc_feature (1)...(469): n = a,t,c or g
  sig_peptide (107)...(242): this location contains the signal peptide sequence, MPVGQSQHSFLLISIVWTKLLLLNQSQIKSALYPTHGPHVVMSAF, Run with SignalP
  misc_feature (283)...(469): similar to gi2440170 in the genepept database release 114, Run with FASTXY 3.3t00, default parameters
gccaaacagatctaccaacacaggccacaaatgcaggagggatcacaggcccgaaccatgaacccggctctattatgaatttcttcctcaggggccaggaggggtcatgcctgtgggccagagccaacattcttttctgctgatctcaattgtttggacaaagcttctcctccttaaccaatcacaaatcaaaagcgctctatatccgacccatgggccacacgtcgtgatgtctgccttctcaggtcaaactgacatacggcctccatgtactgatttatgactttgccacaacctcggcctccccaccttctgaaacccttgcctgtgaaccctcggggtgcctggctcgtgggcgcagcctgccctgccagggtgcacaaacaaaagcccctggtcagggagtggaacataaagcacgaaatcgtcgacccgggaaatccagaccagtnngtcnatacagacagca

SEQ ID NO: 82732 - DNA, 531 bp, Homo sapiens
  sig_peptide (72)...(207): this location contains the signal peptide sequence, MLECAFIVLWLQLGWLSGEDQVTQSPEALRLQEGESSSLNCSYTV, Run with SignalP
  misc_feature (72)...(529): similar to gi555729 in the genepept database release 114, Run with FASTXY 3.3t00, default parameters
tttcgtctctgagaaaagaaggttggaattatcgtattttttttctaggctgagataccagcatggagaaaatgttggagtgtgcattcatagtcttgtggcttcagcttggctggttgagtggagaagaccaggtgacgcagagtcccgaggccctgagactccaggagggagagagtagcagtctcaactgcagttacacagtcagcggtttaagagggctgttctggtataggcaagatcctgggaaaggccctgaattcctcttcaccctgtattcagctggggaagaaaaggagaaagaaaggctaaaagccacattaacaaagaaggaaagctttctgcacatcacagcccctaaacctgaagactcagccacttatctctgtgctgtgcaggcgcaattccattcaggaggaggtgctgacggactcacctttggcaaaggcaccaggctgaaggttttagccctatatccagaaccctgaccctgccgtgtaccagctgagagactctaaatccagtgacaag

SEQ ID NO: 82733 - DNA, 1143 bp, Homo sapiens
  sig_peptide (197)...(332): this location contains the signal peptide sequence, MSALRPLLLLLLPLCPGPGPGPGSEAKVTRSCAETRQVLGARGYS, Run with SignalP
  misc_feature (197)...(785): similar to gi440127 in the genepept database release 114, Run with FASTXY 3.3t00, default parameters
tttcgtggctccccgctcccattgtctcggcagatgccgcctggtccagctatcgtgctcggtattcagttttccggagcagcgctctttctctggcccgcggagcggtcccgcggccgagtaccggattcccgagtttgggaggctctgctttcctccttaggacccactttgccgtcctggggtggctgcagttatgtccgcgctgcgacctctcctgcttctgctgctgcctctgtgtcccggtcctggtcccggacccgggagcgaggcaaaggtcacccggagttgtgcagagacccggcaggtgctgggggcccggggatatagcttaaacctaatccctcccgccctgatctcaggtgagcacctccgggtctgtccccaggagtacacctgctgttccagtgagacagagcagaggctgatcagggagactgaggccaccttccgaggcctggtggaggacagcggctcctttctggttcacacactggctgccaggcacagaaaatttgatgagttttttctggagatgcttttcgaaaccctagcattcttttgcccagatctttcttcccattctacgggcgcctgattgccccacacgccctcatatatcatggcctgttctctcggctgcgagacttctatcccccatgtggtgaggggctgccagaccccctcgccgaattctggccgcaacctcctggcgagaaagtgtccgcttgtgcagccccagaaccacatcccccctgactacacgtcttgctttaccaagtggcacattgtttaggggctcccaataaggatcccattttactaagtgtggcggcttttgggcccccaaccatgaggagacaggaactgtggttatcaccctcaactaagacccatgataagagcaacacgtctatcggagcgcgacggaaggagttctaccgaccgaccgcctactcgcgactaggtaggacgacacacagaatgaacgatgaagaactcagctcgatcgtcgggggcagcttctactcaccgcagatgtgcgcatcctcgagcgacgtactacagtagctaggctgttaggtaccgcacgcaaatatcgatgcaccatacttaaggatgacagatacgtacgttagtcac

SEQ ID NO: 82734 - DNA, 672 bp, Homo sapiens
  sig_peptide (228)...(363): this location contains the signal peptide sequence, MLKVILFFIPILKAVSVSNYSDVISPLSYLAPELTSLSLFSISSS, Run with SignalP
  misc_feature (246)...(672): similar to gi3882068 in the genepept database release 114, Run with FASTXY 3.3t00, default parameters
cggaaatcccgggtcgacgatttcgtgattaagtaagtaattatatgtaaaatacttagacaatgcccagcccatggtaactgctcagggaatggacctgctgttattatggtcctcatcatctgaattgatccatcatgtacatcaccccataaacagcgattgttcaagctaagagtcagtgtgtcctgtgcttgtgtgtgaggttgctcacaaaattgaagtcaatgttaaaagtaattttgtttttcatacctatcttaaaggcagtgtcagtttctaattattcggatgtgatttcacccctttcctatcttgctccagagttaacttccttatctctgttctcaatttcttcaagcccctttctaagaactccagcagcctccctgcctaagttgcacgttgctgagccctggcagttcttgacacatttacccctgaagaagttagagagctgctgctaccccttcagtagctctcattactggcactaacattttttctgcgccctgtcccatgataggatattttcacatcctaaggttcaagcagtggaagtggttatgaaagcatcaatttttctttccactgctgctttctgtccctcagcactatgtgtcatggaaagaatgtagatctggtgagaaggtcaggaaacatggatcctat

SEQ ID NO: 82735 - DNA, 412 bp, Homo sapiens
  sig_peptide (34)...(169): this location contains the signal peptide sequence, MTAGTVVITGGILATVILLCIIAVLCYCRLQYYCCKKSGTEVADE, Run with SignalP
  misc_feature (84)...(414): similar to gi516355 in the genepept database release 114, Run with FASTXY 3.3t00, default parameters
tttcgttgaatagtttgatggggcgccgggcggatgacagcgggaactgttgtgatcactggcggaatcctagctacggtgatcctcctctgcatcattgccgtcctgtgctactgcaggctccagtattactgctgcaagaagagcggaaccgaggttgcagacgaggaggaggagcgggagcacgaccttcccacgcatcccagaggccccacctgcaatgcctgcagctcccaagccctggacggcagaggcagcctggcgcctctcaccagcgagccctgcagccagccctgtggggtggccgcgagccactgcactacctgctccccatacagctcccccttttacatacggacggctgacatggtgcccaatgggggtggaggcgagaggctctcctttgctccca

SEQ ID NO: 82736 - DNA, 679 bp, Homo sapiens
  misc_feature (1)...(679): n = a,t,c or g
  sig_peptide (137)...(272): this location contains the signal peptide sequence, MSMVLGSFRARLLVPISPRKLLLGPSHTSLEWQNQLLGQESSVFP, Run with SignalP
  misc_feature (84)...(679): similar to gi1066818 in the genepept database release 114, Run with FASTXY 3.3t00, default parameters
agatccagctccgtaattcccgggtcgacgatttcgtgacatcccgtggcgtgagcagtgttctggatgagctgggctctccgagacctcatttctgccccatggcctgttgtgtaacagccacccacacctgtgcatgtccatggtgctgggctcctttcgggcaaggctccttgtccccatttctcctaggaagctcctgctgggcccctcccacacgtctctcgagtggcagaaccagctcttgggccaggagtccagtgtgttccctgcctcactgcagcagcctgcaaagggctgagggccacgctggtcacgtgctgctcatgctgccccgtgtgcaggcctggaagcatccgtctgatctcactcactctagaacagatcgcaggagcttggccagctctgtgtgacatacatgctgcatcacgtgcaggccacacagccagggtcaccacccaaccggggatgcccagctccagctctctggagtgctcgggtggaggagggaagagccgacctgtgcgtgcccctcctgctctcctanagcggtttgggggggcctgtagctatctgcccctcctcctggggctgtgctgagatgtccccgcccagctgcaagctgcaccctccccacttccctgtccagctgagtccgtttggcttccctcaggccagc

SEQ ID NO: 82737 - DNA, 891 bp, Homo sapiens
  sig_peptide (166)...(301): this location contains the signal peptide sequence, MRAAWGFRPPLWLPCGVVSDGTRENMHPGGGGRLRRWYPPRGGWW, Run with SignalP
  misc_feature (424)...(36): similar to gi904359 in the genepept database release 114, Run with FASTXY 3.3t00, default parameters
attcccgggtcgacgatttcgtggtcaagtggcttccctgacaacatggagcaagtcgggtcatggccagtgttccaatccaggtctgtctgactcctgggcccttgcagttttctccggtgacaagtggcctccttgacaggagggagtttgaggctctggtccatgagagctgcctggggctttcgtcctcccctctggctgccctgtggggtggtctctgatggcacccgggagaacatgcaccctgggggtgggggtagactcagacgctggtacccacctcggggagggtggtggatgctgatctggcaacatgactctccactgagggggttgccgtggcctgcaggggctctggaaaaagtgtgcaggagtgatgagcttatccttgggtggaaccaacctggggagctgggcagggaggactcatcttcagggcagctgtctccttgtagtcgttcggcagagctcactgggcacctgtatctgtcaggtgctaagctttgtccagtgggagagaagagcaaagacctgttaatttctttcaatgcagccagcaagcaggggcaaaattgacattgggtcttgggggctctgaactttcactttggtcttacgctgggtaactaggtgacctggggcattggactaatccctctgtgcctcaagttccttctgaggcaaaaggagcatgtatattcccagtacttattgggggccattgtccctttatcctcccatctccagtcaaacctctaaaaacatggcctggcttattacagccacttgagaacagtgcctcccacgctcttagtgtagaaccgttacatggacattaaacttcggacccgctcaaagcccaattctttatatatcttgtccccgccc

SEQ ID NO: 82738 - DNA, 471 bp, Homo sapiens
  sig_peptide (432)...(297): this location contains the signal peptide sequence, MTRLLRLMPGLCWSWEQICGGMACWAPSRDESRGRGGHVQGTWAE, Run with SignalP
  misc_feature (256)...(471): similar to gi3093369 in the genepept database release 114, Run with FASTXY 3.3t00, default parameters
ccattgagactctccaagactcccatggaatgaggccctactctgtttacagataagaccccagaaatccacttgcagccctgtgggacaggaaaagagtgcttaggtgcctgactattagacaaaaggagaaactgaggcctcagaacaaaagctgagttcaagtcatagaatggattttcccttggaggccatctggcaacacactggttttgcaggtgagaactgtacagctctgagaatagaggagactaagtatgtccccaacaccctccacacagcattgcaccattccctctgcccaggtgccctgaacatggcctcccctacctctgctctcatctctggagggggcccagcaggccatccccccacagatttgctcccagctccagcagaggccaggcatgagcctcaagagcctcgtcatagctgaggggccccaagaaagtaccacgaaatcgtcgacgc

SEQ ID NO: 82739 - DNA, 559 bp, Homo sapiens
  misc_feature (1)...(559): n = a,t,c or g
  sig_peptide (208)...(343): this location contains the signal peptide sequence, MGPRFVSTLPFSPSAAWCACEAGGGLRREVAHAQRAASTAPTAHM, Run with SignalP
  misc_feature (120)...(354): similar to gi1765936 in the genepept database release 114, Run with FASTXY 3.3t00, default parameters
gccctcaaccaaaatggcgctagncgtgaagctgccgaggtgctaggtgttgccgaagcaagtccggaagctaccgagcgagtccggaagttgccgaaagggagcagcggggaaggaggatggcggatatcatcgcaagactccgggaggacgggatccaaaaacgtgtgatacaggaaggccgaggagagctcccggactttcaagatgggaccaaggttcgtgtctaccctgcccttctccccctctgcggcgtggtgcgcatgcgaggcgggaggaggccttaggcgagaggttgcgcatgcccagagggcagcgtccactgcccctaccgctcacatgcagaactcgacgctgattgggctgaatttaagtagggggtgaattcgggcctgtctgccccgccccctggctcggccttgtagcagcattggtgggggaggccgtcagtcatcacaagcgggttggggtttggggttgatctcagtgcttgngcagaccccacgctggaggaaacccagggccgggagtggtcctcgggtatctgggtttcaaggct

SEQ ID NO: 82740 - DNA, 483 bp, Homo sapiens
  sig_peptide (88)...(223): this location contains the signal peptide sequence, MGLGTESPPASLPFSRWGPLYLRALLLPPAVLCYGTGICLPHLAS, Run with SignalP
  misc_feature (217)...(417): similar to gi5441597 in the genepept database release 114, Run with FASTXY 3.3t00, default parameters
cgaattcccgggtcgactatttcgtgggagaatgggataaagaaagtgacctctgtcttaaggtgctgagttcttactgacaggttcatggggctggggacagagtccccacctgcctcactccccttcagccgctgggggcctctgtatctgagagctctcctcttgccccctgctgttctctgttatgggacagggatctgccttccccacctggcctcaagatcctcaaaggtggctcaagtctgtccccccaaaccacccaggcagtcagcacaaggctgggctcagagtgagtgtccaggacctgtcggaggggcctggcccagggagtggcaggcaggggagggcatggggcgtgcagcttcagcaccagagccccgggtgcagcaccacccctgcgagagactctcctccccttggccggcctcagcccagcagccgcctgcagcactgtctttggttgcctcattctgtggatgg

SEQ ID NO: 82741 - DNA, 473 bp, Homo sapiens
  sig_peptide (194)...(329): this location contains the signal peptide sequence, MRLPWELLVLQSFILCLADDSTLHGPIFIQEPSPVMFPLDSEEKK, Run with SignalP
  misc_feature (194)...(476): similar to gi1430860 in the genepept database release 114, Run with FASTXY 3.3t00, default parameters
gtgtggtggaattcctcggctctcgccagcccggcgccccggtgctgaggaatcattgacatagagtaactccacagcatgtgtcttcaagagcttccctaaaagattaaaggttatacaaaacttaaaagaagcagcaattctattcgcttgttattggacttgaaactccctttgacctcggaaactgaagatgaggttgccatgggaactgctggtactgcaatcattcattttgtgccttgcagatgattccacactgcatggcccgatttttattcaagaaccaagtcctgtaatgttccctttggattctgaggagaaaaaagcgaagctcaattgtgaagataaaggagatccaaaacctcatatcaggtggaagttaaatggagcagatgctgacactggtatggagttcctgctacagcgctgttgaaaggagcttgttgatcaataaccccaataaaacccaa

SEQ ID NO: 82742 - DNA, 472 bp, Homo sapiens
  sig_peptide (143)...(278): this location contains the signal peptide sequence, MSKFLRYMAACVPVASTLLTSKPFTEIPAVSCIEAKHQLVFTSSS, Run with SignalP
  misc_feature (176)...(472): similar to gi897722 in the genepept database release 114, Run with FASTXY 3.3t00, default parameters
gtggaattcgtgaaatctgtgtccctagcctggaagtgaagagggtagtatccttacttgtctgtcttccttggtggaaccaggttcacaaaaaatgtcactgcgattgaatgtgagctttcacttttaacactcacaagtgatgtcaaaattcctgagatatatggcagcctgtgtcccagttgcttccacattgctgacaagcaagccctttactgagatccctgctgtaagctgcattgaagccaagcatcagctggtatttacttcatcctccatcaggcatcaacagagcatgggactgcaagacagaaatattactctgaaaatgtagctgggaccacagccaactagtctacctatcagccagctgctgagaggagcctgccagtcagctgaagggtcagtgcctgcctttgactttgactcagctgctgaggctacatgactcatccgagagtaagatactcaa

SEQ ID NO: 82743 - DNA, 1491 bp, Homo sapiens
  sig_peptide (263)...(398): this location contains the signal peptide sequence, MLRLYVLVMGVSAFTLQPAAHTGAARSCRFRGRHYKREFRLEGEP, Run with SignalP
  misc_feature (1268)...(1491): similar to gi463921 in the genepept database release 114, Run with FASTXY 3.3t00, default parameters
attgaggcctgttggaccgatccgagaacccctcgggtcgacccacgcgtccgggcacagtcacattctagaagaccatgtgggatgggagatactgttgtggtcacctctggaaaatacattctgctactcttaaaaactagtgacgctcatacaaatcaacagaaagagcttctgaaggaagactttaaagctgcttctgccacgtgctgctgggtctcagtcctccacttcccgtgtcctctggaagttgtcaggagcaatgttgcgcttgtacgtgttggtaatgggagtttctgccttcacccttcagcctgcggcacacacaggggctgccagaagctgccggtttcgtgggaggcattacaagcgggagttcaggctggaaggggagcctgtagccctgaggtgcccccaggtgccctactggttgtgggcctctgtcagcccccgcatcaacctgacatggcataaaaatgactctgctaggacggtcccaggagaagaagagacacggatgtgggcccaggacggtgctctgtggcttctgccagccttgcaggaggactctggcacctacgtctgcactactagaaatgcttcttactgtgacaaaatgtccattgagctcagagtttttgagaatacagatgctttcctgccgttcatctcatacccgcaaattttaaccttgtcaacctctggggtattagtatgccctgacctgagtgaattcacccgtgacaaaactgacgtgaagattcaatggtacaaggattctcttcttttggataaagacaatgagaaatttctaagtgtgagggggaccactcacttactcgtacacgatgtggccctggaagatgctggctattaccgctgtgtcctgacatttgcccatgaaggccagcaatacaacatcactaggagtattgagctacgcatcaagaaaaaaaaagaagagaccattcctgtgatcatttcccccctcaagaccatatcagcttctctggggtcaagactgacaatcccgtgtaaggtgtttctgggaaccggcacacccttaaccaccatgctgtggtggacggccaatgacacccacatagagagcgcctacccgggaggccgcgtgaccgaggggccacgccaggaatattcagaaaataatgagaactacattgaagtgccattgatttttgatcctgtcacaagagaggatttgcacatggattttaaatgtgttgtccataataccctgagttttcagacactacgcaccacagtcaaggaagcctcctccacgttctcctggggcattgtgctggccccactttcactggccttcttggttttggggggaatatggatgcacagacggtgcaaacacagaactggaaaagcagatggtctgactgtgctatggcctcatcatcaagactttcaatcctatcccaagtgaaataaatggaatgaaataattcaaaaaaaaaa

SEQ ID NO: 82744 - DNA, 432 bp, Homo sapiens
  sig_peptide (45)...(180): this location contains the signal peptide sequence, MKVFYRWAQQLLELLIICVCVCACVGVHAYACILERKGSGLLSKS, Run with SignalP
  misc_feature (22)...(432): similar to gi53861 in the genepept database release 114, Run with FASTXY 3.3t00, default parameters
ttctgatgctgggcggtcgaggggaaatgtaagcccaacaacagatgaaggttttctatagatgggctcagcagttgttggaactgcttattatctgtgtatgtgtgtgtgcctgtgtgggcgtgcatgcatatgcctgcattttggagaggaagggatctgggcttttatcaaagtcctgaaaggtcttttgatccaggagttaagaaacactgtaataaagagatttaactgtgttcgaatctttgcttttccaccaggtggtgcaaatcttttatgatgttcatagaggttaaatcctcaaaaataagaataatttaaaattgtgtaattttctctaagagtttagtcctgtcacacaatgtgaagcattgttgatctgattcttgctttccttctgtctttaataaagatacaggtagatttacatat

SEQ ID NO: 82745 - DNA, 398 bp, Homo sapiens
  sig_peptide (180)...(315): this location contains the signal peptide sequence, MLSNCSLNFCVLCLPLSLYQQTPVHPSRPSSSDFSLEPLAASLSP, Run with SignalP
  misc_feature (180)...(398): similar to gi555375 in the genepept database release 114, Run with FASTXY 3.3t00, default parameters
cgcacatccccgaggcgactcaaacttaaccttcatgttctttgtctcagtgtctgagatcattgatctgggtgacttgactggtgtctgtctccccctgctcattggaagcctctcatcacatgtgagccgtggctcttttgctcacctgtgtattctcaatgcctgccgtagaatagatgctcagtaattgttcgctgaacttctgtgtcttgtgccttcccctttctctctaccagcaaactcctgttcatccttcaaggcccagctccagtgacttctccctggagccattggcagccagcctctcccctgccttcctgcagagctcactacacccctttgctctgccacttcctatgctggcttaaggccctggggctttttttcttcaggga

SEQ ID NO: 82746 - DNA, 440 bp, Homo sapiens
  sig_peptide (86)...(221): this location contains the signal peptide sequence, MFFLVSQLISIFSSQNSIGLALWGFVLFSSYFLYCLFLLYAVFYP, Run with SignalP
  misc_feature (146)...(441): similar to gi436923 in the genepept database release 114, Run with FASTXY 3.3t00, default parameters
gctgcaactgtaccatgagtctcccttccagatcaaaaggaagatcccgaccgcagtcctttggaataagatttgctagtattcaatgttctttcttgtgtctcaactcatatccatattttcttctcagaattccataggtttagccctttgggggtttgtacttttttcttcttattttttatactgcctgttcctactttatgctgtgttttacccatatttatgtcattttaatcagttccataagactgtgtttgaactccccacctccacttgcttttgttttgggtgatgactgtgctgtccacctctgccacttgtttcaggccctactactttttccctccaatgttccttcttttgtgtctgccatctattattgctgaatacgttattgtcgcttttgtcttcttattttattttctcctcttcttcct

SEQ ID NO: 82747 - DNA, 590 bp, Homo sapiens
  sig_peptide (448)...(583): this location contains the signal peptide sequence, MSFTPFLHLLTFLINRREWGLKASSLVLRERCLIRVRVTINSNGR, Run with SignalP
  misc_feature (291)...(0): similar to gi214265 in the genepept database release 114, Run with FASTXY 3.3t00, default parameters
gctgaacccagggggtggtgtgtgctgccctgcaaggtgattcttctgctccagggtgagcagggcctgtccttggacttgctctttggagagttgggatggtgacctgtactgggatggtgacctgtactgggttgttgacccctcgggatgtgtggggtgattcttccacagatgaacatagcatggggcagaacactgtcccactgcgggaaccctttgctcattctccgagctccagatgaggaagggaggcgggtggaattggatgaattggcgcagtgattccgaaattgtaaccgggggagatgacatttggtggtaagaggacgggacacagcattccccgaaactgatccccggagagaaagctggttatttcctttggcggtctctttctgtgcagctcatctcttgaaggagaacgtctcagcttaggggtaaaatatgtctttcacacctttcttacatttgctaaccttccttattaaccgaagagagtggggtctcaaggcctcaagccttgttcttagagaaaggtgtttaatcagagtgcgagtaaccattaattccaatgggcggtttatact

SEQ ID NO: 82748 - DNA, 711 bp, Homo sapiens
  sig_peptide (176)...(311): this location contains the signal peptide sequence, MAPNALHLLVFMALCKALPLSYTRILTNRIQQKGWTQFLRLGYKK, Run with SignalP
  misc_feature (335)...(711): similar to gi4530664 in the genepept database release 114, Run with FASTXY 3.3t00, default parameters
tgctttgatctcatgtcagtctctacccttgactttgacatttggattcatagtaacctcccacttttcctgaattttgtttgcatcttgatgatttcacccccagaatgagagaaagattttgccttttgaaagagtggttgagcctatatatcctgatgacacagcctgtaggatggcccccaatgccctccacctcctggtgttcatggccttgtgtaaggccctccccttgagctatacacgtattctaacaaatagaatacagcaaaagggatggacacaatttctgagattaggttataaaaagactgtggcttctgtatcaggtatccactcctttccttttcccttccctccccttccctccctttccttccccttccctctcctcccctgccctcctcttctttctctttctcagatcattcgcactggggcaagcaagctgccatgttgtgggcaactttacagagaggcccacgtagcgtggggagaaactgagatcctcagtgcaatagcctgtgaggactgacacctgccacttaccaaagagtaagctcagaagtggatttttcagccccagttgagtcttgagatgacggaagcccgagccaacagcttgactgccatgttatcagaaaccctgagccagaatcactcaggttaaccactcctagattcctgacccccagaacgtggaggtggaat

SEQ ID NO: 82749 - DNA, 1127 bp, Homo sapiens
  sig_peptide (55)...(190): this location contains the signal peptide sequence, MAMGVPRVILLCLFGAALCLTGSQALQCYSFEHTYFGPFDLRAMK, Run with SignalP
  misc_feature (118)...(1127): similar to gi5834584 in the genepept database release 114, Run with FASTXY 3.3t00, default parameters
agccaggcagcacatcacagcgggaggagctgtcccaggtggcccagctcagcaatggcaatgggggtccccagagtcattctgctctgcctctttggggctgcgctctgcctgacagggtcccaagccctgcagtgctacagctttgagcacacctactttggcccctttgacctcagggccatgaagctgcccagcatctcctgtcctcatgagtgctttgaggctatcctgtctctggacaccgggtatcgcgcgccggtgaccctggtgcggaagggctgctggaccgggcctcctgcgggccagacgcaatcgaacgcggacgcgctgccgccagactactcggtggtgcgcggctgcacaactgacaaatgcaacgcccacctcatgactcatgacgccctccccaacctgagccaagcacccgacccgccgacgctcagcgggctcgagtgctacgcctgtatcggggtccaccaggatgactgcgctatcggcaggtcccgacgagtccagtgtcaccaggaccagaccgcctgcttccagggcaatggcagaatgacagttggcaatttctcagtccctgtgtacatcagaacctgccaccgggccctcctgcaccacctgatgggcaccaccagcccctggacagccatcggacctccaaggggctcctgctgtgaggggtacctctgcaacaggaaatccatgacccagcccttcaccagtgcttcagccaccacccctccccgagcactacaggtcctggccctgctcctcccagtcctcctgctggtggggctctcagcatagaccgcccctccaggatgctggggacagggctcacacacctcattcttgctgcttcagcccctatcacatagctcactggaaaatgatgttaaagtaagaattgcactcctgtccctctggccttccatctctcccgcccttgtgccccacaacctggccaacagtactggaagaaactggacacagtcaccagcatcccaggggagggcaaaacagccatgtcgtgccctgatgaagagcaattctgatcacagctgttactcactgagcaccagccaggcaccaggcaccccataacacggcttcctgtg

SEQ ID NO: 82750 - DNA, 785 bp, Homo sapiens
  sig_peptide (364)...(499): this location contains the signal peptide sequence, MTWLLVAYADFVVTFVMLLPSKDFWYSVVNGVIFNCLAVLALSSH, Run with SignalP
  misc_feature (361)...(742): similar to gi2773183 in the genepept database release 114, Run with FASTXY 3.3t00, default parameters
gcggccgcatgatgcgtccctgcctcggccgctggcagtcgccgccgccgccgccgcaggccgggaggagccgcagcgccgggcgaccccgcccgggcctcggatccgatcacataggacagtatgcaccttaagatcctgaagaaacggcacaaaatgttcaagtgatgtttagaaataacttgtgagggtgcgtcagggaaatcatgcagccatcaggacacaggctccgggacgtcgagcatcatcctctcctggctgaaaatgacaactatgactcttcatcgtcctcctcctccgaggctgacgtggctgaccgggtctggttcatccgtgacggctgcggcatgatctgtgctggtcatgacgtggcttctggtcgcctatgcagacttcgtggtgactttcgtcatgctgctgccttccaaagacttctggtactctgtggtcaacggggtcatctttaactgcttggccgtgcttgccctgtcatcccacctgagaaccatgctcaccgaccctgaaaaatccagtgactgccgaccatctgcctgcacagtgaaaactgggctggacccaacccttgtgggcatttgtggtgagggaaccgagtctgtgcaaagcctcctgcttggggcagtacccaaaggaaacgctacgaaagaatacatggacgagcttgcagctgaagcccggggaagtcatctacaagtgccccaagtgctgctgtattaaaccacggccgctcacagcttcagatatggtaacacctacgtgccgaatct

SEQ ID NO: 82751 - DNA, 395 bp, Homo sapiens
  sig_peptide (259)...(124): this location contains the signal peptide sequence, MTLEMRLTLMTALSSAVTQLTLMCVSNIIDPGSKNGHCLSCLATG, Run with SignalP
  misc_feature (53)...(395): similar to gi1519311 in the genepept database release 114, Run with FASTXY 3.3t00, default parameters
atatcagctttcacccgtgaggacaggttagtgtttttcttcaaaagcccgctaccgcagaatacactccaccagtcacagaaccaggacagagggtttggaaggatcaatgcagatccatcattgccagtagccaaacagctcaaacaatgcccatttttggacccagggtcaataatgttggaaacacacatgagggtcagttgtgtcacggcgctgctcagtgctgtcatcagggtgagtctcatctccaaagtcatctcttgtattttagaagcaggcttagtgatttcaaaggctgtttttctaggtattatacatacactttttcaaaggtgtttgaatatatatgaataaaacttagaactcttttatttctcctccttaacattcgc

SEQ ID NO: 82752 - DNA, 365 bp, Homo sapiens
  misc_feature (1)...(365): n = a,t,c or g
  sig_peptide (140)...(275): this location contains the signal peptide sequence, MPGDSTVPHFTSGLLLLIFGWVAAVARENCSLWSTSAPASVVFCF, Run with SignalP
  misc_feature (145)...(365): similar to gi1039421 in the genepept database release 114, Run with FASTXY 3.3t00, default parameters
atggttgcttatgtgtttgattattttgacgggcaagtacgtatatttaggagatttgtaaccatgagcctagcattactgctgataaaacgaatccctcctttctaatcccattgctcttttcttgatgtaaaaactgatgcctggcgacagcactgttccccatttcacaagtggccttttattattgatctttggttgggtagcagcagttgccagagagaattgttcgttgtggtcaaccagtgctcctgcctcagtcgtgttttgcttttaaccatgtcttcctggaatgacacttgaaagggcagtcntcatgtgttagcccagaatgaactcaccggaatcccacgccgagccctatg

SEQ ID NO: 82753 - DNA, 1030 bp, Homo sapiens
  sig_peptide (237)...(372): this location contains the signal peptide sequence, MLHLVFILPSLMLLIPHILLENFAAAIPGHRCWVHMLDNNTGSGN, Run with SignalP
  misc_feature (186)...(935): similar to gi3004482 in the genepept database release 114, Run with FASTXY 3.3t00, default parameters
cggcacgaggaagctctttccactacggctgtattgcactggtgagtccgggcccatggatgagaaattgatgcgaggatcaatacaagcttaatttgaattaataaaaggaaatattttctccctttgaacttatctccgtaaagccattgtgcctcctcttgggggtcacgtgttcacaatcaatggcctttgaggagctcttgagtcaagttggaggccttgggagatttcagatgcttcatctggtttttattcttccctctctcatgttattaatccctcatatactgctagagaactttgctgcagccattcctggtcatcgttgctgggtccacatgctggacaataatactggatctggtaatgaaactggaatcctcagtgaagatgccctcttgagaatctctatcccactagactcaaatctgaggccagagaagtgtcgtcgctttgtccatccccagtggcagcttcttcacctgaatgggactatccacagcacaagtgaggcagacacagaaccctgtgtggatggctgggtatatgatcaaagctacttcccttcgaccattgtgactaagtgggacctggtatgtgattatcagtcactgaaatcagtggttcaattcctacttctgactggaatgctggtgggaggcatcataggtggccatgtctcagacaggtggctggtggaatctgctcggtggttgataatcaccaataaactagatgagggcttaaaggcacttagaaaagttgcacgcacaaatggaataaagaatgctgaaagaaaccctgaacatagaggttgtaagatccaccatgcaggaggagctggatgcagcacagaccaaaactactgtgtgtgacttgttccgcaaccccagtatgcgtaaaaggatctgtatcctggtatttttgagaaaaaaaaatctcaaggaaaaggcataaaaatgattgctacacaaaagtgaccaaattttaagaagccttcatgagctgattggtggggaaattcaga

SEQ ID NO: 82754 - DNA, 1064 bp, Homo sapiens
  sig_peptide (188)...(323): this location contains the signal peptide sequence, MAASWSLLVTLRPLAQSPLRGRCVGCGAWAAALAPLATAPGKPFW, Run with SignalP
  misc_feature (410)...(1046): similar to gi525318 in the genepept database release 114, Run with FASTXY 3.3t00, default parameters
tttcgtggacgggagggcacgggagtgcagcccgcccatgtggctactggaggtcacgttccctaactgatcccttggttctctcgggtggagccttcagcgtgcacggcggggtttgactttgccaccgtctctcttctgggttccaataaagttttcctcttcctctcctcgtacggagttcaagatggcggcctcctggtcgctcttggttaccctgcgccccttagcacagagcccgctgagagggagatgtgttgggtgcggggcctgggccgccgctctcgctcctctggccaccgcccctgggaagcccttttggaaagcctatacggttcagacatccgagagcatgaccccaactgccacttcagagacttatttgaaagctttggccgtttgccatggacctctggaccactatgattttctgatcaaagctcatgagctaaaggatgatgaacatcaaagaagagtcatacagtgtttgcagaaattacacgaggaccttaaaggatacaatatagaggcagaaggcctttttttcaaagcttttttcaaggagcaaacctccaaggggcctgtatgtttatggagatgttggtacaggaaaaacaatggtgatggacatgttttatgcttatgtggaaatgaagaggaaaaaacgggttcattttcatggtttcatgctagatgtgcacaaaagaatacatcgccttaaacagagtttgccaaaaaggaaaccaggattcatggctaaatcatatgacccaatagctcccatagccgaagaaatcagcgaagaagcatgtctcctatgttttgatgaatttcaggtcactgacattgctgatgccatgattctgaaacagctttttgaaaatctgttcaaaaacggggtcgtcgttgtggcaacatccaacaggccaccggaagatctctataaaaatggactccaaagagctaactttgtaccattcatagcagtcttgaaggaatattgtaatacagtccagctagattctgggatagattaccggaaaagggaacttcctgctgcagga

SEQ ID NO: 82755 - DNA, 413 bp, Homo sapiens
  sig_peptide (14)...(149): this location contains the signal peptide sequence, MRVTAPRTVLLLLWGAVALTETWAGSHSMKYFYTAMSRAGRGEPR, Run with SignalP
  misc_feature (14)...(414): similar to gi1731871 in the genepept database release 114, Run with FASTXY 3.3t00, default parameters
cccacgcgtgcggatgcgggtcacggcgccccgtaccgtcctcctgctgctctggggggcagtggccctgaccgagacctgggccggctcccactccatgaagtatttctacaccgccatgtcccgggccggccgcggagagccccgcttcatagcagagggctacgtggacgacacccagttcgtgaggttcgacagcgacgccgcgagtccgaagacggaccccgggcgccatggatagagcaggaagggccggagtattgtgaccgcaacacacagatcttcaagaccaacacacacacttaccgagagagcctgcggaacctgcgcagctactacaaccagagcgaggccggctctcacattatccagacgatgtatggctgcgaactgcggcccgaaggacgcctcct

SEQ ID NO: 82756 - DNA, 311 bp, Homo sapiens
  sig_peptide (42)...(177): this location contains the signal peptide sequence, MRFTFPLMAIVLEIAMIASFGLFVEYETDHTVLEHFNITKPSDMG, Run with SignalP
  misc_feature (42)...(312): similar to gi31195 in the genepept database release 114, Run with FASTXY 3.3t00, default parameters
cctactattctcttagtgtgcctcagacctttgccactaacatgaggttcacattccctctcatggctatagtcctggaaattgccatgattgcctcattcggattatttgttgagtatgaaacggaccacactgttctcgagcatttcaacatcaccaagccatcagacatgggcatattctttgagttatatcctctgttccaagatgtacatggcatgatatttgttgggtttgactttcctcctgaccttcctgaagaactatgggtctcgcaacgtggttattaaactatctcgggctgcctttcg

SEQ ID NO: 82757 - DNA, 441 bp, Homo sapiens
  sig_peptide (249)...(384): this location contains the signal peptide sequence, MRLHYLLRLLSFAFLWFILRSFLVKYLNFFTLGFFFCFSSTPRNF, Run with SignalP
  misc_feature (249)...(443): similar to gi2194165 in the genepept database release 114, Run with FASTXY 3.3t00, default parameters
tgctgttcgactagtgattttcccgggtcgacgatttcgtatattaagtttgcaagcaaataatttgttgggcaagccatataaaatcatgcaaatgctgtaaatatttgttctattttccccgtagaatgggttattcgatatattacatataataaacgaaaaatacatatgcacagtatatacttttccaaaaaaaatcaaacactgtttgagcgtcaagaaaccccaggcggtgcccgacgataatgcgactgcattatctcctacgcttgttgtcgtttgcctttctttggtttattcttcgttcatttttggtcaaatatctgaacttttttactcttggcttcttcttttgtttctcatccacgcccagaaacttcgcgtattggtggctctatttatgctttgtttgagtactttttctgccttttctaattg

SEQ ID NO: 82758 - DNA, 897 bp, Homo sapiens
  sig_peptide (86)...(221): this location contains the signal peptide sequence, MQRNKLCFLPSIVVTILTNTELKLKSHDVERGAKIIYFLLESFSL, Run with SignalP
  misc_feature (110)...(2): similar to gi209907 in the genepept database release 114, Run with FASTXY 3.3t00, default parameters
gcacttgttaataaacttctgcttctttttcttttattattgtgacttttgtttttaggagagtgtctcaactaagaacataaaaatgcaaagaaataaattatgttttctcccttccatagtcgttaccatactgactaatacagaactgaagctgaaaagccatgatgtagagagaggggccaagattatctatttccttcttgaaagtttttccctgaactttccagaagtacaaataagagtaaaaacatatccctggacacaggagctggcgacctaactggcttgttttgagtttaaatttcttcttaatgccctgaatggaaatatttgacttcctctctgtaatatattcatgtttgcttcaatataaaaatactatttataaagatttagccctcaagttaaatggacttttaacctgtgccttggcatccgcatgtaatagtcacatttaagtttggctccaaagattacttccctccctctttcctggacatttggtaaaaagcaaagcgacttcatgaaaccacctatgtaggggttcagtaagttagcactctttagatttcagatgcctgctttcattctttaaaaacaaaaataaaaacaactttgatccattttttaatactggaggtggaatattaaaatggttaataaacttgggttgacaaaaaacagcataattttttaaaaggcttcagaattggtaaacaataccaaattaccagggcctgggtgtggggggtaatgcctggaatcccaacatttttgggaaggctgaggtgggcaaaaaaccccgaaggctcagaagttcaaaaaccagcctgggccaacaaggggggaaaccccctcttttctttaaaatccccaaaatttggcctggggggg

SEQ ID NO: 82759 - DNA, 409 bp, Homo sapiens
  sig_peptide (19)...(154): this location contains the signal peptide sequence, MMAAMLTLAVLFLTGSQARHLWRHDEPPQIPWDRVKDLATGYVDV, Run with SignalP
  misc_feature (19)...(407): similar to gi512410 in the genepept database release 114, Run with FASTXY 3.3t00, default parameters
cccccacgggccttcaggatgatggctgcgatgctgaccttggccgtgctcttcctgacggggagccaggctcggcatttatggcggcacgatgaacccccccagatcccctgggatcgagtgaaggacctggccactgggtacgtggatgtgctcagagacaggggcagagactatgtgtcccacttagaaggctccgtcttgtgaaaacagctaatcctaaagctccttgacgactgggacagcgtgacctccaccttcatcaagctgcgcgaacagctcggacctgtgacccaagagttctgggataacctggaattggagacagagggcctgaggcctgagatgagctatgatctggacgaggtgaatgccaacgtgcagccctatctggacgactttcagaaca

SEQ ID NO: 82760 - DNA, 331 bp, Homo sapiens
  sig_peptide (19)...(154): this location contains the signal peptide sequence, MKAAGLTLAVLFLTGSQARHFWQHDEPPQSPWDRVKDLATVYVDV, Run with SignalP
  misc_feature (19)...(332): similar to gi512410 in the genepept database release 114, Run with FASTXY 3.3t00, default parameters
cccccacggcccttcaggatgaaagctgcagggctgaccttggccgtgctcttcctgacagggagccaggctcggcatttctggcaacatgatgaacccccacagagcccctgggatcgagtgaaggacctggccactgtgtacgtggatgtgctcaaagacagacagatagactatgtggcccagtatgaaggctccgacttgcgaaaacagctaaacctacagctgcttgacagctgcgacagcgtgaccaccagcttcagcacgctgcgctaacagctcggccctgtgacccaggagttctgggctaacctgcaaaaggatacagagg

SEQ ID NO: 82761 - DNA, 340 bp, Homo sapiens
  sig_peptide (35)...(170): this location contains the signal peptide sequence, MWHLRLAYLPKLLSQLVLRRGHYPQTPLGLFNKKPWVQAGWLQLS, Run with SignalP
  misc_feature (202)...(11): similar to gi3875441 in the genepept database release 114, Run with FASTXY 3.3t00, default parameters
agcaggggagggttttattcacatcacattatggatgtggcatctgaggctagcctacctgccaaagttacttagccagttggtgctaagacgtggtcactacccacaaacacccctggggcttttcaacaaaaagccatgggttcaggctggctggcttcagctgtcctcctgggagaaaatgctactgaggtaagttgaggtgggcaagcctggggtggggcttgcagtcggggatgggggaataatggaggttcccacatccttccaggcaggtgcccacagccgcacccggaggcagtacagcaggcctgtggaagagggtgtggctaaggctgaa

SEQ ID NO: 82762 - DNA, 365 bp, Homo sapiens
  misc_feature (1)...(365): n = a,t,c or g
  sig_peptide (201)...(336): this location contains the signal peptide sequence, MPYPFLMRRCLLSYFGPLLLCYPVPRNLHSXILPRLPFPTLGRLY, Run with SignalP
  misc_feature (88)...(365): similar to gi1143538 in the genepept database release 114, Run with FASTXY 3.3t00, default parameters
atgtgatttagaataagacctggattgtgtccacactaactgtgcatgtgcaatcttggaaaaatcactaagcctcagtttcctctctgtcgttggtaacagcaatgcctacctcatggtttttgctcaatgcataagatgtgaatgtgtgtaaaagtgcctttaaaaccacccagtgttctctgctgttaagatcaaggatgccctacccatttctcatgcggaggtgcctcctaagctactttggccctctcttgttgtgctatcctgtccccaggaacctccattcagntatcttacctagactgcccttcccaacccttggccgactatatttgggaaagaacctgctactacattaagag

SEQ ID NO: 82763 - DNA, 356 bp, Homo sapiens
  sig_peptide (177)...(312): this location contains the signal peptide sequence, MSSTWPRLLARSSLLCQVLRMTQTKHITPLTDLPALLVQGTPHPP, Run with SignalP
  misc_feature (130)...(333): similar to gi4092666 in the genepept database release 114, Run with FASTXY 3.3t00, default parameters
gaataataatgcctgcctcaaaaaacccaaaccccagccttgctgggttgtgaggcttcagtgaggtgagaagcaattagcacagagcctggcacatgacaagggtgcaataaatgccagcatgactgcctttcacccgtatctcctgccaagcctgtctctcgagctttggattcatgtcttcaacttggcccagacttctggccagatcctccctcctgtgccaggtgctccgcatgacccaaaccaaacatatcacacccctcacagatctccctgccctgcttgtccaggggacaccccacccacccagctacccagccaggagcttgcacatcgcaccaaatgtctctgct

SEQ ID NO: 82764 - DNA, 362 bp, Homo sapiens
  sig_peptide (89)...(224): this location contains the signal peptide sequence, MTCQQPQDLRLKAPLQAWLRVGLLVLSTLVKVRAGCALEAWSARA, Run with SignalP
  misc_feature (219)...(19): similar to gi1070010 in the genepept database release 114, Run with FASTXY 3.3t00, default parameters
gaaattagccgccgaagggaagggcccggagagcttgggaagcgacctaggctgccagcctcccggcgggtctttggtcccagctctgatgacctgtcagcagccgcaggacctgcgcttaaaggcgcctctccaggcctggctcagggtggggctcctcgtgctcagcaccctggtcaaggttagggctgggtgtgcgctggaggcttggagtgccagggcacccagtgaagagcgaatgaatgaacgagtgaacaccggactgggggcctgcagacggttcttcgcaggttaattagaaggcctctagcaagctgcagcggaggcatttcaggcatccttcagagaggaccctcggcctg

SEQ ID NO: 82765 - DNA, 387 bp, Homo sapiens
  sig_peptide (19)...(154): this location contains the signal peptide sequence, MKFIWVLKSFMLHSSSVVLSRECTPASATKLFHIQVCPAPLLEIL, Run with SignalP
  misc_feature (323)...(386): similar to gi2649328 in the genepept database release 114, Run with FASTXY 3.3t00, default parameters
cgtatacatcctgtgaagatgaaattcatttgggttttgaaatcttttatgctacattccagttcagtggttcttagcagagaatgtacaccagcatcagcaacaaagcttttccacattcaagtatgcccagctccactcctggaaattctgattcactaagtctagggagagttctgggaaacagtattttaaaaaattccattggggtttctaatgtgaaatattaatgtaaaaaatcattatattacatagaactccttgagaaaaggcaccattttgtctttttggtctctccaatacctagcatattgccttggcatgtggtaagtgctcagtaattgcttgttaaatgaatgaaccctattgcttctctttttggttctg

SEQ ID NO: 82766 - DNA, 380 bp, Homo sapiens
  sig_peptide (71)...(206): this location contains the signal peptide sequence, MLEWPLLGQILPMIIPLPPLPALVVWPIGLTHCPWPSPFVPASLD, Run with SignalP
  misc_feature (184)...(190): similar to gi3451435 in the genepept database release 114, Run with FASTXY 3.3t00, default parameters
tccaccttcatgttacccttggtctccccagtctctgccagatccttctgacctggcatcaccaagacaaatgctggagtggcctctccttggacaaatccttcccatgatcatcccactacctcctctccctgccttagtggtttggcccattgggctcactcactgcccttggccctccccttttgttccagcctctctggatgggttctacaacagtcgcagcctggatggtaagtctccacccttgaggccagagaagtggtctccctggtcctggttctcacggctcccaggtcatgggcttcccaaggagggagggcagagaaagagagaggtttgggcctagcaggttaaaaagctccttcgtcgacgcggcg

SEQ ID NO: 82767 - DNA, 400 bp, Homo sapiens
  sig_peptide (145)...(10): this location contains the signal peptide sequence, MSALWLVYVSCGCSCALCVLVHAQTCTSFSILVHAQAHVLSCDHI, Run with SignalP
  misc_feature (110)...(324): similar to gi463280 in the genepept database release 114, Run with FASTXY 3.3t00, default parameters
tgctcgtgtggatatgatcacagctgagtacatgggcttgtgcgtgcacaagaatagaaaaggatgtgcatgtttgtgcatgcacgaggacacacagagcacacgagcacccacaggacacatagacaagccaaagggcactcatgtgtgggggtcaaacatctgagagcgtgtgaccagtgtgagtctgaagaccatagactctagtgacaggtgtctgagatggccacgggctgcattagaaacactaagaggctcactgcctgctctgtccccattggatccctcggcaggctccagtgacagcaaactgtggcatggagcccccagaggacctagcacttaaccttggagcttccctgagtcctcaccttgaagagagtccctggaccaatgtcca

SEQ ID NO: 82768 - DNA, 372 bp, Homo sapiens
  sig_peptide (308)...(173): this location contains the signal peptide sequence, MFVFVSIHTELVPILRPLCLLYCCPDCSVPRPLYSLKYLLLINDF, Run with SignalP
  misc_feature (210)...(375): similar to gi5103731 in the genepept database release 114, Run with FASTXY 3.3t00, default parameters
cacaaggttttatcatatcatagagatgccattttagagatggttatagacattaagcaagtaaattaatttcacaatacaagcaagatgtgacaaatgctatgaaagaaataagacagaatgatataatggagtgactgggaaaaggaggacatgtgaatttggagttcaggaaagtcatttataagcaggagatatttgaggctatacaaaggtctgggtacagagcaatctggacagcagtacagcaagcacaaaggtcttaaaatgggaacaagctcggtatggatggagacaaatacaaacattggaaggaataaagttaccaacacagctttcccacaggtgatgagaaagcccaactgagagaaa

SEQ ID NO: 82769 - DNA, 361 bp, Homo sapiens
  sig_peptide (233)...(98): this location contains the signal peptide sequence, MKLFFFLSPLLGFSVKNNGQSGRPQVYSLTAALGTTRYSDLTILD, Run with SignalP
  misc_feature (179)...(297): similar to gi4105 in the genepept database release 114, Run with FASTXY 3.3t00, default parameters
ctcagattgcagcaccccagagtgaataggaaaccaactccaagctgtcacagtaaggactatacaaatgcaaactaataacatcctaaaaaagaaatccaaaatggtcaaatcagaatacctggttgtgcccaaggctgctgtgagagagtatacttggggcctccctgactggccattgtttttaacgctgaaacctaatagaggagacaaaaagaaaaaaagtttcatttcatcaatgacaaattaaactggtactgctctcaagggtggtactgctctcaagggatacacaacaccatttaaacctattgaaacacaatgataatcaaatgtgcacccctaaaaaaatgcattatct

SEQ ID NO: 82770 - DNA, 1196 bp, Homo sapiens
  sig_peptide (32)...(167): this location contains the signal peptide sequence, MALFFLALNFWKVGMACYVRTSSWNSLLFFSQPYFLGSCFEQYLS, Run with SignalP
  misc_feature (731)...(246): similar to gi5306152 in the genepept database release 114, Run with FASTXY 3.3t00, default parameters
cttacataaacatattacagttggtgtttagatggctcttttttttctggccttgaatttctggaaagtaggtatggcctgctatgtcaggactagttcttggaattctttgttgtttttcagtcagccttattttcttgggtcatgttttgaacaatatttatcaaatgtctgtttaccagacgttgttccagatgcttgaacaaaatgaaatgtctgctgtcatagagtttccagtctatgtaagacagtaaacaaatgtataatataatgctagatagtgataagtgctaaaaagaagaagaaaataggaaaggggaaagagagtttctgtgtgattgtatgtgaaagtgtccatgcatgccgctcacccagtattttaaatagagtgatcaaggaagcctgtctgaagaagtaacatttgaacagagatctgaaatagtcagtcacgggaacatttagggagatgttccaggcaggcattgtggacaatttatgtcacaaaaaagtcacccaagtgttaagtcaagtaacatcctgtatgataactatatatacatttttttgttttttcttaagtgaaaaacaaacttattaggttttctgggtactcattaggttttcagaaaagtttttcatttaatatcattattgctgtatatttcccttaatgattattctattatttaatacataagatttatggctctacagatacagcttcacaatcccttatctgtaattccaaaatacaaaaaaatttcttaattcatttagtggcaaaatctgaactgacatgaatctatttaaaattatcctttatgggccaggtgcagtggcttacgcctataatcccagcactttgggaggccaaggcaggaggatcacttgaggccaggagtttgagaccagcctggccaacatggtgaaatcccatttctcctactcatacaaaaattagctgggcgcggcggcacatgcttgtggccccacctacttgcgaggctgaggcacgagaatcacttgaacctgagaggtggaggttgccgagatcttgccactgcactccagcctgggtgacagagcgaccctcttgcctcacaaaacaaaacacggccttttctccctcaggggggacctcggcccccctcccgtgggaaaaaactttagcggccttagccaccagctgcccaccg

SEQ ID NO: 82771 - DNA, 366 bp, Homo sapiens
  sig_peptide (126)...(261): this location contains the signal peptide sequence, MQSALMIGIPSGVVMCFCLQKSNEAPIGNVTISYPRGLKIPFLGW, Run with SignalP
  misc_feature (192)...(6): similar to gi5103581 in the genepept database release 114, Run with FASTXY 3.3t00, default parameters
gttgtggctgtgtccactcaggtgcatttttgttgcagttcctgacactcggggcgctttaatctgcacacacgctcaggggagtgttgcggtgcagtagtagcctgtgagtgaatgagtcatgcatgcagtctgctctgatgatcggcattccttcaggagtcgtgatgtgtttctgtctgcaaaagtcaaacgaagctccaataggaaatgtcacaatctcctaccccaggggactgaagatccccttccttgggtggttaaaaatggacttgatttgcgcttctgagaaactgacatgtgaaatcttgttcctgatgtgggaggatggacgccgtcattcattcattcattcatcgaatcttt

SEQ ID NO: 82772 - DNA, 833 bp, Homo sapiens
  sig_peptide (29)...(164): this location contains the signal peptide sequence, MYLGLFLDFYSVSFCGCLHMLQPQCFNYFNSKDQSRFHCLKHCSD, Run with SignalP
  misc_feature (244)...(167): similar to gi2688753 in the genepept database release 114, Run with FASTXY 3.3t00, default parameters
atttagtgcataaaagcagaattctttcatgtatttgggtctatttctggacttttattctgtctcattctgtgggtgtctccatatgctacagccacaatgttttaattactttaactctaaagaccagtccaggtttcactgtttaaaacattgttctgatcatcttattttccttctaagtgaacttagaagcaatatgtttagttcttttttaatcttatcgatattttatgattattgcattaatttgtagctaaatacatgtaaaattttttattttagcccttcttttctatggctcttaatttttctctcatgtctgcttatgccttcagagcaatgctaaataatagtgatcatagtagaaattctcatattgtctccctgattttaatgaacatgctttaggtattatgtattagtactcataagtggcattgcgctgtatagttttttgtttgtttgtcattgagatacaggcatactttgtcgcccaagctggaatgcagtggcatgatctcagctcactgcagccttgaccatctgggctcaaccaattcttctgcctcagcctcccaactcattttttctttaaattatttgtagagacaagggctcgcttacacaggctgggcttcaaactctgtcttcaaactaatctcccatctcagggtctaaaagtgccgggaataccgggggggactaaccattacctggggtggaagcggtcttttggtgggtgggcaattacctaacggtgggggttaataatcttaaaaaggaaatttcttaaacctttttttttttttaaacgggggggggcccagggc

SEQ ID NO: 82773 - DNA, 490 bp, Homo sapiens
  misc_feature (1)...(490): n = a,t,c or g
  sig_peptide (181)...(316): this location contains the signal peptide sequence, MKIFFHIFFHKCLFTYRLFITLALILWYSDIEESTFPPLMRYCPN, Run with SignalP
  misc_feature (289)...(440): similar to gi965069 in the genepept database release 114, Run with FASTXY 3.3t00, default parameters
gctttttccatagacgtaacattttgtctcttatgtgcattacatagtttcttccaagatgtcaacttatagttcatttatggtctctgctttgtagaacttcaaaatttctctacaatcacagttatatattttttctgggttcatatgttgcttagaacacttccctatacgaaaaacatgaaaattttttttcatattttctttcataagtgtctatttacatataggttatttattactcttgcgttaattttgtggtatagtgacatagaggagtctacctttccccctctaatgaggtattgtcccaacacagtgttgcataaatcttttttccaaatgtcagcttttatcacttatcaattctcattgtacttgagtctgttttagattgtctcttatattgatcttttagtttataggaaagctgctttacttnnncnnatttctttttcttctttgttttcgacggacccaattttaaaag

SEQ ID NO: 82774 - DNA, 332 bp, Homo sapiens
  sig_peptide (131)...(266): this location contains the signal peptide sequence, MPISFLTFFSFPSCALTRPFLSLLANSRISFSNAASASPPWTIGK, Run with SignalP
  misc_feature (208)...(333): similar to gi2981073 in the genepept database release 114, Run with FASTXY 3.3t00, default parameters
ggcacgaggtccctcctggccatttggctttctcacagcttgctttgtacctgacggctcttcctctgctctgcgctttactctgccctgcccacctgcctaaagcctgcctccctgttcttgttaactgatgcccatttcttttcttacctttttctctttcccttcttgtgccttaaccagaccattcctttccctgctggctaactcgaggatatccttctcgaacgccgcttcagcttcgccaccatggaccatcggtaaatcctgcctgaccttaatgataaactgtgctaagttgcccttgacttttaaccagaaatggccactgc

SEQ ID NO: 82775 - DNA, 352 bp, Homo sapiens
  misc_feature (1)...(352): n = a,t,c or g
  sig_peptide (25)...(160): this location contains the signal peptide sequence, MWRMRLCXLGYPATWLQMTEIGHARSLMKPDWKLSLTFFSELSPS, Run with SignalP
  misc_feature (225)...(334): similar to gi2208980 in the genepept database release 114, Run with FASTXY 3.3t00, default parameters
ggcacgagtctttgtcttgtaaacatgtggaggatgaggctgtgtggnctaggctacccagccacgtggctccaaatgaccgagattggccatgcgaggagcctcatgaagcctgactggaagctttccttaacgtttttctcagaattgagcccatcttcattgttgccgccctgacgggggcctgtttatgagctttacaggaaaaaggggatcaactgttttcctccaggggctggtaactgcccgaccagaagaggctttcccagtggccctctgacatacgtgtgattcccacctgtgggacggtggcccctggccctttaagattttttcaacattcaaaagaagt

SEQ ID NO: 82776 - DNA, 350 bp, Homo sapiens
  sig_peptide (204)...(69): this location contains the signal peptide sequence, MAILFSKLLAVSFQKLIFAFDDSSAEEPEVVISWLGVVAHAYKKI, Run with SignalP
  misc_feature (204)...(344): similar to gi3065737 in the genepept database release 114, Run with FASTXY 3.3t00, default parameters
ggccaggctggtcttgaaactcttggcctcaaatgatctgcctctcttagcctcccaaagtgctggaatttttttataggcatgagccaccacacccagccagcttatcactacttctggttcttctgcacttgaatcatcaaatgcaaatatcagtttttgaaaactgacagctaacaattttgaaaagagaatggccatcttttcagttgtaaaacattttattaggtttataaacagcaattagaatgatcaagtcaatgaaaaattttttaacattcgctctctttctaatcacttttgtgtgtacatcaacctttagcatttgtcttcttatgaacccatccagt

SEQ ID NO: 82777 - DNA, 366 bp, Homo sapiens
  sig_peptide (298)...(163): this location contains the signal peptide sequence, MPASQAFLFCKCSWVFCWSRGESVSRTSGDSRSSHDLTLTEEGVQ, Run with SignalP
  misc_feature (241)...(349): similar to gi533656 in the genepept database release 114, Run with FASTXY 3.3t00, default parameters
cgctagatgagtgagtccatttacgataactaccatgggtagtgattatcgtcgttatattagctcctctttatcgttcgatgatgatgtacacgtatatgtaagtccgcttctgcgatcttattagccttatctttgttcagatctagggtctcacaatttttgcactccctcctcagttagggttaggtcatgggagcttcggctgtcccctgaggtcctcgagactgactccccacggctccagcagaacacccaggagcatttgcagaacaggaatgcctgagaggcgggcatgccttgagagggctgtaaactggaaacctctggcaccgcggacaccaagaaccacaggcggctcgtgcc

SEQ ID NO: 82778 - DNA, 2004 bp, Homo sapiens
  misc_feature (1)...(2004): n = a,t,c or g
  sig_peptide (918)...(1053): this location contains the signal peptide sequence, MFLLRVKLMHFVNSLHNYIMTRILHSTGLEFQHQVEEAKDLDQLI, Run with SignalP
  misc_feature (1527)...(1761): similar to gi288145 in the genepept database release 114, Run with FASTXY 3.3t00, default parameters
gcaccacntgccaggcaggagccagagatgcagaaagaaaaagtttatacactctctttctggaatctgtacagtcccgtcttcgacatggagaagattccactccacaggttcttactgagcaacaggcaaccaaggagaacctgatgaagatgcagtccattgctgaaagccatcttgaactggatgatgttcatgatccactgcttgccattaactttgcaaggatgtatttggagcagagtgactttcacgagaagtttgctggtggtgatgtatgtgtggatagatcatcggaatctgtgacatgccagacttttgaattaacgctgagatcctgcctctatcctcatattgacaagcagtatctagattgctgtggaaatctcatgcaaactctaaaaaaagattacaggttggtagaatacttgcaagctatgaggaattttttcttaatggaaggaggagataccatgtatgacttctacacgtcaatttttgataaaataagagaaaaggaaacatggcagaatgtgtcttttcttaatgtccaactccaagaagcagtaggacagcgttatcctgaagatagttcacgtctatctatatcttttgaaaatgttgacacagctaagaagaagctgcctgttcatatcttagatggtctgaccctcagctacaaggtcccatggcccgtggacattgttataagtttggaatgtcaaaaaatttataatcaagtgtttcttctcttattgcaaataaagtgggcaaaatatagtctggatgttttactttttggtgaactggttagtactgcagaaaaaccacgacttaaagaaggccttatacatgaacaagacacagttgctcagttcggaccacaaaaagaaccagtaagacagcagattcatcgcatgttcctcttaagagtgaagctcatgcatttcgtgaacagcttgcacaactacatcatgaccaggattctacacagtacagggctggagtttcaacatcaagtcgaggaagccaaggatttagatcaattgattaaaattcactataggtatctgtcaaccatccatgaccggtgtctgctgagagaaaaggtcagctttgtgaaagaagctatcatgaaggtgttgaacttggctctcatgtttgcagacggttggcaggcaggcctgggcacttggcgaatggaatctatagagaaaatggaatctgattttaaaaactgccatatgtttcttgtaaccattttaaacaaagccgtctgtagaggatcctttccccatttggaatctctagcgttgtcactcatggctggcatggaacaaagttaaatgtcttcagcgtaataaatatctccgactttgtcatcatacatgtacatttccaccatgtgcagctgaaaagtgagaatatttttattttggtttatttgtaaaacttgtccacagtcagcctggcacagtcgctcatgcctctaatcccagcacgatgggaggccaagacaggcagatcacttgagcccaggagtttgaggccagcctgggcaacatggtgaaacccggtgtctaccaaaaatacaaaatgtatccagacatggtggtgtgtacctgtagtcccagctactcaggaggcaaagatgggaggattacttgagcccaggaggtcaaggctacagtgagccatgattgcactactgcagtgcaacctgggtgacagagtgagaccctgatctcagaaagaacccacttgcccacagtcccagacagatggattgtaggtgggttttctggagattagtagatactgtatagagttgtatacataaaattgtgtcagtagtacaaagtgtatataggctgtttactcttacatttcctactgtaagatacagatttatggtactgatacctttaaattatatcatattttgaaaatgtaattactgatattcaaaataaattaaaggacttaaaatcaaaaaaaaaaaaa

SEQ ID NO: 82779 - DNA, 1343 bp, Homo sapiens
  sig_peptide (520)...(655): this location contains the signal peptide sequence, MLAGQLLPMLTLLPPSFPLPHPTLGPRRHASLTQLGPAFWMAWGR, Run with SignalP
  misc_feature (771)...(109): similar to gi2384941 in the genepept database release 114, Run with FASTXY 3.3t00, default parameters
ggcacgagaaaatattttcttgggaatgtgtttaaccctttctgcgttcattgttgctgagatgtgaaaactaaccattccctcctgcctacctttttggccactgggcggcagagaatggcgctatgtgcagttgggcccccggcaccatgggcctttggcctgcctgctgcagagtagccctgcctgggcagtctccaggcactgagcaggccatctgtggccaggctgagagaatgactggctcgcttaccagcgtgcatgggacaaggagctttggagcctcaaggggttgttgctggcctgggctagagggaaaggtgaccatccgtctgtcctcctgtctttctattagcgcctccatgtgagtgatggtgccttggttcactagccttcccccaccaccccaccatgccacctggtggtcttggggcctgtgctgtcactccagcccctggggaggagaggacccagcccggagagttggggcaagggctccacatggcccaagggcaacagatgctcgcagggcagctgctgccgatgctcacgctcctgcccccctccttcccgctgccacaccccaccctgggcccccgcagacacgcatctctaactcagttgggcccagccttctggatggcttggggtaggccatgggcccacctggggccaggccagcccctggggcagctctggaagagcagtgtggaggagcacttgcttgcagcctggcttcagcctctggcactgctggagtggtccctgggagcttctgcactgtcggctttggggacgtctcacccacttgggttacagtaggccttccccacccagagagaagtgtttccaccccagagacattgcctgtcagcccctgaagtgctcgcctcccccagtgcccgtcaccagcccttcctatctgtggggtccaagtcaggcttcccctgcggccaccagccatagggagcagccatcagcccccgagtcagaactgcttctgtctgtccatacctccaggctctcccggagagggggacggatatttatttcctaaagtttgcacttaattgtgaggattctcaggattgttgggggctactgaaaagaggaatgtgttgaatgtcgcgtttgctgtccactcgtcctagaagtttagtgtttttgtcactgtcatgtgtttctgtgggcagagctggttctgggagggtgggtcagtgcacccgaggctcagagcatccatccaccccactggccctccttccagataccctctctcttaattggggttctttgcatgttaaaatacttccacaataaataaataattgaacaaattaaaa

SEQ ID NO: 82780 - DNA, 703 bp, Homo sapiens
  sig_peptide (177)...(312): this location contains the signal peptide sequence, MRLWVLFKPSALANFLRYHHSRGIGSTASLLPGVARSPGSPVSLP, Run with SignalP
  misc_feature (522)...(317): similar to gi4426946 in the genepept database release 114, Run with FASTXY 3.3t00, default parameters
ggcacgagagaatttttatgatggctgctgtaaaatccttatcagataattccaacatctgtcacctcattgtttgcatctactgatggtcttttttccattcggaaacattttcctgtttcttggtgtgtggaatgattttttattgaaacctggatatttttaggtattatgttatgagactatgggtcttatttaaaccttctgctttagccaactttctcagataccaccacagcaggggaattgggagcactgcttcattattaccaggtgtggctaggagtccaggttccccagtcagcctccctttatactgagtaacagggtcccctcattactactgggcaaggtgagaattcagtttcccattaggtctttattgattcttccctggctggaatgtgcagcggcaccttttgctgcaccctgggaatctccactaatgctatgggacagagtgaccaggaagagcttcattacaccaggtgggaatgaaattcccagtaccctacacagccttctccgacaccactctggagttgtattcttcccgccccccaacataccccatttaacttcaagcatcttaaccgaggcttaattaaaccggccgccagcctaaatcccttttaacggagggttaattttaaacttggcacctggcccggcgatttaacacccgcccggaccgggaaaaaac

SEQ ID NO: 82781 - DNA, 491 bp, Homo sapiens
  sig_peptide (407)...(272): this location contains the signal peptide sequence, MLFLNLTFNIFPLKRIIVLFDERGNTLPSQNKLLLDSVPFFTDEI, Run with SignalP
  misc_feature (279)...(467): similar to gi1872140 in the genepept database release 114, Run with FASTXY 3.3t00, default parameters
ggacatagttgatctcaaatacatcattctacatccttaatcatagaatgacatttcaaaagtttcaactattaatctgtggcataaaagacagaataataaaagcaacaaatcagactcataaagtgggagattataaaactcacaaccttagaggaagtaggccactaaaattacacgttaaaaaagaaagtacatcacccttcccgtggtgacacatgttttaagcaaatcacaagtgagccgtaaatcacttacaggctcactttacaatctcatctgtaaaaaaaggcaccgaatctaacagaagtttattctgagaaggtagtgtattacctctttcatcaaatagaacaatgattctctttaatgggaagatattaaatgtgagatttaaaaacaacatgaggttttctgttctttctacaaataatctcgcacgcgtgggtcgaccgggaatcggggcggtcacagcgtgtcagaatttcagg

SEQ ID NO: 82782 - DNA, 426 bp, Homo sapiens
  sig_peptide (72)...(207): this location contains the signal peptide sequence, MILCSVCFKICDPPLLLVIASAFQCPLSVAEDIFSSALFPIVPFL, Run with SignalP
  misc_feature (118)...(355): similar to gi1110587 in the genepept database release 114, Run with FASTXY 3.3t00, default parameters
cttaggagaaaccaaacttgtcagatattttggaatggtagctctttttcaggaattagaataactgaagtatgatactgtgttccgtgtgctttaaaatctgtgaccctcccctgttgctggtcatagcttcagcatttcagtgtccattgtctgtcgctgaggacattttctcatcggctcttttccccattgtcccattcctctcactcacacctgattaccaaatagctctaacgaaatcacagtcactccttcctgtgtttccaccattgtgtacatcttcatttgcacaccctattttttaatcaaagttaaagcctcaccaacaaggtacttagaacaatcacccacttctggccacttcgtgacgggaaatacatctttgcaggggaaggagctggatcagactgacagggtttcact

SEQ ID NO: 82783 - DNA, 772 bp, Homo sapiens
  sig_peptide (696)...(561): this location contains the signal peptide sequence, MECGLPKFAGFLFMILCLWNCPEAMECEDGFHCSSVGLLVFASIF, Run with SignalP
  misc_feature (660)...(706): similar to gi1419140 in the genepept database release 114, Run with FASTXY 3.3t00, default parameters
ctgtctagttctatagcactgtgcttatttcttttccatccaacctttgtactccccactttgtatcttcttcagtggcttctaggaagtattactataactactgaatcaatgaattcatagcaaagtgtttcacaattctgtccttctctgttctgtgttagactcccaaacagggctccataatccaagcaatagtaagtttcttctgcttttcaaatccaattagaattttgtccaagcttataacaatttatcctcccctaactcttgagaatcaaagtcattgttatttagatgttaaaaagtttgacctaattcttatctcttaaagaaacatctaaaatgtgtttacagagaattgggatatcatcttcaggtaatccaaatattgacagtgaagaaaagagcccaaacataatgagaaagtaacacacagcagagtatttcaactttaggatataacaacttaaaagatgttactcacaaatatataatctttatcaactggccaaaatatagccttgaattatccaacaagtctcctatttcttgttataaaatatactggcaaaaaccaacaaacccacactgctacaatgaaacccatcctcacattccatggcttcagggcaattccataaacacaggatcataaaaagaaagcctgcaaacttaggtagcccgcactccattttaaggatcggaaattaaatgacatgtgatcatccagctacagcaacctgaggatctttttaaaaagctagcagga

SEQ ID NO: 82784 - DNA, 324 bp, Homo sapiens
  sig_peptide (164)...(29): this location contains the signal peptide sequence, MLRVCRSKRLWLLHFYTGGKIRFDRVKDNGGREDVKEEIKDRQKS, Run with SignalP
  misc_feature (58)...(319): similar to gi4731233 in the genepept database release 114, Run with FASTXY 3.3t00, default parameters
agctaaatcacattccttttcccttgcagacttttttgtctgtccttgatttcttctttgacatcttctcttcccccattatcttttactctatcaaacctgattttaccccctgtataaaaatgcaaaagccatagtcgtttactcctacacacccttagcatttgctgggtgtttgtctctttggtctctcgagccttagatatctctaggccccattctagctcccatgagcaatttcacatcactatggacatgacctcaatgaaactggctatggtactctgggttttcaatgtacaattctatttcccttcctgtagg

SEQ ID NO: 82785 - DNA, 427 bp, Homo sapiens
  sig_peptide (311)...(176): this location contains the signal peptide sequence, MYEEKRVYPVWVIVCLLLTSVTAPKWGKGPLKGSGMNLVVVTTDD, Run with SignalP
  misc_feature (334)...(419): similar to gi3452382 in the genepept database release 114, Run with FASTXY 3.3t00, default parameters
ggcattgaggccaatagtgtgtcatttgctttccctcagctttgggtctctcaacagtaatatataaaaactaaatcagtttttgtgagctataccaggctttgtcagaataaaatgaagtgacaaattcacaaatgtccccagctacagagcactgcagcaatgtaacaaacggtcatcagtggtcaccaccaccaagttcatgcctgaacccttcagtggtcctttgccccacttgggggcagtcacagatgtcaacagtagacagacaatgacccagacaggatatactcttttttcctcatacatctacaatgtgtctaaattaacatctggttacctttttttttctttttaacaagaaagatgccaatttaaattaaaaatccatatactttacagaagtcatattcttgctagagaagac

SEQ ID NO: 82786 - DNA, 403 bp, Homo sapiens
  sig_peptide (310)...(175): this location contains the signal peptide sequence, MYLFPAFLLSTSTCIFLLCRNCFESADPKLQKTCFGSGVWVLAWK, Run with SignalP
  misc_feature (317)...(399): similar to gi825541 in the genepept database release 114, Run with FASTXY 3.3t00, default parameters
ctaatcacctttgagcttagttctggtttatatccagcttttcatctgtcaattatattggaaaaagagaggcactgcccaggtctcaggagggcccctttggaggctgcaaggaacctccctttcccagggcgtgaagaccctgagccctgccatgcttggtctgcaaggctggcttccaggccagcacccagacaccactcccaaaacaggttttctgcagttttgggtctgcactctcaaaacagtttctgcacagcaagaaaatgcatgtagaagtggaaagaaggaaggcaggaaacagatacataaccactttagctctactggcttccccccccaaaaaaaacctagcttccgacctgctccgaatgacttgaggtgaaaatctcggacgcgtggg

SEQ ID NO: 82787 - DNA, 363 bp, Homo sapiens
  sig_peptide (63)...(198): this location contains the signal peptide sequence, MVCGGGRAQLLWDFALKLRAALLQQKATQGEIQLVLMGEAFRQAL, Run with SignalP
  misc_feature (140)...(347): similar to gi5834784 in the genepept database release 114, Run with FASTXY 3.3t00, default parameters
ggacagacattcaaattgtctacaccacccctccttcatccccttcttcaggcagcagccacatggtgtgtggaggagggagagcacagttactgtgggattttgcattaaaactcagagctgccctgttacagcagaaggcaacacagggtgaaattcagctggtgctcatgggggaagcatttagacaagccctagccagaggggactcttccatcccagtggccagaccttgagttccggcaagtctcatcactgtgagttaaagggctctgggctccaaataaatctgaaaggcagtctaggccaaaaggactgcaattcctgggcaagtcctggtgctgtgatgggcttaaagccaat

SEQ ID NO: 82788 - DNA, 653 bp, Homo sapiens
  sig_peptide (141)...(276): this location contains the signal peptide sequence, MPVCICIYIYMFYFVLQISRSSFTCSFSPIYYKYSSLLVYTFLQD, Run with SignalP
  misc_feature (176)...(12): similar to gi262249 in the genepept database release 114, Run with FASTXY 3.3t00, default parameters
ctttttaaaaatttttataaagatagtaatgcatattcattatataaaacatagacaagaaaagaataacaagtaaatcattaactggagataaccattgatcacttgatatacgagttttataattttaagatatatgcatgcctgtgtgcatatgtatatacatatatatgttttattttgttttacaaatatcaaggtcatcctttacatgtagcttctcaccaatatattacaaatattcttccctgttagtatatacatttctacaggacagttttaatacctgcctggcattctattttctaaatcagggttggcagataataatggtccttgggccaaatatagatcactttctgtttttgtaagtaaagttttattgagtctgcctatggctgctttcatgctagaattgagtagtggcaatggagaatttgtggcttgtaaagcctgaaatatttattctgtggcccttacagaaaaacattgctgatacctgggttagataattgattctaaaactgtggatcagagatctctaggggtctcctagattctttcaaggaattgtctgagaaatagtgcccatatttcttactggaacacgaaaattcttcatgatttaactcatcaaatgtgaatcattgagc

SEQ ID NO: 82789 - DNA, 354 bp, Homo sapiens
  misc_feature (1)...(354): n = a,t,c or g
  sig_peptide (69)...(204): this location contains the signal peptide sequence, MCLSSLLLLQTALQEICTLVSFMCVITYMCRYSPRKKFSEVASLG, Run with SignalP
  misc_feature (230)...(341): similar to gi2447170 in the genepept database release 114, Run with FASTXY 3.3t00, default parameters
tgcttttctctttttaggtacatagtattccactacatgtatttgcccagtgcccagtatatgaacacatgtgtctttccagccttttgctattacagacagcactgcaagaaatttgcacccttgtatctttcatgtgtgtcattacatacatgtgcaggtacagccctagaaaaaagttctcagaagtggcatcgctgggtccaagggtaaatgcatttaaaacaacattttttatttatttcgggcagcctactggaatccttagaacattttatgtatgaaacacatgtctaagagcttgcccattcagggttacatgccagtgcatctctcagtgaatatttacccttn

SEQ ID NO: 82790 - DNA, 356 bp, Homo sapiens
  sig_peptide (134)...(269): this location contains the signal peptide sequence, MLSSPKTPLMYPPWIPCGSPNMHWISLLLWVFSTLDAPPYPLWTL, Run with SignalP
  misc_feature (207)...(356): similar to gi60925 in the genepept database release 114, Run with FASTXY 3.3t00, default parameters
gattcatagatctggaattggcggccgcgtcgacttcctttacagatgtccgcaagaattactgaattaaatggtgacatttgccgccattattcagattaatgacatacagacctttttatgttccttttttatgttatcctcacctaaaactcctcttatgtacccaccatggattccctgtggttccccaaacatgcactggatttctttgctcctgtgggttttctctaccttggatgccccaccctaccctctctggacattggaaatcttgccatgctcaaagcccagcttagaaccatctcattcatgaagccattcttgatcttttccagtcaaaaggaatccctttc

SEQ ID NO: 82791 - DNA, 439 bp, Homo sapiens
  sig_peptide (180)...(45): this location contains the signal peptide sequence, MASLAHLALRCVLAGAIGGLDPVGLLFQQATWACSQGRWAQFKGS, Run with SignalP
  misc_feature (335)...(426): similar to gi288278 in the genepept database release 114, Run with FASTXY 3.3t00, default parameters
gtgcagcagttccaaagctcatcctgcagtaccgttgtgttctcagaccctttgaactgggcccatctgccctgtgaacaagcccaagtggcctgctggaaaaggagacccacggggtccaggccccctattgctccagctaacacacatctaagtgccagatgtgcaagtgaagccatcctagaccaatcaggccccagataacctgctagctgaccaaagacacacgagcaagcccagccgagatcaacagcattgcccagctgatctgtagactagagtgcagtttagaggtagtttgttataaagaagaagcaaattcatacaccagggtggatgcctgagaaagtgtgggaacacagtcagaaacagcttgctttgtggctgtacctgacagccctgccagggtcctgcctcgtgccaagcttggcgtaataag

SEQ ID NO: 82792 - DNA, 353 bp, Homo sapiens
  sig_peptide (297)...(162): this location contains the signal peptide sequence, METRWMSLFTILFFFSSVVMPAFQRLSSFLFCILITFFLLLSGLY, Run with SignalP
  misc_feature (206)...(334): similar to gi924355 in the genepept database release 114, Run with FASTXY 3.3t00, default parameters
caattctatctttatattatttatatgcgcaatacaacaaccactcagttgttgggacacagaagactcaaatgacaaaatgacaattaggaatcactacaaatagataaagacttaactaacattcaatgctggaaaattatttcaagccatcaaaccatatagaccagaaagcaacaaaaagaatgtaattaaaatgcaaaaaagaaatgaacttaaacgctgaaaggcaggcataaccactgaactgaaaaaaaataggatggtaaacagactcatccatctggtttccatgactaatgggaacagaggtgctcagggagagcgagtggagagaaaacaggaggttacgg

SEQ ID NO: 82793 - DNA, 648 bp, Homo sapiens
  misc_feature (1)...(648): n = a,t,c or g
  sig_peptide (10)...(145): this location contains the signal peptide sequence, MLVLLVWVHHTLLLGQKSTYEEKRNGKWGRQRRAPYLGVYIEATG, Run with SignalP
  misc_feature (299)...(116): similar to gi158463 in the genepept database release 114, Run with FASTXY 3.3t00, default parameters
agatagcatatgcttgttttgcttgtttgggttcatcatactctattgcttgggcagaagagcacatatgaagagaagagaaatgggaaatggggaagacaacgcagagcaccatatcttggggtgtatatagaagctacaggacaagtgtaatttttatcattgcatggggagcattgacataatttctactgcagctgagcattttttaatatggataataggattctgcaagtgatacatttggtcagagaacttaataaactagtcaagtgggataggtcctgtgacagaattgtgtgatacaggtcaaacaggagttgggttatggggaaaatgccagttgaaatatgttttgatctttggagaaacctattttttcatttaacctgttctttaaatccagtatgttccagaacatacaaaaatgtttaaatgttccatttgtaagaggatatcatgtattttatatcaatttaaatgcagttatcctaatcatttttctttcatttttaccctttattaactcttcatttgtttacaaaacaaatccactctatgaacgcaatctctaattatgtgntttctttcagggatccaaaccttgaaacctttgctctagatgtcaggcttgtttttgacaactgt

SEQ ID NO: 82794 - DNA, 516 bp, Homo sapiens
  sig_peptide (160)...(295): this location contains the signal peptide sequence, MLNFLTLVPFPLRRAVPGHISTRRPFFHSPPPKLCVCVHFNILSS, Run with SignalP
  misc_feature (168)...(129): similar to gi1620065 in the genepept database release 114, Run with FASTXY 3.3t00, default parameters
ctatttcattgtatggatgtgccgtaatttacttgtataacttgttgagacatgtaagtttactacttttcattattaaaacaatatttccgtatacatcgttcacatctgttactattttttcctgattagattcttagaattgctgaatcgtgcagaatgttaaactttttaacacttgtcccatttcctttgagaagggctgtcccagggcatatcagtacaagaaggccctttttccatagccccccaccaaagttgtgtgtgtgtgtgcattttaacatattgagtagtaaaaatatcttatttgaattccacgtctctggttaccaatgaagtttaacttttattttttaatattttctgaaccttttttgcaagaacattcttctagattatgacgtactaaatccagtatttttcctttattctgacttctctgaagaatttctttctttttttttttctgagacagagcctgggcaacaagagcaaaactccgtttcaaaaaaaaaa

SEQ ID NO: 82795 - DNA, 393 bp, Homo sapiens
  sig_peptide (82)...(217): this location contains the signal peptide sequence, MDVGPNSLPHLGLKLLLLLLLVTLRGQANTGWYGIPGMPGLPGAP, Run with SignalP
  misc_feature (82)...(361): similar to gi50229 in the genepept database release 114, Run with FASTXY 3.3t00, default parameters
cttgcttgtgaaaagggaagcagatctgaggacatctctgtgccaggccagaaaccgcccacctgcagttccttctccgggatggacgtggggcccaactccctgccccaccttgggctgaagctgctgctgctcctgctgctggtgaccctcaggggccaagccaacacaggctggtacgggattccagggatgcccggcctgcccggggcaccagggaaggatgggtacgacggactgccggggcccaagggggagccgggaatcgacgccatttccctgatcctatgacccgaaggacagtaaggaaaacccgggtttttcggacggaaccgtaaatatggccccatgggaacctcgtgggaagcaaccgggggccaggccccatggtag

SEQ ID NO: 82796 - DNA, 428 bp, Homo sapiens
  misc_feature (1)...(428): n = a,t,c or g
  sig_peptide (120)...(255): this location contains the signal peptide sequence, MWISSINFFLFIIGIFFCFFVCLVILYYILEIVYKNDSYDYSNTV, Run with SignalP
  misc_feature (144)...(386): similar to gi4049867 in the genepept database release 114, Run with FASTXY 3.3t00, default parameters
nttctgcttaaactcctcagcttttcaataatgttgtgcattgttctcactagattatttaacatatttataacaattatcttaaagttattttctgctaattccaacagttgggttgtatgtggatctcctctattaattttttcctctttatcataggtatatttttctgtttctttgtatgtcttgtaattttgtattatatactagaaattgtgtataaaaatgatagttatgactacagtaatactgtgctcagaaaatatcatgcttcttcttctgttaggctgctggtgagagatctcaatctgatttgtagttgagcagggtctgggcttcattgcagctttagttagattctgttcaccactggcttcaaatatttgaggatggggttgagactttcccttctgtcgtcttctcgcagc

SEQ ID NO: 82797 - DNA, 615 bp, Homo sapiens
  sig_peptide (454)...(319): this location contains the signal peptide sequence, MDLIFVKVLLIFAAIQTLSKWQFAFTFSIQTVPSLVINLSWLLLD, Run with SignalP
  misc_feature (53)...(599): similar to gi4468951 in the genepept database release 114, Run with FASTXY 3.3t00, default parameters
cactccgccgcgctctccgccaccgccaccactgcggccaccgccaatgaaacgcctcccgctcctagtggttttttccactttgttgaattgttcctatactcaaaattgcaccaagacaccttgtctcccaaatgcaaaatgtgaaatacgcaatggaattgaagcctgctattgcaacatgggattttcaggaaatggtgtcacaatttgtgaagatgataatgaatgtggaaatttaactcagtcctgtggcgaaaatgctaattgcactaacacagaaggaagttattattgtatgtgtgtacctggcttcagatccagcagtaaccaagacaggtttatcactaatgatggaaccgtctgtatagaaaatgtgaatgcaaactgccatttagataatgtctgtatagctgcaaatattaataaaactttaacaaaaatcagatccataaaagaacctgtggctttgctacaagaagtctatagaaattctgtgacagatctttcaccaacagatataaattacatatatagaaatattagctggaatcatcttcattactaggttacaaggaccaacactatctcaggccaagggcaacctttctaaac

SEQ ID NO: 82798 - DNA, 438 bp, Homo sapiens
  sig_peptide (261)...(396): this location contains the signal peptide sequence, MSSSNNDSFVPFFFIFISVNFCLTAFVNLSYIMRNGALMEDILLY, Run with SignalP
  misc_feature (198)...(363): similar to gi3256646 in the genepept database release 114, Run with FASTXY 3.3t00, default parameters
attgaggaccactagatagtgcggcggaattccagtcctctagggagctctcttggaaaggttggggtgctagacacacaaaccagccccttctcttccctgagtgaagctgagagtgaggggctctcttcctgattgtatggcactgcactgtgggccaggtgtctgtggagacggtgctggaaatctccctaccagtttcagtgagtctggtttcatgttctggggttcaggagcctgtcaattaggttctgatttccatgtcatcttctaataatgatagttttgtacctttctttttcatttttatttctgttaatttttgtcttactgcatttgttaatctttcctatataatgaggaatggagcactgatggaagacattcttctttattaccaacttgagtggaatgcttctgaagtttcaaaaataagaa

SEQ ID NO: 82799 - DNA, 460 bp, Homo sapiens
  sig_peptide (71)...(206): this location contains the signal peptide sequence, MTLFTILFCIVNLGYGFSFLHNTHFFHNYLSELLVGHSLLENAFF, Run with SignalP
  misc_feature (420)...(457): similar to gi3037018 in the genepept database release 114, Run with FASTXY 3.3t00, default parameters
catcgacgacccattgaagatcctctagtccatgcggtggaattctttagattttcccagattattactaatgactttgttcactattttattttgcattgtcaatcttggttatggattcagttttcttcataacacacatttttttcataattatttgtcagaattattagtgggacactctttgttggaaaatgcctttttttaccctcattcttgagttataatttagctgtttctctcaacattttggatagattgggcttctgttttctgtcttttaaaaagacttctctttgatgttttgcaatttcttatgatgtgttgaaatgtggatttatttttatttaccctacttagggcatgtgcttcctgaaggcgagttctatgtgtttcatctattctagaaaatttatagctattatcttttctaatgttgccttctcacttttctctctgt

SEQ ID NO: 82800 - DNA, 1098 bp, Homo sapiens
  sig_peptide (53)...(188): this location contains the signal peptide sequence, MLLKLFCPVASLLCIIPLSFPILWLLLGSIIFRSIIVAMMGEKTC, Run with SignalP
  misc_feature (648)...(453): similar to gi1947023 in the genepept database release 114, Run with FASTXY 3.3t00, default parameters
tacgcctatcctcttgtgcttttaagcagacacaaataaaacacgttgccatatgcttctcaaattgttctgtccagtagcttctttgctttgtattatacccctctcatttcccatcctttggttgttgcttggctccattatctttcgaagtatcatagtagccatgatgggagaaaaaacatgtcacatgaagcactgacgtcaagccatagcaaaatagaggacaggttaggagtatgtatgtgaactgggatagaaacacatgaaggaggagagggtggaaaactaaagatgaagattggctttgagagataattcattcatttaataactgcatattgtagtaggttgactagtggcacccgaaataatatgtccatgtctttgctccctggaacctgtgaatgtgaccttatttggaaaaaaaaaaagatcctaagttaaggatcttgagatgagatcatcctagattatccaggtaggtcctaaatccaatggcaagggtccttataaaagatgaaagaggagaagacacagagaataggagaaggcgatgtgaagacggagatagaggttggggctaatgccaccgcaagccaagggaagctgaggaatgccaggcagttgccaaaacggaaaagaagcagggaacttttccccttaaagcctcccaaagggaatatggccctgccaacaccttcatttacgactctaacctcttaaattgggacgggctaacatttctgccattttaagcctacccagtttataccactttgttatgggggctccaggccactatcaccaatccttccctcgaacagagtagatctaaacccccagtgggtagactccggacactatactcctatccggactcacctcttccctcatatgcagaatccccggctctcaggggtgctgcatccgtgtaaccccctcttctccagccgctgcgatacggccccgtgatcttcgcaccccatcgctccatctcttacacgcctttgctctctggccccgctcgtgcggtacgcgcgggaccctcgttatcgtactatgtacactcgcctgcccggttccacggctaccccc

SEQ ID NO: 82801 - DNA, 447 bp, Homo sapiens
  misc_feature (1)...(447): n = a,t,c or g
  sig_peptide (393)...(258): this location contains the signal peptide sequence, MVPCPLPVMTGVVSAWFLGEPFCSGTLSPLRAGLGLGGGGLECAS, Run with SignalP
  misc_feature (210)...(447): similar to gi2587351 in the genepept database release 114, Run with FASTXY 3.3t00, default parameters
ccagcagggtgctgcccatccagggaccactaactacatttccaggaacaattcactgcctgctgtgtcagccgcttctcaagtgctcccatgtagagtgtggctattgtggggaacaatgcagaaatagaaccctttcacgctcgcaggaagttccatgggatggcacagctgagaggacaatgcagggctttccaacccagctggggcgggatcccaagtgagctggctggagctgctcagggcagggtggaaaggaagcacactccagacctccccctcccaaccccagcccagctctgagtggggagagggtcccactgcagaagggctctccgaggaaccatgctgagaccacccctgtcatgactggcagaggacagggaaccatcacccttgtgtcnggctcttcagagactcctcagtntcgggaggtccagttctccc

SEQ ID NO: 82802 - DNA, 489 bp, Homo sapiens
  sig_peptide (70)...(205): this location contains the signal peptide sequence, MQHILSCLLKGLFLSNGFPMLSGVPKSITHHTGLNRHGPGLYLTA, Run with SignalP
  misc_feature (179)...(395): similar to gi1710212 in the genepept database release 114, Run with FASTXY 3.3t00, default parameters
tgggggcaatcgatcgcgtacactatcagtgtggtggaattcacagagctctgaagtgtcctgggtcaaatgcaacacatcctgtcctgtcttcttaaaggacttttcctgtccaatggcttcccaatgctttctggtgttccaaaatcaatcacacaccacacaggcctaaaccgccatggcccagggctctacctgaccgctggccaacccccaaggcaggttcccagaggcccattgaccaggtgttccattcactcaactcttgaattcatatattaaagtcaactttttagcacctatgggacacagtgatggctttctcgtttcctcattgcccttgagccgtctctgtcagcactgtattgtgggtagttctatttttgccatacttaatttgttctaaactcttgaaacagaaggcattgatttgttgaaacagaagggattgatttggtatatcatgcaaaccagtaaaaaccaaaatgt

SEQ ID NO: 82803 - DNA, 482 bp, Homo sapiens
  misc_feature (1)...(482): n = a,t,c or g
  sig_peptide (381)...(246): this location contains the signal peptide sequence, MMFRKYQRKTLKLLTYFIPLVTNYEVIKTANRMYFLKGQAPFCST, Run with SignalP
  misc_feature (79)...(476): similar to gi2564257 in the genepept database release 114, Run with FASTXY 3.3t00, default parameters
catcgaatagcctagcccagngncgnggaattcctgaagttcanagatactttagacaagaatatatctgtgatttaatttagtagttgtatctgctaagtgcacatgaagatacaatttttgtattttcattaacggttacttgtgcatgcttctcagtaacatgggcccttacttagtctctgtttctgccccaaagtcctgcaggcacccatacattagtgactcgttttgtcagggagtgctacagaaaggagcctgtccttttagaaagtacattctgttagcagttttgattacctcataatttgtcactaagggaataaagtaagttaaaagtttcagtgttttcctctgatactttctgaacatcattctcaagttaagggattgagcaaaggaaggcattttccaaggggcaccatgtaaaaatgggatggtatgcttccaagactgatgctgttttaaagtttttgcacatt

SEQ ID NO: 82804 - DNA, 769 bp, Homo sapiens
  sig_peptide (158)...(293): this location contains the signal peptide sequence, MVSGWITKTQFLLLGRGKICMYKCIKQLQVRKTDVITTKQINYEE, Run with SignalP
  misc_feature (132)...(8): similar to gi414869 in the genepept database release 114, Run with FASTXY 3.3t00, default parameters
taggtttactctcatgtcagtgggcttatgataagttaaaatatagctatctgatttttaaaaagtacacattattatagcatattttatgcaaataaaagagaaataaatatagttgagaattaaatatgcagcaagttactttgcaaggtgtcatatggtcagtggatggataacaaagacgcagttcttgcttttaggaagagggaaaatttgcatgtataaatgcataaaacagctacaggtaagaaaaacagatgtgataaccacaaaacagattaattatgaagaaattaattgtcttaatcatattatgcttacaactaagttttggtaaatccatttaaaattttggtattgtatatcagtatgcattaattcattaattcattccattatatttattgagactctaccacatttcagacatgaatatataggcatgaataaaacaaaaatggttgcttgaagacatggaatcaacctaaatgcccatcgatgacagactgaataaagaaaatgcagtacatatacaccatggaacactatgcagccgtaaaaaagaatgagatcatgtcttttgtggaaacatggatgaagctagaggctattatccttaccagacgaatgccggaacagaaaaccaaataccacatgttctaacttataaatgggagctaaatgaagagaactcatgaacgccgagaaggcaataacaaacactggagtctacttgagggtggaggggcgaaaggagtagtcctcccaa

SEQ ID NO: 82805 - DNA, 473 bp, Homo sapiens
  misc_feature (1)...(473): n = a,t,c or g
  sig_peptide (125)...(260): this location contains the signal peptide sequence, MKFLLTELGLINLVPSFHLSCYPFHKGCPFVSHDQDGNTSNESFT, Run with SignalP
  misc_feature (381)...(443): similar to gi1628546 in the genepept database release 114, Run with FASTXY 3.3t00, default parameters
gcccgccctcaattccacttcggatgatcaacgctaagaaccgggccgacccacgcgtncggtaacaaagacttccccaggcctataataagctgatgtgttgctttttctctttcactactgcatgaaatttctgctaacagagctaggcctcattaaccttgtgccatcatttcatctgtcctgttacccgtttcataaaggatgtccttttgtgtcccatgatcaagatggaaacacctctaatgagagcttcacagttagtggaatgagcccctggtatgcacactggaaatctacttgcttgaaagtcagatttacatacagtgatccttctttagcaataatgtatggccctagaacttgtggcatcaggctatttgaatcataataaaaatattttttataaaaacaggtgaaattggaagaaacttggaggtgttggggtgggtagaataagagaaagaacaggt

SEQ ID NO: 82806 - DNA, 651 bp, Homo sapiens
  sig_peptide (133)...(268): this location contains the signal peptide sequence, MLLWGGVGLFIFLLLLTLIIFWKNRHRSPFSGLPRCCCNWGIRGM, Run with SignalP
  misc_feature (364)...(46): similar to gi158506 in the genepept database release 114, Run with FASTXY 3.3t00, default parameters
ggacttatgagcaggtcgcgtcactgcagctgcgagcgctgcgtttcggatttcggcaatagcttccgaccccgggcttgagtcctaagctgcggactcgcctccccagtgggcatctcgcaggccagccagatgctgctttggggcggagttggactttttatttttttgttgctgttgacgcttattatcttttggaaaaacaggcatagatccccattctcgggacttcccagatgttgctgcaactgggggattagaggaatggtgcaccctgggacccaggtggtgccttcgaagtccagggtgttcctcgattttaaccagggaattaccgaaatggagggttttttccccactgggcatttggcttttcagattttgtaaacctgctttcccttgttcctcccaccaacaaattatatatattatttatatgttatatataacgtattacatatatgtattatatatatgattacacataatatgtatcattataggaagagtagaaataactggattttaaagtcacccacaatcctgtgtccaaaaagacaatattaaattttggttttacattttattttctagtatcttatttttgcatgtgtgtatatgcgggggcgacgcggccgcgaattccagatt

SEQ ID NO: 82807 - DNA, 499 bp, Homo sapiens
  misc_feature (1)...(499): n = a,t,c or g
  sig_peptide (28)...(163): this location contains the signal peptide sequence, MRAXAPTTVQECMPLKAFLLFPFWPWYLILIPALPYLSNPITCQP, Run with SignalP
  misc_feature (268)...(499): similar to gi466862 in the genepept database release 114, Run with FASTXY 3.3t00, default parameters
tgggcggggncccccaatgaaccctggatgagggcgttngccccaacaacagttcaggaatgcatgcctctgaaggccttcctgctcttccccttctggccttggtatctcattctcattcctgccctcccctacctctccaaccccatcacttgccagccatcctgttcttccttgttggtcatcagttaatgaagtgtattaggtgacctgagtacttgtcagtacttcccagaggcaagaacattcctcgcagatcaaggtacctttaagagccaagaagctcagatttggaggcgggagagctgtactgcatcccctcaaatgttagcagtgccaagaaatgagacgctagtctagggggcaccacaagcagaaaggggctgtttcaaggagtcgtccgcccatgggagtctcctcttctattattcaccttgctccaaggatatcttttcttttacgtatgaaaattttgtaattgttcaactataacaccatg

SEQ ID NO: 82808 - DNA, 746 bp, Homo sapiens
  sig_peptide (355)...(220): this location contains the signal peptide sequence, MHVLTMAYVPGTMPSLTHLFLLILHPSGSFLSPFSTQLSSPTKSN, Run with SignalP
  misc_feature (161)...(102): similar to gi3745932 in the genepept database release 114, Run with FASTXY 3.3t00, default parameters
ctgtggtgtaattcctgctgtgcacaaggattgtgcctgacaactggggaatgcagatgaatctcagatgctcccagtgagcttcgaattacgataggggaaataaaatgcatacataaacaccagtcatgcaaagatgaacatgagaaaatattcactaaatgcagtgggagtggagaaagggaaagttatttctattaatggaaagctattttaagttactttttgttggggaggatagttgggtggagaaaggggataggaagctccctgaaggatgtagtataagcaagaaaaggtgtgtcaaacttggcattgtgcctggcacataggccatagtcagtacatgcatggatgtgctggaagggccttccaggcagggttgcagcctgggccagtccttggcacagctgaggagagagcaggtgaaaggagcagcaggtgagtgagtgagccagaatagtaagtgtgggaaggacaacaggggccaagatcagttgaggcaaagtatggaagatcttgaatacctgaagctgggaaaagttactttagaattaaaaacaacataggggatcccctgttttttgttgcaagagtcctgcatagtaaaatacccagcagatactggacactcagcagcagtaaaattgggccaggcatagtggctcatgcctgtaatccagcactttgggagctgaggcagaaggatcagttcagcacatgagttcaagaccagtctgggaacc

SEQ ID NO: 82809 - DNA, 432 bp, Homo sapiens
  sig_peptide (412)...(277): this location contains the signal peptide sequence, MTRLPLGLPYLSFLPWSVLRPPQSSWPSQPTATHTQRPLLDGCLA, Run with SignalP
  misc_feature (223)...(412): similar to gi3879403 in the genepept database release 114, Run with FASTXY 3.3t00, default parameters
gccggcattttcctctttcagaatggcacagagaggtttctagagaaggaccattagacagccgtcctatggtcagcgctggattctgtgttgttctgagctaagagcttgtcctcatcagggtcctggtccacaagggactttcaggagctgatgcagaatgaccagttgctcagtggtccagacccactccccatcttcctaaggtggctcttggagagcccaggacacgggggttggcacgcgaggcaaaaggctgaattcagacccacaccttgccagacacccatccagaagtggcctctgtgtgtgggttgctgttggctgacttggccatgaggactgagggggccgcaggacagaccagggcaggaaggaaagatagggcaggcccaaggggagccgagtcataggctgggttctcagaattcc

SEQ ID NO: 82810 - DNA, 743 bp, Homo sapiens
  sig_peptide (430)...(565): this location contains the signal peptide sequence, MFFRMQVCEHHGFWVILLLLSLKMEIPLAAYPTAEYSSIGSGFTP, Run with SignalP
  misc_feature (160)...(62): similar to gi396843 in the genepept database release 114, Run with FASTXY 3.3t00, default parameters
cctggggtaattcttctgccttctttcttgcatatttataaatttgtaagtgctgtgcacgtggattcttggcaagcatgtggaagcttaagcttaagatttgatttttctgatattataggccaatcactttggatattagatttttaagattgattttggaatttctcatccattagcaggttttcacctttctccttaaactcatagttttccttgaaatcatacagcatatttgtagcaatctgacagcataaatatacacaacacaaatggaacgacttatgaaggaattacttgtgaaagctcattggagtaaaatttcctctcaaacaatactttaggtcatatgactgagtctattaactatttttctgttataccctgccagaaaagaattttaaaagttagtttatgttttgtgtaaccatgttcttcagaatgcaggtatgtgagcatcatggtttctgggtaattctgctgctcctgtctttgaaaatggagataccacttgcagcttatcccactgctgagtattccagcattggtagtggtttcactccattgcatccatccagaactttcacacaggcctccccattacccagcattttttaacattgatcaataaggcctataaccagatttaggctagcaacaccagaggtctgggggcaagggtggaaattgactttacattcttagtagctaatattccataagtgctttatatatatattgca

SEQ ID NO: 82811 - DNA, 1138 bp, Homo sapiens
  misc_feature (1)...(1138): n = a,t,c or g
  sig_peptide (293)...(428): this location contains the signal peptide sequence, MLACLFSGVFLFPDYSHSSCGFPNVIWLTFKAIFVSVVLPNSTHQ, Run with SignalP
  misc_feature (233)...(85): similar to gi342297 in the genepept database release 114, Run with FASTXY 3.3t00, default parameters
ctcaaggatcaggagggaacgtgtccatagatctccttttaaagttagtagatgtgtcctataatacttattccttgggtaggagctgcggtggtgatgggacatggggaggctgaaagcaaggccggttgaccagaactcactcccctatggagggtgacactggcctctctttgagttgagcacactggaaatatttctctgccttcctctctaaagcgggaggtggtgtttgaagagcgaagctttctgaaaatgggaagagcccaaccatccgtgttgctggtggtggatgttagcatgcctgttttcaggagtgttccttttccctgattattctcactcctcttgcggtttccctaacgtcatctggttaacattcaaggccatttttgtttcagtggtgcttccaaactctactcatcaacttcaatattaagagtttgtttgttccactaaagttttatggtgatggtgaaaaaagtatgtggtggtggcgttttttttctggaaggctgctaaaccgacatggaggcgatgcattcatgcccataacccccgctcttttgtaggccccagcacggaggattacttgagccccgcaatttgagacttgccccgccactctggagggaatccaatctctccgacaacgcgatgaaatgggtcgtccgcccgactctctccaccgttgtccccacatttatctcctatacttaggcagccggctctacttctgcaccgatatctagcccggactacttagcttctcctccatcaacctctgcctccctcctccccacgcgccagtccgcatctcgagatagctcccactaaaagtggaactctgtctacttactgaacgtcgatactcaccccacgatctatcaatcaactcactgtcacaccgcagtagctaacatcttctgcaccacgagtgaacacgaccttggcaatatcacgaacggacaccgtccgccacancgtcgctgattggtgatccagaatactcgtacgccatgcacgctgacacagtaatccttacatacattcgtcatctccatcgccgctcgctaggagctgcgatccaccgctccgacacctctgattccttcgtccaccatctgnatctcacccg

SEQ ID NO: 82812 - DNA, 665 bp, Homo sapiens
  misc_feature (1)...(665): n = a,t,c or g
  sig_peptide (260)...(125): this location contains the signal peptide sequence, MSEACLKTFQWLLITLRKKSKLLSLARKVLHGPTFQPLIPSLITH, Run with SignalP
  misc_feature (201)...(32): similar to gi1345536 in the genepept database release 114, Run with FASTXY 3.3t00, default parameters
tttcgtggtaacttcagaaagtggtctcagaatatgaagagggactatgtgagagaggccagccatgtgaaaggctaaggaggagcgtgccaggaagagggaccaacaagaataactctggcatgtgagttatcaggctggggatcagaggctgaaatgtagggccatggaggaccttcctggccagggaaaggagtttggactttttcctcagtgtgatgagaagccactggaaagttttcaagcaagcttcagacatactctgatttacatttttgaaggactgctttggctgtagtgttggcgggtggggcaagactgaaagctgtgagatcagctggaaagctaatgcagtggtccagatgagagaagatgttggcttggtctaagctggaagtagtagagatggaaaacagcagccggattacattaaatatgtctttaaatttgagcccatggaacttgctaattaatcaattagccatgtgacacgaaagaacaatcagggatgactccaaaggtttaacttaagcaaggggacagatggtatgtcatttattagaatgggaaaaaaactaaacctgcaaaggntttggtgttgtggtggtgggggggcctgggccaccgtttaaaattcttgagggtggccttaccccaaacattca

SEQ ID NO: 82813 - DNA, 630 bp, Homo sapiens
  sig_peptide (210)...(345): this location contains the signal peptide sequence, MCLFCSFVNVTLGSTDPMCCPAQWLAQRMPWAFVSIRKAWPLGRM, Run with SignalP
  misc_feature (257)...(431): similar to gi5738800 in the genepept database release 114, Run with FASTXY 3.3t00, default parameters
tttcgtggggagataaagaccctctactcacactgggctgtgagggttaaatgaaataccatgtgactgacactgtgtatatgccataggctcaaagcctgttggttttagcattttaaaactacaaagtttaccttttactctgtaatgtggccttgtatgtttcaatacaaaaatacagatactttaaaaattcctgctcagggaagatgtgtctattctgtagctttgtaaacgtcactttaggaagcacagaccccatgtgctgtccagcacagtggctggcacagaggatgccctgggcctttgtgagcattaggaaggcctggcctctgggaaggatgagtggagcttcccagaggctgaaggaggaggagtagctggtcaccacggggcctctcctgcagggctttgagtctgcccgcgacgtggaggcgctgatggagcgcatgcagcagctgcaggagagcctgctgcgggatgaggggacgtcccaggaggagatggagagccgctttgagctggagaagtcagagagcctgctggggaccccctcaggtacagggtcacaggcatccaagctcccgtgactgctccttcttaagctattttgccgaagcaggacccaat

SEQ ID NO: 82814 - DNA, 432 bp, Homo sapiens
  sig_peptide (295)...(430): this location contains the signal peptide sequence, MRWPWASWAAVLLKLPRRVLPWLPCGHQQHVRATASSRSPPMPVT, Run with SignalP
  misc_feature (296)...(428): similar to gi3150527 in the genepept database release 114, Run with FASTXY 3.3t00, default parameters
tgagaattctccttgtcatcttggcatgtatacttgtctgcataaaacacatgccacgtttgtggagacggaatctgggacactgtcagattatgttcggtctggttcatggtcattgtcaactgagctttggataatttttcactacagctataaccatgactgctttgctgtagctttagccattcctgggcttggaacaggtagagtttagcttcttttccaacagctactgctatgttgttgattctgacacacagaagagcatggtcaccatggaactcgaagtggccgatgcgctggccctgggcgtcctgggccgcggtgctgctgaagctgccccgcagggtcttaccctggctgccctgcggccaccagcagcacgtgagggccacagccagcagccgcagcccccccatgcccgtcacgaaa

SEQ ID NO: 82815 - DNA, 412 bp, Homo sapiens
  sig_peptide (6)...(141): this location contains the signal peptide sequence, MRWILFIGALIGSSICGQEKFFGDQVFRINVRNGDEISKLSQLVN, Run with SignalP
  misc_feature (6)...(415): similar to gi2299433 in the genepept database release 114, Run with FASTXY 3.3t00, default parameters
gggacatgaggtggatactgttcattggggcccttattgggtccagcatctgtggccaagaaaaattttttggggaccaagtttttaggattaatgtcagaaatggagacgagatcagcaaattgagtcaactagtgaattcaaacaacttgaagctcaatttctggaaatctccctcctccttcaatcggcctgtggatgtcctggtcccatctgtcagtctgcaggcatttaaatccttcctgagatcccagggcttatagtacgcagtgacaattgaggacctgctggcccttttagacaatgaagatgatgaaatgcaacacaatgaagggcaagaacggagcagtaataacttcaactacggggcttaccattccctggaagctatttaccacgagatggacaacat

SEQ ID NO: 82816 - DNA, 1094 bp, Homo sapiens
  misc_feature (1)...(1094): n = a,t,c or g
  sig_peptide (238)...(373): this location contains the signal peptide sequence, MRVKFHLCTKGWSQGLFYLGLVGTGQCGAYFHYCGRNCWCLWQGR, Run with SignalP
  misc_feature (156)...(37): similar to gi4029198 in the genepept database release 114, Run with FASTXY 3.3t00, default parameters
caaaattaccaagtgatttataagcttgttaaagcttgagaggcaatgcttagcttagtgattatcggcccagggttctcattaggatcacatggccaatttgcagaaatctcttgtgccctccccacaggttctgtttattgttctgggtggaagcatccacgttgttttaatgaagagcctcatgtgactctaaggtgaggccagaatcaagtatgaaggcttcaaaatacattcatgagagttaaattccacctttgcactaaagggtggtcacagggcctattctatttgggtttggtagggacaggtcagtgtggtgcatatttccattactgtggcagaaattgctggtgtctgtggcaggggagggcacctgaggacaggaaaggagaaacttatattttcatcttcatggagcagctcattgctcctgaatctcttctgttttaaaggatagaaatggatggatttttctgtctttttctgccaattgatgccatgctagctggtaaacatgtggcactgacacctttaaaggcatattcttcagatgcaggggtaatttgtccagagaatcttcatctgagaaggaattccagagaaggaggagatcagaaagagaaaaaagggcttcaggtaaacatgcctcagctgaaaagctatgtccactctgcctcctggaatgccatgtatctagtacttgaaaacttttacttctctacttgtgtttttcctccctaaggagctgggttaagtacttcttaaaattcttatgatagtcaaatgtgtctgaaaagtatttcttccctgtattccagagccttcttttattctttaattcataacttcttatacgccatgcagaattatcaacaggaatttatgaactggcatattaataatgttccgtttgcgcttgttgacactgatagatggtgatcttcagaattcctatggcgaaaactgggcccttattacaatggnacacaattacggtgggctccactctttggtcgcatacactcgagctgcaacgacatacggacggtgtttcttgctcccgtgcatcgtcaccgactctatcactgccc

SEQ ID NO: 82817 - DNA, 390 bp, Homo sapiens
  sig_peptide (152)...(287): this location contains the signal peptide sequence, MWLLEGRVIFYFIYYCVANVSNSFTFSTQRCLIPPFLYSVFSNVF, Run with SignalP
  misc_feature (89)...(386): similar to gi3844768 in the genepept database release 114, Run with FASTXY 3.3t00, default parameters
attttttaacacacatttgatgtttaatttctctgtattagttcagctaacttctgtggagaactttatttttcatttcttggcttagttattaaagtttgtactgagtagaagaggaactaagattactatttagtgatggactgtggtcatgtggttgctggagggcagagtcattttctattttatttattactgtgttgcaaatgtgagcaacagttttactttttctactcaaaggtgtctcataccaccatttttatatagtgtgtttagtaatgtttttgttatcataaagcctatatttatttactaccataattgaaaataatttgattcagggttctgctttctctctctcattgacgagctttaacttgattactatct

SEQ ID NO: 82818 - DNA, 389 bp, Homo sapiens
  misc_feature (1)...(389): n = a,t,c or g
  sig_peptide (215)...(80): this location contains the signal peptide sequence, MINTAFYLDLVFFSIILSYFYLFNSGGEIPFHTKTXQISTLDVRF, Run with SignalP
  misc_feature (260)...(379): similar to gi2760635 in the genepept database release 114, Run with FASTXY 3.3t00, default parameters
caatatgtattttatatcttgcctctctataatcaaaaaagttaatgtatgtcatataattaacttacttagtttttaagaacctcacatctaaagtggaaatttgtnctgtcttagtatggaaagggatttccccacctgaattaaataaataaaagtatgacaaaataatagaaaaaaacaccaagtcaagataaaaagcagtgttaatcattattaattataaacttcataagcaattttatcaatatttacctactttatgaattttatataatctcaatttatatgtattttaatctgactatctaaaacaagatatatgaaaataacaactgatcacaattaatacttttaatcatgtatctacaataaaacccacgcgtccg

SEQ ID NO: 82819 - DNA, 412 bp, Homo sapiens
  misc_feature (1)...(412): n = a,t,c or g
  sig_peptide (260)...(125): this location contains the signal peptide sequence, MKLSLSNILTSFLFLWGSHQAPHAALAWSGPGVTSTLAFCPHWPG, Run with SignalP
  misc_feature (124)...(197): similar to gi1015339 in the genepept database release 114, Run with FASTXY 3.3t00, default parameters
gggaccaggtgcccaagtcaggtgtgaaaaatcacatacagagaatggagtggtctaggacccagtgaggaaatgcaaatggtccgtggccatgccgccttttaaggaagagacggcatggaacccaggccagtgagggcagaaagctaaggtgctagtgaccccaggcccactccaggcaagggctgcatgtggtgcttggtggctgccccacagaaaaaggaaggatgtcaggatatttgacaaagaaagcttcattccatggtgacacccaggtagaggtgcctcccagtcacctgaaccaggagttctcaaaggcacttccttaactcctggggatatagggccctcctgaggccaaacaataaaattcctagggcacacgtaggagtcggnaaagtgggtgtagggg

SEQ ID NO: 82820 - DNA, 446 bp, Homo sapiens
  sig_peptide (405)...(270): this location contains the signal peptide sequence, MVLLPLQCGLTKASSCLHTLCSSSDQIGYLPVKNTDQLGLQMEVA, Run with SignalP
  misc_feature (209)...(33): similar to gi2576305 in the genepept database release 114, Run with FASTXY 3.3t00, default parameters
ccggtcgacccacgcgtccgctttctgtctgtctctctctctctgcctcgctttctgggtctctccctctctccctgtctgtctctcctctctctttccacctgtgcctttctgtttgtccttctctgcctttctctcactcttcctctctgcttcccccgcctcccaccttttccttctcttcaatacaccttccctctcccccttcaggacgcctcacatccactgccttgccagggaaggcgtgcgactgactcagcacatctctgccacctccatctgcagcccaagctggtccgtgttcttgacgggaagatacccgatctgatcagatgaagaacacagagtgtggagacatgaagaggctttggtgagtccacactgtaaagggagcaggaccatgacgtctggccccaaggttgtcaaccccaaatgcaagatccttc

SEQ ID NO: 82821 - DNA, 401 bp, Homo sapiens
  sig_peptide (26)...(161): this location contains the signal peptide sequence, MRICFCLYNKLSVTLLITFIEEMLILEVTKYVVCTRYFIYREKQL, Run with SignalP
  misc_feature (218)...(48): similar to gi3293478 in the genepept database release 114, Run with FASTXY 3.3t00, default parameters
cggacgcgtgggcttagattaagaaatgaggatatgtttttgcctgtataataagttatcagtaactttgttgataacatttatagaagagatgctgatacttgaagttacaaaatatgttgtttgcactaggtactttatatatagagaaaaacagttgtttaggaaccaaatttccagtgtttattggaaagcgtgaaaagaaattagagaagttagagggtaagaggaaatccatatgaacagagccaaagagtaacaacgttttgatggtcgttgcctggatattggggatcaaaaataagcaggatgtcttagatgtgataagtaggcagtcgttgacttccaactttctttagagcaaacaagttaggggggtttgtaaagggattgtagatggt

SEQ ID NO: 82822 - DNA, 636 bp, Homo sapiens
  sig_peptide (5)...(140): this location contains the signal peptide sequence, MKLLGIVILYLGMKLLGHKVCKYTSNRFYQKVFYQRGLVMLIFIP, Run with SignalP
  misc_feature (171)...(60): similar to gi506400 in the genepept database release 114, Run with FASTXY 3.3t00, default parameters
tgaaatgaaactgttgggaattgttattttatacctaggaatgaaattgcttggtcataaggtatgcaaatatacctctaatagattttaccagaaagttttctaccagaggggtttagtcatgcttatctttattcccttcagcaacacatgagagttccagtttctccacattcttgataatacttgacattttctatttaaaaaggaaatttagccattaatggctttactttttaggtgcctccataatctccccacatccattcttggttacatttaaactagttgctatggtcttaatgtttatgtccccccacccccaccccaccccacgccaaattcatgtgttgaaatcctaacctccaaggtaatggtattaagatgcagtgcctttggaaggtgaattggacatgagggtggagcatgcatgaatgggattaatgtccttatgaaagagttctgcgggagcttatttgccttttccccatgggttgagcctgggagaaggggccatctgtgagaaagcggggcttctaagacactttaagtggtttgggcttcatcttgcgcctcccataccccattaaccccaataaaaaattttgttggtatggccccccccttttggtttct

SEQ ID NO: 82823 - DNA, 878 bp, Homo sapiens
  sig_peptide (419)...(554): this location contains the signal peptide sequence, MKMEMETKRSWRPQSHGHFTFQFLLSWTFELILFHFVPFFPYLLF, Run with SignalP
  misc_feature (382)...(579): similar to gi1280049 in the genepept database release 114, Run with FASTXY 3.3t00, default parameters
atctcggctcactgcaacctctgtctcctgggagcaagcgatactcctgcctgagcctcccgagtagctgggactacaggcgtgcatcaccacgcccgcctaatttttgtattttcagtacagatggggcttcactatggcagccagggtggactcgaactcctgaccttgtgatccacccgcctcggcctcccaaagtgctgggattacagtcgtgggccaccgtgcccagccagggacctctattctttgaactacaaggcaaggtcatcctcccacccccttatccattcagtgaacatttactgaggcgttactctgtaaagaaccctgagagagaccaggctgagtaagacaggctttactgccgatttacttccaatatgctcgcttttcatctctgacattctgtggtcttatgaaaatggaaatggagacaaaaagatcatggcgcccccagtcccatggtcatttcacattccaatttcttcttagttggacttttgaattaattttatttcactttgtccctttttttccttatttgcttttttaatttcttctcttcctcttcctgggacatcaaccatccaatttaacctttcatcctcccctactacctaatccttgaaaaatacaagcccaaaatcatttcatcaccagtaattgtctttaaattgctccaataatttgcaaggaccatggggaaaagagaaagattaaaaagccctacgcccagagaaccagattgtataacaagtcgaaaatcaagtttactaatcaccattcatggccttgaacttttaataaaaccttcattgcctggaataaatccaatttttgagaaaaacttaattggatttaaaaatggcgccctt

SEQ ID NO: 82824 - DNA, 641 bp, Homo sapiens
  sig_peptide (595)...(460): this location contains the signal peptide sequence, MYLPLLSIQAVFTRWVISHVKCLCSSSQDRHKNSWARGTLPSIPN, Run with SignalP
  misc_feature (277)...(420): similar to gi551744 in the genepept database release 114, Run with FASTXY 3.3t00, default parameters
cacggggtggctcttcagagttaaaggaggggaagcttttagcttccaaagtgtcatccctcttagtaattgtatatggtggcttcttttttttaaaggtcccataaaagtcaggtggcccagttgcactatgttctctcacagagggttttcagagctctggtttttattagggaatgctattgccccatacacccaacatgttgtggctgctgagggaccctcttggtgatctgaagacagattgtcacagggagtcagccagcagagggatggaacggagggctgaccaccaagaagagacccttcttccaaaacatactagccagttgcctagctggtgtggccagcctctattttacaagctttggtagcttgaaatagaacagtcatcacatcttgtggttggcaggtcaccactggcttctgtgatgcaaagggaaagaaagctccttttgttagggatgctgggtaaggtgcctcttgcccacgaatttttatgcctgtcttgtgaggaagaacaaagacatttcacatgtgagataacccatctcgtaaaaaccgcctgaatgctgaggagtggaagatacatttgagaatgcattggaagtatgaaccgggactgggttaggcttacttgt

SEQ ID NO: 82825 - DNA, 429 bp, Homo sapiens
  sig_peptide (167)...(302): this location contains the signal peptide sequence, MCSIKACMRLICWATLMAFFEAMGSLSLRRVPTAFGDQSIFCVLC, Run with SignalP
  misc_feature (153)...(309): similar to gi4127986 in the genepept database release 114, Run with FASTXY 3.3t00, default parameters
gtccatagatgtcaaccagtggtttattattagtcatgtgagtcctggggaacccagaggaactccctcttcaaacaaatgttttacctgagtctgcacgtgttggagagttctccaaattaactctcatgtagtcatatgatgcgtagtagagggaagacttattatgtgctccattaaagcctgcatgcgcttgatttgctgggccactctgatggccttttttgaagctatgggctctctgtctcttcgtcgcgtgcctaccgcgtttggtgatcaatcgatattttgcgtattatgctcacgcgctagtgatggatggtcttttatatatgggtgggcattccctctccgtctattagcagaaactgatatgtgtgcccgattcctgcaattatgtgtgtcaccattgttggatgccatagcgca

SEQ ID NO: 82826 - DNA, 813 bp, Homo sapiens
  sig_peptide (381)...(246): this location contains the signal peptide sequence, MIYTALKFMLFLMILLMCIIVLAYNMCSANVNQCPRLHHHDLMGH, Run with SignalP
  misc_feature (559)...(769): similar to gi561540 in the genepept database release 114, Run with FASTXY 3.3t00, default parameters
gcccccagcaactgaaaaaccagtggcacagagggagatgaggaaatgaggagctttgggaaaacttggctttcaaaaaaatatactgaggatgatttaatgcagaaatatcttgaaagaaaagatgaaaggacgtattacttcttttgttcactcaagccaattaaatcaacaaatatttactgaacacctaccatgtatgagtcattgagaaatatcctaggaatacagtcatgaaaattgaatggcccattaaatcatggtggtgtagcctagggcactgattaacattggctgaacacatattatatgctaggactattatgcacattaataaaatcatcaaaaacaacataaacttcaaagcagtatatatcatattaaatctctaagtatatatccactgagagctgtctgactctgaagccagtcctttagccaccctcctataggagcttagccctggggaattctttgggcagaatccagggacatactgagttggggtttggtggttccaaggaaagcagcttccacctgaaaggaagtacagtactggggccttacttccctaaagacccagggaggggagagaaagtgctctgcttgtatcctaagcacaaatgcaatacagcaacatcagtaatggtaactgagtgcttactgcatgccagacccgtgctaagctctctccatgcactatcttaatgttcacaacctcacacagtaagcattattaacaacagcactttacaaatagaaatttgttgaggctcagagttgccctcgtgggaattacctaaggcgatctat

SEQ ID NO: 82827 - DNA, 446 bp, Homo sapiens; identical to SEQ ID NO: 82820
  sig_peptide (405)...(270): this location contains the signal peptide sequence, MVLLPLQCGLTKASSCLHTLCSSSDQIGYLPVKNTDQLGLQMEVA, Run with SignalP
  misc_feature (209)...(33): similar to gi2576305 in the genepept database release 114, Run with FASTXY 3.3t00, default parameters

SEQ ID NO: 82828 - DNA, 957 bp, Homo sapiens
  sig_peptide (281)...(416): this location contains the signal peptide sequence, MFTFGRLFQIITVVTCLQFIQDCCIHSRQINSLLETSSLSRCLEV, Run with SignalP
  misc_feature (285)...(69): similar to gi4493697 in the genepept database release 114, Run with FASTXY 3.3t00, default parameters
agctctatgccatcctgtttacagcgaggcaagatgaatcattatgtctgtgcattttgttttacttatctgtgtatatagtgtacataaaggacagacgagtcctaattgacaacatctagtctttctggatgttaaagaggttgccagtgtatgacaaaagtagagttagtaaactaatatattttgtacattttgttttacaagtcctaggaaagattgtcttctgaaaatttgatgtcttctgggttgatggagatgggaagggttctaggccagaatgttcacatttggaagactctttcaaattataactgttgttacatgtttgcagtttattcaagactgctgtatacatagtagacaaattaactccttacttgaaacatctagtctatctagatgtttagaagtgcccgatgtatgttaaatgtataggtagtaaaataccactttgtaaatatctttttgctaaaattcataggaaatgcttttggaaattgaattgtgaagccacctttgtgaacagtatagtaatgtctatacttgttcaatagtttagaggaggtaggagggaagaaattgcaaaaggtaatattactagtgtgttcatacttggacattttcagacaccatttttctatatgttttgggcattttgttttgctctgtatatagtatatataatggacaaatagtcctaatttttcaacatctagtctctagatgttaaagaggttgccagtgtatgacccaggagtacacttagcatattttgagcactttgggttgcacttcctaggaaaacttgccttttggtaagacttttgccaggaattcctctgacctttcttattattaccgcgcccggccggttcacctggatgacgacaacgatgtcggctgtggtcaccttgggggcccaactggccccttgtcatactccttgattgagcc

SEQ ID NO: 82829 - DNA, 422 bp, Homo sapiens
  sig_peptide (125)...(260): this location contains the signal peptide sequence, MQILVHAHFVCPACCLSAVTTGGQIGCAASAHAAAPKAETPLAVK, Run with SignalP
  misc_feature (202)...(384): similar to gi3954833 in the genepept database release 114, Run with FASTXY 3.3t00, default parameters
cgacccacgcgtccgatgcggcatgggcgttatttctcctttttaaggcagcaggcatttcctttaccatgattgccaggcaggttactcctctgagcaaatcagcggcaatgatgagtgtgagatgcagatccttgtccatgcgcacttcgtgtgtcctgcgtgctgtctctctgctgtcaccacagggggccagattggctgtgcagcctctgcacatgcagcagctccgaaagctgaaacaccattagcagtaaaaagctgtgcagccctcagccgctccaggcctgctgctgcacagcggaaggtaagtggccgctgggctttgtgggagctgcatctcacactcatcattcatggcccttatgccagagtggggctggactgagcccctttcttttggaggcagccgttaaacagag

SEQ ID NO: 82830 - DNA, 618 bp, Homo sapiens
  sig_peptide (151)...(286): this location contains the signal peptide sequence, MIALVLTGAFWCLLLAAKGDGKQFQGSPRCQPLTEGLSSRGEEAR, Run with SignalP
  misc_feature (100)...(7): similar to gi344020 in the genepept database release 114, Run with FASTXY 3.3t00, default parameters
cgcagctgggctccatcaacatttttcgcatccccgctccctcccgggccctgccttagccggggtctctggtgactcacagctgagcatggaggggagggggcggtctggtggatacgccaggcctcgggcagctgtttcacgttaacgatgattgcactggtgttaactggagcgttttggtgcttgttgcttgctgccaaaggggatgggaaacagtttcaaggttctcccagatgccagcccctgactgaaggcctcagcagcaggggagaggaagcccgaggccaaggagggctcaggaggggtgaagactgcaggctccctggcccctacaccataaagaatgtgcagtggggaggaaaagtctaaaatgtgctatttaggttaagctgcatttcaaaggccttgtttccacttcattcctaaacttatttttctaaacaagtacttttgatcagctggaatgttgggggtaagccacattcatttttaaaaactgggttgtttgaaaagcccaactgttaggatctgaagttttggatcgcagacccagtggagccgtggaaagctacggggggggatcattcaagaaaatttcctcttggccccagcata

SEQ ID NO: 82831 - DNA, 329 bp, Homo sapiens
  sig_peptide (161)...(296): this location contains the signal peptide sequence, MLIRFLTGWLIAVYLGLQGHNCATFYLRRKEGQKVITGTTTVAFL, Run with SignalP
  misc_feature (161)...(208): similar to gi5020383 in the genepept database release 114, Run with FASTXY 3.3t00, default parameters
cgttgcgcatgttcacagacaggagagtcgccagcaataccttggcagcctttaaatgtgaaacgtctgttacttgcgctggaggcagaggctgtgcagggagcctgcttctaatcgtgggctcccttatctgttacggatccctcccctcctgttctagatgctgattcgttttctcactggctggttaattgctgtctacttaggcctccaaggccataactgtgcaacattttatctgagaaggaaggaaggtcagaaagtgatcactggcaccaccactgtagcattcctgtcacaccaacacagaaattcacagctcatactgt

SEQ ID NO: 82832 - DNA, 355 bp, Homo sapiens
  sig_peptide (132)...(267): this location contains the signal peptide sequence, MTFLLKVGILLLLLSDSMCWRHWRNYPVMLSRDLEVIHGCSQILS, Run with SignalP
  misc_feature (201)...(41): similar to gi4128127 in the genepept database release 114, Run with FASTXY 3.3t00, default parameters
caagaaaaaagaaatggagtgcttctctgcttcttctgcttcctgtaacttagaacaagctcagagagcaaggggactgatttagtacaacctcatcatctgtgggcatattttaactgtaatcttcaggaatgacttttctcctgaaagtaggaattctcttactgctgttaagtgacagcatgtgctggagacattggagaaattacccagtcatgctaagcagagatctggaggtcatccatggatgcagccagattctttctagagctacaaaattgactttctaaaaagtcagcaacacagcactgaagaacatttattgctacaccttattttaaaattggattcaatg

SEQ ID NO: 82833 - DNA, 862 bp, Homo sapiens
  sig_peptide (124)...(259): this location contains the signal peptide sequence, MNFWSFVPAQALCLTLCYVIRSRDAKSQDHPVVLFSTERGRNTNR, Run with SignalP
  misc_feature (210)...(2): similar to gi1869875 in the genepept database release 114, Run with FASTXY 3.3t00, default parameters
actcgatgtcctcattctacccctaggcggctcacaaggaggcagggggaaggggccctgtgcaacatgtgtgccagatgagcacacaggcctgctcatctactcagggcccccaccatctccatgaacttctggagcttcgtgcctgcccaggccctttgtctcaccctctgctatgtgatcagaagcagagatgcaaagtcccaggaccatcctgttgttctcttctctactgagcgaggcagaaacaccaatcgtggtgtaatgagcatatgcagggatttgtgtgcctggctcccctgggcttcatggaggtaacgcggtcccatccatatggctaccctaggagatgaggaaactggggtgcaggaaggttaagtcacttgctcaaggtgtcacacagtaacagacaactgggatcaggtcttgggtgttggtttcaggctatgcctcagcagccttcacagtgttctgggatgcggagttggatatggggttgcagggattggtgagggtccttggccctccgcccaccctgcacacttgctggcttctacttggatatcacaggggttggcttgcaacactaatttacaccccatatccagtgaagcaggcagctcctgttaaacccattttatagatgggaaactggaggaagcaccattagagatgagccttaaagaagtgcaggttctataaggaaagaggcatgaaattggccgggggtctttggggtgctggcgccataaaaaaggtggaccctggaacctgcttgggacaaaagggccttaccaattacaaaacccacctttttttgttgggaaggtttctttgtttgctgggttacaggaagggcgcg

SEQ ID NO: 82834 - DNA, 416 bp, Homo sapiens
  misc_feature (1)...(416): n = a,t,c or g
  sig_peptide (135)...(270): this location contains the signal peptide sequence, MLLSLYLLAMVWSQQGLGRRLSLLFGISQCPPPGGELAGGPPGSL, Run with SignalP
  misc_feature (216)...(416): similar to gi2992470 in the genepept database release 114, Run with FASTXY 3.3t00, default parameters
gagttaccgggcctacccacgcgtccgcttaaggtcttaacgccccattcaatttgcagagcagatcttccttgataatggggtgggtgtggggacgtctggctcagctaccgtgcaggcagaattgaggggatatgctgctgtccctctacttgctagccatggtgtggtctcagcagggcctgggccgcaggcttagcctcttgttcggcatctcccagtgtcctccaccaggaggagaactagcaggagggccgccagggtccctggtgggagaggagcacgtagtcttcccagcacttccctgcctgcctaatgcggcctctccgtgttcctgagagcagcccccaatccccttgccagccttgcctccttcctgcccctgccccgggaaccccgtctggcccagtcccagn

SEQ ID NO: 82835 - DNA, 849 bp, Homo sapiens
  sig_peptide (45)...(180): this location contains the signal peptide sequence, MSHAIFGSVHLVFFVILNTIYVFLYLGHNFKLKFFFIIVNSNLTR, Run with SignalP
  misc_feature (45)...(261): similar to gi2688122 in the genepept database release 114, Run with FASTXY 3.3t00, default parameters
ttaaaattgaattttagatgaacaattttttttagtatttaagtatgtctcatgcaatatttggctcggtacatttggtattttttgttatcttaaatactatttacgtgtttctatatttgggacataactttaaactaaaatttttctttattattgtaaattcaaatttaactaggcatcctgtattttatatggcaaccctacttcggatgaattttaaataaatccatggtaaagtaatctataaagggatagatgggtatattcagggatttagtcctagaaaaagttcggaaccgctgctatagatgctgtgtagtgtcagtgaaaggattgctgagcagtagtgaactcacttaaaaagaagcagcatgacttttcttgattgaatcactgctaagaagagtaatagcagagattgctggtacaagggaccactttggtttggctctagctggtgaggactgagcaggagatttgggcataattgaaatgactagagtccaggctgtaaatgaaagcaggtgaaaccagaagatgaattagaagggactgagagtttggcagtcacaatgagtcaaagaggtagaagttcacagggaagaaactcagaatttacaatcttggaggaatggctctgtatgataacggggctaaaaatccaatttcacatttacttttactaaattaaaagtaagagctctggagacaagatacttggttttgaattctgggtgtgcgagcttggccaaagaatttaacttccctgggtcttcgctctttatttgaaaaatagcaataatgatggctcttggggcccggcacagtggctcatgtctgtaaacc

SEQ ID NO: 82836 - DNA, 1134 bp, Homo sapiens
  sig_peptide (69)...(204): this location contains the signal peptide sequence, MFALGNHWAGMLLVTLAAVSLTLTLVLVFERHQKKANTNTDLRLA, Run with SignalP
  misc_feature (217)...(19): similar to gi5104427 in the genepept database release 114, Run with FASTXY 3.3t00, default parameters
cggttcgacccacgcgtccggtggttttctatgtggtggtgtgggccaatatctactctaccagtcagatgtttgccttggggaaccactgggctggcatgctgctcgtgaccctggccgcggtgagcctgaccttgactcttgtgctggtctttgaaagacaccagaagaaggccaacaccaacacggacctgaggctggcagctgccaatggagccctcctgagacaccgggtgctgctgggggtgacagacacagtggaaggatgccagagtgtgattcagctttggtttgtctacttcgacctggagaactgtgtgcagtttttgtctgatcatgttcaagaaatgaagactagccaagagtccttgctgagaagcagattgagccagttgtgtgttgtcatggagactggggtgagccctgcaacagcggaggggcctgagaacttggaggatgctcctctcctgcccggcaattcttgtcctaacgagaggccactcatgcagactgagcttcatcagcttgttcctgaggctgagccggaggaaatggcccgccagctgctggcagtgtttggcggctactacatccggcttctagtgacctcccaactccctcaggcaatggggacacgacacacgaactctccgagaattccatgcccctgccagctcatagaagcctacatcctaagcacagggtgctgcccgttcctggcgaggtgacctagggatgaagggactatctttcttcagaatgaacagcaagaaggcgtcaggaacccaaaatggccatgggaaccccaagtgaagaagaaacatctggggcacccaaagaggcctggaggcaagccctggggcttaggctaacttaagcaccgccaaaaacctggttggcttttagctgacccctggctctgcgaagcggtggacaagctatccccacaaagtcctttttgtggtgaaactgggcctcatgggagacgaaccgatggttattgttaagaccgtcaaatagatagcaatgcgctgagggtcaacgtgctccgtggcggcgtcaccacagctaacgcgagcggtaccgggctcatttcggtggtccgcaacagaggggttgccggaagaaaatact

SEQ ID NO: 82837 - DNA, 864 bp, Homo sapiens
  sig_peptide (170)...(305): this location contains the signal peptide sequence, MLQACKAAARASVRLPSLLSFFWASSSWSILLKTEVATFRRLSKV, Run with SignalP
  misc_feature (805)...(854): similar to gi5059041 in the genepept database release 114, Run with FASTXY 3.3t00, default parameters
gggtcctgaacccagtgacctccgcctctgggggcaattccatctccagtggtttttgccacaggctggacagggtcgaagttgcttcgtcttgctgcctgggcaatccttaaaatgccctggcctgccacatcaatagcaactagcagatgcaccttggggattctggatgttgcaagcctgcaaagctgctgctagagcctctgtccgtctcccgagcttgctctctttcttttgggcatcctcctcctggtccatattattaaagaccgaagtggccactttcaggaggctctctaaggtgctgtctggtcctgtaccttggttttgtagtttccttctactatcaggagctgccttgtgtaataaacttgtccttcaggatgagctgttcctcaactgaattacgggataaggaggtatactctattagtgcctttccataaaggctacaggagtcttatctggcttttggtccattatagacagtttagagtatgataccttgttttaacctgaattgactctcccttagctgagagagccagacagacaccatcttggctccttcacttacagccccttactcacccccttcctcaaggacttaacttgtgcaagctgactcccaacacatccaagagtgcaattaactgataagatactgtggcaagctatatctgcagttcctaggaatttgcccaattgatagcacccagagcccccccgcgtttgtgtccggttgataacacccaaagccccgcgcctatcaccttgtgatggatttaaaaacccctggcacctggaacacgtttgctttcctggaaccatttatccttttttactttttgcctgctttaattt

SEQ ID NO: 82838 - DNA, 657 bp, Homo sapiens
  sig_peptide (140)...(275): this location contains the signal peptide sequence, MVYFLTLLPQFSLSLHLIVEYFRAGSYVGVRLSHWDEKGEMARVF, Run with SignalP
  misc_feature (166)...(82): similar to gi780426 in the genepept database release 114, Run with FASTXY 3.3t00, default parameters
gtcagcgtggtggaattcttagagccaggagcccgatgataattgagaactggaatgtgttacagaccttgtctaggagggatagaaaaagaatatgggtttaaagaagagatggaaactgttaagtagaggacacattatggtttactttttaaccttgcttccccagttttccctttccttgcatttgatagtagaatattttagggcaggatcatatgtgggtgttagattaagccattgggatgagaagggagaaatggcaagagtattttccttcattactttattatttattttccttttcctgaggtaaggaaggggatataaagaaatggcctttatggttcccacggtgatagggatgaacatacaatattctctcccttctcaccacagcagctccctgtctgttactgcagagcttgaggtgactggactgtctcccaggttactgtagggattgcagtgctggagaagagaggccgggcaaggggaacaaggagcaagggaattccctagtggtttttgtgggaaagaagcggagagtttctgcagctgcctagctagggctgcagtattatgtaatgccttcttgcataagtcagaaaaacacaattctggtaaattttttaaataaaaaaaaaaacaaaaaac

SEQ ID NO: 82839 - DNA, 854 bp, Homo sapiens
  sig_peptide (757)...(622): this location contains the signal peptide sequence, MGFSLWPGLFLPPNLVVLPATPRKSGGLQAGVTAPVVIYESLAWT, Run with SignalP
  misc_feature (553)...(8): similar to gi1617552 in the genepept database release 114, Run with FASTXY 3.3t00, default parameters
atattcatgacagaccccctctgatgctgaaatttgtgttgtctttggaaggtgctgggctaagctgtggagtgcctgcatctggcctggctctgctggggatgagcagtgccatgtggcagccccgtcccttctggggcttcaacacctgtcctgccagtggaggcagtggggtgggctgccttgcagcacgttaccaccccgacatgctagaattcagcagtgctagaatttcactgggtttccaagcggtgctctggagctgtgcagtcatgtacctacttgcctgaactgcggagtgaagggatttgctcattcaagtggtccctgctgccggcccaatgcagtgggaccaagtcgggggatgggctgtggcagaagcagtctcacctcagtgggagggaatgggaaagggaagcctcaggccgagacctgcccactcgtaagccctggatggtgacccagctgggccatgagggtgaggaaagccatggcagagaatgctatggcgcggaggcaccaaaggtgctgagcgcacaaacgctggtgggctcaagagcgaggcggagaaaaacctgttctgggcctaaacttcttgcctctccttaattactacagcccctggtccatgccagagactcgtaaatgacgacaggtgcggtgactcctgcctgtaaacccccacttttgcgaggcgttgcaggcagaaccactaggttaggaggtaaaaacaacccgggccaaagggaaaaacccattttacaaaaatccgaattacccagatggttggcggggctggaatccaatctcggaggttggccgcaaaaggttaacctgggggggagtgcagagcc

SEQ ID NO: 82840 - DNA, 426 bp, Homo sapiens
  misc_feature (1)...(426): n = a,t,c or g
  sig_peptide (344)...(209): this location contains the signal peptide sequence, MQLLFTLCHYHIGFIFVALDSFDIMRDGTLFFSKGDGYSWYLETT, Run with SignalP
  misc_feature (218)...(426): similar to gi1870221 in the genepept database release 114, Run with FASTXY 3.3t00, default parameters
atgtcttgcatctcagcactatctgtgatgccaatccacactctcacaagcgcacaaacacagactcaaatacttgtttgtcagccaggagatgtaatactgttaaactgtcaatatttctgagtattgtacaaattcaatgtcatccttattaaaattccaatgttctttatttggcagagatattttatataattctaaaattcatgtgtagtctcaaggtaccatgaatagccatcacctttagaaaagaacaaagtaccatccctcatgatgtcaaaagagtccaaagctacaaaaataaaaccaatgtggtaatggcataacgtgaaaagaagttgcatgncagaacantatnaacactatagcctgtgcaagtcggacgcggggtcggccgggnttcggccggtcgcnantccgatgagc

SEQ ID NO: 82841 - DNA, 690 bp, Homo sapiens
  sig_peptide (355)...(490): this location contains the signal peptide sequence, MFFILIFSGIELKKFIFSQLFSGTLFRFQMQSDKNCILRKKYQAH, Run with SignalP
  misc_feature (588)...(690): similar to gi1016089 in the genepept database release 114, Run with FASTXY 3.3t00, default parameters
gaaaggaaggcatcatccacacaaaggaacattagctcagtgcaagggtcatagcctgaggtgggtgaagaaaatacctgctttatactgttctggaaattcttctataagtttgtaatcatatgtacccaaaatgtacctgtatttcattttgtaaactgtcacaaaattaatatttccaatgcctcatatgtttttaaaaaatatgaaactattatttatttgaatatattacatgaaactcctcaaagacatctctgattagagcaactttgccatcacagaaagtcagtttattttctataatgtatatcctctactaattataatctatactgcctttcatctatatagatgttttttattttaattttcagtggaatagaactaaagaagtttattttttcacaactgttctctggtactctttttaggtttcaaatgcaatctgataaaaattgtattttgaggaaaaaatatcaggcacactgctatcactcccaaactctttgagttttgtaaacaaaattttcagttcaccactaatactgacaccacagcacagtacagtgaattcactttgcagatgtgattaggtagtgaagattatccctaccttattagtgataaatatggtcagtcttagcttccatcgtgatatttgcgtagaactagagccaggaaagccat

SEQ ID NO: 82842 - DNA, 745 bp, Homo sapiens
  sig_peptide (242)...(377): this location contains the signal peptide sequence, MLYHSKFLYSFGIFIFSSHLPFLWQDYFCFSFKSFIVTLPFKSVP, Run with SignalP
  misc_feature (23)...(378): similar to gi5869817 in the genepept database release 114, Run with FASTXY 3.3t00, default parameters
gatcttttgtaagtggaatagcttttatcttaattggatacattctatggttcagagtttgtgcatgtgaacagttggtatgtatctgctttggaaaatactgtgtgaaataatattttctatgctcagttctgcttttgtcataattacatagtttaaactgcatacatcaattgtacaagcagatacatgtaagcattctgtaggtgcatattaagatgcattaattttgggctcacaaatgctttaccactcgaaattcctttatagttttggaatatttattttctcttctcatcttccatttctgtggcaagactatttttgtttctcttttaaatccttcatagttacattaccttttaaatctgtcccaggacgtcttactgaatcagacttgaaactgggatgtgcatgcaagtggagatgggctatgcatccctaaaatctgtcctctttcctgtgctggagaaacacgatctgtctgtcacagaaagcttggataaatgttaaaccagtgtttatctacataccttgatttgtttgaggcctaggatccccctggaaaagaactgtaacgctgaaaaccactttgaattcccacctcttaagggctggggttaagactgggggggaaaggcgtttttgggccctccccaaaggaagagctttcttcacccccgggggggaaacacaagttttgtgcccaaaaaataccgggggggggttaaaaaacagacccccc

SEQ ID NO: 82843 - DNA, 761 bp, Homo sapiens
  sig_peptide (69)...(204): this location contains the signal peptide sequence, MSFFSWNSLLLSGLGSGLLLSRAGGMCLAGIIGKITPGGLGVGPR, Run with SignalP
  misc_feature (255)...(4): similar to gi208157 in the genepept database release 114, Run with FASTXY 3.3t00, default parameters
aatacatgggccggaggttgggcttcttcacttccttggccaagaccttgtggccacactccagccccatgtcatttttcagctggaacagtctgcttttgtcaggtttgggctctggcctcctgctgtcccgggctggagggatgtgtttggctggcatcatcggcaaaatcacgcccggaggcttgggagtggggccccggagctgctccgtcctctgccgctcccgctcccgctccagcagctccccctccgacttgatgatggattctttccgcggagggaggctgggcttctcctccatgtcggggtctgagatctcctcgtagcctgctgacgcagacatgtctgaagatgccttcctcaggacatccttactgcccttccagtctttagaccatggcaaccccgagtccatgacaccatgcggtgcgtcaggcaggggccgggaggggcccgtggcttcgctgcccgtgttgttctccagcgctgctgcttcccccagccggagctgggtcacctcgtggggcaggggagccagaaagttgggtctcgacgcgttgctcgtcttcttgtacttgtcaatgaaggtggccggggcccacccttccttatcttcaatctgaatgtaccaccagccactcaagtttttctcgatcacctgtgtgtaggcgcaggctagctggtcttcagcttggggggaggaagaagagctccaggtaggatttgtgggttttatttggatcaccccatttcccgca

SEQ ID NO: 82844 - DNA, 369 bp, Homo sapiens
  misc_feature (1)...(369): n = a,t,c or g
  sig_peptide (225)...(360): this location contains the signal peptide sequence, MFLLSTHLFFCFYDLLSLLAIPNTVRLYMFQCHHSFFGQMLQKLL, Run with SignalP
  misc_feature (75)...(285): similar to gi995707 in the genepept database release 114, Run with FASTXY 3.3t00, default parameters
ataaaatataaagtattatcattaatgtaatttacttctttcattggaggcttcactcatgctttcaaacatagattatattattccaacccttcttaagaggaattagtatttcattattccataaggttctacaaatacctacaaagaccatcatgaattccaggtgctctgtaacctgatcaggttggagaactgctgatgcaaccaaatttaatcacttaatgttcttactaagcactcatttgtttttctgcttctatgacttgctctcactgcttgctatcccaaacactgtccgtttgtacatgttccaatgtcaccattcctttttcgggcaaatgcttcaaaagctactgtttctataan

SEQ ID NO: 82845 - DNA, 1040 bp, Homo sapiens
  sig_peptide (144)...(279): this location contains the signal peptide sequence, MNKSLILSFRLCLLSKRHSLTGVLNLDLSQQPSCGPDPHVRVNFA, Run with SignalP
  misc_feature (357)...(178): similar to gi2065424 in the genepept database release 114, Run with FASTXY 3.3t00, default parameters
ttcggtgtaacaatcacacatgcagaaagactcagggatagcatgaataacttttcacatattcccattctaggtatgagagtcaagaccatttggaggttgggtctaagtatgcaaatcacaatctcaatgtggacaggtttatgaataagagtctcattctctccttcagactgtgtctcctcagtaaacgccatagtctcacaggtgtgctgaatcttgatctgagtcagcagcctagctgtggaccagatccacatgtgagagtcaattttgcagctttccacttcctccagggatgagattcagaacttcagaagtagattgtgtttatctaaaaggatgacgtatttactgttgactggttgtgaataccagtatcacaatgtcacctgtgtgctggaccatataagggcattcaatatattacctgagggctttatcgctgggtctgtcccacagaccctggctgatggatgaaatgagtactcagacacaggtatgcagtgtaagagcagctaggcgactgcctggctatattggacagagtgcagccctgagaagctgggctgctttcttttattcagtgcaggcacaatgccgaaaacctggagccaatacaacctgcaggtaattaacatttattgttcccctttcaagaaacatcacatgtgcaaatgatcaaggtcagtttctggtaacataagtaaacaagcctctttaggataagttccccccactcccttgatttaactctcacccctgattaaggttatagacaggtgcctcagtattatccctgtggtctgcggacctccaactttcaggaggtggatctttcctaaaattttaacacttgacggcccccccagccaaattgccctttttttttgacaggttgtggacgaacctcaaggtggcgggtggctacgggccctgtgtccactgtccctaaccccagctataacctcaacagttggcggccttataaaaacttcacgccgccgacgaactttttggccctcatcgatcggagtccc

SEQ ID NO: 82846 - DNA, 510 bp, Homo sapiens
  sig_peptide (470)...(335): this location contains the signal peptide sequence, MCFKLCLPFYICTVWRRDGEGGIELQTRVLNRDLSCVSQVTGAKL, Run with SignalP
  misc_feature (182)...(440): similar to gi4725946 in the genepept database release 114, Run with FASTXY 3.3t00, default parameters
acttctctgtgaggcgggcgagggagagagggaggagagatttcatgccatggtgtcctccaaagctaggtccttacctaatgttacggagccccctgcgtccacctgacagctgacagagcagaaaggaaggtctgtgtatggggaaagcacagcggtgctgggagcattggtgccgcccacctcacctctcagcagtgactgtgagaccatttaaacacctcgttaccagcccctcaagtctgctaagcctgggcctccaccgagcatccactcactccaggcacctctcctgggcctccccagacctcgtaccacacatgaatgcggtgggacagcttagcaccggtgacctggctcacacaggacaggtctctgttcaatacacgtgtctgtaattcaattccaccttccccgtccctcctccaaacagtgcagatataaaatggcagacacagtttaaaacacatcagtaaatcaaggccaactggtcagtactgtacctttctt

SEQ ID NO: 82847 - DNA, 375 bp, Homo sapiens
  sig_peptide (199)...(334): this location contains the signal peptide sequence, MILIVLPSFLIRLKFCFPLQECFSFICPQLTCCYLLYANILDWPN, Run with SignalP
  misc_feature (53)...(353): similar to gi4106953 in the genepept database release 114, Run with FASTXY 3.3t00, default parameters
caaatctatcctaaaaaatcactggactgtatactttaaaataatgaatttgttgggatgtaaattaaatctcaatacagttgataaaaagatctttattatttttagaagttataacaaaagtattcctttttttgttctaaaatacatttatctgtccagtcttcaacttttggagcccccagtttttccctgtccatgatcctcatcgtgcttccctcttttcttatcaggcttaaattttgttttccattacaagagtgcttctctttcatatgtcctcaactgacctgctgttatctactttacgcaaacattctggactggccaaattccaacccaagtctacacaaactctactcctgccctaatgag

SEQ ID NO: 82848 - DNA, 727 bp, Homo sapiens
  sig_peptide (206)...(341): this location contains the signal peptide sequence, MLFSSSYRCVLFFFLLFSFVASDCVFSNSLSSASPILFSALSVLP, Run with SignalP
  misc_feature (366)...(2): similar to gi2072957 in the genepept database release 114, Run with FASTXY 3.3t00, default parameters
cttgacctttgagagtttgattattaaatgtcttaaggtagtcatatttggataaaatctgcttagtgttctataacctacttgtacttgagtgttcatatctttctctgggtttgggaagttctatgtttttatccttcttaataaactttatatcccaatctatctcctctttaaagccaataactctagatttacccttttgatgctcttttctagttcttataggtgtgtgttattcttttttcttcttttttcttttgtcgcctctgactgtgtattttcaaatagcttgtcttcagcctcaccaattcttttttctgcattatccgttctgccattaaaagaactctgatgcattcttcaatacactaaaagcatttttcaactccttattctcgacttgtatcattataatcattcgatttatttcataagtacatataataatacatagacttacatttgtaagttcttctttttacaaatgatccccctatcaaacaactgttatggtttcccggccgaggacaccccatcacctctagcgtcccgcacaggggcctcattcctccactcccccacgcctcgttccctccccgaccctaccctccctgcgtgcttcttgcggttgctcacgcgcctacatcactcccccacgccagtccgcccccccccgactaacgtccccgcgggtccgcgccccccgaccggcccagcacctcgc

SEQ ID NO: 82849 - DNA, 1170 bp, Homo sapiens
  misc_feature (1)...(1170): n = a,t,c or g
  sig_peptide (55)...(190): this location contains the signal peptide sequence, MGLTPGRCSGWKPRQAPLRGRWGRWSWPWLTEVLGWWSPTFWASF, Run with SignalP
  misc_feature (199)...(31): similar to gi2244878 in the genepept database release 114, Run with FASTXY 3.3t00, default parameters
tttcgtcaggccttccctgtggaggctgcagctgctgctcaggccaggagccagatgggcctgacccctggcaggtgctcagggtggaagccgaggcaggctcccctccgtgggaggtgggggcgctggtcttggccatggctgacagaggtcctggggtggtggagccccacgttctgggcctctttcctggctgcgtctttctcaagggccggttcctgctgtttgcatcttgctctccagcttgctctggtccctggtgttactgcaggagtcctgatgaggctgcaagccccccagggcagcccacctgcaccttacaggcaggcagtgggagggggcgcagagggccagcccacagttacccaaggtcccaggtcaggagggtgacatgctggcttgggtcatgctttcctactcctactgctccccctccgccctgctcccgtcccccgtggccctggccctatctgtaaaatgctccctgcttctgctgtccccccaccccgctaccgtaccccatggccctggccctttgtaagatgctcccttgtgctgctggccccatctgggctccttggagtctagacttttaaatggccttggaagccaccccagggtcccccttcacacgtgggggcaggcccctacccgctgtctttttgtgtgcccatgacatgctgcggagagtatagcaacaaggccccaggctgacaccaaccctggtccgcgtggggggtcttggcngacttatgattccttaacagggcccacccacatttcggctcttgtcttccttggacgctagcattaggcggcatcaaggattaacgtgtagtacctcttcccttcgttcttaggttcatgtacggactgcccaggtatctccccagggggagcgagcttgcgcgtctctaccaggtgacaatgtaccaatctacggcataagctactcagggagctcctatgtagccgcgacagatcgggacgcgaaggtccgacgtaccgaacgctactattgtatgtcaggtacgctagttagcgacctaagcgagttacgtaatacgatcgagcgacgctagggatagaatcctcgcacgcggatctatgctagcgtagcgaccgtattgtacggctacgaagcgagtgtactctacggatactagggcg

SEQ ID NO: 82850 - DNA, 1119 bp, Homo sapiens
  sig_peptide (83)...(218): this location contains the signal peptide sequence, MPLPHQGAFLSLCLWVVDAATAATGLERPARPSKLLGHPECSRGG, Run with SignalP
  misc_feature (495)...(66): similar to gi1118064 in the genepept database release 114, Run with FASTXY 3.3t00, default parameters
tgccacacccagcccactctgaggatggagtgcgcaggatgtggccaattaaaaaggccctggaggggggtgggcggcctgcatgcctctgccccatcagggggccttcctttccctctgcctctgggttgtggatgctgcgactgctgccacggggctagaaaggcctgccaggccgagcaagctccttgggcatcctgagtgcagtaggggtggcctctccagcacccctgccgggctgcctggaggagtcctccagctgtgtccacaaagcagagtgtgagcgctgtggccctagacaaggcaggacaacccactctcctcccctgcctgtgttcctcactcctttcagcgtctgagccatagttggtcccaccatgggctggccctgtgctggtgctgggcagcgctaacaggcagttccagctgtgatagaaggtgggtgcccgtccccacccagctgatgagaagagattgaaggggaggggggcgaaagaaggttttctagaagaagaaacctttgccgccctgctggaaaggcctgggttgggaacggtctaaaagagatgcaaaggaaagtcggggggtcatcttatcccaagaaccttctgggatgaagggagtgctcccgcggtgctggcctgtcacggagtccttacccaccttgggctcactagaccgtggaatgaatgtgacattttctttcttttcttctgagaccgtctcaccctattggcgtccccgccatctacgcaccagacatgctatggctgcaaagctacctgcgcactaccgtgcacctgtgcacattcgttaagccgcaccctagccaccgcgcttacctcagcaaaaacgcagccccttcgactaccactcatcagagcatacgacgccggctgaacgcgacacggaactcacacccatgatttgcatccgctcgctcccacaaccttcttgaccgtcaagtacaccaatacactcaccctaaactgcgaccgatgtgaatatcgcgattcacaactaccaccgtacccagtcaccataacacctgcgagcgtcgcacccgactcgacaccatccgtctcgactagactctgagtctacgcgtgacaatagtca

SEQ ID NO: 82851 - DNA, 366 bp, Homo sapiens
  sig_peptide (15)...(150): this location contains the signal peptide sequence, MLFLALQSKSLCELLLKEGSNTYQVPHGFQGRTVDYCLLLGLDNL, Run with SignalP
  misc_feature (304)...(293): similar to gi6009420 in the genepept database release 114, Run with FASTXY 3.3t00, default parameters
ggctttcttctttcatgttatttttagctctacagagtaaatccctatgtgagttactcctcaaagaaggtagtaatacttaccaggtaccccatggtttccagggccgcactgttgattactgtttattactgggactggataacctttatgagcctttactgaccgtgctgggcaccgtcacatccgtcatctcagtttgggcctcacaacagccctgggaagaagaaactgttgctcccactttgcagatagggaaactgaggtcaagagggtcaagggctcgcccaattcccacaactaatgtgggtgaagctgggattctaattccgggtgccctacagacagaggtgtctgtggctgcca

SEQ ID NO: 82852 - DNA, 577 bp, Homo sapiens
  sig_peptide (38)...(173): this location contains the signal peptide sequence, MHAWLAWTQGGLLILDSFIECTRSAHSGSDNRRRAGDTAEIKQSS, Run with SignalP
  misc_feature (156)...(20): similar to gi475435 in the genepept database release 114, Run with FASTXY 3.3t00, default parameters
tgatttctctcacccacagatttgtgagtcttgagaaatgcatgcttggctggcatggactcagggaggtttactcattttggattcattcattgaatgcacgcgaagtgcccactctgggtctgacaacaggagacgtgcgggggatacagcagagataaaacagagcagcctccactcctacagagcttactgttgagcagaggagacaaatatcagttacataatcacccaaacaaatgctcagttacaaactgaagaagaagacaaaaaagaaagttgcaagttataatggcagcaaacagcatgaggggctgagtctgagtgagagtcaaggaaggcctttctgaggaggtaacatgtgggctgagatctgaaggaacaggtcatggctgatggggtgaggctggttagaaagtgcattcattcatttatggcaaagagcacagcaagtgccaaggcctcatggcaggagggcacctgcacacagagagcaagtagactgggggggtgggggggcataagaagtgactgaggaagccccaccccaaaccctgcaggcctgggaaaccatccc

SEQ ID NO: 82853 - DNA, 575 bp, Homo sapiens
  sig_peptide (114)...(249): this location contains the signal peptide sequence, MKFTTLLFLAAVAGALVYAEDASSDSTGADPAQEAGTSKPNEEIS, Run with SignalP
  misc_feature (46)...(450): similar to gi2582838 in the genepept database release 114, Run with FASTXY 3.3t00, default parameters
ttccaagccctaactgggatcctcagtctaccttgtttccacatcccacccacctctcgcttccccagaccttctgcagattctgtggttatactcactcctcatcccaaagaatgaaatttaccactctcctcttcttggcagctgtagcaggggccctggtctatgctgaagatgcctcctctgactcgacgggtgctgatcctgcccaggaagctgggacctctaagcctaatgaagagatctcaggtccagcagaaccagcttcacccccagagacaaccacaacagcccaggagacttcggcggcagcagttcaggggacagccaaggtcacctcaagcaggcaggaactaaaccccctgaaatccatagtggagaaaagtatcttactaacagaacaagcccttgcaaaagcaggaaaaggaatgcacggaggcgtgccaggtggaaaacaattcatcgaaaatggaagtgaatttgcacaaaaattactgaagaaattcagtctattaaaaccatgggcatgagaagctgaaaagaatgggatcattggacttaaagccttaaataca

SEQ ID NO: 82854 - DNA, 653 bp, Homo sapiens
  sig_peptide (448)...(583): this location contains the signal peptide sequence, MLELGRCNKVKLILFFVSVIQSVTRGWRWGLGQLESLGESFMKAA, Run with SignalP
  misc_feature (218)...(39): similar to gi3874533 in the genepept database release 114, Run with FASTXY 3.3t00, default parameters
gggaagaccgccaataattttttggtaaactgctcacccagtgttaatctttgggaaaggcttctacttttgaaatagttgatctcacgatacactgttaggttgtacaacatcattttttaaaaagggacctttagaggcttgtctaaattttacagttgatctaagtgtattgaccacatgtattagttttggatttgcttgttcgttatattgtatgtgtacagctcatgggcactttaaaaataatacaggacattgatagacatcgactttaatcccagaggaaaaaaatggaaatcgttgaaagggatagataattagtaattaagaaattcagctctccattagcagacatcaaacattaccgtagcgctgggctctccaaggtgtcagaggaaaacttcatggtgatctagatatagtttttttttcttcaacttgcttatgttggagttgggaaggtgtaacaaggtaaaattaatcttattctttgtgagtgtgattcaaagtgttacgagaggttggcggtgggggctggggcagttggagtcactgggggaaagcttcatgaaagcagcagtgtttcaactaggctttgaagaataagtaggatttaagcaccaaagctgtctaatagaagccactgtatt

SEQ ID NO: 82855 - DNA, 796 bp, Homo sapiens
  sig_peptide (189)...(54): this location contains the signal peptide sequence, MSLHLVTTILFIIFQVRSMCVNKRKMLVHTLSLERCYAVRSFWNQ, Run with SignalP
  misc_feature (376)...(153): similar to gi1890782 in the genepept database release 114, Run with FASTXY 3.3t00, default parameters
atggcattttactcactgtggtgtaattctgcctctgtagtttattagtctgtttggttccagaaacttctcacagcatagcacctctccaagctgagggtgtgtactaacatctttctcttattcacacacatgcttctcacctgaaaaatgataaatagtattgtggttactaaatgtaatgacatatacaaagtgcttagaaaagtgtctggcacttcatagatgcacaatacaatgagagttgctattacttcattattattaaattactgttttattcttcatgcattaacacctaccatgtacacagaatttgatgaagaagcactatacaggtgcaatccaaagcctagggaatttataattaatatggggatttaggacttaggttcttgaacatccctctctttaatgatgctctgtagtgtatgatgcagggtaagtacatcaggagacatatggtaagtgttggcagtttcactggaggggaggacagcttatagcagtggctatggacggccccatggatttaatatataccctggcttgtttcaacattttttgtagaaaaagttgaaaaggaaggaaaggaacatatgcagatttctaaataaaattcagattgtttctcatgggagagccaagtgttttgtggggagacggaagtggaaataaggaagccagtgaaaggtggggtcacctggggagggctgagatgtgcctttgactttggcctgaatgcctgaccaataaaaattcccttgtaactgaaaaactgagggaggaggctttt

SEQ ID NO: 82856 - DNA, 786 bp, Homo sapiens
  sig_peptide (56)...(191): this location contains the signal peptide sequence, MGILSLTILYSFLYYGEMFYMWLNLCFVLIGCLPYFSFILRPAKI, Run with SignalP
  misc_feature (236)...(59): similar to gi4049797 in the genepept database release 114, Run with FASTXY 3.3t00, default parameters
agacactgtggtggaattccttttaaaacagaacagcaatactaaaattcatattatgggcatcttatctttgactatcctatattcctttttgtattatggtgaaatgttctatatgtggttaaatttatgttttgttctaattggttgtttgccatatttttcttttattcttaggcctgcaaaaattcaatctgtcttgatttatctactaattgtttgcatggaagattaacaggaaacaaagtagtgaactgggacattaaggtaaattaatagtaaatgttgggcaacatcttacataatttactgatactcttattaaggattttgtttttaaagcactgccagattgatctaaataataggtctcagttaaagggttatgcaaacatacaatttgaagggtaaacaaatgcaaagttaaatgactaacatagttgaatgactttggtttgaagtatagttacctttgtaagctacagcaggtctttggataatgtcgttcattataaagtcagtgagaaaaaaattgattcctggcaggggcaactgtctgtgtggagtttgaatgtttttgccatgtctgtatgggttctcaaatcttattttcctttttcattggcctcatatttatgtcacagctggaactttgcttccatctagaggcttctacttactttccaagaccaaactgctcttatgggtatccctaacactttattattttacttacccatggcaaaaatacctgcttggttaaggctctagcagcccaaaagaaac

SEQ ID NO: 82857 - DNA, 441 bp, Homo sapiens
  sig_peptide (168)...(33): this location contains the signal peptide sequence, MDLLLYIVMLILRSYLSLRDVSKPLGALLKFSTSSNSFSFYVLLP, Run with SignalP
  misc_feature (291)...(423): similar to gi3088334 in the genepept database release 114, Run with FASTXY 3.3t00, default parameters
caagctcctgtaggaagggacagggaggacttggtagcagcacatagaaggaaaaagaattactgcttgtcgaaaatttcagcaaggctcccagaggtttacttacatccctaagactcaaatatgatcttaaaataagcataacaatgtataataacaagtccatcaatcattattgaaaaaaatctttgaatctatttttctcacttcaacagagaggtgtcataaccagttcattcctacgtggcatcctggcatggttaaacgctcccttcactgacgtgagcttctcctcagacccggggagcgcatagtggtgtggtgtggacctgccagcccagcccctgcaccagcatcctcagggctattggagcacccagcagtgtggagtggacccgctggcccagcccctgcaccagcatcctcagggctattacgaaa

SEQ ID NO: 82858 - DNA, 443 bp, Homo sapiens
  sig_peptide (298)...(433): this location contains the signal peptide sequence, MRFPPFLFWNSILLALPLPKGYFIYPAKCSKMSTLLHPRQNRSSL, Run with SignalP
  misc_feature (233)...(352): similar to gi1707608 in the genepept database release 114, Run with FASTXY 3.3t00, default parameters
agcagaagattctcatcctggagttcagaatattcttctatatcagataagcaaataaaaaatattcttaactaactaccaactggtaagtaagttttcctggccctctctccataacagtaagacattattcatctaatacaatgtcagtattagaatggttaagaaaattctgtcaaaagtttcaaatgactattctataaaacttgccctaagaatcccaatttgagactttgtaaagatcttttatgtttcctggtctcttttatattcatccatgggacaaagattaattgcatgaggttccctccatttttattttggaattctatacttctggcccttccccttccaaaaggctacttcatatatccagcaaaatgttctaagatgtctaccctcctccacccaagacagaatcgatcatctttgacacctacctg

SEQ ID NO: 82859 - DNA, 416 bp, Homo sapiens
  sig_peptide (303)...(168): this location contains the signal peptide sequence, MPRKIWTLVFWLRNFHVLSGRKQRNSWCLRMRKWYRDRLSGPFFP, Run with SignalP
  misc_feature (356)...(403): similar to gi5326710 in the genepept database release 114, Run with FASTXY 3.3t00, default parameters
tcctgattctggccagaccagcttgtaggaagctcaatactgtcttaagttcagattctcgacatgctcgcagaagcatactaaatccatcattaagcagtttttcatgggaaggatacaagcaatagctggtctcaaacacttcttgaacaccatcaatgtatatggaaagaagggtccagatagtctgtctctgtaccatttcctcattcttagacaccaagaattcctttgctttctcccggaaagcacatgaaaatttctcagccaaaacaccaatgtccagatttttctgggcatacatcaagaggaaggccatgtgacccttccaaatgagggctctgtgagacattacaaaagcaggcttgaggaaattcaggaggtctaaaacatgacttgcaacatcttctacgaaa

SEQ ID NO: 82860 - DNA, 431 bp, Homo sapiens
  sig_peptide (125)...(260): this location contains the signal peptide sequence, MISLLHRRTYFPALCYCTVARRAWLCLGLGGCNKREAVPSALLLP, Run with SignalP
  misc_feature (241)...(360): similar to gi170454 in the genepept database release 114, Run with FASTXY 3.3t00, default parameters
tttcgtcactaagcagaggccacatttgctgaggaaatcctgaatgaggagcaggtggagagaaaaaggaggccattctcaactgaggaagggtgggctgggagggaggggccagggataatttatgatatcattgctccaccgccgcacttacttcccagccctctgctactgtaccgttgctaggagagcctggctctgtctggggctgggagggtgtaacaagcgggaggctgttccatctgcactcctcctcccccacccaggggagggcaccgcatggagctgcatccaccaccccttcccaggccctgacagacaccagtctcttctgtcgttcccccaaatctagccactcaagggatagcaggactcccagttgggctgaggatctagagcaaggaatgggcaagagagcatggaaggagaca

SEQ ID NO: 82861 - DNA, 867 bp, Homo sapiens
  sig_peptide (38)...(173): this location contains the signal peptide sequence, MVRASFLCCVHRTLGPWDLSHMELGQLLQNAPSAHRGCLGVWKEV, Run with SignalP
  misc_feature (375)...(45): similar to gi21799 in the genepept database release 114, Run with FASTXY 3.3t00, default parameters
tttcgtcatgaataataattagaagagtaacgttcacatggtaagggcgtcttttctctgctgtgtgcataggaccctgggaccctgggatttaagtcatatggaacttggtcaactcctccaaaatgctcccagcgctcacaggggctgccttggtgtttggaaggaggtggtgccaaagcagttggtttgctggattttgactttctttttttaaagtggtatttgcaaatactaccccgagggcaatggttaatggatttgacctttgggtcatgggggccagggagcaacactcataggagctgtgtgtgtgagtgctgcggtgcggcgtcgggctgctgactggctctgccactcacctctcaggccttaagaatactgaagattctcacctacgattggaggcgatggtgggagtggtccttaatactgctttatagaaaatcatagtggaggccacgcgccgtggctcatgcctgtagtcccagcacttcgggaagccgagatgggcggaccacgaggtcaggagatcaagaccatcctggctaacaccgtgaaaccccgtctctactaaaaatacaaaaaaattagccgggtgtggtggctgactcctgtattcccagctactctgaaggctgaagcaggaaaatggcgtgaacccaggaggcggaacttgcagtgaaccgaaatcgtgccactggactccaacctgggcgacagaaagagactccgcctcatataaccccctctggcgaggaatagaaataagaaccctttgcggaaaccaccagggggccccgtgtcgcccaggggaccctggcctcaagttttataaaaaggttgccccaactttttttttccccc

SEQ ID NO: 82862 - DNA, 861 bp, Homo sapiens
  sig_peptide (161)...(296): this location contains the signal peptide sequence, MCACAVRALSLAGGAVLLSSLCACARAPRYVGGERRVQSPARPAD, Run with SignalP
  misc_feature (279)...(12): similar to gi940346 in the genepept database release 114, Run with FASTXY 3.3t00, default parameters
tttcgtggaggaggcccggggacctcataggggaaggcggggacggcggggtgcagcgtgtgggccacgacgctaggccggttcctcaaaggcgcggcctctgtacggagcagggtacgcagcgtgtgtcgccccatttgtgggggccgcggaggagggtatgtgcgcttgcgcagtccgcgcgctgagccttgcgggaggggcagttctcttgtctagcctgtgcgcgtgtgctagggcgccgcggtacgtgggcggggaaaggcgggtgcagtcgcccgccagaccggcagactcggttgcacgtattgcattcatcctctttaggttccgaactgacctccagtcaggtccatcactgcatcttggtatttgctgatcctctgtcctgacttgatcttgcactcaggaaagatcttcaagaattacctaattttggcctggcgcggtggctctcgcctgtaatcccaccactttgggaggccgaggcggttggatcaactgaggtcagaaattcgagatcagcctgaccaacatggtgaaaccccgtctctactaacaataccaaaagtaaccgggcgtggtggctcatgccctgaactccagctactggggggggaaattgtttgaaacccgggaggggcgggttccggaaaccaccatggctctattgcacttcatattgggctacataaacgaatctcccgctcgcagatacccatccctagaattacctattttgggcgattttgttaataaaaagaatttttttggtttatagtccaatgagccatcccttggtcagaacccccccacacggaatatttctgcatttgttttagccaaagcctttgtgttctt

SEQ ID NO: 82863 - DNA, 413 bp, Homo sapiens
  sig_peptide (186)...(321): this location contains the signal peptide sequence, MGYYVCKYFREKKLFFLLLQLFCMFSTVSNKIKNHMPRNKSDRQD, Run with SignalP
  misc_feature (240)...(362): similar to gi5051425 in the genepept database release 114, Run with FASTXY 3.3t00, default parameters
ggtgtgattctaaagtggatccttttgctatagaggacattatttatacaactgtcaaaattttaagtctaaggattaaatattagaaataaatcagtattaatgtcctgatcttgatgggtgtattatggttatttatataggaggatttccttcactggaggaaatataagtatttggagaggatggggtattatgtttgcaaatatttcagggaaaaaaagttgtttttcctgttattgcaacttttctgtatgttttcaactgtttcaaataaaattaaaaaccacatgcctaggaataaatctgatagacaagatttctatgaagaagcaataaagcattgagagagatttttaaaagacctaagtaaatagagggaaatagcatgttcatagattgggagactcatt

SEQ ID NO: 82864 - DNA, 443 bp, Homo sapiens
  misc_feature (1)...(443): n = a,t,c or g
  sig_peptide (312)...(177): this location contains the signal peptide sequence, MLFFKMLFPPWRHCPPPVVGSMSSFRIGRALPDRPPLSSFVTHSP, Run with SignalP
  misc_feature (140)...(406): similar to gi2791595 in the genepept database release 114, Run with FASTXY 3.3t00, default parameters
ntacgtgctgtgctggttgctgcgaatccagcagagaacaaggtcctggagttccctgacctcccggtgtcacaatccaacgagaggagacatagagtaaccaagcaaacaaaaacacattctcaaaccggtcactgtcagactgtctgtgagaagcgctccacaggacacagctggagaatgtgtcacaaaggaactcagaggggggcggtcagggagggctctcccaatcctgaaggatgacatggagccaaccacaggcggggggcagtggcgccagggtgggaaaagcattttaaagaaaagcattttagacagtaggagcaggatgacaggggcttagggtaggaaagcagtaggagggtccagggaccaaggaggccagtctggggtagacgcggggaggttcagcacagcctcgtgtcgtccttgcgaagataatn

SEQ ID NO: 82865 - DNA, 872 bp, Homo sapiens
  sig_peptide (156)...(291): this location contains the signal peptide sequence, MIQVRNLIVLVCFLVELLNVPVLFLYSRGWQTLTHGLTQLKTAFF, Run with SignalP
  misc_feature (194)...(78): similar to gi439877 in the genepept database release 114, Run with FASTXY 3.3t00, default parameters
aattttttcctccttacactatgtgggtttttttcccacaagaaagctttccctcctctagtgacgtagacattctcccctgttttcttctaaaagttgcaaggtttggattttcttatttaggtctttaatccttctagaaattatttttaggaatgatacaagttaggaatctaattgtacttgtttgcttccttgtagagttattgaacgttcctgtattgttcctgtattccaggggttggcagactttgacccatgggctaactcaactcaaaactgccttttttttgtaaattaagtttgattgggacacagccctacccatttgtttatggctgcatttgtgctacaacagcagagttgagtagttgccagagatactgagtgaactccaaagcctaaaatatgtcctatctggctctttacagaaaaagcttgcaaacccatggtctaaaagatagtcatgaaagagtagctcatatttccaacagtagcagatatagtcagtgaaaatagaggaaattacactaaaggttgtaagaaggaaggaaaacaatcttttggacatgtaaaaaatacaaagtttgggccgggcgcggtggctcacacctggaatcctagcgctttgggaggctgaggcgggtggatcacctggggccaggaggtcaagatcagccctgcccacctgggggaaccccggcttgtgtagaatacaaaaaattaccgggcgcgggggcaagcgcccggaatcctagcacctaggaggttgggcaggagaactgtttgaccccggagcgaagggttgacttcgcacagaccccacccctgccccccgctggggccatgaatggggacccttctcaaacccg

SEQ ID NO: 82866 - DNA, 412 bp, Homo sapiens
  sig_peptide (272)...(407): this location contains the signal peptide sequence, MCVMLCWHKTLFNAFFLSFGSQCQIPACQHSLFAVHRLKLQRFSI, Run with SignalP
  misc_feature (220)...(108): similar to gi5103155 in the genepept database release 114, Run with FASTXY 3.3t00, default parameters
gaacggggattcctaaatacttactgggcaaattgaggctgaatgatacacattcctgggtctcgccctcagtgatgcagagtggggggggacctgggctatgggggccctgtaggtattctgctgcagatgggggcaccacacttgcagctcagaacagagataaaaccagataaaactccgctttatgactgctttgcatcactttccagctggcctcatctgaacagggcagaaagttcctaataacaataatcaacgtcagaattaaatgtgtgtcatgctctgctggcacaaaactcttttcaatgcattctttctttcctttggatcccagtgtcaaatacccgcttgccaacatagtttgtttgctgtacacaggttgaaactgcaaaggttttcaattttaaat

SEQ ID NO: 82867 - DNA, 392 bp, Homo sapiens
  misc_feature (1)...(392): n = a,t,c or g
  sig_peptide (278)...(143): this location contains the signal peptide sequence, MEPWATSCRWRGGWGWTNLQVTLLSLPHLPVGGGMGPEVGSFPRA, Run with SignalP
  misc_feature (112)...(306): similar to gi2738904 in the genepept database release 114, Run with FASTXY 3.3t00, default parameters
tggcctccagcagccgtgtcagctcccgtagctgctccaccatctcnccgcggccctgcagtgtggagcgcagccccaccagccttgggccattgcagctgagcctaggtaaggagcgtggcgtctgaaccccccagggaagagcccgggggaatgaacccacttctggtcccatgccacctcctacaggcaggtggggcagagacaagagtgtcacctgcaggttagtccacccccagcctcccctccacctacagcttgttgcccagggctccatccccttgtcaggggccagggctctctcttcctacctttttctcttttcagaagatatgtaagcaatgggggaagtcagagtgaggaagtggctatccacaaaagaatgacgatct

SEQ ID NO: 82868 - DNA, 442 bp, Homo sapiens
  sig_peptide (228)...(93): this location contains the signal peptide sequence, MGHWGEGKASLLLLVIRECCVRLLSFAGARGSDQHLPGIGVATGA, Run with SignalP
  misc_feature (203)...(405): similar to gi510502 in the genepept database release 114, Run with FASTXY 3.3t00, default parameters
cgggcgtgaggaagtctgcggtgggtgatgaatacaaagaacagtttctctttcctgtcagtaaaacgctgtttccagagcctgccaggtttcgccccagtggccacacctatgcctggcaggtgctggtccgagcccctagcgccagcaaaagaaaggaggcggacgcaacattctcgaattactaggagaaggagggaggctttcccttccccccagtgccccatgtaccaacgcgtctcgccataccccttgcccctcttccagcagctgacggagtaattcgagtaggaatcgaaagatttggaggcgccgggggagaaacctgcggagcgctctccgagcctgtggcgtcccagaaagactacgagccgggccagggaagttctctggaggacatggggtggatacccagggaattccaccgcactgtacgaataga

SEQ ID NO: 82869 - DNA, 420 bp, Homo sapiens
  misc_feature (1)...(420): n = a,t,c or g
  sig_peptide (384)...(249): this location contains the signal peptide sequence, MAHPSSLGVAILVALLSSVCSWERHAVIDGRGFDATCVNRLWLRW, Run with SignalP
  misc_feature (176)...(395): similar to gi2160382 in the genepept database release 114, Run with FASTXY 3.3t00, default parameters
ngacgtgcctgggtaccacagatgtgccttggttccnccgtgcccaccagcagccgggagaggcgaaggcattggcctggcctggcccctgctttgagtcttatcatttctgcatcattctgagctggaaacctccccaaaatcattcaaggacccacataaccacacaatggaagccttgcagccacctaacagcaggaaaggccatagccaggtccccccagctgcctcctgggctccgacccacccaccgtagccacagcctatttacacacgtggcgtcaaagccacggccgtcaatcactgcgtgtcgctcccagctgcagacgctggacaaaagggcgacgagaatggcaacccccagcgaggacggatgggccatagggctgctctctgggcatctctgaggaattgcaccac

SEQ ID NO: 82870 - DNA, 656 bp, Homo sapiens
  sig_peptide (70)...(205): this location contains the signal peptide sequence, MLRGMDSLGVIVLVPWIVLYPSPPPSSALRVHLLIRSLDAHVSAR, Run with SignalP
  misc_feature (335)...(18): similar to gi3243053 in the genepept database release 114, Run with FASTXY 3.3t00, default parameters
tagaccagtctggtggaattccgcacgtgcaggtggagccgctgcggagcgcggagtctttgcgggtgcatgttgcggggaatggactcactcggggtgatcgtgctagttccatggatcgtgctttacccctccccgcctcccagtagcgcactgagggttcatttgttaattcgttcattggacgcacatgtgagcgcccgctcagtgcccggcgccgtgcaggttctggggacgccacagtgaacaaaacctatagcagtcatccgggtccccagagcaggtggactcgatgtcgttgacgcagctgtgtcctcggggcctggaattgatggatgcgccaataaatgtttgtaaaacagagagaacgaccctaacctctgctttcccagtccccactcggaggtaacaacagtgaaagtttcggcattgcttcggggctgtacacagtgttatacgtgtaaatataaatgtctgcgtataagtatttttattctaaaaagcctaaaccatgtatgcattgtgctacgttgtacttcagaaaatttaaagcttggaggattttttccacatcttttcatgtcagtgtatacgggtccttgtggtttgaggggccaacccggtttttgggtgaagggccggcccacttgcctcat

SEQ ID NO: 82871 - DNA, 414 bp, Homo sapiens
  sig_peptide (90)...(225): this location contains the signal peptide sequence, MRLVPVCLLYLCYVMLCYVMLCYVMLCHDMLRYESHSHGLPPPIP, Run with SignalP
  misc_feature (210)...(411): similar to gi4336617 in the genepept database release 114, Run with FASTXY 3.3t00, default parameters
cctggccgcacaggggcaggtggaggaaagtgcttagaggcatttgcttcggaatttccagcccaatccctactgtgggaagtggaagaatgaggctggttccagtttgcttgctttatttatgttatgttatgctatgttatgttatgttatgctatgttatgctatgtcatgacatgttacgctacgagagccactcccacggcctcccccccccgatacccaccctgtagcactagctgggcccactcctccattatgctctccaccctcaagcagcgtctgctggcaccatctccctctactaccaaaaccagcttctgcccctcaacattatcatcgtgcacccacaattctccctctctcaactggatcggatatcccccctccttgatcttgaaggacccccttaac

SEQ ID NO: 82872 - DNA, 394 bp, Homo sapiens
  sig_peptide (282)...(147): this location contains the signal peptide sequence, MRRSQCVWVLRGVRRSQWVWIPRGVRRSEVFVSYGQHPWERAMLA, Run with SignalP
  misc_feature (177)...(397): similar to gi2293509 in the genepept database release 114, Run with FASTXY 3.3t00, default parameters
ccctccatgatgcccggccttcctacaaggctggaatagaaacactcagagggcccagacccctcgccagagtcagcaccccacataggagccaaacacgggaaatgtggggcactctctctgctcaacggcgataggacctgggccagcattgctctctcccagggatgctgcccataggacacaaatacctcagatctcctcactccccttggtatccaaacccactgtgatctcctcactcccctgagcacccaaacacactgcgatcttctcattcccctcagcacccaaacccactgtgatctcctcactccccttggcacccaaacacactgtgatctcctcactcccctcagcacccaaacacactgagatcttctcattcccctca

SEQ ID NO: 82873 - DNA, 424 bp, Homo sapiens
  misc_feature (1)...(424): n = a,t,c or g
  sig_peptide (413)...(278): this location contains the signal peptide sequence, MASRTLAVMLGRGGLWGQLFWSSLILPQAQGLCSLHFSCAHSLNK, Run with SignalP
  misc_feature (216)...(367): similar to gi466861 in the genepept database release 114, Run with FASTXY 3.3t00, default parameters
ncagtgccttgagaactgatttttcatgtatttgtccatttcttgcttattgcaggtggaaggataaatccaattcacattactccatcttggctggtagcagaagcctcaactttatttaactgtatttaactttaatttcagtaactaagtggctagtgctgccaaactgagcagcacagctcaagactgtgggttctgtggggacaggagccatgttggcctggttccctccaggtgccccagccaccggcacagcctgggtgctcaagaatgtttgtttagtgaatgtgcacaggaaaagtgtaatgagcataagccctgggcctgggggaggataagagagctccagaaaagttgtccccaaagtcctccccttccaagcattacagccagggtccttgatgccatgctccctcctatt

SEQ ID NO: 82874 - DNA, 624 bp, Homo sapiens
  misc_feature (1)...(624): n = a,t,c or g
  sig_peptide (68)...(203): this location contains the signal peptide sequence, MILLFLLHLSRRPSIKKGEIWRREKIKISGSLNITHFIFFSHSFH, Run with SignalP
  misc_feature (141)...(24): similar to gi3257131 in the genepept database release 114, Run with FASTXY 3.3t00, default parameters
aaccattgtcatgaataaactgactcacaaatggaaaaagcatgtaatatggctgttctaggctgaaatgatacttttatttttattgcatttgtcgaggcgcccttctataaagaaaggcgaaatttggcggagggagaaaattaaaatttcaggtagccttaacatcactcattttattttcttcagccactcattccatacccagttgtctttaaaaattctgccttttaatttgttctctgccctcattcactggcatatagaactacttatttgcctgtcttccttgcccaccagagaagtctttttcatcttcattacttccataactaacccaggccctgacattgggtggttgctaaatgagtagcaatgatggtaggaggcaggggtgtgtgtactggagcagtttaacagatgagaaagccaaagcttgagtgacttacctaagtctagcaatggcaaggataggattcaaactcatgtcttctagtacttcttccagngttccctttgctaagctatgacatatcttccccacaaaaataattcgggaagtttcactttgagagtggcatggccagaactgtncatcgtgacgcaagtcactcaggccatatg

SEQ ID NO: 82875 - DNA, 410 bp, Homo sapiens
  sig_peptide (368)...(233): this location contains the signal peptide sequence, MLRLWASGRAAAILCPSPAPKANVRSERGWGSNWRKSYCAGAVRG, Run with SignalP
  misc_feature (184)...(393): similar to gi484022 in the genepept database release 114, Run with FASTXY 3.3t00, default parameters
ctcttcagttctgctgaggttcccctgacagccagagcctcgagtcggcctgcgttggtttagaaggaacgttcggatttgttcccagggtgttacaggcatcctagcgccacaaagagcgtaccctcggagggacagacaggtaattagagagggaacaactcacattctcccgggctcagccgccacgccccgcaccgccacgccccctgctgcaccacgccccctcgcagccccgcactgcgcctgcgcagtagctcttacgccagttcgagccccaccccctttcagagcgaacattggccttgggggcggggcttgggcacaagatggccgctgcgcgcccagaggcccagagtcggagcataaccgactcaggagtcgcgatcccaggagccactggacctggt

SEQ ID NO: 82876 - DNA, 445 bp, Homo sapiens
  misc_feature (1)...(445): n = a,t,c or g
  sig_peptide (218)...(353): this location contains the signal peptide sequence, MNFFINSLAMLLGISYSNSHVIEYVFEVRFNMNKTVSAVTKLTFS, Run with SignalP
  misc_feature (65)...(318): similar to gi2394505 in the genepept database release 114, Run with FASTXY 3.3t00, default parameters
attccttcgtaattccgggncgacccacgcgtncgagacattaaaaggatagagctgacttaaatggaattttatagcatttctcatccttttcacttcctttctatggtggaatacgttgattagttataacttcatttttaaaaattgctttacgcttgcactccttaactgcacatatttcaaaggtgacccataagaagtggtccatgtaagcatgaatttctttattaatagcctcgcaatgcttctgggaatctcttattccaatagtcatgtgatagaatatgtttttgaggtgagattcaacatgaacaagacagtttctgctgtcaccaagttaactttctctaacagtgaaacttcagtaacacagaatctaatgatttctatgactatttcttagctgcgattttttggatatcaggtattattaggtatactg

SEQ ID NO: 82877 - DNA, 371 bp, Homo sapiens
  sig_peptide (137)...(272): this location contains the signal peptide sequence, MPAKTGLFGNLAVMFLCWFLERSDEQLSFNLVAWNFSMNNSILVL, Run with SignalP
  misc_feature (144)...(272): similar to gi340581 in the genepept database release 114, Run with FASTXY 3.3t00, default parameters
tattccaataagctgagcagaggaagttgactttatagagaggaaagggtggaggaaagcaggaagaggcagcagaaaattgattgtttgtttcagttactttctttgcaaaggttaaagcagagggggcttccttatgccagctaaaactggcctgtttggtaatttggctgttatgtttctctgctggtttcttgaaaggtcagatgaacaacttagtttcaacttggtggcatggaacttcagcatgaataactctattttggttttggtctgttgggtctaatacaggagctcagttcaaaccaatggcctcctataaattttatataacaattagtattacacaaactggaaagctggctttgcgg

SEQ ID NO: 82878 - DNA, 581 bp, Homo sapiens
  sig_peptide (92)...(227): this location contains the signal peptide sequence, MLDHRHLLRRQIWMSCLSLSSTWEGILFPNLPCCGRNMQLTSCQG, Run with SignalP
  misc_feature (412)...(125): similar to gi3875434 in the genepept database release 114, Run with FASTXY 3.3t00, default parameters
ctggaagggagacgcacttcaccaccaatccgcatgacctcacttccttccacactgtatgcttttctgacagatgtgctcaacatattagatgctggatcatcggcatctactacgtaggcagatctggatgtcctgtctctctctctccagcacttgggagggaattctttttcctaacctcccttgctgtggcagaaacatgcaactaacttcctgtcaaggggttctgagcaaaaatggcatttgtctcttgcgagccagagcagatgactgctggtccgagacctccaaccctgctcttctcactcacaacaaaccctgcaggatggtgcacaacgactccatgctacagtgatttgtagacgtttcctgcccaggccactgagattctgaagggatgtgttgctgcactataacctagtcctctctgtctagtattcaaaataagaatcttgacccaaattttagagcggccatatccttataaataggacttcaaatccccagaaccagacagtatgggagaactacaaatgttgccccattgtttcctgaaaaactttcagggagaaattgga

SEQ ID NO: 82879 - DNA, 588 bp, Homo sapiens
  sig_peptide (538)...(403): this location contains the signal peptide sequence, MLFFIYHNHLPLFFGLHLLVPHLLCCSCYTLSLPYPSVLGHPHFV, Run with SignalP
  misc_feature (206)...(460): similar to gi201911 in the genepept database release 114, Run with FASTXY 3.3t00, default parameters
attctaattacatattgaaaattataagcattttgatttatattcctaattttaaaccttccttatttatttttatactcagtatcacaccaaaaaatgctcattcaactcacaagaggcagtataaagataaactcttaaaaagcaccaagatgatatttttgcacgttgggtatgtgaggatatcataaagtgccataaattgttatgtgtatgtatgtgtgtgtgcatatgtgtagcatgtttatatgcatgcatgtgaatttttcacttgaaaagcggtcattctatggttatctacaaagaagccagttctttgtccaaataagcagggcacaattattcaagaaaaaaccgcagagagtagaactgctctgtagcatttcgtgaggatactggcagcacaaaatgagggtgaccaagcacagagggatagggtaagctcagagtatagcaggaacagcacaggagatgaggtactagcaagtgtagaccaaagaaaagtggcagatggttgtggtaaatgaaaaacaacatgattttactgccgaagcaataactggggtctggctgaaggggaaagaaccc

SEQ ID NO: 82880 - DNA, 340 bp, Homo sapiens
  sig_peptide (179)...(44): this location contains the signal peptide sequence, MSGGWNFSLKQSFMVLLDFCLCIRKVRRLMSLTKFMVAIEQPIIF, Run with SignalP
  misc_feature (110)...(279): similar to gi3510490 in the genepept database release 114, Run with FASTXY 3.3t00, default parameters
cacatgatagatccagaagagagaaatggcacgtatctgagggaaaataataggctgctctattgcaaccataaattttgtcaaagacattagacgcctcacctttcttatgcataaacaaaagtctaataaaaccataaatgattgcttcaaagaaaaattccaaccacctgacatattttcagtcagtttttgttggatttagtacattttaagttacataaactcactattgaaggttaagcatcccaaatcccaaatccaaaagtctccaaaatctgcatgatacttgaaggaaatgctcactgatgcatttcagatttcagatttttggattatg

SEQ ID NO: 82881 - DNA, 398 bp, Homo sapiens
  sig_peptide (98)...(233): this location contains the signal peptide sequence, MPHPTVCLQMTLALICMASLKLAGLLATAQNGHPTQFTEHVRTQG, Run with SignalP
  misc_feature (116)...(391): similar to gi4426808 in the genepept database release 114, Run with FASTXY 3.3t00, default parameters
tagatttctccctttcaagagcagcttttgagccaggaagcagtgagccatgagcagctggttaggcaaatgccctggagacagggaaggttagtccatgccccacccaacagtttgtctgcagatgacactggccctcatctgcatggcctctctgaagctggcgggcctcctggctacggcccaaaatggacaccccacacagttcacagagcatgttagaacacaagggaaagccgagtgcctgcatttgggcaacgctaccagtgtcacttcccctccctgagcttccatgatgtatattagacacaacgagaaaaccagcagaagagaaacctacaggctcctacacttcccaatcttttttttctttagttcatgttgttacatattaacat

SEQ ID NO: 82882 - DNA, 403 bp, Homo sapiens
  misc_feature (1)...(403): n = a,t,c or g
  sig_peptide (311)...(176): this location contains the signal peptide sequence, MGTHCSLLLREKHLTLNILILGLVLSYYRXERRGRGKALGFLLAT, Run with SignalP
  misc_feature (156)...(310): similar to gi1000102 in the genepept database release 114, Run with FASTXY 3.3t00, default parameters
cagttatatagtcacagttaaattgtaggggtccggccataaaatcatccctttctcctgagtcatctcttagagttggcttctaaaagctaagggcaggtactgtctgtgttgcccagtgtcccttcttttatgaagaaggcacttctcccagagcagtgtcaactctccctcagtggctaggaggaagcctagagctttcccccttcctcttctctctnccctataataagacaaaaccaaacccagtatcaggatgtttagtgtcaggtgtttttctctaagtaggagagagcagtgtgtgcccatgtagttgatcgcttaccattattatttcgtgctgtttgtctcaccctcgcagttctgtgatagttgtcaccggtgtctctccagtgtagcatgc

SEQ ID NO: 82883 - DNA, 758 bp, Homo sapiens
  sig_peptide (55)...(190): this location contains the signal peptide sequence, MMNLGVIFTCLYFSVQIFYSDYKFHFKTKKFLHLGKCSEFPHHVL, Run with SignalP
  misc_feature (599)...(715): similar to gi4469350 in the genepept database release 114, Run with FASTXY 3.3t00, default parameters
aaaattatataactcaagtcaagtgaatggttcagcaaaatagtgtttctctgaatgatgaatttgggggtgatttttacttgcttatactttagtgtccaaattttctacagtgactataaatttcattttaaaactaaaaagttcttacatttggggaaatgcagtgaattcccacatcatgttttaaattactcagccactaaaaatgaatgtgcatggcgtcattaacataatcattgcctgaaccgtatttttcacactatgtactctaggttcctggaggtgaaaggaatctggacttagagttcttggctacctctggctgcccccgaattagaacagcccatgggggtatgtgtattgggagtggaggagtggacgggtagattgactttttctcaggcatcaatctgttacaaggttcatggtttctatggggccagatgcatgagaggtcaaagcatgggcaataggggttaactgaacgagttgaatgctaggaagtcctcaggggagccaacgttccttgtaaagtgtgtagattttttgttttttaactaaataaaatcttggcactgacaaagttattcctgctgtttggagctacaccagaaccccttggaactctacagaggggtagaactaaagcaaaaaccatcattcaccctacagagtattataaatttcattttcacacagtaaaaagttcctaaattggaggaaacatagtgaattccacataatggttttaaata

SEQ ID NO: 82884 - DNA, 709 bp, Homo sapiens
  misc_feature (1)...(709): n = a,t,c or g
  sig_peptide (135)...(270): this location contains the signal peptide sequence, MSSRAGKGQLSPAPLFLGSFLLSYLFQVPFCYLGLNSTHAQLKGM, Run with SignalP
  misc_feature (224)...(73): similar to gi6003378 in the genepept database release 114, Run with FASTXY 3.3t00, default parameters
ggtatttctgcacatcttccaaggttcctaatgctgtctgaacatggcagtttccctctgggtcctctgaagtggtgcaatccgaaggacatcatatatctccctcaacagggcctgctgagttccaatattccatgagctcaagagctggcaaagggcagttgagcccagccccattgtttctgggttcttttctgctgagctatttgttccaagttccattctgctacctaggcttaaattccactcatgctcagctcaaaggaatgcagctcatgctggccaaagtgttcaccaggaaatggggggctagaattcttcttttcatttctggcttcctctctaacatctgtaaggccaactatgccactgcctgaactgtccccttttcaactggggagcaactacttacagggcatctcttctgggagactttttttattctctacacgcagattgatttcctaaactccagaggaccacagactttttatttgggatgagagccgaagcccttctgggatacccagaagaggggtgttatttaaacactctctttcttttcctccaggttatataacatgtatttaatgagcacctactatatgccgggncctatgttatgagttaaaggagagataagccctggctttccagagcttattgtacacttagctggaaccccccccccccccccggtcccttaaaa

SEQ ID NO: 82885 - DNA, 323 bp, Homo sapiens
  sig_peptide (114)...(249): this location contains the signal peptide sequence, MIYFVLLSFLGFRAVLLNRVKNGCLMIIRLVKKNLVLLWKIPQYW, Run with SignalP
  misc_feature (316)...(293): similar to gi4376952 in the genepept database release 114, Run with FASTXY 3.3t00, default parameters
tagattcatagtttataaacttggctgttttcagccctataagctgagactaatgaacaatttttgcatgccatgttaactcttctgtttaattattagatatgatctagaaaatgatttattttgtgttgctcagttttctaggatttagagcagttttgctcaacagagtgaaaaatggctgtcttatgataattaggctagtaaaaaaaaatcttgtgttactttggaaaatcccacaatattggcactttcgttttgttgaatgtgaatattttgaaggtttattttatatatatatatacacacccactcatatagtt

SEQ ID NO: 82886 - DNA, 988 bp, Homo sapiens
  sig_peptide (185)...(320): this location contains the signal peptide sequence, MVLPPHKTVQLPRLHLVWLWVSQAWVGGTVLHWLASQQLCVLVPA, Run with SignalP
  misc_feature (388)...(243): similar to gi5901655 in the genepept database release 114, Run with FASTXY 3.3t00, default parameters
cggacgcgtgggtaaaattacacttatttagctggaagggcttgtagtgtctagctccacccttatgttatggatgagaaaactagggaccaagtatgttcagtacgttctgtacaagcttgggacagaatgagggcccaaactcgggcctgctaagccaccagtccaggagtgattctacgacatggtattgccccctcataagactgttcagcttcccagactgcacttggtgtggctttgggtatcccaggcctgggtggggggcaccgtccttcactggctagccagccagcagctgtgtgtgctggtccctgcttctctcaccatgagctgggatcttgaggccaggcttggttatattctagcctggatgagcctgggtccttgttactgctgcctattcaccattcctaccctcctggaaattagcctcatagtatcacttgcctaattattttatttaatttgcacagcacagaactaaagcacagtggtgacaatggccgggaatcaagtaaagtgaggtaccctatatcccatcttgctgactacccagtgtagtgcctggaacatacaaactgcacattcatactttttgggtaaattattgacaagtaaaaatgaatgaaagctaaccagtaacagaacattttctaccctttgtcttcttgagatgttttaggagactaatccttgttgttcttttccaatgtaaatttttatgaaccatcaagatgtaatgcaggcattaagattatttctgtagagattaagaacatgaaaatactgatgcttaatatttagcagaaccaaaaaaattgtggtataattacaactctgtaaagacaaagtaggccgggcgcggtggcacacgcctgtggtcccagcactttgggaggccgaggcgggtggattgcttgagctcaggagttcaacaccaccctgggcaacatggtgaaaacttgtctctactaaaatacaaaaa

SEQ ID NO: 82887 - DNA, 406 bp, Homo sapiens
  sig_peptide (115)...(250): this location contains the signal peptide sequence, MKYFGFVSFGSETVPLALFGLCFLAYISLYPTANICKMARLDLQC, Run with SignalP
  misc_feature (332)...(55): similar to gi450775 in the genepept database release 114, Run with FASTXY 3.3t00, default parameters
aagataaaagaaaagacagagagaaaaacctgtgcctccaatttcactacttgaggtgaagttcagttttctggttaattgaaataattactgtgtttcttaagttttaatacgatgaagtactttgggtttgtttcctttggtagtgaaacagtgccactggcactgtttggtctttgttttcttgcttatatttccttgtatcccacagcaaatatttgtaagatggcccgcctagacctgcagtgtcctggtggtcctcttaagcactaaccatcagcagcgccccactcagtggccccaaccagcctgagtccaggaggggatgatcctttcagcatagctttagaagacaggaatctttctagctgctcttatgatagtaaatgtatctctgtactcagct

SEQ ID NO: 82888 - DNA, 848 bp, Homo sapiens
  sig_peptide (252)...(387): this location contains the signal peptide sequence, MHCVLEILVSVLGLTHHLLLRDRDHYRLVRLMGDVGGEGELKAMW, Run with SignalP
  misc_feature (361)...(260): similar to gi5069466 in the genepept database release 114, Run with FASTXY 3.3t00, default parameters
ttccttacgaatgtagaaatcaatgttgtaaataaaatagcagccccagaaactcaaatctaaatagactaataagagtaattcactatagccaagaaagagttattttaccaatgcaggatggttaatattaggaaattcattcagtgtttgtttacccaaggcttaatatatgccggactttgtctggttgtagagatactgtgaggaatgagttcttgctacttgcccatagaaggcattcagtccaaatgcactgcgttttagagattcttgtttctgttctcggtcttactcatcatcttcttcttagggacagggatcattataggctagtgaggctgatgggagacgtaggtggtgagggagaactgaaggcaatgtggagggtgtgtctgagtgtgtgtagggttgataaatgatgctagagaagtaagaaaaggctagatcctgtaccagagatgtttaggagctcagattttatcctaagagtcataggagaggtactgaagggagaaggtcatgatcagatttgcgcagtaaaatgatcactctggcgccggacgtgggggctcactcctgtaatcccagcactttgggtgggccaagctggatggttcacctgaggtcaggagtcctagaccagggtgttcaatgggcgaaaccctggcttactaatatccaaaactagcccggcgtgtgtggctgcctgacacccatttctccgttggttatgcaaacaacccttgaccttgaaaccgacgttcactaattctattttccgtacactcctcccgcccgcgttttagaacggatgtcttttgcatgaacgacggaccactgatcct

SEQ ID NO: 82889 - DNA, 461 bp, Homo sapiens
  sig_peptide (418)...(283): this location contains the signal peptide sequence, MVVIYRMCMLQAFGIMPAVNESKQLQLLGAALWPLQSGSHLAVLT, Run with SignalP
  misc_feature (362)...(457): similar to gi897608 in the genepept database release 114, Run with FASTXY 3.3t00, default parameters
ccagattggtctgctgcttcaatctctgcctcacacagtctgttctccaccatcaatcagagggttccttatgaaatgtaagtcccatcatagcaatcttctgtaaagaatacaaaatgtcttcccatctcacggcaaataaggtctaaagttttactcctggcctgtcagttcttacatgacctgagctatcattcactgagttcccatcattctggcttccctgattgccaggtgtgtccctggccaatggatgaaatgagtactcagacacaagtatgcagtgtaagaacagctaggtgactgcctgactgtagtggccagagagcagccccgagaagctgaagctgcttgctttcatttactgcaggcataatgccgaaagcctggagcatacacattctgtaaatgactaccatttagtgttcccggacgcgtgggtcgacgcggaatctcagccc

SEQ ID NO: 82890 - DNA, 393 bp, Homo sapiens
  sig_peptide (322)...(187): this location contains the signal peptide sequence, MRARVYIAGVLAAFYLQWPDRSHASRRVSRGGWHLVIKPNILERI, Run with SignalP
  misc_feature (177)...(390): similar to gi3822436 in the genepept database release 114, Run with FASTXY 3.3t00, default parameters
tgcatttgttcttcccagtgagatggctgttatcagcatccttacttcattacaaaggctcaagagcttacccacacatatttagacaagttggcaaggctaatactgaaacttgatgcggattacagtctagagatttctaacccgaatgtttcctgttccgcattctaaaaacaggcaaaaaaaaattctttctagtatgtttggctttattactaaatgccagccaccccttgaaacccttctagaggcatgagatctgtctggccattgtagatagaatgcggctaagacgccagctatatacacacgcgcccgcatacgtacatagtgaagttaacacacggccatgtctgtaaacagagaactcatcagacgggccctctcgttcgt

SEQ ID NO: 82891 - DNA, 453 bp, Homo sapiens
  sig_peptide (68)...(203): this location contains the signal peptide sequence, MHLFFHTLTSLRLGCIIQSLLARGASCCYCHHMNIRICEWMSAAQ, Run with SignalP
  misc_feature (133)...(409): similar to gi1674201 in the genepept database release 114, Run with FASTXY 3.3t00, default parameters
tcgctgcaggaattcggcacgagcaccttcttactttatgaaagcgctgtgttatgtcctttctaagatgcaccttttttttcatactttaacatctctaagattgggatgcatcatacagtctctgttggcaaggggggcctcatgctgttactgccatcacatgaacatcagaatttgcgagtggatgtcagcagctcagaaggaaatcccagagatagtagtagagcatccttgatgctggagaagcccaggctgtgtggaatagcacagcattaaaaactccatgatagagagattaagagacattggactcgaaatgtgaaaaggaataccttaaacaatttatttcaattatattttcctttttaaaaatttacaaaagtgatagatgcttttttaaaatctggatctaatatattctaaaagagttctttcagtaagtacaaaaaa

SEQ ID NO: 82892 - DNA, 430 bp, Homo sapiens
  sig_peptide (309)...(174): this location contains the signal peptide sequence, MLHILSGICLTHISLYHPLFQVNQLLAEADNVSLYSPRRFWPFSS, Run with SignalP
  misc_feature (119)...(267): similar to gi4454702 in the genepept database release 114, Run with FASTXY 3.3t00, default parameters
cgcgcaattccgcacgaggagaaccctatgggacctcggaggggtcccctctctcccttggtctgtgtatttcaaagttgcctgatgatccaagaaccgcagttctcacgatgcagcgcaggctgttgggatggatgctaatgatccctttggaatcctaaacttctgacaggtgaagagaagggccagaatcttcgcggagagtaaagagacacattgtcagcttctgcaagaagttggtttacttgaaaaagggggtgataaagagagatgtgtgtgagacatattccagaaaggatgtgtagcatccaaagaaaagtgactgcatttccccattggaaaagcactggggtttccgttgggctggtggcattggctagctgcctccttggggcagggtgagcaggttacagaggaccacgctaagggg

SEQ ID NO: 82893 - DNA, 868 bp, Homo sapiens
  sig_peptide (480)...(615): this location contains the signal peptide sequence, MKFACPAFFSRLFHSLFCVPELLILLLILPFSFLCFWLIILGCKI, Run with SignalP
  misc_feature (200)...(0): similar to gi1574031 in the genepept database release 114, Run with FASTXY 3.3t00, default parameters
ctgacgatttcggcacgagatttatatgcacataagtatgcagatgacatttgttttctttttcagctttttcacattttgcatgaaatatgccctcacaaaacaagttgctgtagcaacaacaagtacacaaatacttgcatgtgttaaattaataaggcgatattggaagctgactttccatcaagacaggaacaagcttcggttcccattgttttccctaggaaattactgagtggcattaaaaaaaaaaacaatgcatcattaactgtcgatatgaacgtccacattggagcttcctgtgagatccgttgtctgccagaaagcttaaaaacaagtcaaggagcctgttagtgagaaggagcgtgaaggaagtcccaatgtgaaggtttgcacacagccatatcctgctcaaaaagccacttcatatcctgagctactaaaatttcctcattgtcagtggcagagttaatcacactatgaaatttgcctgccctgcctttttttccagattattccattctttattctgtgtcccagagctgctgatcttattattaattttacctttttcctttctttgtttctggctaatcattctaggatgcaaaatacagactccgggtatcagtggtgcgatcaaaatcttcctcttcaagcccatcattagaaccccggccattaagctcattgaaactgagtttcttttcctataaaataaaaataacggaccccttcactccattcaggcttttttaatctgtggactatgaatctcaaaaaaaaagcccggttcagtttttcctttttattttcccgcaaactaagtacccaaggggacttgggttttttttaagaggaaacctcc

SEQ ID NO: 82894 - DNA, 380 bp, Homo sapiens
  sig_peptide (38)...(173): this location contains the signal peptide sequence, MFLVCMVLCFICKRYRKDVAETRGFFLVLVCFISFSSTPVASSSF, Run with SignalP
  misc_feature (140)...(382): similar to gi2623056 in the genepept database release 114, Run with FASTXY 3.3t00, default parameters
cagtgagggtgaatttgcagaatagaaggaattttttatgtttctagtttgcatggtgttatgctttatttgtaaaaggtacagaaaagatgttgcagaaacaagagggttcttcttggttctggtgtgttttatcagcttctctagtacccctgtagcatctagctccttcagtgcttatgtctgcccagcacgtgatcttgaaccacacagagcttcttcagtgccaagtggctacagtgtacgcaacttctccagcctccatttcctaaagtgtgtgtgcttttgcaaatgtcgtgttcaagcagcccaggcagcttttccagtagtgatctcttacagtgtgtgaaggacagcagcccatattggccagcacctgg

SEQ ID NO: 82895 - DNA, 963 bp, Homo sapiens
  sig_peptide (107)...(242): this location contains the signal peptide sequence, MCLTLGGCTPTFLPLTQMPLVSAICSALSCLLPQPCPKFTFQSPD, Run with SignalP
  misc_feature (95)...(452): similar to gi12770 in the genepept database release 114, Run with FASTXY 3.3t00, default parameters
ctgtcacttccctacctgaaatgtttcagtgacttcctactattttaggataaacccaagatgttaacaggttcacagggctggcatcatctgctctggctcctgcatgtgcctcaccctgggtggctgcacccccacatttcttccactgactcagatgcctctggtctctgccatctgctctgccctctcctgcctgctcccacaaccttgtcccaaattcacttttcagagcccagatactaagtcacacaactttttctggggcctttttttgggggaggtgggcaggctacagcccatgtgctcatggggaccctgtttctccagtcctgacagttacctcaccacactgagtctctgttccttttaggctctgaggtccaggaggcagctggctgtgtctgcagtcttgtttattgtggccactggcactgtgtctaccccatagcaaagctaagggaggactggttgaatcaattatcttttatgaatcatttttaatatttctgcacatatgttcacagaagacttattcacaatagcccaaaggtgggaacaacccaagcgttcgcagaggaatgaatggatacgcaatgtggcctatccataccatgggatattatccaggcttaaaagggaatgacattctgacacaccctgctacatgaatgaaccttgaggacatcatgcaaagtgaaataagccagacacaaaaggcaacatattgcatgattccacttctaagaattacctagagtcatccatttcgtagggacagagaatggagaaatgtttgccagggctggaggagaagggaatggagagtttgtgtttaatgggtacagaatttcaggttgggaagatgacaatgttctgtggatggatggtggtgacagttgcccgacaatgtgactgtgcccagtgccaccagactgtatgctgaaaatgactaagatggta

SEQ ID NO: 82896 - DNA, 344 bp, Homo sapiens
  sig_peptide (306)...(171): this location contains the signal peptide sequence, MTFYLACYVLIISHCISSHCPVTLTLIGFPCLNSLHLVFPYPQNP, Run with SignalP
  misc_feature (196)...(345): similar to gi1785775 in the genepept database release 114, Run with FASTXY 3.3t00, default parameters
taagtgctataaaaactttaatgcaatgagaagataataaggatacctgggctgggagaagagggctactttagctagggtgatgatcagcaatgcctctctgagaagataacatcttagttgagatcagatgattgaaaagccagccatgagaaaagctgaggcaaaaggattttggggatagggaaacaccaagtgcaaagagtttaagcaaggaaaaccaataagggtcagagtgactgggcagtgagaagaaatgcaatgagaaatgatcaatacataacaggccagataaaaagtcatgcttctctacagtttgctgttgttttccccttaagagtaat

SEQ ID NO: 82897 - DNA, 355 bp, Homo sapiens
  sig_peptide (355)...(220): this location contains the signal peptide sequence, MLVSVFAGCLFELSWSPKVSTQTFQLCCSLATKNRRNGGLLWECG, Run with SignalP
  misc_feature (116)...(357): similar to gi3319912 in the genepept database release 114, Run with FASTXY 3.3t00, default parameters
aagaatctgcatgtctagcaagttccaggtgtgccagtgtttaggatttggggacctcatgcctgagccatgctttccccaagtgcccgtcaatggttggctgtgttgattggacactggaagtagaagaggtcagtcagtgaggatagggggagcacatggaacgtctttatacccccaccttcagctgtaatgctctcagcaccctgagctcactgtctccacactcccacagaagtcctccatttctcctgttctttgtagccaaagaacaacaaagttgaaatgtctgggtagagacctttggagaccatgagagctcaaacaaacatcctgcaaacacacttacaagcat

SEQ ID NO: 82898 - DNA, 331 bp, Homo sapiens
  sig_peptide (30)...(165): this location contains the signal peptide sequence, MRIDLSLLLIFYLLFLMHKSRLVVCQTRVQLCEQEETVSYPDGPA, Run with SignalP
  misc_feature (58)...(269): similar to gi4545290 in the genepept database release 114, Run with FASTXY 3.3t00, default parameters
tggcagacaagggaacgaagggtgatgacatgagaattgatttgtcattgttactgatattttacctactatttttgatgcacaaatcaagacttgtggtctgtcaaacaagagtgcagttatgtgagcaggaagagacagtttcatatccagatggtcctgcaattgccacgcgggagtgtggatgcacaaccgatgtgtctacaattataccttgagactgaatgggaacaacctgatgttatcattcgttctttacaaactcttttaacgtctcactaaatatgatttatagatgaagattgtcaacatactggtttttacttcattg

SEQ ID NO: 82899 - DNA, 330 bp, Homo sapiens
  sig_peptide (144)...(9): this location contains the signal peptide sequence, MNSLLWLKLFAAWCFLKDFSLNNRAKTQTAFIQNKRKSYPELNLH, Run with SignalP
  misc_feature (153)...(264): similar to gi559536 in the genepept database release 114, Run with FASTXY 3.3t00, default parameters
tctcatatgaaggtttaactcgggatatgattttctcttattttgaatgaaggctgtttgcgttttagctctattgtttaaagaaaagtcctttaaaaagcaccaggctgcaaacagcttcagccacaagaggctattcataaccacttcttggctctgggtgtcactgcggtttgtaactgcttgtgctgaaggaggcctccccagaaacagtgccatcccccagaaacaatgctgcccccagaaacaaagctgcccccagagacgatgccagtgtgagtgctggcgtctgtctgagctcattatggaagttaccaggtatttggtaaa

SEQ ID NO: 82900 - DNA, 332 bp, Homo sapiens
  sig_peptide (162)...(27): this location contains the signal peptide sequence, MNSLLWLKLFAAWCFLKDFSLNNRAKTQTAFIQNKRKSYPELNLH, Run with SignalP
  misc_feature (165)...(275): similar to gi559536 in the genepept database release 114, Run with FASTXY 3.3t00, default parameters
atcgcggcagattctcatatgaaggtttaactcgggatatgattttctcttattttgaatgaaggctgtttgtgttttagctctattgtttaaagaaaagtcctttaaaaagcaccaggctgcaaacagcttcagccacaagaggctattcataaccacttcttggctctgggtgtcactgcggtttgtagctgcttgtgctgaaggaggcctccccagaaacagtgccatcccccagaaacaatgctgcccccagaaacaaagctgcccccagagacgatgccagtgtgagtgctggcgtctgtctgagctcattatggaagttaccaggg

SEQ ID NO: 82901 - DNA, 443 bp, Homo sapiens
  sig_peptide (377)...(242): this location contains the signal peptide sequence, MVVLMDLLACFCLWQVISMQWCLRGLVIPPSESATLYHVETIPCS, Run with SignalP
  misc_feature (246)...(404): similar to gi160362 in the genepept database release 114, Run with FASTXY 3.3t00, default parameters
tgttcaactcacacctgggttagaactggttcttattccagctggcccaagaaataatgaaactcaatcatctcaaaagtcatgattcaagcggtctttatgttacttttccaacacacacacattattaaattgtgtccttctgaggaggcccttccagcagaggtggtggccctatcgtattctgtcgttgccgccgtccccctgcgtgccctttggctcacattacaaagcaagttggcagagcaggggatggtctcaacatggtacagcgtcgcactctcactgggaggaatcacaaggcctctcagacaccactgcattgagatcacctgccacaggcaaaagcaggccagcaagtccattaacaccaccatcaccaaggttgtttcagtcaccaagatctccgggtacggacagtgaatcagtaagcaggtcataca

SEQ ID NO: 82902 - DNA, 337 bp, Homo sapiens
  misc_feature (1)...(337): n = a,t,c or g
  sig_peptide (147)...(12): this location contains the signal peptide sequence, MNSLLWLKLFAAWCFLKDFSLNNRAKTQTAFIQNKRKSYPELNLH, Run with SignalP
  misc_feature (153)...(265): similar to gi559536 in the genepept database release 114, Run with FASTXY 3.3t00, default parameters
tctcatatgaaggtttaactcgggatatgattttctcttattttgaatgaaggctgtttgtgttttagctctattgtttaaagaaaagtcctttaaaaagcaccaggctgcaaacagcttcagccacaagaggctattcataaccacttcttggctctgggtgtcactgcggtttgtagctgcttgtgctgaaggaggcctccccagaaacagtgccatcccccagaaacaatgctgcccccagaaacaaagctgcccccagagacgatgccagtgtgagtgctggcgtctgtctgagctcattatggaagttaccaggtatttggtaaatgatttn

SEQ ID NO: 82903 - DNA, 420 bp, Homo sapiens
  sig_peptide (75)...(210): this location contains the signal peptide sequence, MMNTLLLFAGLLLTWESGQVLGDQTDSDNELQEMSNQGSTYVNKE, Run with SignalP
  misc_feature (75)...(423): similar to gi30251 in the genepept database release 114, Run with FASTXY 3.3t00, default parameters
tttcgtgccgggaggagcgcgcgggcacagggtgcctctgaccgacgcgtgcaaagactccagaattgtgaggcatgatgaacactctgctgctgtttgcggggctgttgctgacctgggagagtgggcaggtcctgggggaccagacggactcagacaatgagctccaggaaatgtccaatcagggaagcacgtacgtcaataaggaaactcaaaatgctgtcaacggggtgaaacagattaagactctcatagaaaaaacacacgaagagcgcaggacactgctcagcaacctagaagaagccaagaagaagaaagaggatgccctaaatgagaccagggaatcagagactaagctgaaggagctcccaggagtgtgcaatgagaccatgatggccctctggtgagagtgtaagccct

SEQ ID NO: 82904 - DNA, 362 bp, Homo sapiens
  sig_peptide (37)...(172): this location contains the signal peptide sequence, MKQSWLGLGTGPLTPALSLLQTQGSALPAHPPFSQWGPKWEWGVR, Run with SignalP
  misc_feature (69)...(287): similar to gi3941342 in the genepept database release 114, Run with FASTXY 3.3t00, default parameters
ccatcctaacactattcactatagggctgctggtgaatgaaacaaagttggttaggcctgggaacaggtcctctcaccccagccctgtccctcctccaaacccagggctcagcacttcctgcccaccctcccttctcccagtggggtcctaaatgggagtggggggtgagggtaggagagggatggaacagacagagggtagcatcaggcattctcagcttggctcccaagacactgctggctgcatgggggcacttccaagagagcaaggtctgacccattgccctgtccatggcacccttcccactccatcgtcctgcaagtgtttcttgagtgagtgaaggcctgttggggtattccca

SEQ ID NO: 82905 - DNA, 658 bp, Homo sapiens
  sig_peptide (122)...(257): this location contains the signal peptide sequence, MAHHARARLVFVLGPTACRELSLVLFLCSPRDGFQFCLGVITDNE, Run with SignalP
  misc_feature (241)...(84): similar to gi3582319 in the genepept database release 114, Run with FASTXY 3.3t00, default parameters
gtggttttgataatgggaaaggaaatgctccttaggttgagtgtttagccttagttggcgacccaaaggtttacgttcttattagcatgcccaggaggggtgggaacgcctgccatgtttgatggcccatcatgccagggccaggctggtgtttgtgctgggcccaactgcttgccgagaattatcattagtactttttctctgttctcccagagatggttttcagttctgtttgggtgtgatcacagataatgaagtgaaatgcggcttccttgtcatgaaccaccatcatgctcatttactgacttgaaataatattgagatctcaatatggaaaggacagcggaggaggtgggaagacattccattttagaaacatctgtggcttatacaagagaaggcacaacaactaggccacttcatcaatgtgattcaagttaatgtgagaagttggaccattgctaagaccattttctgcccaaaacttcctgcctttttacctttcactaaacagaacctttgaccccgatacaaccccggcggagggtatttaaaaatgcccttttgggcccggccgggcgggctccacgcctgtaaccccagcccttctgggagggccaggtgggccggaccctgagggtccccagtcccgaaaccc

SEQ ID NO: 82906 - DNA, 404 bp, Homo sapiens
  sig_peptide (181)...(316): this location contains the signal peptide sequence, MCFRCLAKQSFLVSLVVPGWWFSCCHGLTLLCSVIRKEDVLQYRF, Run with SignalP
  misc_feature (270)...(1): similar to gi4377708 in the genepept database release 114, Run with FASTXY 3.3t00, default parameters
ctgaaaattagtatccccctcccacgagataactcagcaggcttgcaaatccaatagctatgcttggtgcccagcatctgcctctcctgaaagtattcagccacgaacttggtatagtcattgggcatgacgaacgtcagggggatgaactggtacagggaagtgccatacatcctcctcatgtgcttcaggtgtttggccaaacagtctttcctggtaagcttggtggttccagggtggtggtttagctgctgccacggtttaacactgttgtgttcggtcattcggaaagaggatgtcctccagtacaggttccagtcctccgcgttctgctcctgcttatcaaacttattccaccccctctccaggaggacgctttgcaccacagccggggtggtctcgtg

SEQ ID NO: 82907 - DNA, 370 bp, Homo sapiens
  sig_peptide (233)...(368): this location contains the signal peptide sequence, MLLFAIQIFCAFSILSFAHFSYWIVYQSHTYAHMYVCLPYPCVHA, Run with SignalP
  misc_feature (280)...(341): similar to gi939954 in the genepept database release 114, Run with FASTXY 3.3t00, default parameters
gagaaaggtttctgggtcgaaggatatggcatgtttctaatttgatggatgttgccatattgctttctcagtaggctgttaacctttacatttccttacaacaatgtatgatcctgctcccttcccacttgcccagcaaagatacatattatttatgtttttatttttttcccagccaataaagagaagtcttagttacttttaattttctcttcctttagtaattttgattatgttactgtttgccattcagattttctgtgcattttcaattctatcctttgcccatttttcctattggattgtttatcagtctcatacatatgcacacatgtatgtgtgcttgccctatccgtgtgtccatgcatgc

SEQ ID NO: 82908 - DNA, 361 bp, Homo sapiens
  misc_feature (1)...(361): n = a,t,c or g
  sig_peptide (240)...(105): this location contains the signal peptide sequence, MPRLKPRRSPLFCRLRFVIFSMEKTPPSSVQGMTSYHIVSHPPPH, Run with SignalP
  misc_feature (246)...(358): similar to gi265212 in the genepept database release 114, Run with FASTXY 3.3t00, default parameters
nactcagtttccccaacggtgaatgaaggggtgaatctggaaggctgacattccgtactcagcaatgctgtcaccccctcagaaatccccagcctagcctgggggtggggtggggggtggctgacaatgtggtatgaagtcattccctgcacggaggagggaggggtcttttccatggagaaaatgacgaacctgagacgacaaaagagggggcttctcctgggcttcagtctgggcatgatccatcagtaatggattacctcactggctgggagaccccacccacacctgcagtcccaggcccttccaaacaatacgaggcacccccatcccacgccccccagcagatccatgacttaaa

SEQ ID NO: 82909 - DNA, 602 bp, Homo sapiens
  sig_peptide (276)...(141): this location contains the signal peptide sequence, MCFLVCSFFSGTNRVIIPSYELKDRRLRRIAKLGLLSWIASSSYL, Run with SignalP
  misc_feature (482)...(541): similar to gi2522528 in the genepept database release 114, Run with FASTXY 3.3t00, default parameters
tgctttttcacttattgcagagctgaccacattaccagcccccactggcactgcagctcccaccctcatacttgagttaccaggaaccatgcggtctataggtggatcaccttatatatgctcacatatgtgagcggaaagatatgaactagaggctatccaactcagtaacccgagcttggcaatgcgtctcaagcgcctatctttcaactcataggaaggtattataaccctgttggtcccactaaagaaagaacatactagaaagcacatcagaaccaaccacagcagatttcaacatgacctcaactgcccctgtttctcgcagtccacattaataagcaacacaagcgggtttcgctaacaaagcctccgacttccagagattgagaagtcagttttctagaagcagaggaaagttgagtgtgattttacaatgacccaaaatatgggtatatatgggttgcagaaatgtaagtgggatgcagatggcttcataaggcattattgcaaggaaaatggattacagccctatgaagggcagttattagaccagcaaaagagaattaaacgactctaaaaaagagccatttagccctttc

SEQ ID NO: 82910 - DNA, 349 bp, Homo sapiens
  sig_peptide (325)...(190): this location contains the signal peptide sequence, MCHLKLSVLSFIYSFLPLFGKGYWERSVIKDKSVKRKKNCLENKT, Run with SignalP
  misc_feature (198)...(274): similar to gi9412 in the genepept database release 114, Run with FASTXY 3.3t00, default parameters
agaaaataagtattcatattctttgtgactggttgattcgtggtctggaagatatcctaaacttgtgtaatttcaccaggatttccttttttgcattggctgctagaaatcttgaaacaaaaattatgacctatttatagcaagggcatataacattatgttatctttttagccccgttgctggcacttttgttttgttttcaaggcaatttttctttctttttacacttttatctttaattacagatctttcccaataccctttaccaaacaagggcaagaatgaataaatgaatgaaagaacactcaattttaaatggcacatctgggcccagagggcaaatattct

SEQ ID NO: 82911 - DNA, 357 bp, Homo sapiens
  sig_peptide (59)...(194): this location contains the signal peptide sequence, MRTMGLYGCGLSCIPLTFACESPYSICDCIWTQSLQEGMKVQLGH, Run with SignalP
  misc_feature (269)...(338): similar to gi143018 in the genepept database release 114, Run with FASTXY 3.3t00, default parameters
cttagaaatagttgagatattcatcaggtggtgaatggataaactctcaccgtgatacatgcgcacaatgggtttgtacggctgtggattgagctgcatcccgttaacattcgcatgtgaaagcccttactccatatgtgactgtatttggacacagagtcttcaggaggggatgaaagttcagttaggtcatacggcgcgatccgttatttggcaggtcggtgtccgtgtaagaggaggagagaactctccctctctgttcgccattgtgaggacgcagctgaaggcagctgtttgcaaggcaggaagaaagccctccccagagccccgaaccttgatctcagacttccagcctcc

SEQ ID NO: 82912 - DNA, 454 bp, Homo sapiens
  sig_peptide (37)...(172): this location contains the signal peptide sequence, MILNKALMLGALALTTVMSPCGGEGIVGECMSEGCSLELKNSKLK, Run with SignalP
  misc_feature (37)...(155): similar to gi1916745 in the genepept database release 114, Run with FASTXY 3.3t00, default parameters
cagaacagcaactgctgaggctgccttgggaagaggatgatcctaaacaaagctctgatgctgggggccctcgctctgaccaccgtgatgagcccttgtggaggtgaaggcattgtgggtgagtgcatgagtgagggatgttctctggagctgaaaaacagtaaattgaaggaaaagagataaagcgatttgcagagaaactgtagagatttcctaagggccctttcagtattaagacaattaaaaattatagctgttcctccttcaggaaaccagagccccaacctactctttttgttatctatgctgttgtgttcactaaggacgctattctgtttatattatattcagtgacttacagcctgaggtctctatgtcgttccatcatgattgcctcaaaaattagtgaggtttccatcagtggataattttttattattaaaaatttatgaag

SEQ ID NO: 82913 - DNA, 396 bp, Homo sapiens
  sig_peptide (163)...(298): this location contains the signal peptide sequence, MMLWQVYPGPSAAVLCLFLHPPWSRSTAVEREKRQKDGRGQRMLL, Run with SignalP
  misc_feature (193)...(139): similar to gi12729 in the genepept database release 114, Run with FASTXY 3.3t00, default parameters
ctttgaaagggccacatgctctgccatgctagctgaactgcataagaatgcatcagttatgcaaagcatcttttaccagaattgcacaaatactagtttttatttaaacccttggctcatgattaatgtatccatctaacaaagtcccaaaataatggaaggatgatgctgtggcaggtttaccctggaccatctgcggcggtgctctgcctctttctccatccaccctggtccaggtccacagcagtggagagagaaaagagacagaaggatggccgtggtcagcgcatgttgctgccgcagccccagtgcctgatgtctagttgttgcttggtagacgtccagagtttaacaggatagattcttgatattctgcttgaatcaacaatcttacct

SEQ ID NO: 82914 - DNA, 342 bp, Homo sapiens
  sig_peptide (11)...(146): this location contains the signal peptide sequence, MAPVMARWPPFGLCLLLLLLSPPPLPLTGAHRFSAPNTTLNHLAL, Run with SignalP
  misc_feature (65)...(341): similar to gi5918165 in the genepept database release 114, Run with FASTXY 3.3t00, default parameters
gcaccacttcatggcccccgtgatggctcgctggcctcccttcggcctctgcctcctcctgctgctgctgtccccaccgccactgcccttgacaggggcccatcgcttctccgcacctaataccactctcaaccacttggcactggcacctggccgaggcacactctatgtcggcgcagtgaaccgcctcttccagctcagccccgagctgcagctcgaggccgtggctgtcactggccctgtaatcgacagccctgactgcgtgcccttccgtgacccagccgagtgcccacaggcccagctcactgacaatcccaaccagctgctgctggtgagcagccg

SEQ ID NO: 82915 - DNA, 313 bp, Homo sapiens
  sig_peptide (155)...(290): this location contains the signal peptide sequence, MATRSKGAFINCYIILLLTFLMIRTFYNLMEYYCPTLLIRKLMSN, Run with SignalP
  misc_feature (143)...(246): similar to gi3378564 in the genepept database release 114, Run with FASTXY 3.3t00, default parameters
tacagagagagcctcggctttgcctcatctctaaagttggaattgtagcagtgatacttacctcataaagctgttgagaagactaaattatttaatcaacatataacccttatcaccatatatgataggttttataatattccccagtgagataatggcgacaagaagtaagggggcatttattaattgctatattatattactgctgacgtttcttatgatcagaactttttacaatctcatggaatattattgtcccaccttactaataaggaaactgatgtctaataccaagatactttgatttgcacat

SEQ ID NO: 82916 - DNA, 316 bp, Homo sapiens
  sig_peptide (254)...(119): this location contains the signal peptide sequence, MQEGKLKVIRSLLFLYLHFVYVECGFSPGCLPWDQISVCLNANKR, Run with SignalP
  misc_feature (209)...(276): similar to gi2292751 in the genepept database release 114, Run with FASTXY 3.3t00, default parameters
actgccagttttctaagctcttttgacataccacgagggattaatccaaatgaacaacatgtcgtcatttcttaaaatcgattcaacaataaccaaaaattaatctgccgtccacctcctcttattagcattaagacagacagaaatctgatcccaaggaaggcaccccggagaaaagccacactcaacgtacacaaaatggagataaagaaacaaaagagatctaattaccttgagttttccttcctgcattttcagcaggttcccttgcgtcagaagcccaggaggaaaacaaaagagatctaattaccttgag

SEQ ID NO: 82917 - DNA, 1292 bp, Homo sapiens
  sig_peptide (430)...(565): this location contains the signal peptide sequence, MRGFCAFLGSWLVPFAYLTVLDLSKSLSAALLTAALLTFDTGCLT, Run with SignalP
  misc_feature (334)...(1251): similar to gi3645952 in the genepept database release 114, Run with FASTXY 3.3t00, default parameters
atgccgccggccacgggcggaggcctggcagagtccgagctgcgtccccggaggggccgctgtggcccccaggctgctagggccgcaggccgggacgtggccgctgaggctgtggcgcgaagccccaaacggcctgcttggggctcacggcgcttcgaggcggtcggctggtgggccctgctggccttggtgacgctgctgtccttcgccacccgcttccaccgcttggacgagccgccgcacatctgttgggatgagactcactttggaaaaatgggaagttactatatcaaccgtacatttttctttgatgtgcacccgcccctgggaaagatgctgataggtcttgctggctacctgagtggatatgatggtacctttttgttccagaagcctggggataaatatgagcatcacagctacatgggaatgagaggattctgtgcattccttggctcctggctggtcccctttgcctacctcactgtactggatctgtccaagtccctctcggcagcactgctcacagctgccctcctcacctttgacacgggatgcctcactctgtcccagtacatcctccttgaccccatcctgatgttcttcatcatggctgccatgctgagcatggtcaagtacaactcttgcgccgacaggcccttctctgccccctggtggttctggctcagcctgactggcgttagtcttgctggtgctttaggggtcaagtttgttggcctctttatcatccttcaagtggggctgaacaccattgcagacctttggtacctgttcggagacctcagtctttcattggtgactgtgggaaaacacctgactgctcgtgtcctgtgcctcatagtgctgcccctggctctctatacagccacctttgctgttcacttcatggtgctgagtaaaagtggccctggtgacggtttcttcagttctgccttccaggcccggctttcagggaacaacctgcacaatgcttccatccctgaacacctggcctacggctctgtgatcactgtgaagaacctccggatggccatcggctatctgcactcccacaggcacctctaccccgagggcattggtgcccgtcagcagcaggtcaccacctatttgcacaaggactacaacaacctgtggattatcaagaaacataacacaaactcagatcccctagacccttccttcccagtggagtttgtaagacatggagacattattcgactagaacacaaagaatgtccacttaaaaaaatctggcgatgggagcagaaaga

SEQ ID NO: 82918 - DNA, 359 bp, Homo sapiens
  sig_peptide (207)...(72): this location contains the signal peptide sequence, MHSTVINLLTWIVLLSMPSLIYWLKNLRYYFKLNPDPCKPLAFIL, Run with SignalP
  misc_feature (281)...(328): similar to gi882642 in the genepept database release 114, Run with FASTXY 3.3t00, default parameters
gggatcccagcagcaagtgacaagtcttttgagtggaagaaggaagtgggttcctgccatagtcggaataaggataaatgccaaaggtttacatggatcaggattaagtttaaaataatacctaagattctttagccaataaattagagaaggcatgctgagtaatacaatccatgttagtaagttaatcacagtactgtgcatgcgaaggctatcttcagcatcgttggcagataaacgaagatggtgtattgaggagtctttatgatgattggatttcttttcacttcttctagagtgtttgggattcacaggctggctattcttaaaagttgttaagctggcttgcagatgaacaa

SEQ ID NO: 82919 - DNA, 438 bp, Homo sapiens
  sig_peptide (246)...(381): this location contains the signal peptide sequence, MYSYFRFTIRIFLTTMLISIPISVVIFLKRNTNKSRELQLTAQYR, Run with SignalP
  misc_feature (264)...(396): similar to gi1230667 in the genepept database release 114, Run with FASTXY 3.3t00, default parameters
aattgtcttagctgttctgaaatgccaacatacaccagatcagctaagacaattactctattcactacactgtgagttgcctcctcactatgaacttctggaaaataagaattatgtcttatttattcatctttgtatcctcatgatctagttcagtgtctggctctagaaatcattaaataactttgtgaaatcaattcagtacaataacttcatcatcttagatttataagaaaaagttgcaaatgtatagttattttaggtttaccattaggattttccttacaacaatgctaatttcaatccccattagtgttgtgatttttttaaagaggaacactaacaaaagcagagaacttcaattaactgcacagtacagagatagtacctcttatgctaaagaggcaagaaaaatctagcagtcaatattctataact

SEQ ID NO: 82920 - DNA, 834 bp, Homo sapiens
  sig_peptide (127)...(262): this location contains the signal peptide sequence, MGFLSLTLYLLTSLNKMLFKLRGAQPTEEDIGGWLNELKTSLKYI, Run with SignalP
  misc_feature (129)...(27): similar to gi5104739 in the genepept database release 114, Run with FASTXY 3.3t00, default parameters
gaaagctcatcttccaaacaactcacagggaagatggcatgatcctgtttagacaaagaataagaaggaagaaagagctgcatggcttgaatatctgatgtgatactaagagcttgcagagaggatatggggtttctttcactgactttgtatttgttgacttcactaaacaaaatgctcttcaaactgcgaggtgctcaaccaacagaagaggacattgggggctggttaaatgagctaaagactagtttaaaatacattagactgagataagaaaaaaaaaagcatttctaggtgaaggcggaagtttggaatgctgtgagccattttaaggatatgactagattcttcaaatatcagaaggataccatttccaagagggatgagatccattctttgtaattctaggaggacaactctaggattcaatggtggggtgaatggggaaagagatttcaactcacgttgacaaattggcggcttcgtgctccaatgggcagaattgcctgagaggatacattcagcagatgagtgaccaatgagtcgctgcctaaaggcaaaaaatggaaaatcattgtcctgtacatacctcatcaacttcctgacagcatgcatatgtggcaaaccagaaggattacaatgcaggagaagtctaaggcctagcctaaactttacctattgtttccagcgcttccatttctttttcttaatctttcattattgaaagagatatttcgtcgacggcgccgcgagattccaaaatttatgaatcgtaggttcctggaaaaacccccgcaggtttcactttaactgggcatggggggcaccatatta

SEQ ID NO: 82921 - DNA, 567 bp, Homo sapiens
  sig_peptide (13)...(148): this location contains the signal peptide sequence, MLTCVPERLFQCHHLIRMTCLFMILEFRLFKYDSNLCSHVIINHP, Run with SignalP
  misc_feature (435)...(552): similar to gi4753898 in the genepept database release 114, Run with FASTXY 3.3t00, default parameters
ttctattataaaatgcttacgtgtgttccagagcgactattccagtgtcaccatttaatcagaatgacatgcctgttcatgattctagaattcaggttgtttaaatatgacagtaacctatgcagtcatgtgatcattaatcacccacaagttcagggacgccaaagatgatccagaggtaggcatctggctatttcaacttcacgaggccaaaatggaagttaaagagctaatctgggctgaacagaagattctggcagaacactgacactgaatccaaccttcacgcatcctctctccacatcattctttaggccttaactctttattccacattctctaataaacctctgtagctcttcccacccacagagacagcatcctgagagctctggggaacactcagatgtcctaaccacatgttaaccttgaattccccagttccagtggttttcacctctgctccacatgagataaccctttcaaagagccatgcccaggatcttgtcatcagctgcaccacgctgcctagaaactgtgagcttggaccattcactttgtggcttt

SEQ ID NO: 82922 - DNA, 724 bp, Homo sapiens
  sig_peptide (98)...(233): this location contains the signal peptide sequence, MGVSELLLLLKMIASVIFLYSFISMFKTQLLCSSSTSHGILESRI, Run with SignalP
  misc_feature (195)...(298): similar to gi1522685 in the genepept database release 114, Run with FASTXY 3.3t00, default parameters
ggcacgagaaacagtacatcctgcctatgaattctactgaccttaatctataattttttgttactactaggtttgaactgaggtatgattgaaagagatgggagtcagtgagctactgctgcttttgaaaatgatagcttctgtaatatttctttattcatttatttcaatgtttaaaacccaactactttgtagttcgtcaacttcacatggaattcttgagagcaggatcaaatgtcatgcagacttttaccttttctgccagtgaggacaatatggaaagcaaggtaaacggcaatggctgggtgtgggggagggagtcatctattaaaaaataacctcttcatgggaagctatggaattgattatgtgttactatactttattacaaagtccatataaatatgtattaattttcacgtgaagatatatactaaataggtcgggcacagtggcttacacctgtaatcccagcactctgagaggccgaggtggacagaccacttgagcccaggagttccagatcagcttggacaacatggtgaaaccctgtctctactgaaaatgcaaaaattagctgggtgtgtggcaggcgccagtaacccagctacgcaggaggttgaggcatgagaatggcttcaacctgggagatagcattgagccgagataccccactgccttccacctggtgacagagcaagaccccatgtcaccaaaaaaaaaa

SEQ ID NO: 82923 - DNA, 352 bp, Homo sapiens
  sig_peptide (47)...(182): this location contains the signal peptide sequence, MLQRMIEVIVDLFFLSLILSSFQSLWVLPEISLGNSSHSFLPLRY, Run with SignalP
  misc_feature (296)...(345): similar to gi11662 in the genepept database release 114, Run with FASTXY 3.3t00, default parameters
ggcacgagctcgaagattaagtgacatggatacaaaggatgggaaaatgctgcaaagaatgattgaagtcattgttgatttattttttctttccctcattctttcttcttttcagtccctgtgggttctccctgagatctctcttgggaattcctctcattcatttcttcccttgcgttactgttctaattcaggcccatagtatcccttgctaggactggtgcagtagtcttctggtttccttgcctcctgcctcttctccatcctgtgcatgttctcccagcactgatctggcccagtcactctctctgttacacatagtaccttcttcccattactgtcaatggcatat

SEQ ID NO: 82924 - DNA, 350 bp, Homo sapiens
  sig_peptide (159)...(294): this location contains the signal peptide sequence, MVTLRFLLCCCLQCSCYADSGLAFIVSFVWKNMLISDNAIKLIFS, Run with SignalP
  misc_feature (183)...(272): similar to gi3877071 in the genepept database release 114, Run with FASTXY 3.3t00, default parameters
ggcacgagggcatcttagatttactggtacagggttatagaggaaaaaactgagtaaaatgttgaatatttatgtttttagcagtgggcattgaatttagagtttctcgagtgagagtgatgtcagtgaggcattagttcatgtagttgctgacagtgatggtgacgttaaggtttctgttgtgctgctgtttacagtgctcatgttatgcagacagtggtcttgcgtttatagtgtcgtttgtctggaagaacatgttaatatcagataatgctataaagcttatattttctaaattttatatgtatcttttcaaatacttagatcttaatatttgatttttcattttg

SEQ ID NO: 82925 - DNA, 355 bp, Homo sapiens
  sig_peptide (25)...(160): this location contains the signal peptide sequence, MNQLSFLLFLIATTRGWSTDEANTYFLECTCSWSPSLPKSCPEIK, Run with SignalP
  misc_feature (25)...(296): similar to gi3357909 in the genepept database release 114, Run with FASTXY 3.3t00, default parameters
ggcacgagctcacacaagattacaatgaaccaactcagcttcctgctgtttctcatagcgaccaccagaggatggagtacagatgaggctaatacttacttcttggaatgtacctgttcttggtctccatctctgcccaaaagctgcccggaaatcaaagaccaatgtcctagtgcatttgatggcctgtattttattcgtactgagaacgctgttatccaccataccttctgtgtcatgacctctgcgggctgcttctggatactaaaggtcaccgtgcataactatgatctgacaacggacaccccgtagaattatacccagactcttttaagggaaaaactgctcattattg

SEQ ID NO: 82926 - DNA, 228 bp, Homo sapiens
  sig_peptide (70)...(205): this location contains the signal peptide sequence, MVISAAVLSSILCVFLSKLVLMNDECLRLTFWLHCNAKHYRYSML, Run with SignalP
  misc_feature (154)...(217): similar to gi895684 in the genepept database release 114, Run with FASTXY 3.3t00, default parameters
accacctctcctgccatattcctgggtgcttcactgaatgcaggatacatccatctggatgacacacttatggtcatttcagccgcagtcttatccagcatcctatgtgtattcctttctaaactggtactcatgaatgatgaatgtctgaggctcacattctggctgcactgcaatgctaaacactacagatatagcatgctgggctttcctaaactgacatctgtt

SEQ ID NO: 82927 - DNA, 708 bp, Homo sapiens
  sig_peptide (31)...(166): this location contains the signal peptide sequence, MNFEILIQRSLLFYFVLALNFPVASLDFFSVKIISAVFVEQKFWD, Run with SignalP
  misc_feature (203)...(89): similar to gi3378168 in the genepept database release 114, Run with FASTXY 3.3t00, default parameters
ggcacgagagaagacttgagggtcctattgatgaactttgaaatattgattcagagaagtctgcttttctattttgttttagctttaaatttccctgtggcaagtctagattttttttcagttaaaattatttctgctgtatttgtagaacagaagttttgggattttgtaaaataatgaccagagactaagaattcccatgccaccccgtatcactgtggaagatggagaagtgaggaactgtacctgcgggtgagccctggtgccatgttgagtgtgggaatcaggagagctgcagtggcttatataaacacctgacgaagtagtctaattggcttaatcatttattttatttattgaaatatatatctgggctgggcacggtggctcacatctgtaatcccagcactttgggagggcaaggcaggtggatcacttgaggttaggagttcaagaccagcctggccaatatggtgaaactgcgtctctactaaaaatacaaaaattggctgggcatgatggcgtgcacctgtaaccccagctactcgggaggctgaggcaaaaaaattgctttgaaccttggaaggcggagggtttcaatgaaccccgagactgcacccactggcctccagcctggggcaaaaaagccgggacttccttcttcggacaaacaagcacgcgggcgggcacactccttcccagcccgcc

SEQ ID NO: 82928 - DNA, 346 bp, Homo sapiens
  sig_peptide (24)...(159): this location contains the signal peptide sequence, MKLCFFFPTLAFCDVYQCVCNPMLSFSLEEGDLCTPHHLRDLANY, Run with SignalP
  misc_feature (120)...(14): similar to gi600720 in the genepept database release 114, Run with FASTXY 3.3t00, default parameters
ggcacgagaaacaaaacgtttgtatgaaattatgttttttctttccaactttagcattttgtgatgtttaccaatgtgtttgtaatccaatgttatcattttctctagaggaaggagacctttgtaccccacatcacctaagagacctagctaattactctttcacctttagtttatcccttcccccctttactacatgccacttcatcgaaggaatgaaacttaacaagtgcgttttagcttaacatctacagtatattgtttagtttactgtttgacttgaaaatattctgaggggttaaagtactgtaaggtacatgtcagggcttacttgaatattctaatt

SEQ ID NO: 82929 - DNA, 716 bp, Homo sapiens
  sig_peptide (53)...(188): this location contains the signal peptide sequence, MLDYLCFLLWKVIPQALQLCCWASLSEKTASLLLPGKEAQGFLTL, Run with SignalP
  misc_feature (124)...(68): similar to gi2791616 in the genepept database release 114, Run with FASTXY 3.3t00, default parameters
ggcacgaggaatcatcttattcctcaggagaattgtgaattttcttgaaatcatgttggactacctgtgctttctgctctggaaggtgattccccaggcacttcagctctgctgctgggccagtctctcagagaaaactgcctccttgcttcttcctggaaaggaagcccagggctttcttaccttgtttccaggggtacagatgacttcgtttcaagggcttctgtttttcaatagcattgcccattttaaagccagaggacacagggcccttcccagccccagcgtctttccggagcagcaactgaggaccgagtcactggctgaaaggggatatctcttggacatcccaaaccacccagcggcagaacccaggcagcctcacaagggaagcctgaggaatctcattctcaagtctttgccttctgcctttcaaaatccctttggccccagggaggaaatcagaagaaagggcttgttatcgccctaccggtgcctctcaggcatggtctatattaagaagctctttcctcagcatccttttgacactttattactcatccagcacaaccgcggggttgcaagaataaattttatggtcccaataccttttaataccactttttttcccccggaagaaagggggggataccgtgaatcaaaaaggctgaaaggccttaaaaggaacccctttcttgggggcctgcccccggaaa

SEQ ID NO: 82930 - DNA, 360 bp, Homo sapiens
  sig_peptide (199)...(334): this location contains the signal peptide sequence, MILCHTVLNVPSLLAILGLADLCLTYYACLCVDRYWSFCICRSIH, Run with SignalP
  misc_feature (214)...(280): similar to gi4929410 in the genepept database release 114, Run with FASTXY 3.3t00, default parameters
cgttgctgtcgctgggctgaggtaccttaagcttccccccgcaacaccccagcctcagggattgcgggagttgtcagagatctgatggatccgaaaggggcagggccaggggattaggtttggggtcataggttctgttttccagggtaggggtgagatacgtctggattatgccctttgccgtgtcctccatctaggatgatcttgtgccatactgtattgaatgtgccttctctgctagccattttaggtctggctgacttatgtcttacctattatgcatgtttatgtgttgatcgatattggtccttctgtatctgccggtcaattcatggacgcatgacgacagctatcctttat

SEQ ID NO: 82931 - DNA, 1798 bp, Homo sapiens
  sig_peptide (978)...(843): this location contains the signal peptide sequence, MAMLPFPIFLVLLLRGLVLWTPASSGTIMPEERKTEIERETETES, Run with SignalP
  misc_feature (881)...(529): similar to gi4050087 in the genepept database release 114, Run with FASTXY 3.3t00, default parameters
caagaagtgtccacagcagtaatggataaagactagttttaaatcctcaaagccctaagaggggccccttggttgccctttgtgaatgccagcccccttaagagagtggtgtttgattaacaaaaaaactgtggccccaagtggaacccttgaccttttcctcagataatctgtgtatgtacacagctaacacagctctttagattccctgttaagtgactcattcacattcctttcttggatataaagtcattgctgtctttttatttttgaaatagtacaagacaaagatttttaacttaacatgaaaaattcactcttttattttggaaaaaaagttaacttttcatactaacaaacagaacaagatttaaggtaaatttcttaaacattatccagaaaaataacaagatttatagtatctacttctggtactaatatacacaaaaggccaaaaccatgcctattctgcaggtgtagcttcggtgctctcctgttcaggggcaggctcactgcccgcttcttttccttctttgcttcttttagattttttgtgtttgtgtctcctgtgactatctccttcttcactttcatggcgacgtctactattacttcgagaagacttatgtctggtttcctctttctccctgtgtcgtctttctctatgtcgttcttctttttctcgacttgctctgtgacgctcataacctctttctgcatattccctgtatctgtatcgttcttcatcgctgttgaaaacacttggtgtaggactgtgatcacgctccctctctctctctctggtgcgttctctttctctgtcccgatcacggtctcgctctctgtctctgtctctctctctatctcggtctttctctcttctggcataatagtcccactgcttgctggtgtccacaagactaggccacgaaggagcagaaccaggaagatggggaaaggcaacattgccatatggaaatgcacgtgcagaacgactatcataaccagaggaatgtccactttctattgttggtataagagatggaggtggagcgcctggtggaggaggaaaacccggtggtggaatcagaggtggagcagtgctgacagtcggaggaggtggaagaaatggaggaggtggaaggtgagtgggaggagctcctggagggaaaaacggaggtggtttgctaaaattgttgtctacttcagtagcagatctttcagaaaggacctgtatgttgctgttctcatttgcccgtcgcctgccttttactcggctgatagttatagtctgaccgataacatcaattgccccaggtaatctcctgctcggtggaagcccagtcttgaacaaagaaggaggagaagtaacctcagcttttgtagatggaagggcagtttctttctctgagtttccagttcttccctgctgtaccttaaaaagattgaatctgccatcttggatctctgcacctggtgtaacttccatagtacagtcttcggccgtaattttatttgtagtagaggttactggtataacttcaagtcccattcgtatcctcttttgtttttcacagtaagctttccaggtatcttcattaaacccataattaaaataatcagaaagatcagcaccaggtttacgccatggtttatcttcaaaagaatccaaatctacctctaagagtggaactccattaatgcttccaggtgcatcaaggtctactcctttgacttttgtccctgtagttccataaactcttccccctgtcttgacgaaatcgtcgacccgggaatt

SEQ ID NO: 82932 - DNA, 340 bp, Homo sapiens
  sig_peptide (21)...(156): this location contains the signal peptide sequence, MAWIPLFLGVGAYCTGSVASYELTQPPSVSVSPGQTASITCSGDK, Run with SignalP
  misc_feature (21)...(253): similar to gi4103659 in the genepept database release 114, Run with FASTXY 3.3t00, default parameters
ggcacgagggtgcctcagccatggcatggatccctctcttcctcggcgtcggtgcttactgcacaggatccgtggcctcctatgagctgactcagccaccctcagtgtccgtgtccccaggacagacagccagcatcacctgctctggagataaattgggggataaatatgcttgttggtatcagcacataccatgccagtcccctgcgctgtccatccaccatgacgctactggccctcattggattctgactagtctcctcctaaagactgttactcttcatcgtcacagtaacgccaccccgatcccactttccgtcgtcgactacactactgtcgc

SEQ ID NO: 82933 - DNA, 384 bp, Homo sapiens
  sig_peptide (335)...(200): this location contains the signal peptide sequence, MSFTVLCMFLAVVVHKIMNTCWVSTSSNYHLQTSPGWPELIGRLR, Run with SignalP
  misc_feature (303)...(387): similar to gi3676090 in the genepept database release 114, Run with FASTXY 3.3t00, default parameters
catatgcttcttcgaaatcttacgaaacaaggaaggtgctgctgaggttccagaaaaggtgccagtcttcagttgctgctgttcttcctgtagcctagcctagatttgaagcttttgaagagttcatgaaggcactacgaaatttaggtgagcgcgctgtatcaatctccccttctttagtgtgcgagatataatttttgtctcaaccttccaattagttctggccatccaggacttgtttgcaagtggtaattggaggaggtgctgacccaacatgtattcattattttgtgtactaccactgcaagaaacatgcagagaactgtaaaagacataacataatcaagtgccaaaatgtgtgtataggaggcttctgctcgtgcc

SEQ ID NO: 82934 - DNA, 351 bp, Homo sapiens
  sig_peptide (335)...(200): this location contains the signal peptide sequence, MFSQSVAWLSNLFTGNFTEQKALIWMRSSLLIFPLWTVLLVSRNL, Run with SignalP
  misc_feature (232)...(346): similar to gi56590 in the genepept database release 114, Run with FASTXY 3.3t00, default parameters
attatatttttaaggcagccattttaatatagtgagagcatgtgtgaatatgtattaacattctaagccattaaggccacttgttcacagaatatatttgagctctaaaattgttgaaagagaaaatgctcaaatagcttacagaaataatggatgttatacagaccagaaaggaatcaaattaaataccaaaagtttgtaagatttcttgacaccaaaagcacagtccatagaggaaaaattaataaactggacctcatccaaattaaagccttttgctctgtgaaattccctgtgaagaggttggaaagccaagctacagactgggagaacatattttcatctcgtgcc

SEQ ID NO: 82935 - DNA, 474 bp, Homo sapiens
  sig_peptide (302)...(437): this location contains the signal peptide sequence, MTFFKKYIYKIFFLCLDSCTTRCLDETFSEFVLLGVHRICDLMSF, Run with SignalP
  misc_feature (329)...(437): similar to gi6015733 in the genepept database release 114, Run with FASTXY 3.3t00, default parameters
ggcccgccctatgacgctttccatcgatcgcggtaagtaccggctcgacccacgcgtccgcaccgtgcccagcctcatatattttttgatgaaagtctgctgaggatgaattctgtccacttttattatctgaaaacatctttattttgcctcattttaaatagtatttagattgggtgtagacttctatattgccaattagtttcttttagcactgtaaatacagatgtccagtattttcagattcagttatttcagctgaaaagctagctgaaagtcttgttgctcctctgaaggtaatatgacttttttcaaaaaatacatttataaaattttttttctttgccttgatagttgtactacaaggtgcctggatgagactttctctgaatttgtcttgcttggggttcatagaatctgtgacttgatgtctttcatgagttttgaaaaatgctagccattatctcttacatg

SEQ ID NO: 82936 - DNA, 393 bp, Homo sapiens
  sig_peptide (27)...(162): this location contains the signal peptide sequence, MLVKVVYVMGAILKIFLREGNVINQRSGMDIEKYSEHYLAQGVRW, Run with SignalP
  misc_feature (219)...(393): similar to gi3688813 in the genepept database release 114, Run with FASTXY 3.3t00, default parameters
gcatcgatgaaacagttgtagctgacatgctcgtaaaggttgtatatgttatgggggccattctcaaaatctttctccgtgaagggaacgtcatcaatcagcgcagcggaatggacattgaaaaatattccgagcattatctggcacagggcgtgaggtggtgacattgagacaagtggtcgaggcaagggtgggaatagtgaccaagccgtctctcccaggaacccagattatcgtcctctctggaggcgtcatcatcacggggcagtgcgcaagaggggagggagaaccggcacttcttcatatcagttcttcttgaaatgccggtgggtggaacactacatgatcactctccaggcgttgagaacgacgcccgctcgcgatctagaacta

SEQ ID NO: 82937 - DNA, 383 bp, Homo sapiens
  sig_peptide (182)...(317): this location contains the signal peptide sequence, MRCGIFKLGMVSFICMMWDSCLMYLQLRLCLCLDYRIFLLRVVSI, Run with SignalP
  misc_feature (264)...(371): similar to gi5019379 in the genepept database release 114, Run with FASTXY 3.3t00, default parameters
ttgatatgtagtctactcacattttcattatttagcaattttgtacaaaaatagcaattaatttgtaaacactgccagaatactttctagctgctttgtaattttttaagagtgttattttgcttatggattgactagttgctaccctcgtttttgattttaaactgtggatatatggtaaatgcggtgtgggatctttaagttgggtatggtctcttttatctgtatgatgtgggattcttgtcttatgtacttgcaattgagattgtgtttatgtcttgattatcgtatttttttattacgcgttgtctctatattatttttttaatatgagtcgtctcatgtttaattattatgattatcttttataatatctactctcg

SEQ ID NO: 82938 - DNA, 364 bp, Homo sapiens
  sig_peptide (271)...(136): this location contains the signal peptide sequence, MKREAMVSPLLLGRPGWALPVLQQRNQSAAKSCWRKPQAVSWTLD, Run with SignalP
  misc_feature (261)...(364): similar to gi1835337 in the genepept database release 114, Run with FASTXY 3.3t00, default parameters
cccactcaagggcgttgctctgtacctggcctctgtgagaacaaagcctgcacagtgtcgatggactctggtaagcttcatggatttacttcccaagtaaagtgcggggtggagcaaacctctagctttgaggcaggtcaagggtccaggacacagcctggggcttgcgccagcagcttttcgctgctgactgatttctctgctgcaggacgggcaaggcccacccagggcgccccagcaggagagggctcaccattgcttctcttttcattcattcattcattttgtttttaagaaaaaaaaccaacaacaccaaaaaaacaggtctaataagccttccttggagccaaatgggcaaaaatgt

SEQ ID NO: 82939 - DNA, 781 bp, Homo sapiens
  sig_peptide (263)...(398): this location contains the signal peptide sequence, MHPQLIPSVIAVVFILLLSVCFIASCLVTHHNFSRCKRGTGVHKL, Run with SignalP
  misc_feature (224)...(783): similar to gi4159801 in the genepept database release 114, Run with FASTXY 3.3t00, default parameters
agtagatcgcgatctagaactagtccggacgcgtgggaaagacttcttttgagctaactttcttatactggtacctttctaatctcactacaatatgtaacattggtgttcgatctcaagtatttctgaatatattcccctatccacagaaatatactctgggggaaaaaaaatagaacaaattcttgccgtcctgaccattgaacaagagactaattagacaatggggctagaaaaacctcaaagtaaactggaaggaggcatgcatccccagctgataccttcggttattgctgtagttttcatcttacttctcagtgtctgttttattgcaagttgtttggtgactcatcacaacttttcacgctgtaagagaggcacaggagtgcacaagttagagcaccatgcaaagctcaaatgcatcaaagagaaatcagaactgaaaagtgctgaagggagcacctggaactgttgtcctattgactggagagccttccagtccaactgctattttcctcttactgacaacaagacgtgggctgagagtgaaaggaactgttcagggatgggggcccatctgatgaccatcagcacggaagctgagcagaactttattattcagtttctggatagacggctttcctatttccttgggcttagagaggagaacgccaaaggtcagtggcgttggggggaccagacgccatttaacccacgcagagtattctggcataagaatgaacccgacaactctcagggggaaaactgggttgttcttgtg

SEQ ID NO: 82940 - DNA, 404 bp, Homo sapiens
  sig_peptide (85)...(220): this location contains the signal peptide sequence, MVFTCPHQKPALSILLRLLLLNRSAAAAESQWFLLFTKICPPTWV, Run with SignalP
  misc_feature (334)...(390): similar to gi1125823 in the genepept database release 114, Run with FASTXY 3.3t00, default parameters
ggcacgagattgatttgtgggtgccactgctgcagctgctgagtctcaatggtttctagtcttcaccaagttctgcccacccagatggtttttacctgtcctcaccagaaacctgcactgtctatattgctgaggctgcttctccttaaccgatctgcggcagctgctgagtctcagtggtttctactcttcaccaagatctgcccacccacatgggttttacctgtcctcaccagggttataggtgaatggctcaggccttgaaacctccaactgctctgactccaggttggagcacttctatgcccagcactaacctcgctattacaggatgccaccaaaaccttgatatggggctgctgcatcctaattaaaaaaacaagtaatagacattattttttttc

SEQ ID NO: 82941 - DNA, 1172 bp, Homo sapiens
  sig_peptide (91)...(226): this location contains the signal peptide sequence, MCVPRSGLILSCICLYCGVLLPVLLPNLPFLTCLSMSTLESVTYL, Run with SignalP
  misc_feature (550)...(1173): similar to gi3877677 in the genepept database release 114, Run with FASTXY 3.3t00, default parameters
ggctttgacagggcatagtctcctccaataatcttctccgttctctctcattattccctcgagttcttctcagtcaagctgcatgtatgtatgtgtgtcccgagaagcggtttgatactgagctgcatttgcctttactgtggagttttgttgccggttctgctccctaatcttccttttctgacgtgcctgagcatgtccacattagaatctgtgacatacctacctgaaaaaggtttatattgtcagagactgccaagcagccggacacacgggggcacagaatcactgaaggggaaaaatacagaaaatatgggtttctacggcacattaaaaatgattttttacaaaatgaaaagaaagttggaccatggttctgaggtccgctctttttctttgggaaagaaaccatgcaaagtctcagaatatacaagtaccactgggcttgtaccatgttcagcaacaccaacaacttttggggacctcagagcagccaatggccaagggcaacaacgacgccgaattacatctgtccagccacctacaggcctccaggaatggctaaaaatgtttcagagctggagtggaccagagaaattgcttgctttagatgaactcattgatagttgtgaaccaacacaagtaaaacatatgatgcaagtgatagaaccccagtttcaacgagacttcatttcattgctccctaaagagttggcactctatgtgctttcattcctggaacccaaagacctgctacaagcagctcagacatgtcgctactggagaattttggctgaagacaaccttctctggagagagaaatgcaaagaagaggggattgatgaaccattgcacatcaagagaagaaaagtaataaaaccaggtttcatacacagtccatggaaaagtgcatacatcagacagcacagaattgatactaactggaggcgaggagaactcaaatctcctaaggtgctgaaaggacatgatgatcatgtgatcacatgcttacagttttgtggtaaccgaatagttagtggttctgatgacaacactttaaaagtttggtcagcagtcacaggcaaatgtctgagaacattagtgggacatacaggtggagtatggtcatcacaaatgagagacaacatcattattagtggatctacagatcg

SEQ ID NO: 82942 - DNA, 333 bp, Homo sapiens
  sig_peptide (145)...(280): this location contains the signal peptide sequence, MYAPACLCLSLFLLLLPLFFSVSLWLSVSGLFSLTHLPCISILSP, Run with SignalP
  misc_feature (142)...(334): similar to gi862343 in the genepept database release 114, Run with FASTXY 3.3t00, default parameters
ctgaggtggtctcatttcattctcctaaccacctcgggaggtaccattactacccccattttataggtgaggaaacagggtgaggagaagtgatgtaaacatctctatcctgtttctagaacatctccctgtgttaaagtgagtatgtatgcacctgcatgcctgtgtctctctctcttcctccttctcctcccccttttcttttctgtttctctctggctcagtgtgtctggcttattttcacttactcacttaccctgcatctccatcctctctccacacaccccattcccttcctccttattccattatttgaccaaatacttttatttg

SEQ ID NO: 82943 - DNA, 360 bp, Homo sapiens
  sig_peptide (113)...(248): this location contains the signal peptide sequence, MELVRRLMPLTLLILSCLAELTMAEAEGNASCTVSLGGANMAETH, Run with SignalP
  misc_feature (113)...(353): similar to gi1572629 in the genepept database release 114, Run with FASTXY 3.3t00, default parameters
ctaccccttgcgtggctggaactgacgtttccctggaggtgtccagaaagctgatgtaacacagagcctataaaagctgtcggtccttaaggctgcccagcgccttgccaaaatggagcttgtaagaaggctcatgccattgaccctcttaattctctcctgtttggcggagctgacaatggcggaggctgaaggcaatgcaagctgcacagtcagtctagggggtgccaatatggcagagacccacaaagccatgatcctgcaactcaatcccagtgagaactgcacctggacaatagaaagaccagaaaacaaaagcatcagaattatcttttgctatgtccaacttggttccgaaag

SEQ ID NO: 82944 - DNA, 369 bp, Homo sapiens
  sig_peptide (178)...(43): this location contains the signal peptide sequence, MACQPSLCVPWFYWSVLSPPRYLNVVWGCFLLRPPLSFPMAANIS, Run with SignalP
  misc_feature (243)...(327): similar to gi1449328 in the genepept database release 114, Run with FASTXY 3.3t00, default parameters
agtaacaggtaacgggtgacgagagagtgaggagctgccacacgaaatattggcagccatggggaaagaaaggggaggccgtaataaaaaacacccccaaactacatttaagtaacgcggaggtgataacacagaccaataaaaccagggaacgcacagtgaaggttgacacgccatccttaacgcgcctccccggcttgtttctgcaatagaaactcacatccatttaatcacctttctgacatggagcgttcccttatattgggataagaatggctcgtcatccctcccaccccctccacctgccgggctgtgtatttcagaaagttccttggaactttctccatcttctctccctcccagtggttt

SEQ ID NO: 82945 - DNA, 337 bp, Homo sapiens
  sig_peptide (150)...(285): this location contains the signal peptide sequence, MPLTTAFLRMVSALCGDCRHQPDPAIPWPHNLRGADYQNQVGGLA, Run with SignalP
  misc_feature (209)...(324): similar to gi3335226 in the genepept database release 114, Run with FASTXY 3.3t00, default parameters
cacagatctctctcagaacactgctctgtgagagatctgtgagctccttccattgggagcctgctctggtggacacagaatgcgctggagcctgcatataaattataagtaaaacagctacttgaactacctttcctagacatttatttatgccattgacaactgccttcctaagaatggtatctgctttatgtggagactgcaggcatcaaccagaccctgccattccttggccacacaacctccggggagcagactaccaaaaccaggtcggaggcctggcccagagaaaggcttctgtcatgagaacagatcaacatgccccccaccccaactc

SEQ ID NO: 82946 - DNA, 908 bp, Homo sapiens
  sig_peptide (483)...(618): this location contains the signal peptide sequence, MGSVFWHVLFCISGVCLWCAHRMAAFLQQMAVLLPVDCERPAAVH, Run with SignalP
  misc_feature (115)...(906): similar to gi3879782 in the genepept database release 114, Run with FASTXY 3.3t00, default parameters
gggaggcgggcagcggagccaagctgacccggcgagcggagccggggctggagagcggcgaccactgcggatctcggaaggaagaaatgatgtaaatcactcatccaaaccttaaggtcaaaggtgagaaggaaggtcaggaagaacatggcctggccaaatgtttttcaaagagggtctctgctgtcccagttcagccatcatcatgttgtagtgttcctgctcactttcttcagttattcgttgctccatgcttcacgaaaaacatttagcaatgtcaaagtcagtatctctgagcagtggaccccaagtgcttttaacacgtcagttgagctgcctctggagatctggagcagcaaccatttgttccccagtgcagagaaagcgactcttttcctcggcacactggataccattttcctcttctcctatgctgtgggcctattcatcagtggcatcgttggggatcggttgaatttgcgatgggttctgtcttttggcatgtgctcttctgcattagtggtgtttgtctttggtgcgctcacagaatggctgcgtttttacaacaaatggctgtactgctgcctgtggattgtgaacggcctgctgcagtccactggttggccctgtgtggttgctgttatgggcaactggtttgggaaagccggacgaggagttgtttttggtctctggagtgcctgtgcttcggtgggcaacattttgggagcgtgcctagcttcttctgttcttcagtatggttatgagtatgcctttctggtgacggcgtctgtgcagtttgctggtgggatcgttatcttctttggactcctggtgtcaccagaagaaattggtctctcgggtattgaggcagaagaaaactttgaagaagactcacacaggccattaat

SEQ ID NO: 82947 - DNA, 434 bp, Homo sapiens
  sig_peptide (6)...(141): this location contains the signal peptide sequence, MDTWLVCWAIFSLLKAGLTEPEVTQTPSHQVTQMGQEVILRCVPI, Run with SignalP
  misc_feature (6)...(437): similar to gi1223886 in the genepept database release 114, Run with FASTXY 3.3t00, default parameters
ctgccatggatacctggctcgtatgctgggcaatttttagtctcttgaaagcaggactcacagaacctgaagtcacccagactcccagccatcaggtcacacagatgggacaggaagtgatcttgcgctgtgtccccatctctaatcacttatacttctattggtacagacaaatcttggggcagaaagtcgagtttctggtttccttttataataatgaaatctcagagaagtctgaaatattcgatgatcaattctcagttgaaaggcctgatggatcaaatttcactctgaagatccggtccacaaagctggaggactcagccatgtacttctgtgccagcagtgaaagggggtctggggccaacgtcctgactttcggggccggcagcaggctgaccgtgctggaggacctgaaaaacgtgttcccaccc

SEQ ID NO: 82948 - DNA, 435 bp, Homo sapiens
  misc_feature (1)...(435): n = a,t,c or g
  sig_peptide (120)...(255): this location contains the signal peptide sequence, MWLPPALLLLSLSGCFSIQGPESVRAPEQGSLTVQCHYKQGWETY, Run with SignalP
  misc_feature (120)...(435): similar to gi5706456 in the genepept database release 114, Run with FASTXY 3.3t00, default parameters
cggacgcgtggggcagaaggtgcaagccagagctcaggcagaacttccagattgcatctgggatctgcatttgccactggttgcagatcaggcggacgaggagccgggaaggcagagccatgtggctgccccctgctctgctccttctcagcctctcaggctgtttctccatccaaggcccagagtctgtgagagccccagagcaggggtccctgacggttcaatgccactataagcaaggatgggagacctacattaagtggtggtgccgaggggtgcgctgggatacatgcaagatcctcattgaaaccagagggtcggagcaaggagagaagagtgaccgtgtgtccatcaaggacaatcagaaagaccgcacgttcactgtgaccatggaggggctcaggcgagatgacgcanatgtttactggtgtgggg

SEQ ID NO: 82949 - DNA, 786 bp, Homo sapiens
  sig_peptide (316)...(451): this location contains the signal peptide sequence, MVCRLPCTLLPWPLKHKQGALLYICPASLPAFNPRNLSVYLLFSA, Run with SignalP
  misc_feature (169)...(85): similar to gi3193038 in the genepept database release 114, Run with FASTXY 3.3t00, default parameters
gcctggtgtaatgcgaggttgccggaaacagcaaagatagatttcagagcacagcagcaggggtccctggtcagccccgctccctagagcaggagatcttgagtgggagaacattcttgttgtagccacagctgaggccctggaccagctctctccacaccgcatgctccgagttgggactctaaggagtctaggaattttcattcaaacttggccttacaggtcactcatcagaaaaatacttttttcaaggtcaaccaatagaacatactttattcaacagtttgttagtttgctttttaaatatttagccacatggtatgtaggcttccatgtacactcttgccctggcccctgaaacataagcagggggctcttctgtacatttgcccagcttccctgccagcctttaaccccaggaacctctcagtctacctcctcttttctgcctctgaatccctacctttaaagtcagaacaggccaggcccggtggctcacgcctgtaatcccagcactttgggaggctgaggtgggtggatcacttgacatcagtagttcaagaccagcctggccaacatggtgaaaccccatccttactaaaaatacaaaaattagccaggtgtggtggcgggcacctgtaatcccagctactcaggaggctgaggcaggagaatcacttgaacccaggaggcagagtttgcagtcagccaagatcacgccactgtactccagcctggatgacacagcgagactccgtctcaaaataaatacaaaaaaaaaaaagg

SEQ ID NO: 82950 - DNA, 422 bp, Homo sapiens
  sig_peptide (263)...(398): this location contains the signal peptide sequence, MRIFCLFLSLGIWYPLPPGPLGEDRACPTLSEAASLAQLPGLGTA, Run with SignalP
  misc_feature (251)...(391): similar to gi1181399 in the genepept database release 114, Run with FASTXY 3.3t00, default parameters
tggagtgtgggtcctacaaagaagctgcagccgctttcctccctgccactctccccccagcccccaggcccatctctgagctgctgtctgccatcgcacggtaaccggatgagacaggcaatttatgacaccagctgtctctgtcaaaaccggatctcccacacacaccaggggaagccaattaccttgagcccagccctgccagaaaccggggcccacaagggagagcagggactgcccagagaggtgagtggcacctgacatgaggattttctgcctcttcttgtctttgggcatctggtatcctcttcccccaggcccccttggggaggacagagcctgccctaccctctctgaggctgcttctctggcccagctcccaggcctaggaactgcaagagcggtttcagggtggagaacag

SEQ ID NO: 82951 - DNA, 390 bp, Homo sapiens
  sig_peptide (246)...(381): this location contains the signal peptide sequence, MSWTFLTSLIHSLYKMCLLTYGCGLLRFQHLQAWETVRLEYLEGP, Run with SignalP
  misc_feature (186)...(366): similar to gi5104308 in the genepept database release 114, Run with FASTXY 3.3t00, default parameters
atgccactctgtagacattaaattgagtaaagagcagtgctgggagagcaggcaatttagataaaatccttcatcagtgtttccagtgtcaagatactctttcattatatagacttgttctgcactctatccgggagtccatggcaaatgatgtggataaagagctaatgaagcagatcctctgccttgtcaatgttagtcacaatggtgtgagtgaatcagaactgatggaactctatcctgagatgtcctggactttcttgacctcccttattcacagtttatacaaaatgtgtttgttgacttatggatgtggcttgcttaggtttcaacatctgcaggcttgggaaacagtgagattggagtacctggaaggccccactgttactt

SEQ ID NO: 82952 - DNA, 371 bp, Homo sapiens
  sig_peptide (153)...(288): this location contains the signal peptide sequence, MIWTSFKSAMIATILVICQVFIVYSKPFKDRDHFSFIHSANAEYL, Run with SignalP
  misc_feature (241)...(303): similar to gi335551 in the genepept database release 114, Run with FASTXY 3.3t00, default parameters
ggcacgaggagagttagacttattaatgaatttgtgcaccaaagggtcaggccaagcttacctcctctttgaaggcttttcttactttctttgcactcccactcattgaacatagtccaagttgaattgaccactccttccttcatgccctgatgatatggacttctttcaaatcagctatgatagctactatactagttatatgccaggtcttcatagtgtactctaagcctttcaaagacagagaccatttctcattcattcattctgccaatgctgagtacctctctgtctcattgctgtgctggaggctgaggatggagcaatgagtgacccaaagggcatctcctctcagaatttaggcaattgtg

SEQ ID NO: 82953 - DNA, 379 bp, Homo sapiens
  sig_peptide (6)...(141): this location contains the signal peptide sequence, MVLQTHAFISLLLWISGACGDIVMTHSPDSLAVSLGETATIDCRS, Run with SignalP
  misc_feature (6)...(382): similar to gi560842 in the genepept database release 114, Run with FASTXY 3.3t00, default parameters
gcaagatggtgttgcagacccacgccttcatttctctgctgctctggatctctggtgcctgcggggacatcgtgatgacccactctccagactccctggctgtgtctctgggcgagacggccaccatcgactgcaggtccagccagagtgtcctctaccacgccaacaataaaaactacttaacttggtaccagcagagaccacgacagtctcctaaagtgctcattttctgggcatctacccgggaaaccggtgtgcctgaccgattcactggcagcgggtctgggacagattattcgctcaccataagcagcctgcaggctgaagatgtggccacttattactgtcaacaatattatgattctccgatcaccttccg

SEQ ID NO: 82954 - DNA, 362 bp, Homo sapiens
  sig_peptide (185)...(320): this location contains the signal peptide sequence, MILISFGKSWPVSLQILFLLHCLFSSHSGTSMILIGSFLPCPYVS, Run with SignalP
  misc_feature (128)...(334): similar to gi6009791 in the genepept database release 114, Run with FASTXY 3.3t00, default parameters
ttctggctttcatcaggtccttagggaagtcaattgtttgtcttgttgctcttttgaaagtagtatcttcttctctctaacttccttttttcattttcataagttttgtgatgatctgcctacagtagtcttctttgtacttacttggattgtggtttatagaacttcttgggcctatggcttgatgatattaatcagttttggaaaatcttggccagtatctcttcaaatattgtttctgcttcactgtcttttttcttctcattctggaacttcaatgatacttattggatcttttttaccatgtccatatgtctcttaccctttttctctttatgcttcactatgtaggttactactgg

SEQ ID NO: 82955 - DNA, 369 bp, Homo sapiens
  sig_peptide (196)...(331): this location contains the signal peptide sequence, MCSVTCGVLFALSGLLLYSSPSPHWNRPSRIAVYLMCLTKYCTGS, Run with SignalP
  misc_feature (214)...(271): similar to gi2827919 in the genepept database release 114, Run with FASTXY 3.3t00, default parameters
ttacagtctgtctctgaagattacttgtacagtcccatcagctatactttttcaccccacagtccagctgccagcctcgccagaatccccttattatttgaaatttattgttgtattcactcaatgtattctgtgcctgaaatgcatctctggagtcaacatgggtaccctttccttctttaaagcccttccctgatgtgcagtgttacctgtggtgtcctcttcgctctctcaggcctcctgttatactcttctccttccccacactggaacagacccagtagaattgcagtgtatctcatgtgcctcactaagtactgcactgggagctctgccgcctcctgccagtgactctgcttcagccatgtt

SEQ ID NO: 82956 - DNA, 384 bp, Homo sapiens
  sig_peptide (165)...(300): this location contains the signal peptide sequence, MFYVYVFKLTQMVYFKTFSLVIMFLRSSCIRGYSLLLLRAEYYLC, Run with SignalP
  misc_feature (292)...(376): similar to gi2769725 in the genepept database release 114, Run with FASTXY 3.3t00, default parameters
gggttagcaataaagttgacatatttattatcacctacaacattgcctttttaatcgcctctcctctggagttacaaccactaccatgaatttggggtttatctttcccattaattttaatatcctttatctggacatgtcagtatgcatgagcagcgtttaatatgttttatgtgtatgtctttaaacttacacaaatggtgtattttaagactttttcacttgtcattatgtttttgagatctagctgcattcgtggatatagtttactcctcctaagggctgaatactatttgtgcaatactttattgctgtatatgtctctctaagagggtgagttgttctggggcagagatgggatgttgtttgtgtttataccctcag

SEQ ID NO: 82957 - DNA, 440 bp, Homo sapiens
  sig_peptide (108)...(243): this location contains the signal peptide sequence, MQATSNLLNLLLLSLFAGLNPSKTHINPKEGWQVYSSAQDPDGRG, Run with SignalP
  misc_feature (108)...(443): similar to gi442364 in the genepept database release 114, Run with FASTXY 3.3t00, default parameters
cccgtagacgtcttacctgcctacgccaagcttggcacgaggggtctctgcagtgagtggggagcctacataaaagagagtaaagaggggcaaaaacccagatcagaatgcaggcgacgtccaaccttctcaacctcctgctgctgtctttgtttgccggattaaatccttccaagactcacattaatcctaaagaagggtggcaggtgtacagctcagctcaggatcctgatgggcggggcatttgcacagttgttgctccagaacaaaacctgtgttcccgggatgccaaaagcaggcaacttcgccaactactggaaaaggttcagaacatgtcccagtctattgaagtcttaaacttgagaactcagagagatttccaatatgttttaaaaatggaaacccaaatgaaagggctgaaggcaaaatttcggcagatt

SEQ ID NO: 82958 - DNA, 497 bp, Homo sapiens
  misc_feature (1)...(497): n = a,t,c or g
  sig_peptide (273)...(408): this location contains the signal peptide sequence, MGIYLTLWGILAFSMNFFIPHLVLQFVITDLLIPAMHKALAIRFV, Run with SignalP
  misc_feature (333)...(455): similar to gi338259 in the genepept database release 114, Run with FASTXY 3.3t00, default parameters
ntaatctttaacataaaacaanaaaactcccaaaactcagaaccctaagtatataatcagtatcattcgccataaatagaagaatgaatacaaaatgatattctaaaatttctagccatatattctaacccacaaaaggctctgagcctgaaacctgttcattactacaagtttattaagtgttgtagaggtattaaagacatattagcatctcagttaatcttttttctcttgttattgtgattagagcagtatccatgtattacactttaatgggtatatatctcacactttggggaatattagcatttagcatgaacttttttattcctcatctggtacttcaatttgtgataacagatttattaattcctgccatgcacaaggcattagctatcaggtttgtaaagaggagaagctttatacaaatatggttatttgaatacatgtctttctcctctgtgtatgtctggcaagcttatgtgagaacagggacc

SEQ ID NO: 82959 - DNA, 942 bp, Homo sapiens
  sig_peptide (569)...(434): this location contains the signal peptide sequence, MLPRLVLSSWPQSIFLPRFWNYRCEPPCLACFDIFYSVLITNSLH, Run with SignalP
  misc_feature (175)...(121): similar to gi2315424 in the genepept database release 114, Run with FASTXY 3.3t00, default parameters
ttttttttttttgttctaagccatagaagaatatttattgacatggaaaatgttaacaatatacttctatatgaaatatgtaggctacaaaacagtatatacagtttaataccatttttatggaaagaaaaataaccatatatacaaaatcatgcataagaaaaaaataatataaggatgtacataccaaatattaataataatggctatctctggatagtggaatcagagggattatgtaattttcctgataaattttcctgtcctccaaacagcatccgcttcatactattatttcttggttgtaattagtttgatataattctcttcagaaaggctctgtttcactatatatacctcaaagcatacttttgatgcagcttctgcaattcccatctaaaaagtagataacacttgctcttatattctggcatatgaagactatttgtaattaacacactataaaatatgtcaaagcaggccaggcatggtggctcacacctgtaattccaaaaccttggcaggaagatcgattgaggccaggagctcaagacgagcctgggcaacatagaaagaccctatctttacaaaaaaaactttaaaaattagccaggtgtaatagcacatgcctgtctgtaatcccagctacttggcaggctggaaggtcaaggctgcagtgagccatgatcatgccactgcactccagcctaggtgacagagcaagaactcatctctaaaaaaaaatttttaaataaagcaaaatatgccacagcatagatctgattgtagaaaattattatatggagaactgaaaaatctcctaatcaagacaaaaattttaaatagaggaaaaaaatactatctatcattagttcaagtttccattaagagtagagtgtgaagtagctccaagttcagagctggagaattttgcatctctcc

SEQ ID NO: 82960 - DNA, 418 bp, Homo sapiens
  sig_peptide (219)...(354): this location contains the signal peptide sequence, MKPWILLLVMFISGVVMLLPVLGSFWNKDPFLDMIRETEQCWVQP, Run with SignalP
  misc_feature (249)...(394): similar to gi161149 in the genepept database release 114, Run with FASTXY 3.3t00, default parameters
acaagtggggcatctgtaggggccacagtgagctctcaatgatcatctgtagtggcagcaaaagagttcgagccccacttcaaacaacttcataataaaaggccagacaaaagagctgtcagccagttactacagacactcaatgcagacaccttcagagtattgggaaaagacttgccttctgccagaacttaacccaaatacacacagagagcaccatgaagccctggattcttctactcgtcatgttcatctctggagttgtgatgcttctgcctgtgctgggaagcttctggaacaaagatccctttctagatatgataagagaaactgagcagtgctgggtacagcctccatataagtactgtgagaaaaggggtactaaaataatgacttgtgtacgtccaaatcatacatg

SEQ ID NO: 82961 - DNA, 474 bp, Homo sapiens
  sig_peptide (83)...(218): this location contains the signal peptide sequence, MLPAPTMPWPLLLVRSVSGAHTTRACFPGCQCEVETFGLFDSFSL, Run with SignalP
  misc_feature (221)...(464): similar to gi439296 in the genepept database release 114, Run with FASTXY 3.3t00, default parameters
ggggccgggggggttaaaactgaacgcagtgctgaccctgacgactctccgggacgacccacgcgtccggcggctgtggcgcatgcttccagcccccaccatgccgtggcccttgctgcttgtgaggtccgtgagtggggcccatacaacccgggcatgcttccccgggtgccaatgcgaggtggagaccttcggccttttcgacagcttcagcctgactcgggtggattgtagcggcctgggcccccacatcatgccggtgcccattcctctggacacagcccacttggacctgtcctccaaccggctggagatggtgaatgagtccgtgttggcggggccgggctacacgacgttggctggcctggatctcagccacaacctgctcaccagcatctcacccactgccttctcccgccttcgctacctggagtcgcttgacctcagccacaattggctgacagccctgccagg

SEQ ID NO: 82962 - DNA, 1050 bp, Homo sapiens
  misc_feature (1)...(1050): n = a,t,c or g
  sig_peptide (293)...(428): this location contains the signal peptide sequence, MENVNLKASYLQFSKLMAGKGWALFIALTFSQRLLPCLAIIEIIN, Run with SignalP
  misc_feature (295)...(55): similar to gi4090259 in the genepept database release 114, Run with FASTXY 3.3t00, default parameters
tgcaagaattggcaggcaaatggggatgtgtgtgaacggtgtgactatgaacatgggtgatcgattacggacatgcaagatggaaaattggttgtggcatccagataagggaaaacaagtaggacaccagattgtatacactgtgatcaaaaccatgtgaaaaacacatgcatgaagaggactgggaagaaatacacaagaagtggttgcattagggtgagaaggagtattcatgtttttctcatccgtctttttcaaaccttttgtaatgggtggttttattaattttataatggaaaatgttaatttaaaagcaagttatttacagtttagtaagctcatggcagggaaaggctgggctctgtttattgctcttactttttcccaacgcctactcccatgcctggcaattatagagataataaatgtgggtgtggaatgagtgcccactgggaaacctctcagaggactttgacccaggaacatatttgcacagggtttccctcagctggagaaggtttctctgggagagcaccagccaggtgtgtgtcatgggatatatttacagggtggtgagctctcctggtccaacctaaaaggtcccagcaaggtgtaggggcccttctggccatttgacatcaccagggcagttagtgctgatacaaaccacagagaatgaacaaactccaactcaaacgggaatggattttatgtcattctgggactttcaaacttgataatagaccaagcatggtggctcacacatgtaatcctagcactttgggaagccaaggtgggaggatcgcttgcggccaggagattgagaccagcctgggaaaggtagcaagacccagtctctacaaaaaaattttttgttctgttttgtttttgagacagagtctcaactctgtcgtctaggctggagtgcagtggtttgatcttgggtnattagtttctttttttgtgggtgttgtgtttaagtttttgttttgggttaaattaatctggtcttgggaatccttctttttatcgttggtggagatttaaccg

SEQ ID NO: 82963 - DNA, 613 bp, Homo sapiens
  sig_peptide (18)...(153): this location contains the signal peptide sequence, MKGPSKCTCFSSFFCLLFLEASEFPRPCQCLSPPCTFMEAHTSFM, Run with SignalP
  misc_feature (98)...(7): similar to gi2281967 in the genepept database release 114, Run with FASTXY 3.3t00, default parameters
attctacaattctacaaatgaagggtcctagtaaatgtacttgtttctcctcattcttctgtctgctctttctggaagcctctgaattccccaggccatgtcagtgtctttcccctccctgcaccttcatggaagcacacacttctttcatggcatcttacttcaggcccagaaacatgcactgaggattccagcctttgtaaaatggcatctcttttgatttacccacactgacctaccttatttcccagatgtcaatgatttgagtagtaccatcactgtttttattgtggggaggtggggagggcatacctacctgcctaacacctatattatttttcctttaaattggcacaatttcttcttctttagctttatcgcacagagtattgcccatggttttaatgtgctagctatgcattttttcacacgttaaaatagatgcataactaaatacctgaaataaaatgttaaaagtaagtaatcatctgcgtgttgcctaaaatcagctctcgtttctccagtggtctgcacacatcacagtgggaaccactgctgcactggccttggcgggttccttgcccatctccccaccagacagagagtccctggg

SEQ ID NO: 82964 - DNA, 772 bp, Homo sapiens
  sig_peptide (17)...(152): this location contains the signal peptide sequence, MAPKKLSCLRSLLLPLSLTLLLPQADTRSFVVDRGHDRFLLDGAP, Run with SignalP
  misc_feature (23)...(738): similar to gi2547317 in the genepept database release 114, Run with FASTXY 3.3t00, default parameters
cacgagtgtaaacgccatggctcccaagaagctgtcctgccttcgttccctgctgctgccgctcagcctgacgctactgctgccccaggcagacactcggtcgttcgtagtggataggggtcatgaccggtttctcctagacggggccccgttccgctatgtgtctggcagcctgcactactttcgggtaccgcgggtgctttgggccgaccggcttttgaagatgcgatggagcggcctcaacgccatacagttttatgtgccctggaactaccacgagccacagcctggggtctataactttaatggcagccgggacctcattgcctttctgaatgaggcagctctagcgaacctgttggtcatactgagaccaggaccttacatctgtgcagagtgggagatggggggtctcccatcctggttgcttcgaaaacctgaaattcatctaagaacctcagatccagacttccttgccgcagtggactcctggttcaaggtcttgctgcccaagatatatccatggctttatcacaatgggggcaacatcattagcattcaggtggagaatgaatatggtagctacagagcctgtgacttcagctacatgaggcacttggctgggctcttccgtgcactgctaggagaaaagatcttgctcttcaccacagatgggcctgaaggactcaagtgtggctccctccggggactctataccactgtagattttggcccaggtctcaagcaagggctgggagtggagtctggggaa

SEQ ID NO: 82965 - DNA, 390 bp, Homo sapiens
  misc_feature (1)...(390): n = a,t,c or g
  sig_peptide (20)...(155): this location contains the signal peptide sequence, MAWIPLFLGVLAYCTESVASYELFQPPSVSVSPGQTATFTCSGDD, Run with SignalP
  misc_feature (20)...(392): similar to gi4103647 in the genepept database release 114, Run with FASTXY 3.3t00, default parameters
tcgcggaggtgcctcaaccatggcatggatccctctctttctcggcgtccttgcttactgcacagaatccgtggcctcatatgaactgtttcagccaccttcagtgtccgtgtccccaggacagacagccactttcacctgctctggagatgacttggggaacaagtatatttgttggtatctgcagaagccaggccagccccccgtggtactcatgtatcaagataacaagcggccctcagggatccctgagcgattctctggctccaattctgggagcacagccaccctgaccatcagcgggacccaggctacggatgaggctctatatttctgtcaggcgtgggacacgaatggagctgtgttcggaggaggcacccagttgaccgn

SEQ ID NO: 82966 - DNA, 441 bp, Homo sapiens
  sig_peptide (172)...(307): this location contains the signal peptide sequence, MRWRTILLQYCFLLITCLLTALEAVPIDIDKTKVQNIHPVESAKI, Run with SignalP
  misc_feature (172)...(340): similar to gi436418 in the genepept database release 114, Run with FASTXY 3.3t00, default parameters
gattcaggtggtttaggtgatcaaattgttttagaagagcttggtggtccatgcctatatcttgaagggaatccaacttagctttaattaacattcttaaccttcttacctctctggatctcagttgtctcatctgtaaaaaggagataaaaattatttacctgcctgaacatgaggtggaggaccatcctgctacagtattgctttctcttgattacatgtttacttactgctcttgaagctgtgcctattgacatagacaagacaaaagtacaaaatattcaccctgtggaaagtgcgaagatagaaccaccagatactggactttattatgatgaaatcgttttagaagagcttggtggtccatgcctatatcttgaagggaatccaacttagctttaattaacattcttaaccttccgcacgcgtgggtcgacccgg

SEQ ID NO: 82967 - DNA, 540 bp, Homo sapiens
  sig_peptide (240)...(375): this location contains the signal peptide sequence, MSCVLLLLLFACIDVVVYTLEVLLLSSGHLTGLSSCRVSPAAAGS, Run with SignalP
  misc_feature (505)...(538): similar to gi545721 in the genepept database release 114, Run with FASTXY 3.3t00, default parameters
aattccacacatgtaaatcagagctaattggctgaaaatgaattagaatttttgaattaaattttaattatacaagtaatacatgaatacattttcctttaaataaaattagagcattttaggtaaagaagtctctactggcctccccagcctgacctcaggccccttccccactttagaggcagctgctgttaggcatttgctgttgatccaaaatgttctcctatgcgcattgaaacatgtcctgtgttctattgttgcttttgtttgcttgcatagatgtggtggtgtacacactggaggtgctgctcctgagctcagggcaccttacgggactctcctcatgtcgcgtgtcacctgccgcagctggctccactgcccctttcagctggccgctggcaaccagaactgattgtgctatgatttatttagttgttgcttattgatcgactattaaaaggcttccagtcttgtttcaataagacaaacctgtaacagcatccttgtacatgccacttttgctcatgtacaaagtgtttt

SEQ ID NO: 82968 - DNA, 728 bp, Homo sapiens
  sig_peptide (154)...(289): this location contains the signal peptide sequence, MHLHCLVWRFVLQECFSGLAVAKGRKCLSLSVNINFSIYTLIMAS, Run with SignalP
  misc_feature (372)...(88): similar to gi5832845 in the genepept database release 114, Run with FASTXY 3.3t00, default parameters
cccccttagagatccctagtccagtgtgagggcattcccaaaacagattctcagaaaataaactaagaaaatattcctcaagtctctataaatacatattttatcacatgtgattgtactatatcaatctcattttgaatctcattttgagagatgcacttacactgtttggtatggcgttttgtattacaggaatgcttttcaggactagcagttgctaagggaaggaaatgcttaagcttgtctgtaaacattaacttcagcatatacacattaataatggcttccccacctgtaaccaacctacttacctggcaggttttatttcctaggctaaggatttttgagaactctatcataaaacagctgaattatgacctcctttggtttttacaatatgcaaatacagctaaatactcgttaatattctgcatttaaattcttcttcttaataaagacatgcactttattcctgctcccacgtatggttcctaaggtcctaaagctcacacttccttacaatttttaattctgttctatcataaaccttttgagagctgagcagtaagcttttcattttcttcagaatcagctccagtctgaggattttgaggccatgtcatgagagtaagaatgcaccctgcatgttttctatcgaaggtagaatattaacttgtttaatagtttcaggtttggccacatgaaaaataaaatccggcggaggcccg

SEQ ID NO: 82969 - DNA, 351 bp, Homo sapiens
  sig_peptide (42)...(177): this location contains the signal peptide sequence, MYQVVHLNLCMSLYLCYTSTILTLKNGLLHNDSIVICHGIREYKP, Run with SignalP
  misc_feature (84)...(216): similar to gi4803766 in the genepept database release 114, Run with FASTXY 3.3t00, default parameters
gaaccaagtactgattacacaagtgtgttcattttgagaaaatgtatcaagttgtacatttaaatttgtgcatgtccctgtatttatgttacacctccacaatacttacattaaaaaatggacttctacacaatgacagcatagtcatttgtcatggcattagagaatataaaccagccatcatccaaatccttacggtcttatttctcctgataggtcagcactaatgtacgctaaattcttctttggtattctccctgaaaatatgacctgctctcagaaaagcaagaagtccaactgaaacggaagtttctatgggtaggtaatggtttgacccctgatcccactacc

SEQ ID NO: 82970 - DNA, 449 bp, Homo sapiens
  sig_peptide (84)...(219): this location contains the signal peptide sequence, MRLPDVQLWLVLLWALVRAQGTGSVCPSCGGSKLAPQAERALVLE, Run with SignalP
  misc_feature (84)...(452): similar to gi2072522 in the genepept database release 114, Run with FASTXY 3.3t00, default parameters
gtggggaattccccagcaatcagactcaacagacggagcaactgccatccgaggctcctgaaccagggccattcaccaggagcatgcggctccctgatgtccagctctggctggtgctgctgtgggcactggtgcgagcacaggggacagggtctgtgtgtccctcctgtgggggctccaaactggcaccccaagcagaacgagctctggtgctggagctagccaagcagcaaatcctggatgggttgcacctgaccagtcgtcccagaataactcatcctccaccccaggcagcgctgaccagagccctccggagactacagccagggagtgtggctccagggaatggggaggaggtcatcagctttgctactgtcacagactccacttcagcctacagctccctgctcacttttcacctgtccactcctcggtcccaccacctgtac

SEQ ID NO: 82971 - DNA, 486 bp, Homo sapiens
  misc_feature (1)...(486): n = a,t,c or g
  sig_peptide (244)...(379): this location contains the signal peptide sequence, MLVGWLVGLWVVSCLTARLHVRVGTESHMFPIVSWDVEQAQCLEG, Run with SignalP
  misc_feature (325)...(472): similar to gi336447 in the genepept database release 114, Run with FASTXY 3.3t00, default parameters
cgatgcgagnnccaaatgagaccatgatgagancctaggccangncgnggaattcgtcctgtttgcttgagtctgggcatgatgacttccagttgagcccttggcatgctctttgcctagaacagtcttctcccagagagagtcaggacttgctgtctctctctattcaagcctcacttcattggagggcctttcctgccctccacccaccctgtccccatcccctgtcgttctggaatctggatgttggttggttggctggtgggtttgtgggttgtgtcatgtctaactgccaggctccatgtgagagtagggacagagtcccacatgttccccatagtatcctgggatgtagagcaggcccagtgcctagaaggcactgaggaaatcctatgcaattctggaactgctgttagttcctggcctggcagggttgcaggaggctggggtcgctggtctccaggcctgctcagccctgacgtttgg

SEQ ID NO: 82972 - DNA, 681 bp, Homo sapiens
  sig_peptide (177)...(312): this location contains the signal peptide sequence, MGLDALVPLAVTVAIFLLLVDLMQQHQRWTARYPPGPLPLPGLGN, Run with SignalP
  misc_feature (177)...(363): similar to gi2388520 in the genepept database release 114, Run with FASTXY 3.3t00, default parameters
gcggtggaattccagcaggttggctcacagcagaaggcaaaggccatcatcagctccctttataagggaacggtcatgcactgggtgtgctgagagtgtcctgcctggtcctctgtgcctggtggggtggaggtgccaggtgtgtccagaggagcccaatgggcagtgaggcagccatggggctggatgcactggtgcccctggcagtgacagtggccatcttcctgctcctggtggacctgatgcagcagcaccaacgctggactgcacgctacccgccaggccccctgccactgcccgggctgggcaacttgctgcatgtggacttccagaacatatacaccttcaaccaggtgagggaggaggtcctggagggcggcagaggtgctgaggctcccctaccagaagcaaacatggatggtgggtgaaaccacaggctggaccagaagccaggctgagaaggggaagcaggtttgggggacgtcctggagaagggcatttatacatggcatgaaggactggattttccaaaggccaaggaagagtagggcaagggcctggaggtggagctggacttggcagtgggcatgcaagcccattgggcaacatatgttatggagtacaaagtcccttctgctgacaccagaaggaaaggccttgggaatggaagatgagacgaaa

SEQ ID NO: 82973 - DNA, 424 bp, Homo sapiens
  sig_peptide (164)...(299): this location contains the signal peptide sequence, MAWKLLGCGSLSSAALPPGSWRVLLQPPVWHHTPCPPLRPAGSSR, Run with SignalP
  misc_feature (318)...(394): similar to gi511971 in the genepept database release 114, Run with FASTXY 3.3t00, default parameters
ctcaggggcagactggtatcatctggtggtaaaataggactctgcgccaagtactcacattttctcaaatcctcacgataaccttgaactgttcaacttttatcaccccttccagatgagaacactgaggctcggagagccaaagtgacttgcccaaagccacatggcctggaagctgctaggttgtgggtcactgtcgtcggctgcccttcccccagggtcctggcgagtactgctacagccacctgtatggcaccacacaccatgcccacccctcaggccagcgggctcatcccggggacgtctgcagaagcaccctggggatactgcccactttgtgcatcacgctttgctggaacatgggtctcccagcaggcttatcccagggacgtctgtggaagccggtcagtgcgaattccaccgc

SEQ ID NO: 82974 - DNA, 515 bp, Homo sapiens
  sig_peptide (347)...(482): this location contains the signal peptide sequence, MLENPIRPRNLFSCVMCMYVFLLIVPKVVEVDKLTRSLLQSVFPF, Run with SignalP
  misc_feature (435)...(518): similar to gi511117 in the genepept database release 114, Run with FASTXY 3.3t00, default parameters
gcgggaattactgcactctgcctgagatgcccttaccctaaggaacaaacatagaatcaagttgtcctagaaaggccagggtgggtttgtcctggaggcacactcactgcgagcgtgctctttttccagtatttgaaggactctctttatatgatctgtcttaagagttctattagatgtagcttttagaagatcaattaactatgaatatatactataggcactgaatttagcaagtatagtactattctgttatgctgagcttcttctctctttgtaaatttgatatagtaaattcaaaatccatttcactaataagagttatttatttgcgtcttttctaatcatgcttgagaatcctattcgtcccagaaatttattttcctgtgttatgtgcatgtatgtttttttattgatagtgcctaaagttgtagaagttgataagcttacaagatctctgttgcaatctgtttttccttttaagttggctaaattatgtttattgcaaactcctg

SEQ ID NO: 82975 - DNA, 739 bp, Homo sapiens
  sig_peptide (132)...(267): this location contains the signal peptide sequence, MKSIQILFVVNIFICMGTAEKELKKSKEVVTLRSLPTILTKYDKL, Run with SignalP
  misc_feature (299)...(7): similar to gi3861351 in the genepept database release 114, Run with FASTXY 3.3t00, default parameters
cacagtggtgtaagtcctcagtaagtgaagcagatgccacatgatcttgtaagaaaggaaaacttttcctccatcctcttaggttctgcagcttaatttgtgaattaaactgacaaaagaaggaccaacgaatgaagagcatacaaattttatttgttgttaatatttttatatgcatgggaactgcagagaaagaactaaaaaaatccaaagaagtggttacacttaggagcttacctaccattttaacaaagtacgataaattgtggggaagcaaccaaagaaaaggggcttgggcttctaggggcattaaattgtaggaaggtaaatacatgggagaaactattatagaaaagggttatttagttaggtttctttatgtagagtaatcttgatgctgtctcctcttcttggtatgagaacaaggggacacctttataatggaaatttattccttgcttttaagcagatagaggaagggtaaacagctcttctcgcatcttctttttctcaattgccttcagcttaaaataaaaattaaaaatttaaaaaataaaatttatgcaaaagtaacatatattagggttgtatattctgatactcttcaacattttctggtctagcctccagagtcattcaacatcaacatcactttctctacattctgttgggtataaataagtcaaaggacaaataagacaaaaaagtatttgtattgttaatactgagaggtgacact

SEQ ID NO: 82976 - DNA, 374 bp, Homo sapiens
  sig_peptide (118)...(253): this location contains the signal peptide sequence, MLQLFTPIAWLAGACYSSFIPVARSLASRPGASQPFHSCRLQLSE, Run with SignalP
  misc_feature (171)...(296): similar to gi431961 in the genepept database release 114, Run with FASTXY 3.3t00, default parameters
tctagacaaggggaatgtggtgtcacccaaaaactcagagataaaaccagcattcatggagccccaagcagtgttacaactcttgctcggggagtcctgaggtctgggaccccagaaatgttgcagctcttcactcccatagcttggctagcgggagcatgttacagctcttttattcccgttgcacgcagcttggcgagccggccaggggcatcacagccctttcattcctgtcgcctgcagctcagcgagttccaggtccttgtcccgcgaccaagaggaatgaggtgcgtggacaccagagagtgagtaaggcagagaagaattttattgagtgacataaggaaagctctcagctgtgagaggggacccaa

SEQ ID NO: 82977 - DNA, 352 bp, Homo sapiens
  sig_peptide (287)...(152): this location contains the signal peptide sequence, MKGWPLTALPPALRAPVVLKDGSPLNSLHVRPSPRKNKFSLLQFM, Run with SignalP
  misc_feature (194)...(348): similar to gi212705 in the genepept database release 114, Run with FASTXY 3.3t00, default parameters
agggtggaatcggggtgtcccagaagggccccagcaagtgagtcctggctaaacttaaggcttggtccagtgaggctagagcagctctgggcagtggcgtgctgcagcacaagcctccctgagtgggagagcggtctcagaaggagacatcatgaactggagcagagagaacttgtttttccttggggagggcctcacatgcagggaattcaaaggagaaccgtctttgagaaccactggggctctcagggcaggaggcagggcagtgagaggccagcctttcatcctttcatcctccagacagttcagcctctgttcccacagccctgggccgaggaagacgagatgtggc

SEQ ID NO: 82978 - DNA, 367 bp, Homo sapiens
  sig_peptide (14)...(149): this location contains the signal peptide sequence, MTFTLKGLFLFILTDRTKAMMIMAKGKSVGGENGLGKVSSLKKHV, Run with SignalP
  misc_feature (186)...(331): similar to gi1899116 in the genepept database release 114, Run with FASTXY 3.3t00, default parameters
caggacatgggttatgacttttacattaaaaggactttttctttttattcttacagacaggacaaaagcaatgatgatcatggctaaaggcaagtcagtgggtggggaaaacggccttgggaaagtttccagtctaaaaaagcacgttaacagtacttgatggtgatattttgaatacccaaagaaaagtctgtctactcttctgcccagtctgtaagggcaatgctaacattgaaaccagccaaggaacaagagcaaacaggacaatggcccgtcttcatgtgaaaggaagccaaaacaaaatggcagaaccaaagctaagtctgactaaattctactcattctccaagaggaggtttcatttcag

SEQ ID NO: 82979 - DNA, 524 bp, Homo sapiens
  sig_peptide (91)...(226): this location contains the signal peptide sequence, MRVRIGLTLLLCAVLLSLASASSDEEGSQDESLDSKTTLTSDESV, Run with SignalP
  misc_feature (91)...(432): similar to gi4159995 in the genepept database release 114, Run with FASTXY 3.3t00, default parameters
tttcgtggcgaggcggcggtggtggctgagtccgtggtggcagaggcgaaggcgacagctctaggggttggcaccggccccgagaggaggatgcgggtccggatagggctgacgctgctgctgtgtgcggtgctgctgagcttggcctcggcgtcctcggatgaagaaggcagccaggatgaatccttagattccaagactactttgacatcagatgagtcagtaaaggaccatactactgcaggcagagtagttgctggtcaaatatttcttgattcagaagaatctgaattagaatcctctattcaagaagaggaagacagcctcaagagccaagagggggaaagtgtcacagaagatatcagctttctagagtctccaaatccagaaaacaaggactatgaagagccaaagaaagtacggaaaccaggtagtctggacattttccttgctttttgatttatttaggggacaactgaaaattttaagctaatgaataaagaggctgaagaagaaaaaaaaaa

SEQ ID NO: 82980 - DNA, 435 bp, Homo sapiens
  misc_feature (1)...(435): n = a,t,c or g
  sig_peptide (156)...(291): this location contains the signal peptide sequence, MLSVFFLCLFLIYPEFVFIYLSIHEFIITLDALKYNNILGPISPN, Run with SignalP
  misc_feature (150)...(312): similar to gi3873867 in the genepept database release 114, Run with FASTXY 3.3t00, default parameters
ntttgactgcagaacataggccagngcggnggaattccttttctaccgtctggcttatttgagtcaaccaacatttactgtatccccatgaattgccagacatcataggaggaactacggatgcgagaaattaaggagttcataatctagtaaaaatgttgtctgtgttttttttgtgtttgtttttaatttatccggagtttgtgtttatttacctatccatacatgaatttataatcactttggatgccttaaaatacaataatattctggggcctatatcacctaatgtaatcctccacatgctgtagacatgattaaaatcctcatcctctaacattcaaatagatctggtgaaaataaagtgtacattttatgagttaaaaatcataaaatcttagtcctgctagtcttgattacagttcttttaaagtg

SEQ ID NO: 82981 - DNA, 555 bp, Homo sapiens
  sig_peptide (314)...(449): this location contains the signal peptide sequence, MWTNFFKLRLFCCLLAVLMVVVLVINVTQVEYLDHETVSATFIDS, Run with SignalP
  misc_feature (326)...(485): similar to gi1573530 in the genepept database release 114, Run with FASTXY 3.3t00, default parameters
tattgatgactcttagtccgtgcggtggaattcgtgatgatcatggttcactgcagcctcgacctcccaggctcaagcaattctcctacctcagcctcctgagtaactgggactataggatttctttgaagaaaaatgtgcttcttgaatcaactgcagtctctcctctgcataagagctcttaagggtactagcaggatagaagcaaatgaaactgaaagctcatctgcagctcagaaaagcaaagacatggaattttaaagagtgaaggtagcatggtgtcggccatgggtgaacaagacacagccagacaatgtggaccaatttcttcaaactacggcttttctgctgtctgcttgcagtgttgatggtggtggtgctggtcatcaatgttactcaggtagagtacttggaccatgagactgtttcagccactttcatcgacagcagtggacagtttgtttcctcccaggtgacaggaattagccgaaatccctactgtggctatgatcagcagaccctgtccagccaggagcgcatggaggaggacttctt

SEQ ID NO: 82982 - DNA, 474 bp, Homo sapiens
  misc_feature (1)...(474): n = a,t,c or g
  sig_peptide (40)...(175): this location contains the signal peptide sequence, MALAALMIALGSLGLHTWQAQAVPTILPLGLAPDTFDDTYVGCAE, Run with SignalP
  misc_feature (40)...(475): similar to gi2677618 in the genepept database release 114, Run with FASTXY 3.3t00, default parameters
nttganncactgagacattagtccangcggnggaattcgatggcgctggcggctttgatgatcgccctcggcagcctcggcctccacacctggcaggcccaggctgttcccaccatcctgcccctgggcctggctccagacacctttgacgatacctatgtgggttgtgcagaggagatggaggagaaggcagcccccctgctaaaggaggaaatggcccaccatgccctgctgcgggaatcctgggaggcagcccaggagacctgggaggacaagcgtcgagggcttaccttgccccctggcttcaaagcccagaatggaatagccattatggtctacaccaactcatcgaacaccttgtactgggagttgaatcangccgtgcggacgggcggaggctcccgggagctctacatgaggcactttcccttcaaggccctgcatttctacctgatccgggccctgcagctgctg

SEQ ID NO: 82983 - DNA, 615 bp, Homo sapiens
  sig_peptide (286)...(151): this location contains the signal peptide sequence, MCFWVIFAFFSKLVFFCCLFSTMSIYHFNNEKYMFFRVNQVILFL, Run with SignalP
  misc_feature (403)...(274): similar to gi4886286 in the genepept database release 114, Run with FASTXY 3.3t00, default parameters
tccagatgcctcccatcaggctccacctcttaaaagttccacctgcaacattgctgccctgggaatcaaggttccaacgtgagttttggtggggacactcaaaccatgcaactaccaaaataattgtgactacctgcaaatttttatagataggaaaagaattacttggttaactctaaaaaacatgtatttctcattattaaagtgatatatgctcatagtagaaaataaacaacagaaaaatacaagttttgaaaagaaagcgaaaataacccaaaagcacatcccgcatggggtggaggccccagtggcccagatgctaatggtagaaaataaataacagaaatatatacgctcgtggtagaaaataagcaacaggaaaatacttacaagttttgaaaaagaaagcaaaaatgatccataagcacatcccacaatgcagtcatttctactagtttgttgtagctcctacaaatctttctttctttgggaatatggttttctttcgtcgaagacaccctggctgcgcactttacttcctgacccttttttacatacgatttatcccccccctttttttcccccgcccgagcaagccccctcctcgtatttatc

SEQ ID NO: 82984 - DNA, 418 bp, Homo sapiens
  sig_peptide (112)...(247): this location contains the signal peptide sequence, MPARNWGHINFMVFLLLVNQCKILLNLTPSGSCFVIHRGGRAFYA, Run with SignalP
  misc_feature (225)...(95): similar to gi3883078 in the genepept database release 114, Run with FASTXY 3.3t00, default parameters
cggacgcgtgggggctgttgctgtggaaaaaagcctcaccttcagaaatattggtatactgccctcattgttcattcaagatctgcatgaaggaagacatgagaataacaaatgccagccagaaactggggccacatcaatttcatggtttttcttttgcttgtaaatcaatgcaaaattctccttaacctcactccttctggtagctgttttgtgattcataggggagggagggccttttatgcatatgtgtgcacactcacacacaccatctcaaagcctttcttgttacatgacaaagggctggtgcttcagagcaagtgatatcagggttgaaatctcagcttggccactgtacaacgtatggaaaaaaaaacctctgtagacttcaattttctgtatgaacctggggatgaag

SEQ ID NO: 82985 - DNA, 622 bp, Homo sapiens
  sig_peptide (119)...(254): this location contains the signal peptide sequence, MGICLIAYEFAYLFLLSDHFYFLFFLFPPHLSEFYLFPFTMKNLL, Run with SignalP
  misc_feature (540)...(577): similar to gi311510 in the genepept database release 114, Run with FASTXY 3.3t00, default parameters
ctgggaagtagaattgctgagctggggggcaggggctaagtcaccctccaaaaagcctgtgcccacccccagcataggcacttgttgtactaacactttgctaaaacctctctcttcaatgggaatttgtctcattgcttatgagtttgcttatcttttcttactgagtgatcatttttatttccttttttttctttttccccctcacctctctgaattttatttatttccttttaccatgaagaatctgcttatatcctttccccatttttccactatggcttttatcttttccttattcatttgtagatctttatacagatgctcttcaacctgctgtggagtttcatcccaataaaccctttacaagttaaaaatactgtaaaatgaaaatgtatttaatatgcctaacctactgaacatcatagcttagcccagcctgccttaaacatgcccacaacactgacattagcctacagttggtcaaagtcacccaacacagtctgggcacagccccactaccctttttataattgccccccccccccccccccctttttgttcccaacccttggggcgccgtccaactttgtttgctccgccggcggccccccccccccct

SEQ ID NO: 82986 - DNA, 399 bp, Homo sapiens
  sig_peptide (235)...(370): this location contains the signal peptide sequence, MCGRLVHLDRFALYLVLYSIIPPPPPKSKPPCCTPSWIGAVHSPF, Run with SignalP
  misc_feature (287)...(347): similar to gi553069 in the genepept database release 114, Run with FASTXY 3.3t00, default parameters
cggacgcgtgggtttccatactcatcatttattcgaaccatatgaaagcaggctatgaactaagaagtaattacaaggggcaggctttatggctaagtttgtaattacttcttagctcatagcctgctttccatacacatcatttattctaaccattttaaagagaccagagaactgtctcattcccatatccggataagagtctcatacggattaagcgacttgctgaggtcaatgtgtggacggttagtacatcttgacagatttgcactctacctggtgctttattccatcatccccccacccccacccaaatctaaaccgccctgttgcaccccctcctggattggcgctgtgcactcccctttctccgtccatgttgaggtgtcagcgcgcctt

SEQ ID NO: 82987 - DNA, 415 bp, Homo sapiens
  misc_feature (1)...(415): n = a,t,c or g
  sig_peptide (268)...(403): this location contains the signal peptide sequence, MNLIKLSPIFILRCLCSFDPLFSNCLYICICPSPGNTFLQILSFL, Run with SignalP
  misc_feature (295)...(359): similar to gi1620170 in the genepept database release 114, Run with FASTXY 3.3t00, default parameters
atagatttaagaagcatgtaaaattgacattttttacttttttggtataatttccaatgaacacagagtgcatgcaggggtagtaggtctcagtgaagggtaaaaattagttatgataataatattacccttttatgtgtaagtctatgagttccatggagtgaatgactgggtttatcttgtactttctgtatcaagagctaactacaggtttaacaggtgtcaggcatcagttagtaattgctgaaagaataaataagtgaatgaatgaatctaataaaattgtcacctatctttattctcaggtgtctttgctcttttgatcctctattttccaactgtttgtatatttgcatttgcccaagccctggaaatacttttcttcagattctatccttcctatcactggatcttn

SEQ ID NO: 82988 - DNA, 208 bp, Homo sapiens
  misc_feature (1)...(208): n = a,t,c or g
  sig_peptide (58)...(193): this location contains the signal peptide sequence, MDWTWRVFCLLAVAPGVHCQVQLVQSGDEVKEPGASVNLYLHDNX, Run with SignalP
  misc_feature (58)...(179): similar to gi4128137 in the genepept database release 114, Run with FASTXY 3.3t00, default parameters
cggacgcgtgggcacatcccttctctacagaagcctctgagaggaaagttcttcaccatggactggacctggagggtcttctgcttgctggctgtagctccaggtgttcactgccaggtgcagttggtgcagtctggggatgaggtgaaggagcctggggcctcggtgaacctctacctgcacgacaacncntannnnaaaaaaaaaa

SEQ ID NO: 82989 - DNA, 1222 bp, Homo sapiens
  sig_peptide (335)...(470): this location contains the signal peptide sequence, MKRERGALSRASRALRLAPFVYLLLIQTDPLEGVNITSPVRLIHG, Run with SignalP
  misc_feature (392)...(1008): similar to gi4100319 in the genepept database release 114, Run with FASTXY 3.3t00, default parameters
cagatcctcatctccctgggtagtgaggctcatcacagacaagcaaccaactgctgggctgccggtgccccccatgttggaacctgagttggagattatctcctaagcagatacctgcttccaaactggggatgtagggcttggaaactaaaaaatgccaggtctgagggagaggaaagaacaagtccagcaatacacagagctctgtgtattcagagggaagttggcagggttgtgttcgggcagagaaactccgagtggtacaaaggggacgtgcccagagtggagaaatcatgctaattgtctgcactagagctggagaacgccacccaaaatgaagagagaaaggggagccctgtccagagcctccagggccctgcgccttgctccttttgtctaccttcttctgatccagacagaccccctggagggggtgaacatcaccagccccgtgcgcctgatccatggcaccgtggggaagtcggctctgctttctgtgcagtacagcagtaccagcagcgacaggcctgtagtgaagtggcagctgaagcgggacaagccagtgaccgtggtgcagtccattggcacagaggtcatcggcaccctgcggcctgactatcgggaccgtatccgactctttgaaaatggctccctgcttctcagcgacctgcagctggccgatgagggcacctatgaggtcgagatctccatcaccgacgacaccttcactggggagaagaccatcaaccttactgtagatgtgcccatttcgaggccacaggtgttgggggcttcaaccactgtgctggagctcagcgaggccttcaccttgaactgctcacatgagaatggcaccaagcccagctacacctggctgaaggatggcaagcccctcctcaatgactcgagaatgctcctgtcccccgaccaaaaggtgctcaccatcacccgcgtgctcatggaggatgacgacctgtacagctgcgtggtggaaaaccccatcaaccagggccggaccctgccttgtaagatcaccgaatacagaaaaagctccctttcatcaatttggctccaggaggcattttcctccttgggaccttggtgaagacctggccaacaagggaaaaccccgtctttattaaaaatacaaaaaatgcccccgctttgggtgtaagggcctgttttcccgcgcccttcgggaggttttgaacagtaaatctcc

SEQ ID NO: 82990 - DNA, 667 bp, Homo sapiens
  misc_feature (1)...(667): n = a,t,c or g
  sig_peptide (516)...(651): this location contains the signal peptide sequence, MAWGPCFVAQNLWVLLRXYDIKPGHFAPAHLAFTAEPGGGGLVRD, Run with SignalP
  misc_feature (201)...(44): similar to gi1742582 in the genepept database release 114, Run with FASTXY 3.3t00, default parameters
tttcgtacaacatggggacatctgtttgaccacatagctcacaggagaccgcctgctggcagttggctgttcatgggcagcccttcctgcgttgagccctgaccacccttggcagcctggcaccccgcactggccacccagcgccatccaggagggggtctgggccctcaccaaatcatcgaggccctgatctgaggaaggataatgaagctgtttttcagaggggcccagacccccacgtggggcaccggctttgctctgggctgtttactgggcacccgctcccctaacaaccttcctgagaaaaggactcatgttccaggtaccttccagtacgcgacggagaccagctgggtacctgcctgcctcaggaggcaccctgatggacctgtcggcttccttctgggggctcagggagatcccagcatttctggaggcttcccgaggccatgggcgactgggtgtacagccacatcctcagccaggttgtgggtcctggccaccctggacccctcatggcttggggtccgtgctttgtggcacaaaatctgtgggtgcttttgaggncctatgacataaagccaggacattttgcgccagcccaccttgcattcaccgccgaaccgggtgggggggggctggtcagggaccaccatatcctgtttgg

SEQ ID NO: 82991 - DNA, 406 bp, Homo sapiens
  sig_peptide (96)...(231): this location contains the signal peptide sequence, MLASKWWVFICLYKRVSVIRRLPKEQEPKGEMQPTSTTKPKVAQS, Run with SignalP
  misc_feature (70)...(30): similar to gi60938 in the genepept database release 114, Run with FASTXY 3.3t00, default parameters
tttcgtctggctcttatgtcctgcattgctgaggctcccttttcacacttctctgaccaacttcgtgacttttgcgggaaggaaatgtgccccagatgttggccagtaaatggtgggttttcatctgcctttataaaagggtgtcagtaatccgaaggctccccaaggagcaagagccaaagggggaaatgcagccaacttctaccactaaaccaaaggttgcccagtcaactaagcccctctctacaggggcagggaggctcactgtacgcaaaacatttctgttttcattattttatgggaccctcacgattgttgtatgaaataatgacggaaatctcactttcatttattcacgcaactcatgttactgggcacctaccgttcacaggtgaggaaatgaagg

SEQ ID NO: 82992 - DNA, 667 bp, Homo sapiens
  misc_feature (1)...(667): n = a,t,c or g
  sig_peptide (169)...(304): this location contains the signal peptide sequence, MALKVLLEQEKTFFTLLVLLGYLSCKVTCESGDCRQQEFRDRSGN, Run with SignalP
  misc_feature (214)...(536): similar to gi5737736 in the genepept database release 114, Run with FASTXY 3.3t00, default parameters
tttcgtgcacggtgtgcacgctggactggaccccccatgcaaccccgcgccctgcgccttaaccaggactgctccgcgcgcccctgagcctcgggctccggcccggacctgcagcctcccaggtggctgggaagaactctccaacaataaatacatttgataagaaagatggctttaaaagtgctactagaacaagagaaaacgtttttcactcttttagtattactaggctatttgtcatgtaaagtgacttgtgaatcaggagactgtagacagcaagaattcagggatcggtctggaaactgtgttccctgcaaccagtgtgggccaggcatggagttgtctaaggaatgtggcttcggctatggggaggatgcacagtgtgtgacgtgccggctgcacaggttcaaggaggactggggcttccagaaatgcaagccctgtctggactgcgcagtggtgaaccgctttcagaaggcaaattgttcagccaccagtgatgccatctgcggggactgcttgccaggattttataggaagacgaaacttgtcggctttcaagacatggagtggtggtnggcccttgttgggagaacccccttccttccctccctttacggaaacccggcacttggttgccagccaagggtccaaaccttcggggaaa

SEQ ID NO: 82993 - DNA, 820 bp, Homo sapiens
  sig_peptide (30)...(165): this location contains the signal peptide sequence, MAGLRRPQPGCYCRTAAAVNLLLGVFQVLLPCCRPGGAQGQAIEP, Run with SignalP
  misc_feature (141)...(598): similar to gi3091278 in the genepept database release 114, Run with FASTXY 3.3t00, default parameters
tttcgtcggagaggagcgcgagcagcagcatggcggggctccgacgcccgcagcccggctgctactgccgcaccgccgcggccgtgaacctcctgctgggcgtcttccaggtcctgctgccctgctgtcgcccgggaggggctcagggacaagcgattgagccgttgccgaacgtggtggagctgtggcaggcagaagaaggggaactcctgctgcccactcagggtgattctgaagagggtctggaggagccttctcaagaacagagcttctcggacaaactatttagtggaaaaggcttacattttcagccatcagttttagattttggaatacagttcctgggacatcctgtagcaaagattctccatgcttacaaccctagtagggacagcgaggttgtggtgaattcagtgtttgcagctgctggacatttccatgtaccgccagttccctgcagggtaattccagcaatggggaaaacttccttcagaattattttcttacctactgaagaaggaagcattgaaagttccttatttattaatacctcttcgtatggagttctttcctatcatgtatctggaattggcactcgcagaatctctacagaagggtctgcaaagcagctaccaaatgcttattttctgcttccaaaggtccagagcattcagctgtctcaaatgcaggcagaaaccactaatactagcctcttgcaggtgcaactggaatgcagtttacataataaagtgtgtcagcaattaaaggtaaaataaaatgtgtagtgttttctctctgctttcctcctgcctctttgctt

SEQ ID NO: 82994 - DNA, 412 bp, Homo sapiens
  sig_peptide (242)...(377): this location contains the signal peptide sequence, MGMSSSPLWGQAILLCLEHLILPRLSSLISCHSGTLLLSILSCLL, Run with SignalP
  misc_feature (314)...(387): similar to gi885879 in the genepept database release 114, Run with FASTXY 3.3t00, default parameters
tttcgtttctgttaggcttgcaggagatacagtatgaataattcagttccgctgaagttttaagtcggcagcgtctacagttctggttctcatacttcatctgagttatttgaacaacctcctacctgaacttgccacctcaagcctggctctcatgtaatctgttttcctctgtgttgccagagtacatctaccaaaatgcaaatttgatttttgcctccccccgcatttaaaaaattttatgggcatgtcatcatctcccctctggggtcaggccatactcttatgtctagaacatctgattttacctagactttccagcctcatctcttgtcactcaggaaccctcctcctgtcgatactgagctgcttgcttgaccccgccatgcttttttacgtgctctttctctgg

SEQ ID NO: 82995 - DNA, 1298 bp, Homo sapiens
  sig_peptide (695)...(830): this location contains the signal peptide sequence, MSPTGLLVVFAPVVLGLKAITLAALLLALATSRRSPGQEDVKTTG, Run with SignalP
  misc_feature (314)...(706): similar to gi5420381 in the genepept database release 114, Run with FASTXY 3.3t00, default parameters
gtcgacccacgcgtccgggcaattttttgaccatctccactggaagacagagaatggcttcagggccgggcacttgtgtcttcctgagtttcatgttccccaatcctaccattggtatgtagtaggtactcagagcttttttactgaatgagtcaactggtgagtaataaagaaagcaggaaggagtggctgagtgaagaaatctggaaagaaggaagggagggaaaacaccaggtaggaaatgagtgaacgatggaagaggagagggaattcaacaaggacctcctctttggcttcaggagctggggaccctgaaccagacctgtggatcatccagccccaggaattggtgttggggaccactggagacactgtctttctgaactgcacagtgcttggagacggtccccctggacccatcaggtggttccagggagctggtctgagccgggaggccatttacaactttggaggcatctcccaccccaaggcgacagcggtgcaggcctccaacaatgacttcagcattcttctgcaaaacgtctccagtgaggatgcaggcacctattactgtgtaaagtttcagaggaaacccaacaggcaatacctgtctggacagggcaccagcctgaaagtgaaagcaaaatctacctcttccaaagaggcagaattcaccagtgaacctgcaactgagatgtctccaacaggcctcctggttgtgttcgcacctgtggtcctggggctgaaggcaattaccttggctgcactcctactggccctggctacctctcggaggagccctgggcaagaagatgtcaagaccacaggcccagcaggagccatgaacaccttagcatggagcaagggtcaagagtgaggggtcagccccagagtgaggaccctctgagttggagaggagccagggctcctcaaccatttccctacctccagtcccagcctctaggtgcccccaggcctcatgacaaactcctagatccctacatctggttttggtccacctagtgaaattcccttctttgcaccgggcttccctctaaaatgtctccctttctctttttggcctgttcaagacctccttgcttttcagtccctggctcagtctctcctcaacacccttgcccctgctgcagccctttctggtgcgccctgcccctttccccacctcgctacatccttcttggcctccaacatccaactcagagtcttcttcccaggagatgtctgtaagaatctctgaactcaaccagccagaccatctgtgcccctccatttacacc

SEQ ID NO: 82996 - DNA, 657 bp, Homo sapiens
  sig_peptide (174)...(309): this location contains the signal peptide sequence, MRAVGMQLFWRGWCPGVGAPPTPNGALPELYQKYLLSIYFVGGEP, Run with SignalP
  misc_feature (170)...(44): similar to gi11126 in the genepept database release 114, Run with FASTXY 3.3t00, default parameters
tttcgtgggagtcgcgcttcttccccactcccgagacaggtgagccctggcccgagggcaaggggttttcttttaaccttaggatccggaatgcggttggtgcgccgtcccgctttgcttttatccgctgtgcggatgcctgcaagctcgccggtcccttttctgagcggagtatgagggctgtgggaatgcagctattttggagggggtggtgccctggagtaggtgcacccccgaccccaaatggagctcttccagagttatatcaaaaatatttattgagcatttactttgtaggaggtgagcctctcccttccaggaggtcacagtatacggttctaatttgctctaagccctccgtgaatggtgagttttgtccattcccttttggaagaaacaggatgcgccttaaaccatcttgagtcttaaagttatgcaaaacaggcatttttaaggaaagactggcgactgaaggggagacactgggtgatgcctttattcagaaccaacgaggggaatcacactcagacaaggggctgtttaacaattaaccgcctgactgagaataccagccggggccttgttttataaaaaagggggagctggggcttttatgtaccaagatgccccccctgggggaagttggaaaccccccaa

SEQ ID NO: 82997 - DNA, 673 bp, Homo sapiens
  sig_peptide (223)...(358): this location contains the signal peptide sequence, MPALWLGCCLCFSLLLPAARATSRREGESASTRKHLSPGLRICLS, Run with SignalP
  misc_feature (223)...(302): similar to gi34232 in the genepept database release 114, Run with FASTXY 3.3t00, default parameters
tttcgttgcctctggagggctgggtcctccttattcacaggtgagtcacaccctgaaacacaggctctcttcctgtcaggactgagtcaggtagaagagtcgataaaaccacctgatcaaggaaaaggaaggcacagcggagcgcagagtgagaaccaccaaccgaggcgccgggcagcgacccctgcagcggagacagagactgagcggcccggccccgccatgcctgcgctctggctgggctgctgcctctgcttctcgctcctcctgcccgcagcccgggccacctccaggagggaaggtgagtcggcttccacaaggaaacatctcagccctgggctgagaatctgcctttctctgcagaccgtgatggctgaacgtacctccgaggattcccactttgtccagaaacttggtagagctcccttctcctcacctatctggggctccacagagacggattttaaatgagactaatatataaagctatctgctttttaaaaatagtaagccaataagctgtgacaaaagagggtcttccttaccttaaaaatgttccttcttgatgtcttttttcgaccaaggggccgctatttaatcaataatgtgttgttatatacgttctttccccagcgtgtgcttttattaaaaggttttgggggcaatgcttccc

SEQ ID NO: 82998 - DNA, 409 bp, Homo sapiens
  sig_peptide (236)...(101): this location contains the signal peptide sequence, MFNVAITRLCAVVHFQSVFILTDDVVQDLGLLKAKSFYRQMKKCS, Run with SignalP
  misc_feature (348)...(403): similar to gi1181338 in the genepept database release 114, Run with FASTXY 3.3t00, default parameters
aacccattgcctgcttcttgggaactatttccgaacctttgacattacagtcaacttgcaaagtagtaattattgaaattgtgtttttatggttctttgtgaacattttttcatctgcctataaaatgatttagctttcagaagcccaagatcctgaactacgtcatctgtaagtataaaaacactttgaaaatggaccactgcacataatctagttattgctacgttaaacatcgagaattaaaatcgcttctcaattcttttccccttgtctccattcccttatcgtgaacagccctgctggtattcctttattgatcatcctcttctggggggataaaacttaaagggaaatcaaacttagcatcttctcaaagaaccacatattcctgcccaatgcacgacgaaa

SEQ ID NO: 82999 - DNA, 1126 bp, Homo sapiens
  sig_peptide (121)...(256): this location contains the signal peptide sequence, MLTCSLSFFCKRMLAVLPYHFFSSGSHLRSSVWMFHGCDPRVGEM, Run with SignalP
  misc_feature (139)...(12): similar to gi4093188 in the genepept database release 114, Run with FASTXY 3.3t00, default parameters
agcatctcatttttcgggttttgttttacttgtgtttgtaataagttgttccactgctctaagcacttgaggggatttcgtctgctcctggggctgccttctcggttgggccattgggcaatgctcacctgttctctttccttcttttgcaagaggatgttggctgtattgccataccatttcttttcttctggctcccatttgagaagctctgtctggatgttccatgggtgtgatccgagggtgggagagatgtctggccctcctcccatgtgtgtgaggggggaaacccttactgctagctgggaggtccaggggttttagtctttctcctcttctgtagcctgtgggagtagaaggctcaggctctgtggaggcagtaagcaagcagtctgtttcacatatgtgtgttctggcaaaaggcctacgttggagtttccttcacctcgttggggagctgtatcccattccagaaagaggtaccctcaggtttcacatcatgccccgtggagccttcatttccatcagaggagctgccgtgctcttcacctaatttcttagcagctggtgccattccacagagggagcgataaggacccccacttagacccagtgagacccctcattgggcttgacaggagccatgccatgatgcaactcttggtccagcttaacaaacctcttttttctttcttaactttaattcttcgagagcgcaggggattcaactatgcccccttccttggttcacgtgaccatgctgaatacgttccacctgaacacgtcctacgtatcttcaccggtcttcctcggcaaccactacagctcgtcctcccatccgccacctctccagcctcgtgtcccgaccctccatatacctcagctacagaaccaacgccgtacccggatcttcctctcttttatctcgcctcgtcgtgtcacctcctcaggcccgtcctatgctaggcgcagtgttcgcaataatgcactcaccaacgtgcgcacgcgcgacgcgcgcccgtatacggcgtccacgccatattctcttacttttatctttccgcatcacagcagtccgaagagcgagcctaccatcgtcgccgcgaacgacacgcacatgcacgcc

SEQ ID NO: 83000 - DNA, 411 bp, Homo sapiens
  misc_feature (1)...(411): n = a,t,c or g
  sig_peptide (141)...(276): this location contains the signal peptide sequence, MSCSCPPCFFTLFLHSICQDISWFHPQTPTLDSLLNWIDDLIFYG, Run with SignalP
  misc_feature (141)...(357): similar to gi2104911 in the genepept database release 114, Run with FASTXY 3.3t00, default parameters
atcctcctcagnggatttttccttccttagtaaagctgngtccatctgacactcagcctgacccttcttcctcctcttggaaggcgcaagtactctccccgacctcgttaaaactcaccgaaatccctgaagaaacttaaatgtcctgctcctgtccgccctgcttcttcaccctcttcctccactctatttgccaagacatctcctggtttcatccccaaactcccaccttagattctctcttaaactggatagatgatctcatcttttacggcactctgtataacttcttcccagaagagacgcctctgtttaccttcctactcactctatatctatccctcctgctcctttggctacctggcatggccgcactcccacttgcagtaatgcctaattacctctacaaaa

SEQ ID NO: 83001 - DNA, 1136 bp, Homo sapiens
  sig_peptide (198)...(333): this location contains the signal peptide sequence, MLNKKPLQTLIGIVFNLWINLRGFCLLTHKSSIIQEHISPWIYIL, Run with SignalP
  misc_feature (108)...(31): similar to gi2388562 in the genepept database release 114, Run with FASTXY 3.3t00, default parameters
cgattcacgcgtccgcggcattcttgtcagaagggaggcggtgacgcaaaagtgtggcagctgagccttggatcgggccctgccccaagggttcgcgaatgtgtgtgtggcataccttggccccatcgtctgtcccataatcctgcggttttcacgcgtctattcttaatagacagactttagaattggtttgtcaaatgcttaataagaagcctctgcagactttgattggaattgtgttcaatttatggattaatttaagaggtttttgtctcctcacacataaaagttctatcatccaggaacatatatctccatggatttacatccttttgccaagttgtgtgcttagtccatacctttctgacccaccttagttcaccttaggtaggtgatggtttttgttactgttgtgaatagaatttttaaaattaaatttaattatctcaaaaacccaaggagaaagttttatgaaggcaggccatggtcactctccagcttgtcatgagttgggtgggattgaaagctcactgtagagaggttcctggcccgtggcccgtgctggctggtgtcacatggccctgatgttcacctgacaggccttggtcttgctggcccgcagactttgtcgcctttaccactcccaatggcagcttctgcaccctgtgctttctttgcaggtgctcctggtctcccagctggtcactaatgtcacccaccgctttggtccttaaacctggccctctgcattttcttcaggtgctctgcaggctgggcgaggatattttggtgaacccggatcgcggggtgcgggcatcctagatcgggccctgtttttacccggtcaccaccaccgaatttctttcccaggaacaacgaagggcgcccgctttgaagccaactggccccgggggtcggggcgttccacccttggggctcggtctcgcaccggcgcgtcttcttttcagatggtgccgggcgctgtgtacgacgtggttccttccggctctcggggtctcgtttccgccggcacggctggactgcccggcctctacctcttccgacgcacccgcgctttcgggttagaagacgcccgtagtcgcccccactgggcccccggcgtgcctgtttgcgac

SEQ ID NO: 83002 - DNA, 427 bp, Homo sapiens
  sig_peptide (402)...(267): this location contains the signal peptide sequence, MPLFVVLLFLPHLYHSHPVGSQQDSAPHIWGRASPPFCSWGSELE, Run with SignalP
  misc_feature (311)...(348): similar to gi3881707 in the genepept database release 114, Run with FASTXY 3.3t00, default parameters
ccttagaattttacatacaaagacccagtacagaagaaacggagggaaaaaaaaagtcagtctctacctgaataagcttacacacgagactttaagagaaagatcaccaaatattaaagaaaattactttatcccccaaactgtggctcttcaaaataaagttacaacagatatgaaatgtaaacccttttctgtcccggataccatataatcagggttccatgagaatgcatgcatggggcaagcaaatttcgtcagaactccctctctagctctgaaccccaactgcagaaagggggagaggccctgccccaaatgtggggggcagagtcctgctgggaacccacaggatgactgtgatacaggtggggcagaaagagcaaaaccacaaagagtggcatcctcaagggaaggtcattgatctgcg

SEQ ID NO: 83003 - DNA, 388 bp, Homo sapiens
  sig_peptide (218)...(353): this location contains the signal peptide sequence, MPALRPALLWALLSLWLCCATPAPALQCPEGYEPSPLDRKCAPYP, Run with SignalP
  misc_feature (218)...(390): similar to gi2373395 in the genepept database release 114, Run with FASTXY 3.3t00, default parameters
tttcagccaaacttcgggcggctgaggcggcggccgaggagcggcggactccgggcgcggggagtcgaggcatttgcgcctgggcttcggagcgtagcgccagggcctgagcctttgaagcaggaggaggggaggagagagtggggctcttctatcggaaccccctccccatgtggatccgccccaagcggaggtcgcggaggaggttatcgaaaatatgcccgccctgcgccccgctttgctgtgggcgctgctgagcctatggctgtgctgcgcgacccccgcgcctgcattgcaatgtcctgaaggctatgaaccctccccactagaccgaaagtgcgctccctaccccaatgtcagacgatcctgcccatgcccagaaggtttt

SEQ ID NO: 83004 - DNA, 679 bp, Homo sapiens
  misc_feature (1)...(679): n = a,t,c or g
  sig_peptide (43)...(178): this location contains the signal peptide sequence, MAGSFLLPELLWRTFLNSVPTPAWPSRHCPCWDQGLPMSVLAAPA, Run with SignalP
  misc_feature (220)...(3): similar to gi457187 in the genepept database release 114, Run with FASTXY 3.3t00, default parameters
agcggaggtcgtggatagctcgcacaccacggcgctgacctgatggctgggtctttcctgctgcctgagctgctgtggagaacatttctcaacagcgtccccactcctgcctggccatcgagacactgcccttgttgggaccaaggtctccctatgtccgtcctggctgcacctgcggggcccctggctccacctggtcctggctgttgccttgctcaccctctgacgctcacatgtccatgctggctggtggcttcttgatgctgcaagcttagtgaacacacaggaatcctgctcctagggccagcacaccctccgtggctccttccttggcctcactgtaaagcaagctggcagcagagtcagggctctgggacgtctgagaaatcttgggcaccaaagcggccccccggcctccccttctctcctgtttcctcctctctcaggctatgcttggcatttgggaaccacgtggcaccgttggctcctccctcctgctgcggtcatgccaggatgctgctgcctggccctcatttgtccggatcggtgccgcctccttttcttccccgggagagaaactggagtcccagntctgaggccttgctgcctgtcattcaccctcctgggccgacacctgcccctgttgtcctgttgggaccttaacattctgcagcccacc

SEQ ID NO: 83005 - DNA, 609 bp, Homo sapiens
  sig_peptide (11)...(146): this location contains the signal peptide sequence, MLAQAYRWSLMTGTCWFHLKPSISLHPKKHSLTTLHELGAVLGTE, Run with SignalP
  misc_feature (71)...(8): similar to gi1336798 in the genepept database release 114, Run with FASTXY 3.3t00, default parameters
actgatagaaatgttagcccaggcatacagatggagtctgatgactggcacttgttggtttcatttaaaacctagcatttcacttcatcctaagaagcactcgttgactaccttgcatgaattaggtgctgtgctaggcacggaggctgtaaagacgggttaaacctggtccctgcctttaaggaactggtaaagatgcaatagatggacatcttgacagaaaatgtcagtaccatagggtgataaggcaaaaggtctctttttccaaggagtgggggaagacttgtaaagaggatgattaaagcctcagctgagtcttaaaatatgaataccagccaaaggaactaagtgagacagagcaggaggtttaggctgagagtcagtgagaacaaaggcttagaggtacaccacacatacaatatagcaggggagactgggaaactttaaccaactggtggagacataactttagagaatctcacattaacggcaggagtcttaaatatttgaaaattttactctggattttttttcaggacacttaaaagctcacatagacaatgtaagaatcatgttaaggattggcagttaagtgaaagaattaaaaaa

SEQ ID NO: 83006 - DNA, 623 bp, Homo sapiens
  sig_peptide (195)...(330): this location contains the signal peptide sequence, MSQLTLAFCFITFLVEAKKQRVLLSSFFPYVPYFRGERGQCLDTV, Run with SignalP
  misc_feature (347)...(454): similar to gi4153862 in the genepept database release 114, Run with FASTXY 3.3t00, default parameters
atgggtgtcgaggactgccttatgctgtgagtatgcatttgtttctctccagaacagtgatcttcctggagtgtaatccattcttatacattgtgactttcttgaaatgtttatatgcagcatgacgaagttgccccttttgcacttccctgactccagcggacgtctagccctgcatcattgttcttgtttttatgtcccagttgaccttggcattttgttttatcactttcctggttgaagccaaaaaacaaagggtactactttcttctttctttccatatgtaccatactttaggggagagaggggccagtgtttggacactgttgatttaaaaaatcttattttcaggatcataattacggagcccctcctcctccgacacctcctgcttctccccctgtccagacgatcatccctcgttctgacctgaatggcctgccgtcgcctgtagaggaacgctgcggatacagcccgagctctgaaggagaaactgtacctacctggggtccttggggccttttttaaggagggctctccttctcaactgtgaaccagcgcaagggaagaaaccctgcttccttattaaaattctaagtctggggtctgcttggcaattaag

SEQ ID NO: 83007 - DNA, 384 bp, Homo sapiens
  misc_feature (1)...(384): n = a,t,c or g
  sig_peptide (283)...(148): this location contains the signal peptide sequence, MKSLGCRGQWWFLFFLVELGLWIADCELTVLLMIFYLQSPAVLST, Run with SignalP
  misc_feature (49)...(79): similar to gi3874205 in the genepept database release 114, Run with FASTXY 3.3t00, default parameters
naatctcaaatgcgtgatctggatttccattttgaaacaaatgctggaaaatgtgacccctatgcaaggccccctcctaatgaggtctgcctgttatacatgcgtgacaggcgcttcatagcttggaactaaccgcactgtatttgatgtgctcagcacagcaggtgactgtaggtagaaaatcattaacagtaccgtgagctcgcagtcagcaatccaaaggccaagttcaaccaggaaaaataaaaaccaccactgccctctacatccaagagacttcatcttacacttcaggcatttaaaagcccttccccgcttaatgcgttgtggttgagcagcacatttaaatgcctgaagtgtaagatgaagtctcttggatgtgct

SEQ ID NO: 83008 - DNA, 841 bp, Homo sapiens
  misc_feature (1)...(841): n = a,t,c or g
  sig_peptide (773)...(638): this location contains the signal peptide sequence, MAFRPHQFLVKPRGTFXAFSLFGLHLWLTSLPFLQPFAFFPQSGA, Run with SignalP
  misc_feature (78)...(29): similar to gi450736 in the genepept database release 114, Run with FASTXY 3.3t00, default parameters
cccacgcgtccggttagactctcgtgatgctgataacagcagtaatagcgcatagcaagaatactcaaaccacttcacaaacagcaaccatcctggaccctgttcagatcttcctcttggcaagaaagggagagtttaggtacttccacatctttgccctaatagccttatgttgtcatggcacatgatttgcctcccacctgagcccagcaagtgaatctgtgtgcagaagctgaaagggaagagagaaggaaagaagataaactaatgaagagtgggagacgagcttttcctctgcagtccagagagaagattaaaaggactactagtgaggcagatagacttgcttttttctcatctgccagatttgtgctgatggctgtgactccctgtattggatacttctgctccttaatcatgcgcagcaagaaccagaatgggcgacttcatttccgaagaggaactgaacggcgctgaggctctgggatgcattaagacagcccagatcaacagaaagtctggctggaacctcagagaaatgacccagacagaatcttcagcctcccaagcatctgtcagtggcatcagtggctggcatggctgattgcactgatcccctccctttagcagagagtcaggctcctgattgagggaagaaagcaaagggctggagaaaaggaagggaggtcagccagagatgaagaccgaagagagagaaagccnagaaggtgcccctgggctttacaaggaattggtggggtctaaaagccatcatggtggccttttgggtagaaaaccggcctaagctagtatttaaaaatcttcttcagggcccccattt

SEQ ID NO: 83009 - DNA, 850 bp, Homo sapiens
  sig_peptide (131)...(266): this location contains the signal peptide sequence, MKLILLLFLYYRKGNLGSARPSNLPSIIPALKRLPEDSRLLVSAL, Run with SignalP
  misc_feature (71)...(1): similar to gi1334044 in the genepept database release 114, Run with FASTXY 3.3t00, default parameters
cccccaccccccaccaaataaggcacatcaattttttacaataataaagagctaattgttgagttctaactatatgccaggcacgtgctaagcagtgtacattgtgtcatttaattgacatagcaactcgatgaagttgatcctactcttattcctgtattacagaaaaggaaatttaggttcagcaagaccaagtaatttgcccagtatcataccagctctaaagaggctaccggaggattctaggcttctggtcagtgctctcaaccactgaacacaaaaatgtctttcttattccttttagtctgctgcagtaattgggaggatatagaataactttttaagtattgacactgtattttttgttgttgattttttgttttgctttgttttgtttttcagacagaatctcactctttcgcccaggctggagtgcagtggtatgatctttgctcattgcaacctctgccttctaggttcaagtgattctgctgcatcagcctcccaagtagctgggagtacacacgcatgccaccatgcccggctaatttttgtacttttagcagagatggggtttcgctatgttggccaggctggtctcgagctcctgacctcaggtgatccgcctacctcgacctcccaaagtgctgagatttaaggtgtgagccactgcacccagccaacactgggttattttgactgagattttgtgattgctaccttggcctggggctgactaaaattaccaggttaaagaaagaacgtaaaggacctgagggagcgtgaaaaacccagcatgagaaacttcgggaagcatacgccaaggatttaattactggaatccgatcag

SEQ ID NO: 83010 - DNA, 401 bp, Homo sapiens
  sig_peptide (387)...(252): this location contains the signal peptide sequence, MGPLWWRRVLRRRPLLALAPCLIQACGEKCGGPYPSPASVAVKGP, Run with SignalP
  misc_feature (331)...(384): similar to gi4008584 in the genepept database release 114, Run with FASTXY 3.3t00, default parameters
tcatctgggaatttgttgaagatgcacattctcaggccctgcctcagacccactgaattagcagctctgggtgtggggccagaaaggtgggttttaacaaggcctctgggtgactccaatgttaactgctgcttgagcgccactgcctcagacattaaatgaattaaatatgctcagagaagaaaacaaattatttagtattgagaacagatgtggggggcccagaatatactgttcacaagtgtctaggggacccttcacagctacagaggctgggcttggataaggacccccgcacttctccccacaggcctgtatcaagcaaggtgccaaagcaagcaagggcctcctcctgaggaccctcctccaccaaagaggccccataagacagcctaccttgt

SEQ ID NO: 83011 - DNA, 598 bp, Homo sapiens; identical to SEQ ID NO: 81924
  sig_peptide (49)...(184): this location contains the signal peptide sequence, MAVWSLLSARAVTAFLLLFLPRFLQAQTFSFPFQQPEKCDNNQYF, Run with SignalP
  misc_feature (154)...(410): similar to gi861294 in the genepept database release 114, Run with FASTXY 3.3t00, default parameters

SEQ ID NO: 83012 - DNA, 391 bp, Homo sapiens
  sig_peptide (210)...(345): this location contains the signal peptide sequence, MRGKHLIQPLCAFLLCSKMCGLASQMTGWRCYIGTLDSMCQTPPS, Run with SignalP
  misc_feature (240)...(394): similar to gi6019201 in the genepept database release 114, Run with FASTXY 3.3t00, default parameters
gggggcgcatcttgaatcactaaaacgtctctcagagtggcgagctgctcgcatgacaaagaactgaggctgcctgagggagtagcgtatgcctgtcccccatcccacactcacaccagagcaaatgcttaggaagtggaatgctgggtatctggtctgcttaaattatttgtcctttagtgaggggtaaggggatcctagttgaatttatgagaggtaaacatttgatacaacctctctgtgcctttttactgtgcagtaagatgtgtggtttggcttctcagatgactggatggcgatgctatattggaactcttgattctatgtgtcagactccaccctcgatcacccaaggcagaagagggattgatgtgttggcctggagtcccag

SEQ ID NO: 83013 - DNA, 843 bp, Homo sapiens
  sig_peptide (190)...(55): this location contains the signal peptide sequence, MVFLYGFVFIKKAQLIVVLLFTDVAQRTAAGRPPTPVLGPPSPEC, Run with SignalP
  misc_feature (202)...(127): similar to gi450755 in the genepept database release 114, Run with FASTXY 3.3t00, default parameters
agcctgaccagttgttcccaggatccattgttctccctccataaacaataaacagcactcaggggagggagggcccaacaccggggtgggtgggcgcccagctgccgtcctctgtgccacatcagtaaacagcaacacaacaatcaactgggcctttttgatgaagacaaaaccatagaggaaaaccattagaagaggtaataaaggcccttcttatacagttaatagagagcctcctggatggaacaagaccagctgttgctactgaaaatttacttctgttttcaagttcaaatagagactaaaacattatcttcacgggaattgattttacgtcttccaaacacatatgccaccttaattgtgatttgtgtgatagttcagctgctgaaagctttcgtttatctctacctggttaaacaactttaaataataacaagtcaatatatctgtttattgaccagggttcttctcatccccagagcacactgttgaagaagaaggtacttaaccctttgtttccctagccctgccacatatctcatttttcacattctcaatggggagatataattgtttaaaaaatggaatgaagccgggtggcatggcttacacttgtaattccagctatttgggaggctaaggcaggaggattgctcggggcccggagttcaagaccagtctaggcaacatagtgagaccccatctctacaaaaaataaaaactaacaccccgggttcctgactactcaaaagggtgaggcagaggatcacttgagcccagaagcagaagctgggtgagctagactgggcacgcactcctcatggtgcagaagaaacctgc

SEQ ID NO: 83014 - DNA, 400 bp, Homo sapiens
  sig_peptide (170)...(305): this location contains the signal peptide sequence, MQWVSFPFLSGANLLCYLVASMLFELLLLAALCSIAEAEQTCVPD, Run with SignalP
  misc_feature (213)...(289): similar to gi4886421 in the genepept database release 114, Run with FASTXY 3.3t00, default parameters
ttgagagccctgcattgttctctctgatacctcatttttgtaataagccttttcatactctcggtgtgtgtgtgcaccacatagctctcggtgtcaacctctgaagcacaccttttcaggcaaccgtaacagttggcactgtcagcaggatgtctagatgttggtcaccatgcaatgggtcagctttccctttctctcaggtgctaacctgctctgctacctggtggccagcatgctctttgagctgctgctgcttgctgctctgtgttccattgctgaggccgaacaaacttgtgttccagatttagccaaccgaagatggcagtttctataagtctttggcatttaggagcaggagtatcggatttgggccctccttaaaatggtctgggctaggagt

SEQ ID NO: 83015 - DNA, 639 bp, Homo sapiens
  sig_peptide (244)...(379): this location contains the signal peptide sequence, MSFLSLLRARLSLSGPARRAFPISQPIFSGFLRGFFAKTEPRPLE, Run with SignalP
  misc_feature (132)...(60): similar to gi31362 in the genepept database release 114, Run with FASTXY 3.3t00, default parameters
ctgattcctccctctagggttatccctcagaagcagttctctgcctgcaccttccctgatgactgtgaggcagaagcccccttgggcctccctcagaaaggcagggtagaagagtgatggatggtgcatagtccccacacagaactgtgagccagtcgctggtgctctgggaagtggacctcctcaagctggagaggcatcctctcccgccacagatgtcagctgaccttagcttaggggcctatgagcttcttaagcctgcttagagccaggctgtctctttcaggtcctgccagaagagcatttccaatatcacagccaattttctcagggtttctcaggggcttttttgccaagacagagcctcgccctcttgaggtctcacagcttggagttagtgagcagtctcttcctggggctgctggctacctcttgtagcttggagttagtgtgcagtctcttcctggggctgctggctacctcttgtagcttggagttagtgtgcagactcttcctggggctgctggctacctcttgtagcttggaggtagggagcaaaccctttctgggggtgtggtgtaaatttcgggacctcctaaaaacaccctctggggcccgggaagggaaaaagttgctttt

SEQ ID NO: 83016 - DNA, 395 bp, Homo sapiens
  sig_peptide (226)...(361): this location contains the signal peptide sequence, MKIQKTLIYTKLLCHLLIIFCKGNRLELMSLCCFSDTLTFLCYLE, Run with SignalP
  misc_feature (241)...(396): similar to gi557242 in the genepept database release 114, Run with FASTXY 3.3t00, default parameters
cccacgcgtacgaattacattcttggcaggaaataaaagaagtcaactttctctgtgaattttcagtaaggattgtggcattaccttatatattgttaagcttttgataaatactcacatgtttgtctgatccatttttgagtataaacttctggaaaaaatctagagatgatatagaaataaataaacttctgcaggtcctataacccatggtatctatgcttaatgaaaattcagaagaccctaatttatacaaagctgttatgtcatctcctaattatattctgtaaagggaacaggctggaattgatgtctctttgctgtttttcagatactctgacttttttgtgttatttggaaaggactgatatgaggtatgtgtgtgaagtgctgat

SEQ ID NO: 83017 - DNA, 395 bp, Homo sapiens
  sig_peptide (380)...(245): this location contains the signal peptide sequence, MAKRSPCLLLLPTPIYGVHVSGGGEEKQAGRLLINKCFLGRYTLS, Run with SignalP
  misc_feature (293)...(370): similar to gi4585217 in the genepept database release 114, Run with FASTXY 3.3t00, default parameters
ttaagtcatgaggatttcaatttgcaacctatgcacagtagtggaatattaaatgagaagtaaaatttcttgggtccggtagtgtaaaattaaatatgtgtatgattttaaagcatcaggtgttttaaaaaaccatgtttaaataaaatattaggtaaccaaaaggtgaagcttacaaggaagatgtaggtattacaaagtgaggcaaaagatcatgtttagccattctatgcaaaaaattagaagataaagtatacctgcccaaaaagcatttgttgattaacaatctccctgcctgcttctcctccccacccccacttacatgcacaccgtaaatgggggtggggaggagaagcaggcagggagatcgttttgccattttatttagggctctg

SEQ ID NO: 83018 - DNA, 1249 bp, Homo sapiens
  sig_peptide (265)...(130): this location contains the signal peptide sequence, MSVFLICLVLAWGQHKELAPSEHPDTWSQVEPHTSCLQQKAVEAF, Run with SignalP
  misc_feature (1195)...(1250): similar to gi3421393 in the genepept database release 114, Run with FASTXY 3.3t00, default parameters
ttagaaagcattcagattgttttttttatactcactttaaaattttggcaaggaattcatgcataactgagacttggaggcagcccctgctcacttcacgctgttccttaggcacctcgggattggtatcaaaggcttccactgccttctgctgaaggcatgatgtatgcggctccacttgagaccaggtatcaggatgttcagagggagccagctctttatgttggccccaggccagtactaagcaaattaaaaagaccgacatgggcttcctccctcatatcatttcattctaaagcagcaagcttgtcatacccatggggtcctatgttgatagaaatggagaggtagggatacagtttattctccaaaaatggactgcccacttccatgctgagtgatgctcagggaagtgatgcccgcagaaggcgtctgggcctaaggatccatggaagtcaggagcattaaatcccaaaccaaatcaactccagatatatcagtgtcaaaagcccaagaaaagacaaaaaagaaaaaaacaatccccaggggttctatgaccctattgactcctacagttctttcccttctcttggcaatggaagctccagtacccagattggagattaagatgagacaactttgtgtatatgtgcacgtgtgtggtgtgtgtgtgttttattaaggactaagatacacacttatctattctgtctccttctagcttttaggcagcctactcttggaaactggaggaaactgccctgagaattattagaatgctaataatagtaattggtaacattaacaatcagtgttagacaacagtgaggcatatcatgtgtttttattaaaaatgataaagatgtgtttcttctcatctaaaggaggtaactttgtgataattagtttgattaaaagtttgaagtatgaggattccttgttatgcctttaagggaatttttaaaaaaaatctgagtagagatagtactaatattggcaagaaggtccccaggatagacctagcaaggagataagaatagatcattaaaaaataaatataaatggattggatagaattcccattcagctgttttaacacagaaattcaaaatagtgacttaacatggaagctatttctctcttacttaaaggcaaactggttttacagctctggtgtgtgatgttaccagacgcctaggccctctcctgttgctctgtcatcctaatgtgctgcatccacctcatggac

SEQ ID NO: 83019 - DNA, 412 bp, Homo sapiens
  sig_peptide (52)...(187): this location contains the signal peptide sequence, MFVWCLALWSHVLAASGSSLSLCGVFVVECGAEGLRGVVVVECRA, Run with SignalP
  misc_feature (333)...(394): similar to gi1827466 in the genepept database release 114, Run with FASTXY 3.3t00, default parameters
cggacgcgtgggcggaggtccgagtcgggttggatggctgtgtccgtcgccatgtttgtgtggtgcctggccctgtggtcccatgttctggcagcttctggctccagcctcagcctgtgtggggtgttcgtggtggagtgcggtgctgagggcctgcgtggggtggtcgtggtggagtgcagagctgaggttagagggtttctgtggctgtccctcttacgtgggcacctgcctgtggtctccctgcagctgtcaggtgggggctccccgcaaggcccttcccttagcccagagccctggcgccatgagtccccaggcccttctaggatgcctgcaaagccatcccgtgtcatctctgcgagggtaggctctgctcctgcccaggcggtctttccgggagatctctgcggct

SEQ ID NO: 83020 - DNA, 467 bp, Homo sapiens
  misc_feature (1)...(467): n = a,t,c or g
  sig_peptide (157)...(22): this location contains the signal peptide sequence, MYVPQLEVHLKAFLIFVCRVACFYLIWKNEVLPLEVNEIYENDAD, Run with SignalP
  misc_feature (381)...(467): similar to gi5852625 in the genepept database release 114, Run with FASTXY 3.3t00, default parameters
nagtaaatcctgttataacaggcatctgcatcattctcatagatctcatttacttcaagagggagcacctcatttttccaaataagataaaagcaagctaccctgcatacaaatattaaaaatgctttcaaatgcacttctaattgaggaacatacatttttaaaccgagtattcatacacatattgcatatatgtttagaaatgataatacattttcattagtaagaaatctacattacaagattcattctaaaatctgcattaaagtaaaaaaagctgctgatggtccacatttttgcccttatattgaggtacctaattaattcatcaaggtcctggcctcttcacatccacccaagttactatctgttattagccatggttataccacccccactcccagaaccctttctccccctcgtccaagcttgcgtgtgntgtactaaccangtagnnagttcatctc

SEQ ID NO: 83021 - DNA, 744 bp, Homo sapiens
  sig_peptide (289)...(424): this location contains the signal peptide sequence, MSSTRAWCCQRKRLARWVLGCLSSSSSLSVAPHAVVQHFASATQL, Run with SignalP
  misc_feature (476)...(38): similar to gi3337384 in the genepept database release 114, Run with FASTXY 3.3t00, default parameters
ctgtggtggaattcgcctcccaaagtgctgggattacaggtgtgagccaccgcacccagcctgaaactgcttttgctgagcgtgtccacgttccaggtcatgctctttttcttgggcatctcctccagcttttgctcccagctcagctcctcgtgtagccactccacctccaccctggcaccctctgacacctccagctccttcagcttcctctggcactcggccatcttgcacttgtactcccagcagcccctgtccagttcctccttctccttctggaactgctccatgagctccacccgggcttggtgctgccagcggaagaggttagcccggtgggtgttgggatgcctctcctcttcatcatcgctcagtgtggccccacacgctgtagtccaacattttgcctctgcgacccagctaactccctgaacagtggttctcagtgaggtagtactgccccctagggccattttggaagcttgtttgtgggggctttgatctcactgtgaatgtgacaatgtccttagagggagagagcaaagccatcctgccatgcacagtatggtcctggatgaagagagattcttctacgtttgagtggtttttttaatatccccgccagacatccaacaatatgtgctaagaatctaacttcattgtacatatgaacccaaagtcgcttggtttgttttgggttacatagagaggcctgcttggcccttcaggcggcagtgcgggggt

SEQ ID NO: 83022 - DNA, 471 bp, Homo sapiens
  misc_feature (1)...(471): n = a,t,c or g
  sig_peptide (58)...(193): this location contains the signal peptide sequence, MTFLKSTWVLYIFVQRNGRTWKIYSKPCNYWFQHDDSPSLNIVKY, Run with SignalP
  misc_feature (193)...(451): similar to gi4894341 in the genepept database release 114, Run with FASTXY 3.3t00, default parameters
ntttgatgatgnncnttgtgtcagtgtcggggaattccctgaaagtgcacccncaatatgacctttctaaagagcacatgggtcttatacatttttgtgcaaaggaatggacgaacatggaaaatatattcaaaaccatgtaattattggtttcaacatgatgattcaccatccctcaacattgtgaaatacattgatctgggaaactcttatgttttaaaagctaaggtcatacggaatgcaaaaggttatcgaatgcttgaaataccactactgactgtgtttgttggaaaccctaatttgttggaagttacagctgaagtcacttttgatgatactgacagttatgtaataacaatttctgcagctagcaaagttttacatcagataaactacaggcctccatctaatatgggaattgctattccactcacagataatttttatcatgcagatcctagcaaacccata

SEQ ID NO: 83023 - DNA, 806 bp, Homo sapiens
  sig_peptide (62)...(197): this location contains the signal peptide sequence, MSQLRLLPSRLGVQAARLLAAHDVPVFGWRSRSSGPPATFPSSKG, Run with SignalP
  misc_feature (161)...(448): similar to gi2160381 in the genepept database release 114, Run with FASTXY 3.3t00, default parameters
tgtcgtcctgacctgcagcctccggacctcgctgcagcgcggacccggcccgcccgcccgaatgagtcagctgaggctgctgccgtcccgtcttggggtacaggctgcgaggctcctggctgcacatgacgtcccggtgtttggctggcgcagcaggtcctccgggccaccggccaccttcccaagcagcaaaggtggaggcggctccagttacatggaggagatgtacttcgcctggttggaaaacccccagagtgtccacaagtcctgggacagcttcttcagggaagccagcgaggaagccttttctggctctgctcagccacggcccccttctgttgtccatgagagcaggtctgcagtctcaagtcggaccaagaccagcaaattggtggaggaccacctggctgtgcagtccctgatccgggcctaccaggtgaggggcagctgaggcacagcctgggaggctgcactggctcctggggtgtggccaggcactgaagggaaggggtctcaactccaacatcatctccccagagagcccttctccttgtcctctactgagcggcacctactcctctagccagtctttgccacatcaccattcagagcacttaccacctgcttgaatttttttttgtgcatactgacttgtgtccttgtggtctgttccttgcacacaccatgccccgagtacgtggaggagcacttactaggggatcaattccaaagcctgttgaatgaggggtgagtagattaacccttgataattctgttctctcctctagaatgagcatcctgggagg

SEQ ID NO: 83024 - DNA, 827 bp, Homo sapiens
  sig_peptide (428)...(293): this location contains the signal peptide sequence, MTLPFFAFPLIIWSIRTVIIFFFSKRTERNNEALDDLKSQRKKIL, Run with SignalP
  misc_feature (563)...(604): similar to gi4337192 in the genepept database release 114, Run with FASTXY 3.3t00, default parameters
aatacatgggctggagtaacagtcctttctgtgggtccaccaggggcagaactgtcctttggtggtccaggagatactggaacttgtggaggagggccctggttagggcttgctggtgttggagaaaggtttctttgagctgcagttcgctgacgaatctcttgtccaggtcttgcagttacagctgctccagcagatggcggctcacactcctttgctttctttgagtccggatcaaacctttcaagaattaatttagccgtcttgtaagtttctttttccatgacttcttcaagtatttttttcctctgggattttaaatcatccaatgcttcattatttctttctgttctcttggaaaagaagaaaataattactgttcttatgctccagatgatcaatggaaaagcaaaaaatgggagtgtcatggcaagtcttgctgtaaattcatcaggaagataccacaaatatacaattaagcatgtaaacagatagagaactgaggaatacagaattaatcttccaacccataatttttgtaatctctgatttttttccctaaattcttccaatgcttgaatttccttatctatactttctagaacttctacagttgaaggttttgtcctccatcgagaaaataatccacccatcttttatttgtagaaactgggcacaatgataaatatcatcaattgtccaaaggaattcacagctgcaagaagcgggcgcagcccggcccgggcgtccacccccgccagtctcggccgccaccgcccagcctgcctccagagcaggcagcagccgccactgacagagagacgaca

SEQ ID NO: 83025 - DNA, 647 bp, Homo sapiens
  sig_peptide (122)...(257): this location contains the signal peptide sequence, MPSGCRCLHLVCLLCILGAPGQPVRADDCSSHCDLAHGCCAPDGS, Run with SignalP
  misc_feature (149)...(643): similar to gi3097285 in the genepept database release 114, Run with FASTXY 3.3t00, default parameters
gaattcccgggtcgacgatttcgtgcggagggcgaggaggagcagaggagcacacagatgaagcaggtgtccacgcgtccggccgtccatccgtccgtccctcctggggccggcgctgaccatgcccagcggctgccgctgcctgcatctcgtgtgcctgttgtgcattctgggggctcccggtcagcctgtccgagccgatgactgcagctcccactgtgacctggcccacggctgctgtgcacctgacggctcctgcaggtgtgacccgggctgggaggggctgcactgtgagcgctgtgtgaggatgcctggctgccagcacggtacctgccaccagccatggcagtgcatctgccacagtggctgggcaggcaagttctgtgacaaagatgaacatatctgtaccacgcagtccccctgccagaatggaggccagtgcatgtatgacgggggcggtgagtaccattgtgtgtgcttaccaggcttccatgggcgtgactgcgagcgcaaggctggaccctgtgaacaggcaggctccccatgccgcaatggcgggcagtgccaggacgaccagggctttgctctcaacttcacgtgccgctgcttggtgggctttgtgggtgcccgctgtgacgtgtaaggtg

SEQ ID NO: 83026 - DNA, 794 bp, Homo sapiens
  sig_peptide (185)...(320): this location contains the signal peptide sequence, MLPTEVPQSHPGPSALLLLQLLLPPTSAFFPNIWSLLAAPGSITH, Run with SignalP
  misc_feature (185)...(796): similar to gi4529897 in the genepept database release 114, Run with FASTXY 3.3t00, default parameters
tttcgtgctttgggcaggcaggagcgaaagggccaggggttgcctgtcctcccccaccctgttgaggccttcctccccctctgctgagcctcggttaattataactctgacctaagtgccctgtgacgtcaagcccgggccagccctgcccaggagacccagcaaccaggtccatgtctcagccatgctccccacggaggtcccccaatcccacccgggcccctcagcgttgcttctgctgcagctgttgctgccccccacatctgccttcttccccaacatctggagcctgctggctgcccctggctccatcacccaccaagacctaactgaggaggcagcgctcaacgtcaccctgcagctcttcctggagcagccacccccaggccgcccccctcttcgtcttgaggacttcctgggtcgaacactccttgctgatgacctctttgccgcctactttggacctggttcttctcggcggttccgagcagccttaggtgaggtgtctcgtgccaatgcagcccaggacttcctgccaacttccaggaatgaccccgacctgcactttgatgctgagcgactgggtcagggacgcgcgcgcctggtaggggctctgcgggagaccgtggtggcagccagggcccttgaccacaccctggctcgccagcgcctcggggctgcacttcatgccctgcaggatttctacagtcatagcaactgggtggagctgggcgagcagcagccacaccctcacctcctctggccaaggcaggagctccagaacctggcacaag

SEQ ID NO: 83027 - DNA, 796 bp, Homo sapiens
  sig_peptide (431)...(566): this location contains the signal peptide sequence, MLCLCRFACSRRFTAMGLFCLASLTLHHIFKVHPSCSVSVPPGFS, Run with SignalP
  misc_feature (150)...(20): similar to gi1710216 in the genepept database release 114, Run with FASTXY 3.3t00, default parameters
atccctgtggtgtaattccccagctactcgggagactgaggcagaagaattgtttgaacccgggaagcggagattgcagtgagctgaggtcgcaccattgcactccagcctgggtgacagggagagggactctgtctcaaaaaaaaactgaggtcagggagggtgagatgacggtgagagctcggacttgaacgcaggtcccacccagaacagcagccctaactctgagcaaggtctgtgctgttcagtagctctattgagatgtgatttccacactgtgtaattcattcacttacggtgtacagtccagtgggtcttagcatgctcggtgttgacagtcacatcgtcttcacccccaaaaggaaaccccgtgcccatgagcagtcgctttgtctgcccctcgtccccagccccaggcaaccacaaatccatgctctgtctctgtagatttgcctgttccagacgtttcacagcaatgggccttttctgcctggcttctttaacgttgcatcacatcttcaaggtccatcccagctgcagcgtgtcagtgcctcctggcttttcactgctgagtagtgcccgttgcatggacagaccacgttgtgctcacctgtttgccctaatgggcccctgcttggggctttccacctttgggaggctgtgaattgtgctccagccacacttttgacccccgcccggtttccagaagatgaccaggattggtcactttcttcacccacccaaggacttttggtgggcctgccgcaatccgccccatccttggtggcttgaggcc

SEQ ID NO: 83028 - DNA, 696 bp, Homo sapiens
  sig_peptide (164)...(299): this location contains the signal peptide sequence, MSEAGGRGCGSPVPQRARWRLVAATAAFCLVSATSVWTAGAEPMS, Run with SignalP
  misc_feature (305)...(698): similar to gi3881448 in the genepept database release 114, Run with FASTXY 3.3t00, default parameters
ccggcttggtggcttcgggaaacagtttggcgccggcggccgtccgtgttactccgcatcccgccccgtctcggcacggctagcagccccctggccaccagcgtccagcaatgtgtctcaccggccgggcgtagcagctgcgcgtgcgcggaaccgcggggccatgagcgaagccggcggccggggctgtgggtccccggttccccagcgagcgcgatggagactagtggcggcgacggccgcgttctgcctggtgtcggccacctccgtgtggacggcgggggccgagcccatgagtagggaggagaaacagaagcttgggaatcaagtactggaaatgtttgatcatgcttatggtaactatatggaacatgcttaccctgctgatgaactcatgcctttaacctgtagaggtcgagttagaggccaagagccaagtcgcggtgacgttgatgatgccttgggaaaattttctctgacactgattgattctttggacactcttgtggtaggtttgactcttcttggatttattttattcatgatatgcacacttaagtattatgaatatgatcataacacagttttaaataaaactaaagaatttgaagatgcagtgagaaaagttttaagagatgttaatttagataacgatgtagtcgtatcagtctttgaaacaaacatcagagttcttgg

SEQ ID NO: 83029 - DNA, 389 bp, Homo sapiens
  sig_peptide (44)...(179): this location contains the signal peptide sequence, MYRPDVVRARKRVCWEPWVIGLVIFISLIVLAVCIGLTVHYGRYN, Run with SignalP
  misc_feature (44)...(388): similar to gi3184184 in the genepept database release 114, Run with FASTXY 3.3t00, default parameters
agacctcgaccttcacaggactcttcattgctggttggcaatgatgtatcggccagatgtggtgagggctaggaaaagagtttgttgggaaccctgggttatcggcctcgtcatcttcatatccctgattgtcctggcagtgtgcattggactcactgttcattatgggagatataatcaaaagaagacctacaattactatagcacattgtcatttacaactgacaaactatatgctgagtttggcagagaggcttctaacaattttacagaaatgagccagagacttgaatcaatggtgaaaaatgcattttataaatctccattaagggaagaattcgtcaagtctcaggttatcaagttcagtctacagaagcatggagtgttgg

SEQ ID NO: 83030 - DNA, 721 bp, Homo sapiens
  sig_peptide (274)...(409): this location contains the signal peptide sequence, MLVTLGLLTSFFSFLYMVAPSIRKFFAGGVCRTNVQLPGKVVVIT, Run with SignalP
  misc_feature (265)...(722): similar to gi4929633 in the genepept database release 114, Run with FASTXY 3.3t00, default parameters
gattacgcctagcttggcacgagggatcacttgactccatcccctccccaccaggactacatctcccagcaggctgtgctctgacagctcttggatttaaataggattctgggctctgctcagagtcaggctgctgctcagcacccaggacggagaggagcagagaagcagcagaagcagccaagagctggagccagaccaggaacctgagccagagctggggttgaagctggagcagcagcaaaagcaacagcagctacagaagttggaacgatgctggtcaccttgggactgctcacctccttcttctcgttcctgtatatggtagctccatccatcaggaagttctttgctggtggagtgtgtagaacaaatgtgcagcttcctggcaaggtagtggtgatcactggcgccaacacgggcattggcaaggagacggccagagagctcgctagccgaggagcccgagtctatattgcctgcagagatgtactgaagggggagtctgctgccagtgaaatccgagtggatacaaagaactcccaggtgctggtgcggaaattggacctatccgacaccaaatctatccgagcctttgctgagggctttctggcagaggaaaagcagctccatattctgatcaacaatgcgggagtaatgatgtgtccatattccaagacagctgatggctttgaaacccacctgggagtcaaccacctgg

SEQ ID NO: 83031 - DNA, 790 bp, Homo sapiens
  misc_feature (1)...(790): n = a,t,c or g
  sig_peptide (296)...(431): this location contains the signal peptide sequence, MSHVIWFLLFNTHLSWAVEGREHFQKGKSGEKILDIFLKQLEGCG, Run with SignalP
  misc_feature (158)...(73): similar to gi4127806 in the genepept database release 114, Run with FASTXY 3.3t00, default parameters
agtaacccctttctggttggttaagtagcattgttaatctccatagtcaagtggtttaccatcttaactgccagcatgtgttaatgatgatttctgaggtttgtgctgaaagcaggaggatttcaataggagggactcccagggcctcgtatgttccctttactgccgtcctctctgctgtcacagcctgaaatgtgtaaattgtcgttctgtcttggaataacgttgtacttgcctgtaacttgcaaaaaaatttcaaaagtgtaaatgtggaatggctacctttgtcagatagatgtcacacgtaatatggttccttctgtttaacacacatttgtcttgggctgtagaaggcagagagcattttcaaaagggaaaaagtggtgaaaaaatccttgacattttcctcaagcagctagaaggttgtggagattttaagggcctttcatgtacttcacaaccggtttgttaaatcttatggcatagttttcccccaaaagaacacaacctgtgagaattggaaagctgtaaacataattgatctggcgaggggtttttactttctgaaatttttaagggggataagggccctctcttttttccctatggcaaggggtgataattattttttttcgtggggggacggcacgcagcccccccccccgcgagggggggacgtctttctcttttttctcttacaggntttcacccttcaacgaagagttcgacaccgcctgttttttttcaagacttcagcaattttttgatttggaggagtactacaggatcg

SEQ ID NO: 83032 - DNA, 453 bp, Homo sapiens
  sig_peptide (180)...(315): this location contains the signal peptide sequence, MPLSFHSTYYLLTSLIIYTFNMCIDYKSHEDRDLAGVCVYCYFQS, Run with SignalP
  misc_feature (291)...(435): similar to gi845426 in the genepept database release 114, Run with FASTXY 3.3t00, default parameters
ggctgaaagcatagaatagtgtttgctcttccagttccctctgcttgagatgctcttttcctggatcctcttacttaatttaggtatccccttcagttctgctcaaatgactccttcttagtgatgccttctttaactacccttctaaagattgcaacactcctgcccctgtacttcagatgcccctttcctttcatagtacttattaccttctaacaagccttataatttacacatttaatatgtgcattgattataagtcccacgaagatagggatcttgcgggtgtgtgtgtgtactgctatttccaatcgggagcattggaaaggtgctgggtatatagtagcctctcaggaccttctcaggctgtgctactcataactaacatcccatgggtgaagggtcacattgctctatgtgatgccctctttagtaaaaatcctctgcctctgc

SEQ ID NO: 83033 - DNA, 511 bp, Homo sapiens
  sig_peptide (168)...(303): this location contains the signal peptide sequence, MESLLVAPQSRHLLGLMKVLLFPYMSSAILFQFLFHSSLNHSLVH, Run with SignalP
  misc_feature (399)...(8): similar to gi63165 in the genepept database release 114, Run with FASTXY 3.3t00, default parameters
gggttgactctctgttgggtcatttaccttgtcaacctgactattcattttaacatcaggacctggagtattttctaggtcactggagccttcacttttcccaggcatcctaggtgtgtcctcgcctggagctttttcaccttctttttcttcttggtcctctgttaatggaatcacttctggttgctccacaatcacggcatcttcttggtttgatgaaagttcttctgtttccatatatgagctctgcgattctgtttcaatttttatttcattcttcgctgaatcattctcttgtccatcgggatgatcttggtcacgcacagaatgatctgtcacttcaccgccttttgtaatattttcatcctttgcaaaatcttcatctttacagccttcaactgcctcttctgaagcagggccgggcacagtgacagtgttgacaccatctgcatcttggctctggcttttccatttcttccacacttttgtttttcttttggaccgttctcat

SEQ ID NO: 83034 - DNA, 716 bp, Homo sapiens
  sig_peptide (245)...(380): this location contains the signal peptide sequence, MMTLLRRQERFPGITFWLLIQLLQQILISYHQGSLTFMENGNCLL, Run with SignalP
  misc_feature (394)...(426): similar to gi3204406 in the genepept database release 114, Run with FASTXY 3.3t00, default parameters
ttttttttctaatcagaatacatttctttcttaatctttgggagtacataccaccatactgggggcaatggcggggagagcctttgtggaccagggaagctggggggggagttccatgctagctctataagccaggctctggggcagcatccaagacgctctgtattagatactgaccagtctcatgtgccactggtgaggaggaagacaacgtgcttttcccaaagggcgatgatctccccagatgatgacccttctcaggaggcaggagcgctttcccggaataaccttttggctccttattcagctgctgcagcagatactcattagttaccaccagggatctctgactttcatggagaatggcaactgtcttctccagctttttcagctgggcaagctcctggttcaggcaagccacctgcatggtcagctgttggtttttgtgcagaagatcatcataagtatgtgactgttgcccactcacaattgagatggcagcaccttcctccaactgttgaattttttctgacaaaatgaggttttcctccagcactctgaccagtttttgcttcaaactttccgagaaacttcttgttgaggaggagggggccggagccattccagtgcttatccacaagctccaggagctgtctgaggacagtggccacatgggggggtctggcagagatggggggactgtggtttccagccaa

SEQ ID NO: 83035 - DNA, 642 bp, Homo sapiens
  sig_peptide (259)...(394): this location contains the signal peptide sequence, MGSTKHWGEWLLNLKVAPAGVFGVAFLARVALVFYGVFQDRTLHV, Run with SignalP
  misc_feature (319)...(601): similar to gi3873807 in the genepept database release 114, Run with FASTXY 3.3t00, default parameters
tttcgtcggaagcgagaccgtccatccagaggaaggcaagtttttggctcgggcggctgagaagaccgcgcggggctggagacaggtagcagtacgggggcggggcttcatgccggatgtgatagtctgcagtcgtttcggttggcagcctggcgggtgggagatgcggcggccacctgctgcaaagaaccgaagggaaggttagaagtacgaaggcagtttggagctggggctaagcagctgtcgcacggtcagatcatgggctccaccaagcactggggcgaatggctcctgaacttgaaggtggctccagccggcgtctttggtgtggcctttctagccagagtcgccctggttttctatggcgtcttccaggaccggaccctgcacgtgaggtatacggacatcgactaccaggtcttcaccgacgccgcgcgcttcgtcacggaggggcgctcgccttacctgagagccacgtaccgttacaccccgctgctgggttggctcctcactcccaacatctacctcagcgagctctttggaaagtttctcttcatcagctgcgacctcctcaccgctttcctcttataccgcctgctgctgctgaaggggctggggcgccgccaggcttgtggctactgt

SEQ ID NO: 83036 - DNA, 2280 bp, Homo sapiens
  sig_peptide (153)...(288): this location contains the signal peptide sequence, MGALRPTLLPPSLPLLLLLMLGMGCWAREVLVPEGPLYRVAGTAV, Run with SignalP
  misc_feature (204)...(1866): similar to gi3766136 in the genepept database release 114, Run with FASTXY 3.3t00, default parameters
aggggattcggcagctccttttcagctcgctcggagcacccacgcctcgctgccccgcttgctgccctcaacctgggcatgcgccccccacccttccggccccccagaacccgcgccatcccccggagcctccccagagctggccgcgcaggatgggcgccctcaggcccacgctgctgccgccttcgctgccgctgctgctgctgctaatgctaggaatgggatgctgggcccgggaggtgctggtccccgaggggcccttgtaccgcgtggctggcacagctgtctccatctcctgcaatgtgaccggctatgagggccctgcccagcagaacttcgagtggttcctgtataggcccgaggccccagatactgcactgggcattgtcagtaccaaggatacccagttctcctatgctgtcttcaagtcccgagtggtggcgggtgaggtgcaggtgcagcgcctacaaggtgatgccgtggtgctcaagattgcccgcctgcaggcccaggatgccggcatttatgagtgccacaccccctccactgatacccgctacctgggcagctacagcggcaaggtggagctgagagttcttccagatgtcctccaggtgtctgctgcccccccagggccccgaggccgccaggccccaacctcacccccacgcatgacggtgcatgaggggcaggagctggcactgggctgcctggcgaggacaagcacacagaagcacacacacctggcagtgtcctttgggcgatctgtgcccgaggcaccagttgggcggtcaactctgcaggaagtggtgggaatccggtcagacttggccgtggaggctggagctccctatgctgagcgattggctgcaggggagcttcgtctgggcaaggaagggaccgatcggtaccgcatggtagtagggggtgcccaggcaggggacgcaggcacctaccactgcactgccgctgagtggattcaggatcctgatggcagctgggcccagattgcagagaaaagggccgtcctggcccacgtggatgtgcagacgctgtccagccagctggcagtgacagtggggcctggtgaacgtcggatcggcccaggggagcccttggaactgctgtgcaatgtgtcaggggcacttcccccagcaggccgtcatgctgcatactctgtaggttgggagatggcacctgcgggggcacctgggcccggccgcctggtagcccagctggacacagagggtgtgggcagcctgggccctggctatgagggccgacacattgccatggagaaggtggcatccagaacataccggctacggctagaggctgccaggcctggtgatgcgggcacctaccgctgcctcgccaaagcctatgttcgagggtctgggacccggcttcgtgaagcagccagtgcccgttcccggcctctccctgtacatgtgcgggaggaaggtgtggtgctggaggctgtggcatggctagcaggaggcacagtgtaccgcggggagactgcctccctgctgtgcaacatctctgtgcggggtggccccccaggactgcggctggccgccagctggtgggtggagcgaccagaggatggagagctcagctctgtccctgcccagctggtgggtggcgtaggccaggatggtgtggcagagctgggagtccggcctggaggaggccctgtcagcgtagagctggtggggccccgaagccatcggctgagactacacagcttggggcccgaggatgaaggcgtgtaccactgtgcccccagcgcctgggtgcagcatgccgactacagctggtaccaggcgggcagtgcccgctcagggcctgttacagtctacccctacatgcatgccctggacaccctatttgtgcctctgctggtgggtacaggggtggccctagtcactggtgccactgtccttggtaccatcacttgctgcttcatgaagaggcttcgaaaacggtgatcccttactccccaggtcttgcaggtgtcgactgtcttccggcccagctccaagccctcctctggttgcctggacaccctctccctctgtccactcttcctttaatttatttgacctcccactacccagaatgggagacgtgcctccccttccccactccttccctcccaagcccctccctctggccttctgttcttgatctcttagggatcctatagggaggccatttcctgtcctggaattagtttttctaaaatgtgaataaacttgttttataaaaaaaaaa

SEQ ID NO: 83037 - DNA, 555 bp, Homo sapiens
  sig_peptide (87)...(222): this location contains the signal peptide sequence, MEALTLWLLPWICQCVSVRADSIIHIGAIFEENAAKDDRVFQLAV, Run with SignalP
  misc_feature (87)...(558): similar to gi220418 in the genepept database release 114, Run with FASTXY 3.3t00, default parameters
tttcgtccgggaccagcgcctccccgcttcgcgctgccctcggcctcgccccgggcccgggtggatgagccgcgcgcccgggggacatggaagcgctgacgctgtggcttctcccctggatatgccagtgcgtgtcggtgcgggccgactccatcatccacatcggtgccatcttcgaggagaacgcggccaaggacgacagggtgttccagttggcggtatccgacctgagcctcaacgatgacatcctgcagagcgagaagatcacctactccatcaaggtcatcgaggccaacaacccattccaggctgtgcaggaagcctgtgacctcatgacccaggggattttggccttggtcacgtccactggctgtgcatctgccaatgccctgcagtccctcacggatgccatgcacatcccacacctctttgtccagcgcaacccgggagggtcgccacgcaccgcatgccacctgaaccccagccccgatggtgaggcctacacactggcttcgagaccacccgtccgcctcaatgatgtcatgctcaggctgg

SEQ ID NO: 83038 - DNA, 935 bp, Homo sapiens
  sig_peptide (217)...(352): this location contains the signal peptide sequence, MGDARWTESLSVAGCVWLCFCLCVILPAVGCEVICTLSCVVMGFY, Run with SignalP
  misc_feature (223)...(23): similar to gi2318003 in the genepept database release 114, Run with FASTXY 3.3t00, default parameters
tttcgtcccgcgctcagtgcgcaggcgtcagacgctcagggcctgcgagagtgagctgagtggtcccagggtctacccctggcaggagagagggtgggacccgccggccaggcaggtgcgggggaggagctggggccggtgcggggacccgccggaacctcggatttgcagaggaccctgtgtgtgccctcccaggcccttggggtgtgtgtgacaatgggagatgccaggtggactgagagtctttccgtggccgggtgtgtatggttgtgtttctgcctgtgtgtgattcttcctgctgtggggtgtgaggtgatttgtactttaagctgcgtagtaatgggattttataactgtgtagaatcgtctaacagagtaagacgattttacacagatctctattgtggtttgcttatgaagggtatctgtatgtatatctgcttttttgtggggggccgtaattgagtaactggggatctgtgttatataaaccgccttttctttgggcttgaatttcagggttctgtaagggggcccaagagcaaacgagcctgttgtgtatcgggggggaccgtacaactactatgggtcaaagtgattatgtcctttaacagggaggggaatgatctgggattgtattatcaatgtaatcctcgagcgtgtctcaggacctcagtttcgtttatgggctccaatgtcttggctagtgcggacaacgatcccaaaatgacgcggagtgcgtttcttttgcttctagtacggaagcatatccaaacgtctgtgcgtggcgatcactggaccttctacgtctgctcctcggctagttgagtgtgactactatctcgatttatttgtcgaacaagcaggcgctgatcaccgtacttttcctccctgctgctctattcttgcattgtacgttgattccacacccgtcc

SEQ ID NO: 83039 - DNA, 473 bp, Homo sapiens; identical to SEQ ID NO: 79782
  sig_peptide (102)...(237): this location contains the signal peptide sequence, MPWLLSAPKLVPAVANVRGLSGCMLCSQRRYSLQPVPERRIPNRY, Run with SignalP
  misc_feature (374)...(448): similar to gi4008582 in the genepept database release 114, Run with FASTXY 3.3t00, default parameters

SEQ ID NO: 83040 - DNA, 2744 bp, Homo sapiens
  sig_peptide (57)...(192): this location contains the signal peptide sequence, MQKASVLLFLAWVCFLFYAGIALFTSGFLLTRLELTNHSSCQEPP, Run with SignalP
  misc_feature (57)...(2747): similar to gi2984587 in the genepept database release 114, Run with FASTXY 3.3t00, default parameters
gcggcgccgtcggctgggcccggattcccctgcggcttcgatccctttccactgggatgcagaaagcctcagtgttgctcttcctggcctgggtctgcttcctcttctacgctggcattgccctcttcaccagtggcttcctgctcacccgtttggagctcaccaaccatagcagctgccaagagcccccaggccctgggtccctgccatgggggagccaagggaaacctggggcctgctggatggcttcccgattttcgcgggttgtgttggtgctgatagatgctctgcgatttgacttcgcccagccccagcattcacacgtgcctagagagcctcctgtctccctacccttcctgggcaaactaagctccttgcagaggatcctggagattcagccccaccatgcccggctctaccgatctcaggttgaccctcctaccaccaccatgcagcgcctcaaggccctcaccactggctcactgcctacctttattgatgctggtagtaacttcgccagccacgccatagtggaagacaatctcattaagcagctcaccagtgcaggaaggcgtgtagtcttcatgggagatgatacctggaaagaccttttccctggtgctttctccaaagctttcttcttcccatccttcaatgtcagagacctagacacagtggacaatggcatcctggaacacctctaccccaccatggacagtggtgaatgggacgtgctgattgctcacttcctgggtgtggaccactgtggccacaagcatggccctcaccaccctgaaatggccaagaaacttagccagatggaccaggtgatccagggacttgtggagcgtctggagaatgacacactgctggtagtggctggggaccatgggatgaccacaaatggagaccatggaggggacagtgagctggaggtctcagctgctctctttctgtatagccccacagcagtcttccccagcaccccaccagaggagccagaggtgattcctcaagttagccttgtgcccacgctggccctgctgctgggcctgcccatcccatttgggaatatcggggaagtgatggctgagctattctcagggggtgaggactcccagccccactcctctgctttagcccaagcctcagctctccatctcaatgctcagcaggtgtcccgattttttcatacctactcagctgctactcaggaccttcaagctaaggagcttcatcagctgcagaacctcttctccaaggcctctgctgactaccagtggcttctccagagccccaagggggctgaggcgacactgccgactgtgattgctgagctgcagcagttcctgcggggagctcgggccatgtgcatcgagtcttgggctcgtttctctctggtccgcatggcggggggtactgctctcttggctgcttcctgctttatctgcctgctggcatctcagtgggcaatatccccaggctttccattctgccctctactcctgacacctgtggcctggggcctggttggggccatagcgtatgctggactcctgggaactattgagctgaagctagatctagtgcttctaggggctgtggctgcagtgagctcattcctcccttttctgtggaaagcctgggctggctgggggtccaagaggcccctggcaaccctgtttcccatccctgggcccgtcctgttactcctgctgtttcgcttggctgtgttcttctctgatagttttgttgtagctgaggccagggccacccccttccttttgggctcattcatcctgctcctggttgtccagcttcactgggagggccagctgcttccacctaagctactcacaatgccccgccttggcacttcagccacaacaaaccccccacggcacaatggtgcatatgccctgaggcttggaattgggttgcttttatgtacaaggctagctgggctttttcatcgttgccctgaagagacacctgtttgccactcctctccctggctgagtcctctggcatccatggtgggtggtcgagccaagaatttgtggtatggagcttgtgtggcggcgctggtggccctgttagctgccgtgcgcttgtggcttcgccgctatggtaatctcaagagccccgagccacccatgctctttgtgcgctggggactgcccctaatggcattgggtactgctgcctactgggcattggcgtcgggggcagatgaggctcccccccgtctccgggtcctggtctctggggcatccatggtgctgcctcgggctgtagcagggctggctgcttcagggctcgcgctgctgctctggaagcctgtgacagtgctggtgaaggctggggcaggcgctccaaggaccaggactgtcctcactcccttctcaggcccccccacttctcaagctgacttggattatgtggtccctcaaatctaccgacacatgcaggaggagttccggggccggttagagaggaccaaatctcagggtcccctgactgtggctgcttatcagttggggagtgtctactcagctgctatggtcacagccctcaccctgttggccttcccacttctgctgttgcatgcggagcgcatcagccttgtgttcctgcttctgtttctgcagagcttccttctcctacatctgcttgctgctgggatacccgtcaccacccctggtaaatatctcagctctgattcacttaaagacaatagtgat

SEQ ID NO: 83041 - DNA, 920 bp, Homo sapiens
  sig_peptide (387)...(522): this location contains the signal peptide sequence, MWACWCVLGTPGVAMVLLHTTISFCVAQFRSQLLTWLCSLLLLST, Run with SignalP
  misc_feature (240)...(779): similar to gi4826524 in the genepept database release 114, Run with FASTXY 3.3t00, default parameters
ccgagcagcatcatcgttccaattataccccgttggagcatcggcagatcttccactcttggacaacgcaatcaaaatcttcgtacccattttgcagtagtgatctctaaactctcagcgtaggcatcgggaaccttcgtgccaaggagccatgctgccccgatgggaactggcactttacctacttgcctcactaggcttccacttctattccttctatgaagtttacaaagtctccagaggatgcgaccgactttgagtggagcttctggatggaatgggggaagcagtggctggtgtggcttctccttggccacatggtagtgtctcaaatggccacactgctggcaagaaagcacagaccctggattctcatgctctatgggatgtgggcctgctggtgtgtgctggggacccctggtgtggctatggttttgctccataccaccatctctttctgcgtggcccagttccggtctcagctcctgacgtggctctgttctctcctcctcctctccacactgaggctgcagggtgtggaagaagttaagagaaggtggtacaagacagaaaacgagtactacctgctgcagttcacgctgaccgttcgctgcctgtactacaccagcttcagcctggagctctgctggcagcagctgcctgctgcatcgacctcctactcctttccctggatgctggcctatgtcttttattatccagtcttacacaatgggcccatcctcagcttctcggagttcatcaaacagagaagccagtggtcaaatagggaatttggcatggaggttgagagcaaaggtcctggagcccaccctccagggtttgaatccctgctgtgcttcggcttgagagtgcttgctgagttacttaccttacttatgcctcagtcttcttatcagtga

SEQ ID NO: 83042 - DNA, 642 bp, Homo sapiens
  misc_feature (1)...(642): n = a,t,c or g
  sig_peptide (28)...(163): this location contains the signal peptide sequence, MHLVHLVLLMPGLAAGKEGSPNPFIVHRRGDKLRKSNQGKAGHKA, Run with SignalP
  misc_feature (93)...(15): similar to gi536216 in the genepept database release 114, Run with FASTXY 3.3t00, default parameters
gtccggacagtgtcccaggacagttgtatgcacctggtccatcttgtgcttctgatgcctggccttgctgctgggaaggagggtagcccgaacccctttatcgtgcaccgaaggggagacaaattgaggaagtccaaccaagggaaggcaggtcataaagccaggaactgaacccttggtgacagttagaattaatttgaaaacatacttagggatgctaccttccctttgttcttagaaatttctgctgcaaagtgtgacagctataagcccattcatataaccttcttctaaggcatggaagtggtgcggcaagtggagaagcctcaatgtccaccatatatgtgaatgccaacaacaacggtgatgaccagaacacccccatcccacaattggtcagcaagcatcctctgccaggcacaaagctaagtactgtccagccagtatgtcctgggttgctcanaacaaccccactttatagctgagataaattaagtgacttgtccaaggttatactgctaggaagagctaaagctgggattccagccagggctgcctgcctttaaaacctgtgctctaactcgccaccagtgctgccctgtttgctgccctctgacagaaaaaaagagatttttcaaccca

SEQ ID NO: 83043 - DNA, 531 bp, Homo sapiens
  sig_peptide (120)...(255): this location contains the signal peptide sequence, MVAPGLVLGLVLPLILWADRSAGIGFRFASYINNDMVLQKEPAGA, Run with SignalP
  misc_feature (120)...(534): similar to gi1668766 in the genepept database release 114, Run with FASTXY 3.3t00, default parameters
tttcgtcgggaggctgcgaggactgcaaaagggtggagtctgcctcgcccccgcccaggccccgcccctgccgggaacccactttcccagtcctaggcggcggtcagatccttgcaagcatggtcgcgccggggcttgtactcgggctggtgctgccattaatcctgtgggccgacagaagtgcaggtattggttttcgctttgcttcatacatcaataatgatatggtgctgcagaaggagcctgctggggcagtgatatggggcttcggtacacctggagccacagtgaccgtgaccctgcgccaaggtcaggaaaccatcatgaagaaagtgaccagtgtgaaagctcactctgatacgtggatggtggtactggatcctatgaagcctggaggacctttcgaagtgatggcacaacagactttggagaaaataaacttcaccctgagagttcatgacgtcctgtttggagatgtctggctctgtagtgggcagagtaacatgcaaatgactgtgttacaaatattta

SEQ ID NO: 83044 - DNA, 1072 bp, Homo sapiens
  sig_peptide (480)...(615): this location contains the signal peptide sequence, MKVFFLDESWPQWRFAAGLLALSFGGPAWKFLSVQRVIPWLWAAK, Run with SignalP
  misc_feature (149)...(7): similar to gi552415 in the genepept database release 114, Run with FASTXY 3.3t00, default parameters
cacacacgtgtgttggtgtgtgtacacaagtgctgatggtgaaaacagtgacacacacacctgtgtaggcatgcacacacctgccttgatgtgtgacgacgtgatgatgtgtatgcagacacctgtgttgatgtgtgcctacatatgttgacacaggcacacatggtgtgtctgtacatgcaaatggacacacatgaacacacgtgtttatgcatgtccttgtgtgttgatgtgtctgcacatacatgttgatgtgtcccgctgtggttggcctttctggggccaggcccagcacctggggtttccaggaaacattccctgtcccttcccggaatggccggtacttgctgtgcctccgccgggagatgcaccctgattaactagaacgtggcgaagctcagccacctggaatcgccttaccctggcctttggtttctagcaaatgggatggaagtgagtccccatggagggcttgctccatgaaagtgtttttcctggatgagtcttggccccagtggcgatttgctgcaggcttgttggcactgtcattcgggggtcctgcatggaagttccttagtgtccagagggtgattccatggctgtgggcagcaaaagagaagcccctggggccattagccacacccccaaggctgaacccaaaagttggggtataaacttttgccctgtgagattatgtgatgaaatttttgttcctgttttttgttggcgagctgcggcattacaacatctcaaccactaatgtggggatataagccttatgctgcccggcaacatatccgctgcattaaaaatcctttattaacttttcactatctgttgttaaaacctttattctgtcccttggagcacgtgcgagggttccgcattagcggtcggagcctagattatcctcacgcgtctgtggccggggtgtatcggcgttttgttttcaaggcagtctctaccttctacattaatcgtcttgtgtatcgttttctcacgcgatccgatgtgatgatcctaattcagtagcgccgcgcaggactccacgggggtgagagctagttacttt

SEQ ID NO: 83045 - DNA, 391 bp, Homo sapiens
  sig_peptide (210)...(345): this location contains the signal peptide sequence, MGSKITVLSVIFKLITGLVVNILLLQNENSISSEVVLWSFRHFIA, Run with SignalP
  misc_feature (237)...(385): similar to gi2353220 in the genepept database release 114, Run with FASTXY 3.3t00, default parameters
cggacgcgtgggcggacgcgtggtgagaatagttatgtttgtattttcttttaacttgtgcagtagagggtggcatacaaatgttgtattctcagtatttcaaaaaattaccttcttactgtacaagttgtattcagcatataaagtctattccagctttgttgtagatgcagtgtgattattacatgccgataaggtatgaattggagatgggatccaaaattactgtacttagtgtaatttttaagctaattacagggttggtggtgaatattttacttctgcaaaatgaaaacagcatttcatcagaagttgttttatggtctttcagacattttattgcatatctttggtgctttttgcccatgaagaatctcttttgtgggttggg

SEQ ID NO: 83046 - DNA, 1271 bp, Homo sapiens
  sig_peptide (1099)...(964): this location contains the signal peptide sequence, MFHCYWFRCLSPQTLLCKCFSKGRTDWNCGSARSHSFQSHFFSAA, Run with SignalP
  misc_feature (466)...(966): similar to gi3158469 in the genepept database release 114, Run with FASTXY 3.3t00, default parameters
catctttggacttcctggctgatttataaatttagtatccagttcctcatatgctgcatttttttgtacagttcctgagtagtctcacttttgagagtatctattaagtgcataccagggaatgtttaatccctctgtctcaactgtcagctgttttgttgactaaggcctttgtataaactatgcttcatgttacacaacaggtttgacattctgttgtctctccactcttgtacttcacagaaaacccgcctagtgccaagcaaccctccaagatgctagttatcaaaaaagtttccaaagaggatcctgctgctgccttctctgctgcattcacctcaccaggatctcaccatgcaaatgggaacaaattgtcatccgtggttccaagtgtctataaggaacctggttcctaagcctgtaccacctccttccaagcctaatgcatggaaagctaacaggatggagcacaagtcaggatccctttcctctagccgggagtctgcttttaccagtccaatctctgttaccaaaccagtggtactggctagtggtgcagctctgagttctcccaaagagagtccctccagcaccacccctccaattgagatcagctcctctcgtctgaccaagttgacccgccgaaccaccgacaggaagagtgagttcctgaaaactctgaaggatgaccggaatggagacttctcagagaatagagactgtgacaagctggaagatttggaggacaacagcacacctgaaccaaaggaaaatggggaggaaggctgtcatcaaaatggtcttgccctccctgtagtggaagaaggggaggttctctcacactctctagaagcagagcacaggttattgaaagctatgggttggcaggaatatcctgaaaatgatgagaattgccttcccctcacagaggatgagctcaaagagttccacatgaagacagagcagctgagaagaaatggctttggaaagaatggcttcttgcagagccgcagttccagtctgttctccccttggagaagcacttgcaaagcagagtttgaggactcagacaccgaaaccagtagcagtgaaacatcagatgacgatgcctggaagtaggcatataaatgctcacagttaaatctgacccagtaaactctgtgtgtttagggagtatacaaaagaaatcgttcttgttccttttcttatgttggttgaatagttcgagttcacaagggagatgagcatgtgccaaagagagaaaaaaagtc

SEQ ID NO: 83047 - DNA, 413 bp, Homo sapiens
  sig_peptide (110)...(245): this location contains the signal peptide sequence, MRRARLELSAASWCLLFLLSCLSSVYCNPVLLAGPAESYFFSLAF, Run with SignalP
  misc_feature (193)...(375): similar to gi1418241 in the genepept database release 114, Run with FASTXY 3.3t00, default parameters
taggagatccttagcggactgggattttaatggtctcactgtgtttatctctttgtaaaggccagccctcacctgacttgtctggttccctcctggggctaggggatggatgagaagggctaggctggagctgtcagcagcttcttggtgcctgctgtttctcttgtcttgtctgtcttcggtgtattgcaatcctgtcctcttagcaggccccgcagagtcatactttttctccctggccttccagctccctctcttccacccagtatgcccacctccctctcccttgactaccccagcctctgcccaatcacgccctgccctctacccttcagaggacaccttgccgtctgtggagctggagctattcctatggtctctctgggtccacatgaccttacatggcactcctc

SEQ ID NO: 83048 - DNA, 400 bp, Homo sapiens
  sig_peptide (188)...(53): this location contains the signal peptide sequence, MVVRRHQLTCFLYRLNLLRSGHPLLLAVSVGSPFHISKGGIFWGH, Run with SignalP
  misc_feature (124)...(329): similar to gi5832897 in the genepept database release 114, Run with FASTXY 3.3t00, default parameters
agttatcaataagggagcttgacgggagcattctgtattagaaaatagcgagtgaccccaaaagatcccccctttagaaatgtgaaatggagatcccacagaaacagcgagaagtaatgggtgtccacttctgaggaggttgagcctatacaggaaacaggtcagctggtgcctcctaacaaccatgagccagtgctccagcttctcatgaaacctgctgtgtgtgcacagtggtcatggacgctctggaaccaagagtgcttgagtgctgacataggtcccatgttaccgtgtcctgtaaacccagcataccccctccccacattcatgtatccaggacatatatttgcaacctgaaaaacataactaagatataatttctaaagattcctatgtatcc

SEQ ID NO: 83049 - DNA, 398 bp, Homo sapiens
  sig_peptide (25)...(160): this location contains the signal peptide sequence, MLLVLLSEVLLALSSAQSTDNERPGCAVKDAVENARLNQGSPAMK, Run with SignalP
  misc_feature (25)...(93): similar to gi1050983 in the genepept database release 114, Run with FASTXY 3.3t00, default parameters
agcaactccagagccttcttcaagatgctgctggtcctgctctcagaggtccttctggctctgagctcagctcagagcacagataatgaaagacctggctgtgctgtgaaggatgcagtggagaatgcaagactgaaccagggaagtccagctatgaagatgctacagtaatctcagtggacagcgatgatggtgtccttgctgtacaggggatgcagaatcaatgaaagagataaacaaacatcagagtactgtcagacatagaggactggataatacatttgtgtctttctacatagggggatagaaatatcaggtccccaaactcccatttttcttccaatcacatttaaaatttcaatatgctgccggcagtatgtgtaagaatatatccaaag

SEQ ID NO: 83050 - DNA, 373 bp, Homo sapiens
  sig_peptide (67)...(202): this location contains the signal peptide sequence, MLLPSIIFYFIYLKSSRRWWPVCAGKNTTSELKSRRPFHPRCHCS, Run with SignalP
  misc_feature (218)...(372): similar to gi5105731 in the genepept database release 114, Run with FASTXY 3.3t00, default parameters
tcatgctcagggctggtgtgtgagctaaagaagtaacccagtcatatttcagaattttcaccaaaaatgttattacccagcattattttttatttcatttacctgaaaagctccagacgatggtggcctgtttgtgcaggaaaaaatacaacttcagagctgaaaagcagacgcccgtttcacccgcgctgtcactgctcgctgccccgtgagccagcctgggttctgggtggcaccagcggcagtggctctgcctttgggagcctggggacggtgctggctgcatggagcgcgggcctctgcggctgccactcctccaacagccttcaacacgcagcagctcacaccagcccctggctcccaggccccctag

SEQ ID NO: 83051 - DNA, 668 bp, Homo sapiens
  misc_feature (1)...(668): n = a,t,c or g
  sig_peptide (318)...(453): this location contains the signal peptide sequence, MCLATPRAPSPGRSWGLCALLKLFLCLNEVFPQRMGQNLLPEHKL, Run with SignalP
  misc_feature (162)...(10): similar to gi4049785 in the genepept database release 114, Run with FASTXY 3.3t00, default parameters
cacttttttcaatacgtaaacatatatcgcaataatatataaacgtaagattggataaacatatataacaacaacaatatataaacataagattggatgataaaaattttaattactttgtaatgataaaagtctgtagaggaaaccatgattatgttaaaaggatgttggttgtgcataacaggggcaagttgaaatttgtcttactaatccaaggtttacaggtaagcttattgagtgttactcctaagacatgacaagtgataattattctttgggccttttgcgaagtaaaataatgcatgaacatagagtttatgtgtttggcaacaccgcgagccccttctccaggacggagctggggcctctgtgcccttttgaagttgttcctttgcctcaatgaagtgttcccacagagaatgggacagaacctgctccctgagcacaagctgagggaggtgaattaaagtgcatttgcattcatgaggaaggatctgctcatccaggtgctctgtcctgtcgccgttagacgctccttggtccctcaaagagatgtcactctcacggccactgcattgcaccacctgtgagatacctttggaattgtggaaagttcagctagaaagttgtttctttttaattagatnnnttttctggtcccanccctt

SEQ ID NO: 83052 - DNA, 1017 bp, Homo sapiens
  sig_peptide (689)...(824): this location contains the signal peptide sequence, MMHNIIVKELIVTFFLGITVVQMLISVTGLKGVEAQNGSESEVFV, Run with SignalP
  misc_feature (528)...(390): similar to gi5689485 in the genepept database release 114, Run with FASTXY 3.3t00, default parameters
ttttttttttttggagtttttcagaacaaatgtttatttaataattaagggcaaacaaaaacattaaagcataggaattcatcaactgaatacaagttgtcttgtttggtctgaaatcttgaaaaagttaatctaactacttacctgaggtaaatttaggttggcactgcttcaagggaacctccgtccatcccaaaagttaccttttaattttggttacaggctcccaagtggtcctctccaacctcaggttatgctatatgaataataccaacacctttttctcccatggttaaaagccttcagccttgtttcatacccccatagttctcttataatgtggtgattgcaatcctttccctgggattaaaaggtattttctctttccttggcagaacttcattaaagacgtcctgtttagtctgtcacagatgtcaatcaggcatcttctccccagcaagagagtgaccacttccacatggccatgggcacaggccaaatgtagaacagtcgacggaagctcggttggggtttctgcagaagtttcccccttgggcggtggcggagctgataagcgcgctagtagcagctctggcagaagcaacggtggcttcgagggatggcggcggctgcaacaggacctgcagcatcccagaggaactgactaagactttggaacagaaaccagatgatgcacaatattatcgtcaaagagcttattgtcacattcttcttgggaattactgtggtgcagatgctaatttcagtgactggattaaaaggtgtcgaagctcagaatggctcggaatctgaggtgtttgtggggaagtatgagaccctcgtgttttactggccctcgctgctgtgccttgccttcctgctgggccgcttcctgcatatgtttgtcaaggctctgagggtgcacctcggctgggagctccaggtggaagaaaaatctgtcctggaagtgcaccagggagagcacgtcaagcagctcctgaggataccccgccctca

SEQ ID NO: 83053 - DNA, 747 bp, Homo sapiens
  misc_feature (1)...(747): n = a,t,c or g
  sig_peptide (127)...(262): this location contains the signal peptide sequence, MALFALCGWTGWMLGHQCHRAVIERTHELCNQTYWFESWICHIMS, Run with SignalP
  misc_feature (112)...(286): similar to gi1613900 in the genepept database release 114, Run with FASTXY 3.3t00, default parameters
tgggttgtctccacctttttgaaaattacatccatttttgagtggaaaatgatcttcctttagtggcttctacagttgccaacagcagtttccctctactgctttaaaggtagggatctgggcttaatggctttgtttgcgttgtgtggatggacaggttggatgcttggtcatcaatgtcacagagcagtcatagagaggactcatgagctttgtaatcagacgtactggtttgaatcatggatctgccacataatgagcttacataacttcaggaagcacgtttcctcgctggtaaagtgggaactaccttgcctgtgtccttagagtcagagctatgctagaaactacgtggccttggggcaactcaaccaatgcagagggacctcaaggctataaaaataaataagtaaataaattttaaaaagtcaaaattattttttaaaaagtactctcacgcccgtaatcccagtactttgcgaggctgaatccaggcagatcgcttgaaccccgnagtttgagaccaacctgggcaacatatggagactctgtctctacacaacatgcaaaaaattagctgtgggntgtggggggtgactgtttttccccattccttagagaatcttgccacctttaactttttaagggggggagggattaaaggggggggcgtccccacggcccggggtggagtttatttttttttttgggaaggaggggggtttttcctccttttggccccccccg

SEQ ID NO: 83054 - DNA, 397 bp, Homo sapiens
  sig_peptide (377)...(242): this location contains the signal peptide sequence, MALHTQLSLCEHLLALVTHMVPLVGATLFATQQEFVFHGLSHAFV, Run with SignalP
  misc_feature (338)...(369): similar to gi250170 in the genepept database release 114, Run with FASTXY 3.3t00, default parameters
gtcctgaacacaaggcacaagacacaacacgggaggacctttcatctcatgtctcttacagccagggactgaaggtgtaggacagtaggagaaaatagagtttcacataaaacaccccaaggacatcaaagaaggctagctgccaagaggtaggaagaactagattcttagggacttatccttggggattgataccacccctgccaggcatccacctttggggtgactcagagccaagaaaacaaaggcatgggataagccatggaaaacaaattcctgctgagtagcaaagagagtggcaccaacaagtggcaccatgtgagtgacaagagcaagcaaatgctcacacagggacagctgggtgtgcagggccatcacagctcccacaaccccaaag

SEQ ID NO: 83055 - DNA, 738 bp, Homo sapiens
  sig_peptide (172)...(307): this location contains the signal peptide sequence, MEVSLWNLHVVLCPQPPSCLFWVLGSKLFEDDLMCPHWPCLLECH, Run with SignalP
  misc_feature (103)...(1): similar to gi166459 in the genepept database release 114, Run with FASTXY 3.3t00, default parameters
accagatgcagtattgtaattgtttatcatgttttcactgagcagtgaggagctgtttctgaacattccttgtgaaaacagagaataatcacctgatctagtccactataaaaaattctttgtacctctcctccttttgtcttccctaggcacactcacaaacgtgtttggatggaggtttccctttggaaccttcacgtggtgttgtgtcctcagccaccctcctgtcttttctgggtcctgggttcaaaactgtttgaggatgacctaatgtgcccacactggccctgtctcttggagtgtcataaatagtgaatgtcagctgttgggtcctcttctcccagaagacaaggtgaggtttaggggtggagcctctcataggagcagctggatggcatgaatcccctgggaccgagaggagtctcctgggatactcttctatactcttcctctaaaaagctaatccactgggacttagatttttttttttctcttacccccgttatcactccttagagacaaaaggctgggcaagccgctcggtaactggaattgaggaaaaaaagagattcttgcctttggattgccccatgcttgcgaagggaaaacagctattcccaaaaaccaggaaaccccgccccgccctgagggtggaaacccgcaaaggcaaaagccttttgggggcccccggggggaccccggggcgaggttttttggggggggggggccccccccccc

SEQ ID NO: 83056 - DNA, 440 bp, Homo sapiens
  sig_peptide (415)...(280): this location contains the signal peptide sequence, MRWVKRDEELTRSHSFTQLLPFLLLASRLGFLLFVSGCTFAVTNS, Run with SignalP
  misc_feature (394)...(435): similar to gi699304 in the genepept database release 114, Run with FASTXY 3.3t00, default parameters
actatgatgccatctaccaagacagcaaacatcagagaggaacagctctacaggagggcagttgtccttggatgtgtgaacctgaggtccttgtgaatcatcccaagcagctggacacacagggcctcagcacagaagagaaggtggccctacacagctgatctctggggtttaccacctgatcctgggaaccacagttcctcaggggaatacggcagacagacggcccaaactgagtcctgagtaacatttaaaaactgacaagatgatggagaacccatagagtttgtaactgcaaaggtacagccagacacaaagagaaggaacccaagcctggaagccaagagaagaaaaggcagcagttgcgtaaaactgtgtgaccttgtaagttcttcatctctcttaacccacctcatgctcgtgccgaattcttggcacga

SEQ ID NO: 83057 - DNA, 827 bp, Homo sapiens
  sig_peptide (316)...(451): this location contains the signal peptide sequence, MTNTLCGTQILLTLTETHMVSAVTAPPMPAPTVALSHIEIWGVRW, Run with SignalP
  misc_feature (111)...(13): similar to gi553488 in the genepept database release 114, Run with FASTXY 3.3t00, default parameters
cagagccaggtgaaggctctctgtgggggcggacttaggtaaagggggccaggccaaagtgagaaccaaagtggggtgcgtggtgcaagagtggagtcagcaggctcgggcatccatggcttgtcctaagtctcgagctcaggtccctgtgttgcccacaaccagcactcagactgatagctgtcgggttaatctcatcaactgaagaggcccagaccccaactgactgaaggagaggagccgcttcctcccctgacaagcccttacggttctgcaggggttgaggctggtgatcgcccagaacacaagcacacaatgacaaacacactctgtggcacacagattttgctcacactcacagagactcacatggtctctgcagtcacagccccaccgatgccagccccaacagtggctctcagtcacatcgagatctggggggtcagatgggccccctcattctgggtcctgaacccagcccctcttcttaattgcgatagcctgaaagagcctctctttgcccctcatcatccaccatggagcctgtcgctttctactgtaccccaccctgctacccacatcctcacactgaggcccgagggtggaggcaggaaaatgaccacagtcattctcatcccagtccaggctgcttggactcagcttcccatcattgacacagacccgacatgtaaggaccaggggggcctagcttgggcggtggctgaaggaatacaaggcagaaaatgaggaacactttggggcttggaagaaagaaccttccagcctggggcaacataggggggaaccccctttctaaaaaaaaaatt

SEQ ID NO: 83058 - DNA, 742 bp, Homo sapiens
  sig_peptide (129)...(264): this location contains the signal peptide sequence, MIFGRTLGQLLFSVFQVALNWEVLTLPHYSTGPRKIFKVTLVTLH, Run with SignalP
  misc_feature (121)...(9): similar to gi182220 in the genepept database release 114, Run with FASTXY 3.3t00, default parameters
cggcacgaggttgaatttctctttctgagttgtaggagctctttgtgtcctctggatattaggcctttgtctatagaatacgtagcagatgttttcttccagtctgtcacttgttttaattttctcttatgatttttggaagaaccctaggacagttgcttttttctgtttttcaagttgctttaaattgggaggtactgactctacctcactatagcactggcccaaggaagatatttaaagtaaccttggtcacactacactgattgtcactaaaaacatgtccagatcaaaactagagatggtgatttcagatcatttgtttcagaaccactacccactacatgaataaatgactcctgcatacagatggctaaaacttgcaccagaccacacgcttgatgagtttactgctgaaaatatatgtttcgtaatgaggcaaacactgcttttattaatttcatccttattgaagacattaccaccgatgcatgaagatttttaacatttaggtgctttgccttacagcatattaacacatgctgagatgatgctgcaggctacaagacattctactggctaactggaatgggaccccaaccttacattttctttaccaaacacttaggaaccttgggcccctccttttgggtgggggccacagcccccttattaggggatggtttaaaaaaaagggggggggggcccctttaaaacctccaccagggggcgaaaaaaaaaa

SEQ ID NO: 83059 - DNA, 759 bp, Homo sapiens
  misc_feature (1)...(759): n = a,t,c or g
  sig_peptide (24)...(159): this location contains the signal peptide sequence, MPTVAIGSITNSKLLSYSQELVIPLTLARLWLLSVAFALFPFSIL, Run with SignalP
  misc_feature (195)...(81): similar to gi3819678 in the genepept database release 114, Run with FASTXY 3.3t00, default parameters
ctcttaactgtctttaatataatatgccaactgtagcaattggaagcataacgaacagtaagttgctttcttactctcaagagcttgttattcccctgacactagcaagactctggcttctgagtgttgcatttgcactttttccattctccatcctccactctctacccaacttggagtgcagggcagaagcaaacatccatgaatcaggcctttgccctgagctgggcatagtgtcagataatttcttatttacttaatcctcacaatagtcctggaagagtggtaggtgagaggtgtaatagtgtccccatggtagagatcaggaaactgaatgttatggagtgaattatgttgccccccaaattcataggttgaagccctaaccctccgtgtgacagtatttgaaaataggcctttaaagaggtaattaagggtaaatgagatcatagtgggtggggccctaattccatagaactggcctccttacaagaaaagggagagattgcaggagcacaggtgtgaagagagaaaaggacttgtgaggacacagcaagaagacagccatctgcaagccaagggaaaaaggtctttgggggaaaccaaacctggcaacaaccttggatcttggctttccagccctccccaaacccgggggaaaaaaaaggggggggtgtttaaagcccacccagggttttggaaaatttgggtaagaggganntggggggggccccacgaaccccggggggggcctcggga

SEQ ID NO: 83060 - DNA, 980 bp, Homo sapiens
  sig_peptide (469)...(604): this location contains the signal peptide sequence, MASTWSLERVGTCLPCGFGTWQSTARWPSCRSTSMVWLVWPSLLA, Run with SignalP
  misc_feature (684)...(809): similar to gi3043716 in the genepept database release 114, Run with FASTXY 3.3t00, default parameters
tttcgtacgcgatgcccgagggcgctgtgagcggggtggccttagctcgccgaggctggtcagtgagagggcatactgggaagccctctggagtgggaagacagtgccgctgttgagacaagacccaggactgggccggggactgtcccaaagggtttctcgtcataatggctgtggaagggtcaaccattaccagccggatcaagaatctgttgagatctccatccatcaaactgcgcaggagtaaggcaggaaaccgacgagaggacctcagctccaaggtgaccttggagaaggtgctgggaattacagtgtctggaggcagaggacttgcctgtgacccccgatcaggtttagttgcttacccagcagggtgtgtggttgtgttgttcaatccccggaaacacaaacagcaccacatcctcaacagttccaggaaaaccatcactgcccttgccttctcccctgatggcaagtacttggtcactggagagagtgggcacatgcctgccgtgcgggtttgggacgtggcagagcacagccaggtggccgagctgcaggagcacaagtatggtgtggcttgtgtggccttctctcctagcgccaagtacattgtctctgtgggctaccagcatgacatgatcgtcaacgtgtgggcctggaagaaaaacattgtggtggcctccaacaaggtgtccagtcgggtgacagcagtgtccttctctgaggattgcagctactttgtcactgcaggcaaccgacacatcaaattctggtatctcgatgacagcaagacctcaaaggtgaggtgctgaagctgggagtagccaccaaggcccctggcagggcctgcccagcccaacccaggagactctgccccacttgggcctctctctgcattcccagcagtcatgcagaagttttggatgagccagatgctgtctgggataaggagtaggcccaaagagcaaggatgtatt

SEQ ID NO: 83061 - DNA, 1224 bp, Homo sapiens
  sig_peptide (1195)...(1060): this location contains the signal peptide sequence, MLIPHQLPLCSPWLVQAMLTIEVPWLLGLAHYRLGWHALEGIFWW, Run with SignalP
  misc_feature (361)...(1075): similar to gi4589622 in the genepept database release 114, Run with FASTXY 3.3t00, default parameters
atgtttaaggtaattgcttcagagcaaagcaaagtcaaactgggaccaaaaacgaccaagaccttgagttaccatcccagaaacggatctctcacactgatcctcagtaagatttggaaatgccaaggccttgctgtggttcttaaaataatttttcaacctaatctaatagggtgttcaaaaataattgtgatgtttgcaatagagtgtattaagctgtccttgcattgctataaagaagtaccggagacaggagaatatgatgagagggactttggagggtcccttcgtgttgtcagactgcccagcgcaacagttggaagccaggcaccaccagcaatagagatgagaaattctgaagaacagccaagtggagggaccacggtattgcagcgtttgctacaagagcagcttcgctatggcaatcctagtgagaatcgcagcctgcttgccatacaccagcaagccacagggaatggccctcctttccccagtggcagtgggaacccgggccctcagagtgatgtgttgagtccccaagaccaccaccaacagcttgtggctcatgctgctcgacaagaaccccaggggcaggaaatccagtcagaaaacctcatcatggagaagcagctgtctcctcgaatgcaaaataatgaagaactcccgacctatgaagaagccaaggtccagtcccagtactttcggggccaacagcatgccagtgttggagctgccttctatgtcactggagtcaccaaccagaagatgaggactgagggacgcccatcagttcagcggctcaatcctggaaagatgcaccaagatgagggactcagagaccttaagcaagggcatgtccgttccttgagtgaacgactaatgcagatgtcactggccaccagtggagttaaggcccatccacctgttaccagtgctcccctctccccaccacaacccaatgacctctacaagaatcccacaagttccagtgaattctacaaggcccaagggccacttcctaaccagcatagcctgaagggcatggaacaccgaggccccccaccagaatatcccttcaagggcatgccaccccaatctgtagtgtgcaagccccaagagccagggcacttctatagtgagcatcgcctgaaccagccagggagaacagaggggcaactgatgaggtatcagcatccccctgagtatggagcagccaggtgtatt

SEQ ID NO: 83062 - DNA, 407 bp, Homo sapiens
  misc_feature (1)...(407): n = a,t,c or g
  sig_peptide (304)...(169): this location contains the signal peptide sequence, MCVQVCMRLHVCRCACVHVCACVCSCVQVCTHTGLGEYKTGNCQL, Run with SignalP
  misc_feature (208)...(315): similar to gi1110587 in the genepept database release 114, Run with FASTXY 3.3t00, default parameters
ngatggctggtagcagtggagcatcaaagactagtggtctgactttgggatatttgtccctaggcacttcagggaaagtctggaatttccagggactagtgaaccctccagagacttctgcccctagagatagggcttggggggcttcatttgtccccaagcttgttccccagttggcagttacctgtcttatattcccccagccctgtgtgtgtgcacacctgcacacagctgcacacacatgcacacacatgcacacatgcacacctgcacacatgcaaacgcatgcacacctgcacacacatgcacacactggccctgctggccagggcttctgccaggactccggctgcctggcccagggtcctgagacataagagctctctccgtcctcccccacctgtatt

SEQ ID NO: 83063 - DNA, 643 bp, Homo sapiens
  sig_peptide (69)...(204): this location contains the signal peptide sequence, MALAFLGTVLSKATLGARLTTHCAHPARRARAFSSDVMTHSSILT, Run with SignalP
  misc_feature (328)...(9): similar to gi780367 in the genepept database release 114, Run with FASTXY 3.3t00, default parameters
aatacataccctgtgtatcctggactgcaatgacattggcctgtggcagcatcacacgtccctccattatggcactggcattcttgggaacagttctttccaaagcgaccctcggggcaaggctgaccacacactgtgcccatccagccagaagggcaagagcattctccagtgacgtgatgacacactcctccattttgacaagggcatctctgctcacactgtggaccatgtttaccaggaggacaaagatcctcacagaaggctccggtgtatcctggtgggcagcggcattcccccgtgacgtggtcgcaggtggctccattctggcactggcatctctgatgacagtcgttaccataggtgccctgctcacagcggtcctcgcagcgccagccccggaagcccgcagcacagtggcaagccccggtgatggggttgcacagagccccatttttgcactggcaccggctggtgcagtggggaccccagtgatcaccatcgcaggctgagattgaggagagaaacagtggatatcagtgggtaagggagaaccagatttcttcgcctctcggggagaatggcttggtgacctctcatggccattcattagctggacatcagggccctggccccaacccat

SEQ ID NO: 83064 - DNA, 1038 bp, Homo sapiens
  sig_peptide (153)...(288): this location contains the signal peptide sequence, MSEITLQEGWPLPCVCVCLFLKLVFLLEWSEVLRVHSSGLLFRPR, Run with SignalP
  misc_feature (333)...(213): similar to gi1651663 in the genepept database release 114, Run with FASTXY 3.3t00, default parameters
tttagatattacctccccgaattgaggtagattaaacaaggttccaagcttctcaaactgcaggtgagggggcacgtgaaataaaggatcagtgttcgaattagtccctgggttaagttggattttataaaaccttccaaatgtatcagctcatgtctgagattacacttcaggagggttggcctttaccttgtgtttgtgtttgccttttccttaaactagtgtttctcctggagtggtctgaggtgttaagagtgcatagttctggcctccttttcagacccagagggatgaaaatggccatcatctttaataaaggcctcagatgattctaaagtatgctactgtttgaaaaccactgctgtatcatttaggaattgcattcacttcctagcaacagagactgtaaataaagaaatagcttatttctctcactcagaagttcagagaaacgcaatccagggttagtctggtggctccatggtataaaaattttaaaaattttttgaagtccaggctcataactttccgtcctactatcctcaggttacagcttccattcccatttgtaagggtacttcatgacacaaagatggctgctggagctctacccattgggttacattccagaccggaaacaggaagaagggggaatggccacaaaagggcctggctaacaactgtctaacctcctttaaaagagcttcccagaatcacaccctttctgtcattggcccaatgggtaaggcccatgtagctcctagtagctcgcgaaaattatttttactgagtaattggagcttcaccacaagaggggtttgttgttaaacaacaacaatgggcggcggttacggatacactcttttccggcgcctacaagcaactccttcaggtccacaataaattctccgccgctactaaacttgcagaggatcttggcgcctcatcaactaccacattcgtgtatagtccctagcgccccccataacctacagagtcccatgcttcgctgtcgccgccaagcgcatcaatcgtttg

SEQ ID NO: 83065 - DNA, 421 bp, Homo sapiens
  misc_feature (1)...(421): n = a,t,c or g
  sig_peptide (129)...(264): this location contains the signal peptide sequence, MFLNLIFVTFTILGTLKVISSILKNDFLKAIMRILLRYSFGIKHS, Run with SignalP
  misc_feature (365)...(423): similar to gi4877661 in the genepept database release 114, Run with FASTXY 3.3t00, default parameters
cccacgcgtncgaaataggtatagaaattatatgttcagcctactatgcagatttttttttgtgggcttggtatgttcattatatttatgggtgttcttaattattaactataaccatttaaattgaaatgtttttaaatctcatttttgttactttcacaatattgggtaccttaaaggtcatttcttctattttaaaaaatgatttcttaaaagcaattatgagaatacttttaagatattcatttggaataaaacactctctgaaattccggtctcagagatttaacatttatttcctaaattttagtatgcaaccctctaattttaaaaataatcatagttaaatttcttttccaatggttactgttttatttggttagtgggtcaaaggggaggaggcctattttgtcttgaggtt

SEQ ID NO: 83066 - DNA, 523 bp, Homo sapiens
  sig_peptide (375)...(510): this location contains the signal peptide sequence, MLRRMAVGLLFDTTFLKKLHMFNLCQQLFYKLTCASIHFSGRVGR, Run with SignalP
  misc_feature (73)...(6): similar to gi155701 in the genepept database release 114, Run with FASTXY 3.3t00, default parameters
aacccacctgatttccatggccagcatgtagatcctgtggggtggggatagtggctctgacacagacaattcgctatcacatagctacagacatggcgtttcaagggccttttcttccttgatattcatctcttctctttagagagtgcccacatagtataaaagagaggtgataaaatgtggcctagattgaggagaaattattaagacttatttttctgtaagacctcaaaagattctctatgattattatctccacagggaaacaaatgttggacaaaatacaaccagattcacatagcttatcctatggaactttgcctgatggaagtgactcaacaaagagccaaagtggagagaagaaagaggtctaaatgctgagaaggatggctgttggcctgttattcgataccacctttttaaaaaaattgcacatgttcaatttgtgtcagcagctcttttataagctaacatgtgctagcattcatttcagcggacgcgtgggtcgacccgagagatgctc

SEQ ID NO: 83067 - DNA, 426 bp, Homo sapiens
  sig_peptide (176)...(311): this location contains the signal peptide sequence, MALMLRLVLSLLKLGSRQWHVFGPNKPVQALVGEDATFSLFLSSK, Run with SignalP
  misc_feature (176)...(428): similar to gi4587209 in the genepept database release 114, Run with FASTXY 3.3t00, default parameters
tgtgtctcgatggagcaaactctatatcagcgcagtttgccctccgctcacgcagagcctctccgtggcttccgcaccttgagcattaagccagttctcctcttctctctaaaccatccgtcacctctcctgtcatccgtttccatgccgtgaggtccattcacagaacacatccatggctctcatgctcagattggttctgagtctcctcaagctgggatcaaggcagtggcatgtgtttggaccaaacaagcctgtccaggccttggtgggggaggacgcaacattctccttgttcctgtcttctaagacccatgcagaggccatggaagtgctggttcttaaggcccagttctctagccgggtccacctttacaggggacgggaggaccatccatttatgcagatgccccagtatcaaggccc

SEQ ID NO: 83068 - DNA, 1232 bp, Homo sapiens
  sig_peptide (406)...(541): this location contains the signal peptide sequence, MGEASPPAPARRHLLVLLLLLSTLVIPSAAAPIHDADAQESSLGL, Run with SignalP
  misc_feature (406)...(801): similar to gi517093 in the genepept database release 114, Run with FASTXY 3.3t00, default parameters
agggccgcaatcagagaacaccgccaggacttccaggacttggtctccaggactgaggtcaactgacgtgggcgtggtctgactgtgtgggcgtggccagggaatgaactcacggctctggcttaaggggtgtggtgaacgaaggatggggcgtggctgtgtcaccaagggcgtggtcatggagtagaggcccgggctcctgggtgaggccggcaagtttggagcgtggtcagacaataggggcgtggctacggctcgcggagcgcaaccaacgctctagaccagacctgggctcgagaccataactgtttggctttaacagtacgtgggcggccggaatccgggagtccggtgacccgggctgtggtctagcataaaggcggagcccagaagaaggggcggggtatgggagaagcctccccacctgcccccgcaaggcggcatctgctggtcctgctgctgctcctctctaccctggtgatcccctccgctgcagctcctatccatgatgctgacgcccaagagagctccttgggtctcacaggcctccagagcctactccaaggcttcagccgacttttcctgaaaggtaacctgcttcggggcatagacagcttattctctgcccccatggactttcggggcctccctgggaactaccacaaagaggagaaccaggagcaccagctggggaacaacaccctctccagccacctccagatcgacaagatgaccgacaacaagacaggagaggtgctgatctccgagaatgtggtggcatccattcaaccagcggaggggagcttcgagggtgatttgaaggtacccaggatggaggagaaggaggccctggtacccatccagaaggccacggacagcttccacacagaactccatccccgggtggccttctggatcattaagctgccacggcggaggtcccaccaggatgccctggagggcggccactggctcagcgagaagcgacaccgcctgcaggccatccgggatggactccgcaaggggacccacaaggacgtcctagaagaggggaccgagagctcctcccactccaggctgtccccccgaaagacccacttactgtacatcctcaggccctctcggcagctgtaggggtggggaccggggagcacctgcctgtagcccccatcagaccctgccccaagcaccatatggaaataaagttctttcttacatctaaaaaaaaaaaa

SEQ ID NO: 83069 - DNA, 463 bp, Homo sapiens
  sig_peptide (154)...(19): this location contains the signal peptide sequence, MVHILTAACLPLATLLSCGCDVRVTSHWFYKDMHWMVFLILAKTS, Run with SignalP
  misc_feature (392)...(465): similar to gi4127868 in the genepept database release 114, Run with FASTXY 3.3t00, default parameters
acttgtcaagaattatacatgacgtttttgcaagtatgagaaacaccatccaatgcatatctttgtaaaaccagtgggaagtcactctaacatcgcagccacaggaaagtaatgtggccagaggtaagcaagcggctgtgagaatgtgaaccatccgcccactctgaggagccacccgtggaccctgaggccggggaagcacaaatgttccgaaaactgccccgtcagctaggctagggccccaagagaggggcctgaccaagggacatgaggaaggaaccactctaggacatgagggacatgaggaaggaaacactccaggttcctccagaatacctccagccgtattccattagcctttagggtcagaggctaatgacagacgggaaatcatcccagtgttccaagcaccctacctcccgccgtaaagaggacagacccgctcatctccaagtggacgaaa

SEQ ID NO: 83070 - DNA, 428 bp, Homo sapiens
  sig_peptide (218)...(353): this location contains the signal peptide sequence, MLQSFINYCLLFLIYTVMLAFRSGSDNLLVILKRKWWKYILLGLA, Run with SignalP
  misc_feature (26)...(430): similar to gi1491712 in the genepept database release 114, Run with FASTXY 3.3t00, default parameters
tttcgtggcagactcgccagcgggccccggcgccccagagcccctcgcggagggagcggcggccgagttctccagcctgctgcgcaggataaaaggcaaactcttcacctggaatattttgaaaacaattgccctgggtcagatgttgtccttgtgtatatgtgggacagccatcaccagccagtatttggcagaaagatacaaagtgaacacccccatgcttcagagctttatcaattattgcttgctgttcctaatttatacagtgatgctggcatttcgatcaggcagtgataaccttttagtaatcttgaaaagaaaatggtggaagtacatcctgctgggactagcagatgtggaagctaattatgtgatcgtcagagcctaccagtacacaactctaaccagtgtccagcttttggattgct

SEQ ID NO: 83071 - DNA, 412 bp, Homo sapiens
  sig_peptide (14)...(149): this location contains the signal peptide sequence, MRNALSRLLVGLASLRGARTLSMGTLPERGNIVEFAPCDGLQIEN, Run with SignalP
  misc_feature (11)...(351): similar to gi184503 in the genepept database release 114, Run with FASTXY 3.3t00, default parameters
tttcgtgccagcaatgaggaacgcgctttcgcggctactggtgggcttggcgtccctgcggggtgcgaggaccttatctatgggcactttaccagagcgagggaatattgtggaatttgcaccctgcgatggactacaaattgaaaacaatatggtatctactccagtgaagaacaccctgatagacatgctgtctgaaccaagactctttgttatagaaaccaccagctttgtgtctcctaagcgggttccccagatgggtgaccacactgaagtcatgaagggcattcacaaggttcctggcataaactaccccgtcctgaccccccatttgaaaggcttcgaggcaccggccaccaagaagatctactccatgggctgatacgagatctccgtgagggacaccattggt

SEQ ID NO: 83072 - DNA, 708 bp, Homo sapiens
  sig_peptide (233)...(368): this location contains the signal peptide sequence, MKALLLLVLPWLSPANYIDNVGNLHFLYSELCKGASHYGLTKDRK, Run with SignalP
  misc_feature (233)...(710): similar to gi3041881 in the genepept database release 114, Run with FASTXY 3.3t00, default parameters
tttcgtgtggctccttgcgttcctacatcctctcatctgagaatcagagagcataatcttcttacgggcccgtgatttattaacgtggcttaatctgaaggttctcagtcaaattctttgtgatctactgattgtgggggcatggcaaggtttgcttaaaggagcttggctggtttgggcccttgtagctgacagaaggtggccagggagaaggcagcacactgctcggagaatgaaggcgcttctgttgctggtcttgccttggctcagtcctgctaactacattgacaatgtgggcaacctgcacttcctgtattcagaactctgtaaaggtgcctcccactacggcctgaccaaagataggaagaggcgctcacaagatggctgtccagacggctgtgcgagcctcacagccacggctccctccccagaggtttctgcagctgccaccatctccttaatgacagacgagcctggcctagacaaccctgcctacgtgtcctcggcagaggacgggcagccagcaatcagcccagtggactctggccggagcaaccgaactagggcacggccctttgagagatccactattataagcagatcatttaaaaaaataaatcgagctttgagtgttcttcgaaggacaaagagcgggagtgcagttgccaaccatgccgaccagggcagggaaaattctgaaaacaccac

SEQ ID NO: 83073 - DNA, 908 bp, Homo sapiens; identical to SEQ ID NO: 82946
  sig_peptide (483)...(618): this location contains the signal peptide sequence, MGSVFWHVLFCISGVCLWCAHRMAAFLQQMAVLLPVDCERPAAVH, Run with SignalP
  misc_feature (115)...(906): similar to gi3879782 in the genepept database release 114, Run with FASTXY 3.3t00, default parameters

SEQ ID NO: 83074 - DNA, 428 bp, Homo sapiens; identical to SEQ ID NO: 83070
  sig_peptide (218)...(353): this location contains the signal peptide sequence, MLQSFINYCLLFLIYTVMLAFRSGSDNLLVILKRKWWKYILLGLA, Run with SignalP
  misc_feature (26)...(430): similar to gi1491712 in the genepept database release 114, Run with FASTXY 3.3t00, default parameters

SEQ ID NO: 83075 - DNA, 427 bp, Homo sapiens
  sig_peptide (44)...(179): this location contains the signal peptide sequence, MWGRLWPLLLSILTATAVPGPPLRRPSRELDATPRMTIPYEELSG, Run with SignalP
  misc_feature (44)...(429): similar to gi4836757 in the genepept database release 114, Run with FASTXY 3.3t00, default parameters
tttcgtccggatccgagcgcaaagtctgggcctccccaggaagatgtgggggaggctctggcccctcctcctcagcatcctcacagcaactgcagtcccaggacccccactgcggagaccgtctagagaactagatgccacccctcggatgaccataccctatgaagagctctctgggacccggcacttcaagggccaagcccagaactactcaacactgctgctggaggaggcctcagcaaggctgctggtgggagcccgaggtgccctgttctctctcagtgccaacgacataggagatggggctcacaaagagatccactgggaagcctccccagagatgcaaagcaaatgtcatcaaaaagggaaaaacaaccagacggagtgctttaaccatgtgcggttcctgcagcggctcaattctacc

SEQ ID NO: 83076 - DNA, 446 bp, Homo sapiens
  sig_peptide (21)...(156): this location contains the signal peptide sequence, MESAVRVESGVLVGVVCLLLACPATATGPEVAQPEVDTTLGRVRG, Run with SignalP
  misc_feature (63)...(449): similar to gi404389 in the genepept database release 114, Run with FASTXY 3.3t00, default parameters
tccaaccagttgtaaggagaatggagagtgcagtgagagtggagtccggggtcctggtcggggtggtctgtctgctcctggcatgccctgccacagccactgggcccgaagttgctcagcctgaagtagacaccaccctgggtcgtgtgcgaggccggcaggtgggcgtgaagggcacagaccgccttgtgaatgtctttctgggcattccatttgcccagccgccactgggccctgaccggttctcagccccacacccagcacagccctgggagggtgtgcgggatgccagcactgcgcccccaatgtgcctacaagacgtggagagcatgaacagcagcagatttgtcctcaacggaaaacagcagatcttctccgtttcagaggactgcctggtcctcaacgtctatagcccagctgaggtccccgcagggtccggtaggccg

SEQ ID NO: 83077 - DNA, 596 bp, Homo sapiens
  sig_peptide (140)...(275): this location contains the signal peptide sequence, MAPSFTARIQLFLLRALGFLIGLVGRAALVLGGPKFASKTPRPVT, Run with SignalP
  misc_feature (281)...(598): similar to gi3869278 in the genepept database release 114, Run with FASTXY 3.3t00, default parameters
tcctcaagtcacgggtccacccacgcgtccgtgtaaacgaaaagcttcataagtccctctttgcttagtacttttctcgtcctttccccagggtgcacgtaaccctcaagcactaggaccgtgcggaatccaggctgcgatggcaccttcatttaccgcccgcattcagttgttcctcttgcgggcgctaggctttctcataggcttagtaggccgagcagctttagtcttagggggtccaaagtttgcctcaaagacccctcggccggtgactgaaccattgcttctgctttcggggatgcagctggccaagctgatccgacagagaaaggtgaaatgtatagatgttgttcaggcttatatcaacagaatcaaggacgtgaacccaatgatcaatggaattgtcaagtacaggtttgaggaagcgatgaaggaggctcatgctgtagatcaaaagcttgcagagaagcaggaagatgaagccaccctggaaaataaatggcccttccttggggttcctttgacagtcaaggaagctttccagctacaaggaaatgccaattcttctggactcatgaaccgtcgtgatgccattg

SEQ ID NO: 83078 - DNA, 407 bp, Homo sapiens
  sig_peptide (328)...(193): this location contains the signal peptide sequence, MPFLHSVLVLYMLLPSTFRQAQIFPVRKKPSWSIPLPQSSLGALF, Run with SignalP
  misc_feature (294)...(410): similar to gi552196 in the genepept database release 114, Run with FASTXY 3.3t00, default parameters
ggtttgagcatgtagagatggaggctccagtgaatgagcagatggagacatcctgcaggctgttgaacacagaggtttgaagctaggagacaggctgagtcaaagatagtgattgggaccttgtaagggttgaagaggcggctgagccccagggagctgatgagatagcctggggagaaggtggagggagaagagaagagggccccgagagagctctgtggcaaagggatggaccaggaaggtttttttctaacaggaaatatttgagcctgtctaaatgttgatggaaggagcatataaagcacaagtacactgtggagaaatggcattcagtaagggtggcccctagtattttttattatcatcattatcaaaataaataccaccaccatcaccatcaccaccat

SEQ ID NO: 83079 - DNA, 408 bp, Homo sapiens
  sig_peptide (179)...(44): this location contains the signal peptide sequence, MRRPGAHLCTHHCEWRMISFLCLIYLSYMAQGQLGAGWETEEGIG, Run with SignalP
  misc_feature (280)...(385): similar to gi4335743 in the genepept database release 114, Run with FASTXY 3.3t00, default parameters
catttcccttaataatacttctctccagagtcaacatacatgggtcctataccttcctcagtttcccacccagcccctaactgcccctgtgccatgtatgataggtagatgaggcataagaaggagatcatcctccactcgcagtggtgggtacacaaatgtgctcctggcctccgcatagaagtcagtggatggcctgttctttaagaatgcaatgaattgataagctctgctggcctaggtgtgggagtctaagcgccacaaatgagcgctgttatgagcgttcccctacaacttaggatttgctcagtgcaccaaatgctctgcaaaaagcgggtcttgcttcaaagtattcagaattgcaacgctgaaattctctgcatcttggtgtgcgctgcctcactagat

SEQ ID NO: 83080 - DNA, 423 bp, Homo sapiens
  sig_peptide (178)...(313): this location contains the signal peptide sequence, MLLIPYFLEWKKLWPLAVLSLAWLTYDWNTHSQGGRRSAWVRNWT, Run with SignalP
  misc_feature (97)...(421): similar to gi2088822 in the genepept database release 114, Run with FASTXY 3.3t00, default parameters
aaaggatatataaacaactcattttaattaggtatgaccttcagggtaggcttcttgtcagggcagaacagcaccataggcatgggtttcttctcccgactgaatatacaagacggcctcccaaccttctttgtgctgcaatggatcccatcctatatattattaagagctattcccatgctccttataccctactttctggaatggaaaaagctctggcccttggctgtgctctccttagcctggctcacctatgattggaacacccacagtcaaggtggcaggcgttcagcttgggtacgaaactggaccctatggaagtatttccgaaattacttcccagtaaagctggtgaagactcatgatctttctcccaaacacaactacatcattgccaatcacccccatggcattctctctttt

SEQ ID NO: 83081 - DNA, 436 bp, Homo sapiens
  sig_peptide (295)...(160): this location contains the signal peptide sequence, MVPCSGLCPLGGSWPFLYSLGCSSWAKLSFLTCCLWVDGSRPGPV, Run with SignalP
  misc_feature (173)...(429): similar to gi3288493 in the genepept database release 114, Run with FASTXY 3.3t00, default parameters
cctgggagacaagatccatcaggggccaccaaagtaacactctgaccaaaataatgcagttatttgtacatggaactgattagaagtacaaagattgccacatttttgatggaagtgtgcaaagtccatgagcctggagtgaagcctctggctcactcaaaacaggtcctggcctggaaccatccacccacaggcagcaggtgagaaagctgagcttggcccaagagctgcagccaagggaatacaaaaaaggccagctcccccccagggggcagagcccagagcagggcaccatcaggtcctttccctcctcaccgcaaggcgacctcagtctgtgcggcagcttccagcactgtggggcagtctaccattaaatgctcctccaaatgaagctggactgtgcggacgcgtgggtcggcccggtaattcgaggcga

SEQ ID NO: 83082 - DNA, 416 bp, Homo sapiens
  misc_feature (1)...(416): n = a,t,c or g
  sig_peptide (55)...(190): this location contains the signal peptide sequence, MALTGYSWLLLSATFLNVGAEISITLEPAQPSEGDNVTLVVHGLS, Run with SignalP
  misc_feature (79)...(411): similar to gi3549152 in the genepept database release 114, Run with FASTXY 3.3t00, default parameters
ccgagcactgggacttcaacgccaccatctccaagactcggtttggggtgaaagatggcgctgactgggtacagctggctgctcctcagtgccacattcctgaatgtgggggccgagatctctatcaccctggagcctgcccagccgagcgaaggggacaacgtcacgctggtcgtccatgggctttcgggggaactgctcgcctacagctggtatgcggggcccacactcagcgtgtcatacctggtggccagctacatcgtgagcacaggcgatgagactcctggcccggcccacacggngcgggaggctgtgcgccccgatggcagcctggacatccagggcatcctgccccggcactcaagcacctacatcctgcagaccttcaacaggcagttgcagaccgaggtgggctn

SEQ ID NO: 83083 - DNA, 578 bp, Homo sapiens
  sig_peptide (68)...(203): this location contains the signal peptide sequence, MYGEFKWPSRFFCYLLKITISALLVMEHLKSGLGRWQQSAAAKFG, Run with SignalP
  misc_feature (218)...(289): similar to gi325767 in the genepept database release 114, Run with FASTXY 3.3t00, default parameters
taactattagtaagcatgttataggattagattaaaaataaattgttaataacttttggtaggtattatgtatggtgaatttaaatggcctagcagatttttttgttatcttttgaaaattacaatttcagctttattagtgatggagcatttgaaaagtggcttgggtagatggcaacaatcggctgctgcaaaatttggcaacaaagacaaacctcatttggtctcatgggaatgctggacaagtacacctgcaggctttcccctgaggggcagagcatacctctttaaaacttaagtcatggaggagtggtaccccctcgccccaaaaaacaaactctgaagggattgaggcatatgtgttccgcctcttctcttatactgtaataacagtaagtcataataataacaatatgtcataaatggcttttagatcaccagtgcatagctgggtagttgtctgtctgctatggtggtggggggcaattttagcacattaaaaagtgtttttgaaacccaacaaggcctattagaaaatcagtaatattcctagctagaagcaactgaccttataaaat

SEQ ID NO: 83084 - DNA, 438 bp, Homo sapiens
  sig_peptide (74)...(209): this location contains the signal peptide sequence, MLTGTLGLSVLWPTLGTGDLVWLRMFHKGRTYVCLELSFQYLVLA, Run with SignalP
  misc_feature (127)...(58): similar to gi53902 in the genepept database release 114, Run with FASTXY 3.3t00, default parameters
agaaattccagcatcgctgagccccaggagggagtatgcccaatatgtcggtgctcagagaggaggggagagaatgctgacagggaccctgggtttgtcagtgctgtggccgacccttgggacaggagatttggtgtggctcaggatgtttcacaaaggcagaacctatgtctgccttgagttgtctttccaataccttgttctggcctcatcatataaaatatgcccacatggacctatggaaatgcatgtgaattcgatttcaggtagacaggaactttcctgaatctttctaaataatctttaatatgattcagtgataccattaattttgtatgctaattacttgattaatctctgaggacctatgaaattcagcatctgaaattgtccatggtctagaaagtttctaatatactatctttttcagaataccgc

SEQ ID NO: 83085 - DNA, 437 bp, Homo sapiens
  sig_peptide (159)...(294): this location contains the signal peptide sequence, MKISMINYKSLLALLFILASWIIFTVFQNSTKVWSALNLSISLHY, Run with SignalP
  misc_feature (192)...(440): similar to gi1762 in the genepept database release 114, Run with FASTXY 3.3t00, default parameters
aggtaaacaaactgcaacttatatctgcaatttattttggtatagacaagaggtatgccagtagcacactggtggcttcagaagaaattctcaacacctagctcgccagagagtctatgtatgggattgaacaatctgtaaactaaaggatcctaatcatgaaaataagtatgataaattataagtcactattggcactgttgtttatattagcctcctggatcatttttacagttttccagaactccacaaaggtttggtctgctctaaacttatccatctccctccattactggaacaactccacaaagtccttattccctaaaacaccactgatatcattaaagccactaacagagactgaactcagaataaaggaaatcatagagaaactagatcagcagatcccacccagacctttcacccacgtgaacacc

SEQ ID NO: 83086 - DNA, 621 bp, Homo sapiens
  sig_peptide (229)...(364): this location contains the signal peptide sequence, MWGQSVPGATILKYLLTVRFIWSPLKNEMFQLWLEYTEQLKYFEM, Run with SignalP
  misc_feature (494)...(557): similar to gi544487 in the genepept database release 114, Run with FASTXY 3.3t00, default parameters
ctttgatataacattgttaaggttataacatgattttgcatgtgagtttgtatggaaatgagggaatggaaatgaagacctagcctttctcaattacccttgcaattgttcctttagggagaaacagcggagtattactaatttgtattggttttcaatagaaatttaggtaaataattatttggggtttcaggcttcctttctctaaaaataattctttttagaccaatgtggggccaatcagtacctggagcaacaatattaaagtacctccttacagtgaggtttatatggagtcctctaaaaaatgaaatgtttcaactctggttggaatacacagagcagctgaaatattttgaaatgacacacacataaaatacataatttatttaagggaatttattggtatattttaaaaatacatctttttaataaaataaagataaaattaagaggattatattcctcctttttctttgttgatcagttactagactcccttactcctccaaaaaaaataaaaaagggcgggggttctataggactccaacttttaagaccccggtgcttgggaaacctttggggttctttctttgcgggggcccaaaacccatttcggcg

SEQ ID NO: 83087 - DNA, 446 bp, Homo sapiens
  sig_peptide (233)...(98): this location contains the signal peptide sequence, MICWRTLHLVGGTSYFSFVDCELGQHFQPYKICIMGIKGNTLMKA, Run with SignalP
  misc_feature (256)...(363): similar to gi808843 in the genepept database release 114, Run with FASTXY 3.3t00, default parameters
atcctgtaggctactgtttcctacttgctcatgatcagaacacagctataattttcactttacattttgcatttacagagcatttaatatattttaaagccttcataagtgtatttcctttaatgcccataatacatatcttatagggctgaaaatgttgacctagttcacagtcaacaaaagagaaataacttgtgcctcccacaagatgcagggtcctccaacagatcatataagtgaaaggaaaatctgtactttgggattcatgtttatgagatgattctcagatttctattcgaaacctccttcctgggctcccggagaggcccatccttacccatgtgttccatgtgtatgtttcatttgcacaaaaatcgtgtacgtaaacctcaatgattctctcttcacctctgcggacgcgtgggtcgccacgagattcagcgcct

SEQ ID NO: 83088 - DNA, 428 bp, Homo sapiens
  sig_peptide (141)...(276): this location contains the signal peptide sequence, MISIWWLAVSILQTNVGETIRVHCNMLQLYRSQQQMYFLLWNTCM, Run with SignalP
  misc_feature (309)...(401): similar to gi2688155 in the genepept database release 114, Run with FASTXY 3.3t00, default parameters
agcacagaggtttggttggatacgtgtaaataaaagagctgggattttaagcaggtttgtcctcaactaaactcgaaagctctcactccttctaccatgacaaagtttttacgactctgcattgtggcctattgctggtcatgatatcaatttggtggcttgcagtcagcattttacaaaccaatgtaggagaaactatcagagtgcactgcaacatgcttcagttatacagatcacagcaacaaatgtatttcttactatggaatacctgcatgacgccacattgcgctcatatgtcttaattcagcctcacaggaacatgccctaaattccaaaatacagaaaaggccaaggccataaaaaaactgtcagaaacagaaacgattttaagaggttggatgcagttgaaaggattcagccgaattgca

SEQ ID NO: 83089 - DNA, 472 bp, Homo sapiens
  sig_peptide (283)...(418): this location contains the signal peptide sequence, MWRLAWVNFSFLIFKRSNNTVLPYTERQACEVLWKGQCIVLRYNI, Run with SignalP
  misc_feature (348)...(278): similar to gi4433267 in the genepept database release 114, Run with FASTXY 3.3t00, default parameters
gtgccgtgtggtggaattcatgttcagagttgttcatcataaaaaccaaaacctgtagaaagaaaaaatgagacagtcagaatgaactggtattttctgtattttaactggaagcccagtttgagtgtagaaaaggcggccacaggtggatcaccaccattatgtgtaatagataaaccgctttccagagggcagtcatatattttaagaaacaggaagcatggtgcttagaatctgagaacccaactttaatcttggctgggccactacccccatgtgcccatgtggagattggcatgggtgaacttcagttttctcatttttaagaggagtaacaatactgtcttgccctacactgagagacaagcttgtgaagtgctttggaaaggtcaatgcatagttttaaggtataacataagtgcatttgattttaatggattttttgcatatgtattttttctttttagcaagg

SEQ ID NO: 83090 - DNA, 437 bp, Homo sapiens
  sig_peptide (38)...(173): this location contains the signal peptide sequence, MAVVIRLLGLPFIAGPVDIRHFFTGLTIPDGGVHIIGGEIGEAFI, Run with SignalP
  misc_feature (38)...(307): similar to gi5824657 in the genepept database release 114, Run with FASTXY 3.3t00, default parameters
gtggacttcgtcattattgctgtggtttgagctcagcatggctgtagtcatccgtttactggggcttccttttattgcggggcctgtggatattcgtcacttcttcacgggattgactattcctgatggaggagtgcatataattggaggggaaattggggaggcttttattatttttgcaacagatgaagatgcaagacgtgccataagtcgttcaggagggtttatcaaggattcatctgtagagctctttcttagtagcaaggcagaaatgcagaagactatagaaatgaaaagaactgatcgtgtaggaagagggcgtccaggatctgggacatcaggggttgacagcctgtctaattttattgagtctgttaaggaagaagcaagtaattctggatatggctcttcaattaatcaagatgctgggtttcatg

SEQ ID NO: 83091 - DNA, 489 bp, Homo sapiens
  sig_peptide (165)...(300): this location contains the signal peptide sequence, MKTNRAAGSHWCVCSGGALLSIFLYLYPYPSPNAQIILMKISKSY, Run with SignalP
  misc_feature (182)...(11): similar to gi4468028 in the genepept database release 114, Run with FASTXY 3.3t00, default parameters
ctggaaggacgggggtgttcccagactgctggcaaaacactctgatgggggctgttgacaaaagtgctctggttgtgggggcagggtgccacaggagaatgtcttgaagtagggggccaccagagagtgcacactagtggggcgatggtgtgaggtgcagacaaatgaaaaccaacagggcagcggggagccactggtgtgtatgcagtggtggagcattattgtcaatctttctttatctgtacccatatccaagtcccaacgcccaaattattttgatgaaaatatcaaaatcatataatttcacctggaaatatttgtacatacctttaaaagacaaacagtctttaaatatatatccatgatcatagtaatatactacacattaaaaataattctttgatgaggtaaaagtggaatcacattttcaaagttgctattgttttaaacctttgaaaatttaatagcatagttgacacatttgacata

SEQ ID NO: 83092 - DNA, 308 bp, Homo sapiens; identical to SEQ ID NO: 39580
  sig_peptide (105)...(240): this location contains the signal peptide sequence, MSATTVKIVFNFRYTLMCMSSCYLLINIIVNIYRFIFKKFLNLST, Run with SignalP
  misc_feature (120)...(236): similar to gi1171596 in the genepept database release 114, Run with FASTXY 3.3t00, default parameters

SEQ ID NO: 83093 - DNA, 560 bp, Homo sapiens
  sig_peptide (125)...(260): this location contains the signal peptide sequence, MALVVVALAAVVVGVGAPWGRREGIGGRAGAQGCDHLHDIGHDHL, Run with SignalP
  misc_feature (388)...(8): similar to gi3970850 in the genepept database release 114, Run with FASTXY 3.3t00, default parameters
cccccggttcgaggacggccatgttgttgggcatgtccggggggtgggagagctgggggggcccgtgcatgaagtcattcatggatgtccctccagggttcccgtgggggaagtcaaagttgccatggccttggtagttgttgccttggctgctgtagtcgttggagttggtgccccctgggggaggcgggaggggatagggggacgggccggggcccagggctgcgatcatctccatgacattgggcatgatcatctggctgggactcatggtcttgaaccgcttggaggggatgccatcagggtcgtccttgatgtgtaagtccgacttgatgggcaccggccgccagctgcacgtgggatcgatggtgacctcttcaaactcggagtgttggatggcattcaggattccccacatgtactgatccacctccaggccctccagcagagcggttttattgcacacaggacacctccaggtccctctctcgcaattcagctgcaggtatgactccagatcaaagcactgcacatgcttgcaatcgtgtcctcgacccggg

SEQ ID NO: 83094 - DNA, 476 bp, Homo sapiens
  sig_peptide (229)...(364): this location contains the signal peptide sequence, MAAWGFCFAVSALVVACEFTRLHGCLRLSWGNFTAAFAMLATLLC, Run with SignalP
  misc_feature (115)...(474): similar to gi2463265 in the genepept database release 114, Run with FASTXY 3.3t00, default parameters
ggccttggcccagcagggaccccagggccttgggggactgtgtgagctggaaacgtggctggccagatgggcagcaccatggagccccctgggggtgcgtacctgcacctgggcgccgtgacatcccctgtgggcacagcccgcgtgctgcagctggcctttggctgcactaccttcagcctggtggctcaccggggtggctttgcgggcgtccagggcaccttctgcatggccgcctggggcttctgcttcgccgtctctgcgctggtggtggcctgtgagttcacacggctccacggctgcctgcggctctcctggggcaacttcaccgccgccttcgccatgctggccaccctgctatgcgcgacggctgcggtcctgtatccgctgtactttgcccggcgggagtgtccccccgagcccgccggctgtgctgccagggacttccgcctggcagccagtgtcttcgccgggct

SEQ ID NO: 83095 - DNA, 377 bp, Homo sapiens
  sig_peptide (252)...(117): this location contains the signal peptide sequence, MGCKGDASGACAAGALPVTGVCYKMGVLVVLTVLWLFSSVKADSK, Run with SignalP
  misc_feature (198)...(341): similar to gi1490350 in the genepept database release 114, Run with FASTXY 3.3t00, default parameters
cgcagagcctatatttatactcaaatacacgaagggaaaaaaaatgttctcttacctggcttctaacaacaatggagtggaaaaccattttgttgtaagagaggttgtaatggcttttgagtcggcctttactgaggagaacagccacagaacagtgagtacaaccagaactcccattttatagcaaactcctgtcaccggcagcgcacccgcggcacacgcaccgctcgcgtctcccttgcagcccatgcccgggccgtggtcagtccgccacagtgccagagacaacgccagggcagggcggggcgaggcgccagcggcagtgcaggctgcgccagtgagagaacgacacgcgcctttcccgcggctcgactcaa

SEQ ID NO: 83096 - DNA, 753 bp, Homo sapiens
  sig_peptide (314)...(449): this location contains the signal peptide sequence, MHASEGLPALPLLALVSHSHSCPPLPLQPHHLPAILFFLVGHQLM, Run with SignalP
  misc_feature (48)...(3): similar to gi535097 in the genepept database release 114, Run with FASTXY 3.3t00, default parameters
ctcccaaagtgccaggattacaggcgtgagccaccacgcccagcctaggttttaagcctcacatgtattaggtatttatactaatgctctccctccccttgccctccacccactgtaaaaataatttttatactcttctgcatttgctaaatttcctctcattagcaggttatacctttatgatcagaaaaaaaattaaacactgcttctaaaaaatactcatctccagcacttggagatcacctacctctacattctacccaactgagcccaatttagtcttctcagggctttgcccaagaacagttcaggaatgcatgcctctgaaggccttcctgctcttccccttctggccttggtatctcattctcattcctgccctcccctacctctccaaccccatcacttgccagccatcctgttcttccttgttggtcatcagttaatgaagtgtattaggtgacctgagtacttgtcagtacttcccagaggcaagaacattcctcgcagatcaaggtacctttaagagccaagaagctcagatttggaggcgggagagctgtactgcatcccctcaaatgttagcagtgccaagaaatgagacgctagtctagggggcaccacaagcagaaaggggctgtttcaaggagtcgtccgcccatgggagtctcctcttctattattcaccttgctccaaggatatcttttcttttacgtatgaaaattttgtaattgttcaactataacaccatg

SEQ ID NO: 83097 - DNA, 611 bp, Homo sapiens
  sig_peptide (87)...(222): this location contains the signal peptide sequence, MYHRALVACLPCTSCSVTLGKAIDLTFIIARRKRQQPSLPVPFRA, Run with SignalP
  misc_feature (102)...(49): similar to gi3139005 in the genepept database release 114, Run with FASTXY 3.3t00, default parameters
cgataatagaaggggcctttaccatgtcgtgaggagagaagtgtgggcaagccattgggtgaaaataaaaatccccaacacgaagaatgtaccacagagctcttgttgcctgtctgccctgcaccagctgctctgtgaccttaggcaaggccattgacctcactttcatcattgcaagaagaaagaggcagcaaccttccctcccagttccctttagggcttctgaggatgctggtggcatttcctactaactaaagcatgggccctgtcactggagtgatggccttaaaggtcactctcactgacctttccatcacaataaacaagattccttgccagcgttgtatgttcaaaagatgaatgaaagttatttaagcctcttcaaagtgcaccatctctgtaatttatttcgacaaacaactaaattagaatgatcagaaaaagcccagtgaacagtctcagaaattgtccacttttttttttttggtttggaaaattttggcctttgtttggggtttaaaaacatgtggaaaccctccgggtgtgaaaaaagctctcccagtaaagcccacccccaatttttggggccttttttcggccctatttctggg

SEQ ID NO: 83098 - DNA, 784 bp, Homo sapiens
  sig_peptide (97)...(232): this location contains the signal peptide sequence, MGVGAVSLCTLYLFIICKHFKRWINFPNPDKGPSRHILLQLSKLR, Run with SignalP
  misc_feature (125)...(22): similar to gi338425 in the genepept database release 114, Run with FASTXY 3.3t00, default parameters
tttcgtaggggttagagccccagggctgggaggtggagggaggcgtgcactgctgtggaggggttagagccccagggctgggaggcggagggaggcatgggtgtgggagctgtctcgctctgtactttgtatctctttataatttgcaaacattttaaaaggtggattaatttccctaatcctgacaaaggccctagcaggcatattttgttacagttgagtaaactgaggctatttggagagcacagccaaccttaccaaattctttgggtgttaagcggcgagccaggagctgcatctagcgctgggacagctttggtgcccggtttctacactgctcttgcttagttttgagtgcagcctttctggcagtttctcattggtttaaagtccctccttatgtggagtcagacaactttgatggacttgaagaattgaagaggcaacatagtttttatttaagagaatgggatttggagtcccactgacctttctccaagctggttccacggctctctacctgtctgctcctggtctgagtctgagtgttttcatcaatcaagtgggtctaagactcctcctgcatagcgcagctgtagggattaagcaggataatattgagaaattccctgggactgcttgactgtagtttaagagcccaatgttgggtgcctgtctcatgccggggccagcttcgggggcggcaaataaaaaatggccccggaaactttggggggggctggtaatggagagggttccccaaatgttacctacgttaaaaact

SEQ ID NO: 83099 - DNA, 718 bp, Homo sapiens
  sig_peptide (518)...(383): this location contains the signal peptide sequence, MCGPFCLLPHVCGPRVCAFLPPSPSQLLRKPPSGGLFQQTAFSVQ, Run with SignalP
  misc_feature (155)...(1): similar to gi2317711 in the genepept database release 114, Run with FASTXY 3.3t00, default parameters
atgagccactatgcctggcctggcctttttcaatatagtaaattgaatgggtttttattcgtttgtgggcctctcctttctcctcacttcttccccttgaccttggtggattccttgattgggttgaggcaaaggttcccacacggctttggcttcttggtaactgatcaagagactgactcctacataaccaagggaccccaggagttcccaccaggcttaacaaactcacccaggaccctgtttctcccatggtgttgttcgcttcttctcagccaagcagaattgaaggaggacagacacacagttattcctacctgcagtgctcctgccttcaaataccggggaagtaacgcagatccgaaacatagcgactcgttaactgcacagaaaaagctgtctgctggaataaacctccagaagggggttttctgagcaactgggaaggggatggggggaggaaagcgcaaacccgtgggccacaaacatgtgggaggaggcagaaaggcccacacatatattcaaagacatgggaaattggaaaatgaaattcaccggccgttccatttcccccacctgtagcctcagatccaattagccctgggaaaggtgaggagccagactcacaagcccccatcccactggtgttgggacacacccctacccggaaaaagacggtgcactaaggcttaaatccaagaacctggttccctgctgc

SEQ ID NO: 83100 - DNA, 769 bp, Homo sapiens
  misc_feature (1)...(769): n = a,t,c or g
  sig_peptide (178)...(313): this location contains the signal peptide sequence, MLLWLLLLILTPGREQSGVAPKAVLLLDPPWSTAFKGEKVALICS, Run with SignalP
  misc_feature (178)...(674): similar to gi305334 in the genepept database release 114, Run with FASTXY 3.3t00, default parameters
tttcgtagctgatggaagatgagccccaacttctaaaaatgtatcactaccgggattgagatacaaacagcatttaggaaggtctcatctgagtagcagcttcctgccctccttcttggagataagtcgggcttttggtgagacagactttcccaaccctctgccccgccggtgcccatgcttctgtggctgctgctgctgatcctgactcctggaagagaacaatcaggggtggccccaaaagctgtacttctcctcgatcctccatggtccacagccttcaaaggagaaaaagtggctctcatatgcagcagcatatcacattccctagcccagggagacacatattggtatcacgatgagaagttgttgaaaataaaacatgacaagatccaaattacagagcctggaaattaccaatgtaagacccgaggatcctccctcagtgatgccgtgcatgtggaattttcacctgactggctgatcctgcaggctttacatcctgtttttgaaggagacaatgtcattctgagatgtcaggggaaagacaacaaaaacactcatcacaaggtttactacaaggatggaaaacagntttctaatagttataatttagagaagaatacagtggattcagtctcccgggataatagcccatattattgtgctgggtaaaagagagtttacatacttgggattggagaactttaaaacccccaattatccaagtttacgggaaggggcctatactccggagtaccaggggggg

SEQ ID NO: 83101 - DNA, 796 bp, Homo sapiens
  sig_peptide (238)...(373): this location contains the signal peptide sequence, MCLQFDLLSHATAFLLRLLIIAHSVLLCIIDLVCDNELIVLLDVE, Run with SignalP
  misc_feature (139)...(15): similar to gi2621376 in the genepept database release 114, Run with FASTXY 3.3t00, default parameters
ggaattcccgggtcgacgatttcgtcatttatgagtttgagacttttaacatcattagaaataggagagcatgtactttttccagcaagtgtaaaggggaaacaaacaccaaaaccccatctccctgatttttttggcttttcagaaataatacagcctagtcctatggccagttctgggtttttcttgacagcgtctgtaactgttcttgttatagtctaattctgggtatgagttatgtgtttacagtttgatttactgagccatgccactgcattcttgttaaggttattgattattgcccattctgttctgctgtgtattattgatttagtgtgtgacaatgagttaattgtattacttgatgttgaagaaggatcaaatatctgttcaaaggggatgcttgtagcctgtgtaattgagttggctatttcaggcttttaacatgttgtgaaacaattaggagaaagtacaggaggacctctgagggcagggaacataaaatttgttttcagctttttcgcagttgccaaaaatggtgccgtaaggcttttctggaattaaggagtccagtggtatttgggtagcaaaagcttctgtaaacctaaaatattccccctttatttccctttaaaatcaaagggggggttaccacctttcgaatggcacgccgcccccggaaaacaaccccatttttttgaagttcgttattaggggtgtgaaaaacccatgagaggcgcccccccccccccccctcggtgccttgacggatttttgagctccctccccccccccc

SEQ ID NO: 83102 - DNA, 649 bp, Homo sapiens
  sig_peptide (114)...(249): this location contains the signal peptide sequence, MPLLTLYLLLFWLSGYSIATQITGPTTVNGLERGSLTVQCVYRSG, Run with SignalP
  misc_feature (135)...(589): similar to gi396170 in the genepept database release 114, Run with FASTXY 3.3t00, default parameters
tttcgtgaggaagttcaagggcgagagtgagtaccagcagaaggctgggagtctgtagtttgttcctgctgccaggctccactgaggggaacggggacctgtctgaagagaagatgcccctgctgacactctacctgctcctcttctggctctcaggctactccattgccactcaaatcaccggtccaacaacagtgaatggcttggagcggggctccttgaccgtgcagtgtgtttacagatcaggctgggagacctacttgaagtggtggtgtcgaggagctatttggcgtgactgcaagatccttgttaaaaccagtgggtcagagcaggaggtgaagagggaccgggtgtccatcaaggacaatcagaaaaaccgcacgttcactgtgaccatggaggatctcatgaaaactgatgctgacacttactggtgtggaattgagaaaactggaaatgaccttggggtcacagttcaagtgaccattgacccagcgtcgactcctgcccccaccacgcctacctccactacgtttacagcaccagtcacccaagaagaaactagcagctccccaactctgaccggccaccacttggacaacaggcacaagctcctgaagctcagtgtcctcctgcccctcatcttcac

SEQ ID NO: 83103 - DNA, 979 bp, Homo sapiens
  sig_peptide (258)...(393): this location contains the signal peptide sequence, MATAAQGPLSLLWGWLWSERFWLPENVSWADLEGPADGYGYPRGR, Run with SignalP
  misc_feature (291)...(694): similar to gi5360269 in the genepept database release 114, Run with FASTXY 3.3t00, default parameters
cagaggctcgggaaggggcgtggatccccggaggcggtccccgggttgcagtgagggaagtgggccgggaggagagatgggcggtgaagaggcccggccctgccagggaggcgggcggatccgtggcagtgaccagaaggggccggaagggggtggccgccggccgggccccgccctggggccgcctccccgcgggttccgttggctgtggcggcagctgacgcttgtggcggcggtggcttcggggtgggcgtaagatggcgacagcagcgcagggacccctaagcttgctgtggggctggctgtggagcgagcgcttctggctacccgagaacgtgagctgggctgatctggaggggccggccgacggctacggttacccccgcggccggcacatcctctcggtgttcccgctggcggcgggcatcttcttcgtgaggctgctcttcgagcgatttattgccaaaccctgtgcactccgtattggcatcgaggacagtggtccttatcaggcccaacccaatgccatccttgaaaaggtgttcatatctattaccaagtatcctgataagaaaaggctggagggcctgtcaaagcagctggattggaatgtccgaaaaatccaatgctggtttcgccatcggaggaatcaggacaagcccccaacgcttactaaattctgtgaaagcatgtaagtacgcaaggagggagggagggaataaggaagacggtgggatacaactggactgaagtttctgttttgaacatcacttctgttgttaggacaacagttaatggatatagagaactaactcagcctattataggtaggaaagaagggaactggaacactgattcccttaagtttcttgggcatgttgccactaagctaggtgtggttctattttgttcccttttcctaaatagattgggagtaaatccttataactgtacttatgtaagtagatgtactaacaca

SEQ ID NO: 83104 - DNA, 550 bp, Homo sapiens
  sig_peptide (96)...(231): this location contains the signal peptide sequence, MERRRLLGGMALLLLQALPSPLSARAEPPQDKEACVGTNNQSYIC, Run with SignalP
  misc_feature (168)...(532): similar to gi4205084 in the genepept database release 114, Run with FASTXY 3.3t00, default parameters
ctttcgtggaagaaggaagaagagggtagaggaggagagggaggaggaggagggaggtggcggcgccgtggcggaggagcaggagcaggagggggatggagaggagaaggctcctgggtggcatggcgctcctgctcctccaggcgctgcccagccccttgtcagccagggctgaacccccgcaggataaggaagcctgtgtgggtaccaacaatcaaagctacatctgtgacacaggacactgctgtggacagtctcagtgctgcaactactactatgaactctggtggttctggctggtgtggaccatcatcatcatcctgagctgctgctgtgtttgccaccaccgccgagccaagcaccgccttcaggcccagcagcggcaacatgaaatcaacctgatcgcttaccgagaagcccacaattactcagcgctgccattttatttcaggtttttgccaaactatttactacctccttatgaggaagtggtgaaccgacctccaactcctcccccaccatacagtgccttccagctacagcagcaacg

SEQ ID NO: 83105 - DNA, 932 bp, Homo sapiens
  misc_feature (1)...(932): n = a,t,c or g
  sig_peptide (32)...(167): this location contains the signal peptide sequence, MAALAAAAKKVWSARRLLVLLFTPLALLPVVFALPPKEGRCLFVI, Run with SignalP
  misc_feature (32)...(562): similar to gi4322346 in the genepept database release 114, Run with FASTXY 3.3t00, default parameters
tttcgtcccgtaccgccaggcgatcgcgctgatggcggcgctggcagcagcggccaagaaggtgtggagcgcgcggcggctgctggtgctgctgttcacgccgctcgcgctgctgccggtggtcttcgccctcccgcccaaggaaggccgctgcttgtttgtcatcctgctcatggcggtgtactggtgcacggaggccctgccgctctcagtgacggcgctgctgcccatcgtcctcttccccttcatgggcatcttgccctccaacaaggtctgcccccagtacttcctcgacaccaacttcctcttcctcagtgggctgatcatggccagcgccattgaggagtggaacctgcaccggcgaatcgccctcaagatcctgatgcttgttggagtccagccggccaggctcatcctggggatgatggtgaccacctcgttcttgtccatgtggctgagcaacaccgcctccactgccatgatgcttcccattgccaatgccatcctgaaaagtctctttggccagaaggaggttcgaaaggacccccagccaggagagtgaagagaacacagggaatagaaccccaatacctntcctctctgaggaaaggctgaaacttcaagctccccttgtgataagacttggtcagataactgagtctggtcaatggaatatgagtggaaatgatgtgtgcaacttccgggttctgtccttcctgccgggtggaatgtgaatatgatggcacctgggacccaaagacaggagccacatcttgagagatagatggcagatctgcccctgtggctttggatcatttacctcagtgaacacaacaagcattatccatgaaaccataggttttgtgtgctagttctagtttttaaaatatgaattaaattaaatacgtatctgttaaaacttaaaaaaaaaa

SEQ ID NO: 83106 - DNA, 953 bp, Homo sapiens; identical to SEQ ID NO: 79722
  sig_peptide (477)...(612): this location contains the signal peptide sequence, MFLHSVNLWNLAFYVFMVFLATLGLWDVFFGFEENKCSMSYMFEY, Run with SignalP
  misc_feature (471)...(179): similar to gi6013099 in the genepept database release 114, Run with FASTXY 3.3t00, default parameters

SEQ ID NO: 83107 - DNA, 514 bp, Homo sapiens
  misc_feature (1)...(514): n = a,t,c or g
  sig_peptide (220)...(355): this location contains the signal peptide sequence, MHPLPGYWSCYCLLLLFSLGVQGSLGAPSAAPEQVHLSYPGEPGS, Run with SignalP
  misc_feature (244)...(514): similar to gi3876094 in the genepept database release 114, Run with FASTXY 3.3t00, default parameters
tttcgtctggagcaggcgggaaagcgctggagagaagggggcacctggataaccacccatcttgaaggagacctccctgccctgcctctgttgtcccccagagcactgcctgatcatcctctgttccccatcctcccagcccttcctgctgtacctgtggggagctgatctcctcagtccccctgcttttccccggtctgccatcaccaccccaccaccatgcacccccttcctggctactggtcctgttactgtctactcctgctattctccttgggagtccaggggtccctgggggctcccagcgctgccccagagcaagtccatctgtcttacccaggtgagccaggctccatgactgtaacttggaccacatgggtcccaacccgctctgaagtgcaattcgggttgcagccgtcggggcccctgcccctccgcgcccagggcaccttcgtcccctttgtggacggnggcattctccggcggaagctctacatacaccgagtcacgcttc

SEQ ID NO: 83108 - DNA, 613 bp, Homo sapiens
  sig_peptide (176)...(311): this location contains the signal peptide sequence, MWIRALSCSATCPLPWNSAYYLAAIQTTINAFYKMRSLDCRVGFR, Run with SignalP
  misc_feature (480)...(598): similar to gi2641431 in the genepept database release 114, Run with FASTXY 3.3t00, default parameters
tttcgtgcccccaggccgggcgctgggggcgcacaggcatacagattctctctcctcaccacgcggctgctgctggaggatggaggaggggtggtgtcagcaattcaagactgtctttcctaccctcttcagtgcccttccttgataagctgtttaaaccaggtatgtaaggttcatgtggataagggctttgtcttgttcagcaacgtgtccattgccctggaacagtgcctactacctagcagccattcaaactactatcaatgccttttacaaaatgaggtcattggattgcagagttggctttcgagaagattttgtggcctttctcagctgtctaggtgctgtaggtgctgtgtttctatggctgcaaggatgaagagaaacagaggatcaaacttaaagtcacagcaagtaggtggcagagtgaagagcagatccagcagattctctgaactctcggaaagccagctggcacatcaaaaagacactcagacaacctatggataggattgggggttttgctccaaaggccaacagccagtgaagaactgaggcctgctgccaaccacaagagagagtctagaagaggattccagccccaggcaagtct

SEQ ID NO: 83109 - DNA, 469 bp, Homo sapiens
  sig_peptide (180)...(315): this location contains the signal peptide sequence, MFLWLFLILSALISSTNADSDISVEICNVCSCVSVENVLYVNCEK, Run with SignalP
  misc_feature (174)...(472): similar to gi4240325 in the genepept database release 114, Run with FASTXY 3.3t00, default parameters
cccgtaattctcgggtcgacgatttcgtggcgcggaggagctctgtccggaatcacatagataccatcgtggaaacagcagcgcaggtcacggcgccgcgggccctgcaccagacgctgggctctagagattatttctctttattcagaagcatacagttgtttgctgattgcaagaagatgtttctgtggctgtttctgattttgtcagccctgatttcttcgacaaatgcagattctgacatatcggtggaaatttgcaatgtgtgttcctgcgtgtcagttgagaatgtgctctatgtcaactgtgagaaggtttcagtctacagaccaaatcagctgaaaccaccttggtctaatttttatcacctcaatttccaaaataattttttaaatattctgtatccaaatacattcttgaatttttcacatgcagtctccctgcatctggggaataataaactgcagat

SEQ ID NO: 83110 - DNA, 427 bp, Homo sapiens
  sig_peptide (379)...(244): this location contains the signal peptide sequence, MATDITPEAIGFLSAVGVFIVLLAVLFLFINKKLCFETIGGLPFL, Run with SignalP
  misc_feature (293)...(390): similar to gi1477963 in the genepept database release 114, Run with FASTXY 3.3t00, default parameters
ttctaaagagctaagaagatgggaagtggtagtcagagcctcttcccatctgctccttgagctctagggagaacattactttcataaagataatgtattctttagtaaagtcgattcatcatgtccaccctgacccagaccacagcaagttgccaagcccaggagaatttgaagcataatgcttacccagccccttgtgaatcccagtcttgtctttagaatgctttcttttccctcgatgctccaggaaaggaaggcctcctatcgtttcaaaacacagcttcttgttgatgaagaggaagaggacggccagaagaacaataaagaccccaacagcagacaagaagccaatggcttcaggagtgatgtcagtcgccatggtcggacgagggggctgcccgacggccgcccaggttcggggacgaaa

SEQ ID NO: 83111 - DNA, 497 bp, Homo sapiens
  misc_feature (1)...(497): n = a,t,c or g
  sig_peptide (114)...(249): this location contains the signal peptide sequence, MVLLWKNFILKRRRCIALVVEMVLTFLFSAALLATRSVITINKNG, Run with SignalP
  misc_feature (108)...(497): similar to gi1514530 in the genepept database release 114, Run with FASTXY 3.3t00, default parameters
tccggtattcgcgggtcgacacggcaaagaacctgaagacgacccaaaagggtacctagagttgaactttctctctttttagaagaatagatttctcggagtctgaaaaatttatggttcttctctggaagaattttattttaaagaggcggcgatgtattgctttagttgtggaaatggtcctcacatttctgtttagtgctgcgcttttggcaacacgctctgttattactataaataagaacggacctttcgattttgctgctcagcctgtcgatgaagtgcctttctacatcacagcttccttaatttctccttctcctttggaattggcttacgtgccttccagaagtactgtggttcagggtattattgaaagagtgaaaatggatttaagccctcanatgaaaggttgaacctgcaccagtcatccaaagcagtgacccaacgcttatctttatctttttgctggtttatgccatcgccacaatatgctt

SEQ ID NO: 83112 - DNA, 525 bp, Homo sapiens
  sig_peptide (251)...(386): this location contains the signal peptide sequence, MRPALAVGLVFAGCCSNVIFLELLARKHPGCGNIVTFAQFLFIAV, Run with SignalP
  misc_feature (260)...(527): similar to gi3738167 in the genepept database release 114, Run with FASTXY 3.3t00, default parameters
ggacttctcgggtcgacgatttcgtgccccctcggatgaatgggaccgaagctgactgcgaactacagcttcttggcagcgtcggtgttggccgcgggagaaggggagaccgcggcggcccccagtgagagcggctttccaggacggtgcgatgtgctgcgcagcgaagaggcaggaggccggcttcctggggtagcggtacaggcgggcgcttactctgtgcgcttgcttccccaaccctgcaccggccatgcgcccggccttggcggtgggcctggtgttcgcaggctgctgcagtaacgtgatcttcctagagctcctggcccggaagcatccaggatgtgggaacattgtgacatttgcacaatttttatttattgctgtggaaggcttcctctttgaagctgatttgggaaggaagccaccagctatcccaataaggtactatgccataatggtgaccatgttcttcaccgtgagcgtggtgaacaactatgccctgaatctcaacattgccatgcccct

SEQ ID NO: 83113 - DNA, 421 bp, Homo sapiens
  sig_peptide (114)...(249): this location contains the signal peptide sequence, MMKCSVRLTLQFFGLGFFFRPQRGISLFIAETRRNKIILQHICQD, Run with SignalP
  misc_feature (266)...(375): similar to gi2633101 in the genepept database release 114, Run with FASTXY 3.3t00, default parameters
tcttggtggccatcttctggtgtggctgatgaccacgacaggagttttgtttgttattctctatgtagatatataaatggccattatttaatgataaataataatcacacatcatgatgaaatgttcagttaggctgacactacagttttttggcctaggattcttctttagaccccaaagaggaatatcattgtttattgctgaaaccagaagaaataaaatcattctgcagcatatctgtcaggattttttatgctgccagaaagttatataaccgtaagtaaagtaatttcagcagcctttcataaatgcagctggaagagtgataactttaattctgctagtcaattcttgagttggtccagccagctccataatctcttgataaaatgataacaacctaacatttactagatgtct

SEQ ID NO: 83114 - DNA, 457 bp, Homo sapiens
  sig_peptide (51)...(186): this location contains the signal peptide sequence, MRRFFWCPSPSFCTSVCSFEVPRPSSQKSGGSTSHSPTALPHRRE, Run with SignalP
  misc_feature (371)...(384): similar to gi473910 in the genepept database release 114, Run with FASTXY 3.3t00, default parameters
tcggggattcgacaaaaccaacagccaaataataaaataatcatagttagatgagacggttcttctggtgcccttctccatcattttgcacctctgtgtgttcttttgaggttcccaggccttcctcacagaagagtgggggttccacatcccactcccccacagcccttcctcacagaagagagattgactatagcacattaactctaatagtgggtttttgcattgtaaaacctgagaagggagagattctcagcaattaccaatgattttataatttcattgagtaaagctttttattttcattgagtgaaacgtttggacatggaggcaaactctttcgtaagtttcatgtcataatatttaagcttgcgttcccttcagctcttagcataggtgctggggaatgttgttttctaatctcctgatgtgaattcagaaaagcagtggttttggg

SEQ ID NO: 83115 - DNA, 453 bp, Homo sapiens
  sig_peptide (82)...(217): this location contains the signal peptide sequence, MLATTNFFSVEVGLGLVFFFLLNYILQNFSYEYLRPLNNTSKKLF, Run with SignalP
  misc_feature (343)...(430): similar to gi553923 in the genepept database release 114, Run with FASTXY 3.3t00, default parameters
agttcatttccattaaaacaaacaattggcagagtacagtcacaatattaatttaaaaaatattagaagcaaatcataaacatgttagcaacaactaatttcttcagtgtagaggtaggactgggtttggttttcttctttttgctgaattacattttgcaaaatttctcttatgaatatttacgacccttaaataacacctccaaaaaactgttcccctgaactgcatgttcagttcaaggaaaaaaaagatctctaattataagatgtgctaggaatggcctggtgtagagacagatgacaaacaggcctgtcaattctaacagatgttatattcagatcttgacagtgaccctaagctgtgttctcctcctcttattattccctaaaagttatgcagatacagacaaaaagaagatgagattagaagtataagtgaaccggacgcgtggg

SEQ ID NO: 83116 - DNA, 386 bp, Homo sapiens
  sig_peptide (66)...(201): this location contains the signal peptide sequence, MPVQLTTALRVVGTSLFALAVLGGILAAYVTGYQFIHTEKHYLSF, Run with SignalP
  misc_feature (66)...(380): similar to gi1932809 in the genepept database release 114, Run with FASTXY 3.3t00, default parameters
caggaactcgggcatggagccgccgcgggcctgctgagctccggagcgcggcagccggcggcacgatgccggtgcagctgacgacagccctgcgtgtggtgggcaccagcctgtttgccctggcagtgctgggtggcatcctggcagcctatgtgacgggctaccagttcatccacacggaaaagcactacctgtccttcggcctgtacggcgccatcctgggcctgcacctgctcattcagagcctttttgccttcctggagcaccggcgcatgcgacgtgccggccaggccctgaagctgccctccccgcggcggggctcggtggcactgtgcattgccgcgtaccaggaggaccctgactacttgggcaagtgcagcggctag

SEQ ID NO: 83117 - DNA, 815 bp, Homo sapiens
  sig_peptide (304)...(439): this location contains the signal peptide sequence, MLLLVVCNLHLIRCSKFSDFYMLEVWSNHPYRMLDNTAYCDLLAW, Run with SignalP
  misc_feature (194)...(30): similar to gi643117 in the genepept database release 114, Run with FASTXY 3.3t00, default parameters
gtggaattcgtcagtgtacatagagttgtcctgggaactatgtctgtcttcatggcactgtccacggagtacacacttagaactgacaagatcactgtatgacttgttaacatgtgaatcactggtggacatggagactcttgctgttttgttgatttggaaatggtagttctgaacttgccaaattgggtatatgttatttagtataagttacaaaaaaagaccaaaggttttcagaatgtgtgtttattcttcaaggttctgctcatttcttttagcattgtagtttgattgtagtttctgatgctgctcttagtggtctgcaatcttcacctcataagatgctctaaattttctgacttttacatgctggaagtctggtcaaaccatccttatagaatgctggataatactgcttattgtgatttacttgcctggagatcaagctcatcttaaaatcccgcctttccacatgaatgcgaggattctggatgctttattctttctctaatctctgtctctcttccatcaaggggatggttttatactaaagaactatttttccccaatccacactcacttatactccccaattttcgcaacggatttcttctaaccccctgtcttttcgcctcctcattataaattcgtgcccttctcatcgaacttctctaaatttttcaacaatccccccccctccggcgacgcgactacgcctcgtcgtatcgagggcaccacctctctcaccgcacctcctgattccacagcagtccccgctgcgcttatttctgtccttctcgcggcgcggggggagc

SEQ ID NO: 83118 - DNA, 637 bp, Homo sapiens
  sig_peptide (91)...(226): this location contains the signal peptide sequence, MSLKMLISRNKLILLLGIVFFERGKSATLSLPKAPSCGQSLVKVQ, Run with SignalP
  misc_feature (130)...(638): similar to gi1754714 in the genepept database release 114, Run with FASTXY 3.3t00, default parameters
ataaacttgttttaaattggcttattgctggtctctcaaggcttcctatttttgtttgctttagtctctctaaaatttcagggaaaaactatgagtctcaaaatgcttataagcaggaacaagctgattttactactaggaatagtcttttttgaacgaggtaaatctgcaactctttcgctccccaaagctcccagttgtgggcagagtctggttaaggtacagccttggaattattttaacattttcagtcgcattcttggaggaagccaagtggagaagggttcctatccctggcaggtatctctgaaacaaaggcagaagcatatttgtggaggaagcatcgtctcaccacagtgggtgatcacggcggctcactgcattgcaaacagaaacattgtgtctactttgaatgttactgctggagagtatgacttaagccagacagacccaggagagcaaactctcactattgaaactgtcatcatacatccacatttctccaccaagaaaccaatggactatgatattgcccttttgaagatggctggagccttccaatttggccactttgtggggcccatatgtcttccagagctgcgggagcaatttgaggctggttttatttgtacaactg

SEQ ID NO: 83119 - DNA, 881 bp, Homo sapiens
  sig_peptide (275)...(410): this location contains the signal peptide sequence, MTEATFDTLRLWLIILLCALRLAMMRSHLQAYLNLAQKCVDQMKK, Run with SignalP
  misc_feature (275)...(625): similar to gi5824869 in the genepept database release 114, Run with FASTXY 3.3t00, default parameters
agggtatatagagaaaaggatctcatgtattgctctacttttttcttctagatacctgttaacttcttacgctttcatgatacatttatctagttctgttattcaagttaaagtattatacagttaagtctatggcagagtcagattcttttatgtgtctaactgttgcgaagtatagacttcttatatcttatatggtgaccattaacatataacgagcatgctagcatattgttgtctttgagagcaccgtatcaactttttgatctgtagaatgacagaagccacattcgatactctgcgactctggttaataatcctgctgtgtgctttgcggttggccatgatgcgtagtcacctgcaagcttatttaaatttagcccaaaaatgtgtggatcagatgaagaaagaagcggggcgaataagcacggttgagctacagaaaatggtggctcgagtcttttattatctttgtgtcattgcactgcagtatgtggcgcctctggtaatgctgcttcacacaactctgcttttgaaaacactaggtaatcattcctggggtatttatccagaatctatctctaccttaccagtggataatagtctactgtccaattctgtttactctgaattaccatcagctgaagggaaaatgaagcataatgcaaggcaaggtccagccgttccacccggcatgcaagcttatggagcagccccctttgaagatctccagctagacttcacagagatgccaaagtgtggagatcttattcctagatttggactgcccttacggatcggctcagataatgggctggcgtttgtggctgacttggtacagaagacggcaaagtggaaaggaccccagattgtcgttctgc

SEQ ID NO: 83120 - DNA, 405 bp, Homo sapiens
  sig_peptide (195)...(330): this location contains the signal peptide sequence, MLDWGFPMQSTFYLLLMPFRTVPSGLPSKPRFPEVLGGIDTTVRV, Run with SignalP
  misc_feature (213)...(345): similar to gi5104605 in the genepept database release 114, Run with FASTXY 3.3t00, default parameters
cttagaaggcattagctatcattattatgatgatgagtactattattattttacgtccattcttttattcatttgagccttacataaaagccccaaaaggaaggcagtattattattcctaagtcacagctggacaagctgaggctctgagcgatggagtatcttgtctaaggccgcccgactaggaattgacaatgctagactggggcttccccatgcaaagcactttttaccttcttctgatgcctttcaggacagttcccagtggtttgcctagcaagccacgttttccagaggttctaggtggcatagacaccactgtccgtgtgtctggctcccagctcctaagagagtgattctcacctgaagaagcagggcagcatcacatggaagctttttacaagg

SEQ ID NO: 83121 - DNA, 622 bp, Homo sapiens
  sig_peptide (106)...(241): this location contains the signal peptide sequence, MNNFRATILFWAAAAWAKSGKPSGEMDEVGVQKCKNALKLPVLEV, Run with SignalP
  misc_feature (109)...(620): similar to gi431420 in the genepept database release 114, Run with FASTXY 3.3t00, default parameters
atgagttttccgcttcatcatctgcttctgttttctccatcttagtttgcccaaagcttgctggccgctgtgtagggctggtgagtggctggggctgtctgagccatgaacaacttcagggccaccatcctcttctgggcagcggcagcatgggctaaatcaggcaagccttcgggagagatggacgaagttggagttcaaaaatgcaagaatgccttgaaactacctgtcctggaagtcctacctggagggggctgggacaatctgcggaatgtggacatgggacgagttatggaattgacttactccaactgcaggacaacagaggatggacagtatatcatccctgatgaaatcttcaccattccccagaaacagagcaacctggagatgaactcagaaatcctggaatcctgggcaaattaccagagtagcacctcctactccatcaacacagaactctctcttttttccaaagtcaatggcaagttttccactgagttccagaggatgaagaccctccaagtgaaggaccaagctataactacccgagttcaggtaagaaacctcgtctacacagtcaaaatcaacccaactttagagctaagctcaggttttagga

SEQ ID NO: 83122 - DNA, 591 bp, Homo sapiens
  sig_peptide (61)...(196): this location contains the signal peptide sequence, MVGDTQWTRPECQAWTGTLLLGTSLLYCARSSMPICTVSMSQDFG, Run with SignalP
  misc_feature (79)...(424): similar to gi3878537 in the genepept database release 114, Run with FASTXY 3.3t00, default parameters
gcgcgccgtctgagcaccccaagcccgatgcagccatctttagacgaggcccgcagggacatggtcggggacacgcagtggaccaggcccgagtgccaggcatggacggggacgctgctgctgggcacgagccttctgtactgcgcccgctccagcatgcccatctgcaccgtctccatgagccaggacttcggctggaacaagaaggaggccggcatcgtgctcagcagcttcttctggggctactgcctgacacaggttgtgggcggccacctcggggatcggattgggggtgagaaggtcatcctgctgtcagcctctgcctggggctccatcacggccgtcaccccactgctcgcccacctgagcagtgcccacctggccttcatgaccttctcacgcatcctcatgggcttgctccaaggtaaggggagctcaggcggctccctcacgctctctggcaccagtggtggattccagctgcaagggacctgctgtgggactctgggttttgtgcattttggtcacacgtatgctgatgatgcctccaatactagggccttggagcgccttaactgtcaggagaacaag

SEQ ID NO: 83123 - DNA, 469 bp, Homo sapiens
  sig_peptide (216)...(81): this location contains the signal peptide sequence, MLVAVFIILAFNLVLSPATNLLYGSHTLSPSQRLLPGPPSPCSHP, Run with SignalP
  misc_feature (435)...(460): similar to gi3334810 in the genepept database release 114, Run with FASTXY 3.3t00, default parameters
ttttttttttttcgggttcaaagcctttattgggtcagggcttgctccagagctcaggggccaggtaggtcaggagccttgggatggctgcagggggagggaggccccggaagaagccgctggcttggagaaagggtgtgggatccatagaggagatttgtggcaggggacagcacaagattaaaagccaagatgataaaaacagcaacaagcatctctattctccttgagtttacaaagcccttccaagtacatctgccattctggctgtcaacatctatctgaaaggctgtcttggggaagaaagattagctgtcttctctctccccacagtgcaaaaccagcatgagcaggtaaatgctccaggacagcagatcacagcttagacaacagggaaacctgcctgcagcaggctcttcagaggaaggaggtgctggctgcttgctcacccccgcttcacttcttcctt

SEQ ID NO: 83124 - DNA, 327 bp, Homo sapiens
  sig_peptide (307)...(172): this location contains the signal peptide sequence, MADLVLRLTVVLGLLVLFLTCYADDKPDKPDDKPDDSGKDPKPDF, Run with SignalP
  misc_feature (162)...(255): similar to gi1518798 in the genepept database release 114, Run with FASTXY 3.3t00, default parameters
tgtttctcatgtattttaatgccatgaggtcattgtgtggtcattatcaacagagaattggacaaaaagcaacgtttttctcagtgcttacgtgctcctggacatggagcggaggatgaactcgactgcattctcaatgatctctgtgcccaggaggcttaggaatttggggaagtctggctttgggtctttgcccgagtcgtctggcttgtcgtctggcttgtctggtttgtcgtctgcatagcaggtcaggaataagacaagcagtcccaggacaactgtcaggcgaagtactaagtcagccattctggtagcacggggtattcg

SEQ ID NO: 83125 - DNA, 393 bp, Homo sapiens
  sig_peptide (327)...(192): this location contains the signal peptide sequence, MPLAFLGWVSGSLGTGVGMVEFGKYLLSYDTGPQVPVRVSNHLMD, Run with SignalP
  misc_feature (243)...(396): similar to gi5578775 in the genepept database release 114, Run with FASTXY 3.3t00, default parameters
aagctctagttcactattaacaattgtcagggctgactttatcacttgtccagaacaaaatgaaaatgcaggctttttattcaaacaccaggaaaatgaattcctttatctttcttcccaggtgtctctctcaacttgtcacttattttttatttgctattgaatgacaagctctcttgggcatgggactatccatgaggtgattagagaccctcacaggtacctggggccctgtatcataactcagtaaatacttaccaaactcaaccatacccacacctgtgcccaagctcccactaacccaccccaggaaggcaagaggcatgggaggcagaccatatgtgagcagagggtccaagcctcaagctctcggcccattgtctcaaaaggatt

SEQ ID NO: 83126 - DNA, 583 bp, Homo sapiens
  sig_peptide (189)...(324): this location contains the signal peptide sequence, MRVVPIMIIIDLCLNFPMGSLSALGTDIPQNLMGLLIVEKKCKRG, Run with SignalP
  misc_feature (170)...(7): similar to gi2313948 in the genepept database release 114, Run with FASTXY 3.3t00, default parameters
aattgcttttctgtttgaccaaaggcacctcatttaatctatttctaatttgttttaaggcgtgaattctggaaatgcgtaaaatgggaaatattctcagggaaatctttccaacttccttccccagcacagcttcagttgcgttaacgtataagagagcacttggtaaacactaaggcgatatacaaatgcgagttgttcccattatgattattattgatctttgcttaaatttccccatgggctctctcagtgctctgggcacagatatcccacagaatttaatgggtcttttgatagtggagaagaaatgtaaaagagggagaaatggtctcattttgatatttatatccccaccttttcaacaagcatctcacagcagggtagcccatgctttcccaaccctggcatgtaacattctggactggatagctttttgctgtagcaccagctgtacttttccttggacgatgatcgagcctcgctaagctctctttaccctccactattaacctactgggagaactgtgtgtgctagaaaccacgtttctcctgagcccatagtactctgctacttacagga

SEQ ID NO: 83127 - DNA, 350 bp, Homo sapiens
  sig_peptide (168)...(33): this location contains the signal peptide sequence, MQFKELIFKIFSYFIRFSLVRILWMPESYLLKELYLQIISKHTNP, Run with SignalP
  misc_feature (121)...(342): similar to gi2065319 in the genepept database release 114, Run with FASTXY 3.3t00, default parameters
cgctgtctcttaatgaacttctgttttggagggatttgtatgtttagatataatttgtagatataattcctttagcaagtaggattctggcatccacaaaattctcactaatgagaatcttatgaaataagaaaagatcttaaaaataagttctttaaattgcatttactactaaaatatgaaactattaaatctgctatggtcaattctaacttagcttttattgatcatgataatggaaatatcaactcagttctcttgtttagaaatcttacatacaacaatctatattgtagtctcacaaccagaaatatgttgctattctgctatcctttcattggaggctttaa

SEQ ID NO: 83128 - DNA, 369 bp, Homo sapiens
  sig_peptide (158)...(23): this location contains the signal peptide sequence, MVTQRLVRMQWLPGLKPRHSDTLLIHIQEQLWYNRTKRLPDALLQ, Run with SignalP
  misc_feature (165)...(264): similar to gi1651874 in the genepept database release 114, Run with FASTXY 3.3t00, default parameters
tttaaagtttcagaacccctgatttgaagcagagcgtctgggagtctcttcgttctgttataccagagttgttcttgtatgtgaataaggagcgtatctgaatgccttggcttcagccctggaagccattgcattctgaccaacctttgtgtaaccattttgtagactgtgaggactcttgtcactccttaaattctctcctaaacacattatattttgcttctgaagatgatccaaataccctcaaaactcaggtggagatactgttaaaagatagttttcaaaaagggtaagatcataactcattttaaatataaaatgaacacatgttaaaaattttaactcataagacaagcagttacaaccagt

SEQ ID NO: 83129 - DNA, 872 bp, Homo sapiens
  sig_peptide (508)...(643): this location contains the signal peptide sequence, MIIAIFLVLVLSQNLATSHQEMGSTALAFESRQDKYNTVEARLLA, Run with SignalP
  misc_feature (147)...(10): similar to gi1143004 in the genepept database release 114, Run with FASTXY 3.3t00, default parameters
gggctcggcgtgggtggggacacacactgaaaatgaaggacgtggttggcagggtagctgtacagtgctcttttctgaacaagcaatgtagagttgaggcatccccaggaaaagcttaccattttgcctctctgactttgtggaggcttaactttttgcctaaatgacatctctttctctctctctggcaaactccttagtttactgcaaatttaagatccagttttcatgttgcttcttcaaagatgcccctatgtgtctaagctaatcatccattctctgcttaccatgtattatcatggcatataccatacagctttggagatacctatacatgccttcccaaccacctccttcacatttttatgagcttcattatcatcaactgccattctctaagtaacctgatgccaagtaaccaagtagggattcactgtctgctgaatgaataataaatgaacgaatggactgggtacctggaacaactgtggcagattatttccagatatgattatagcaatatttcttgtcctggtgctctcccagaaccttgccacttctcatcaagaaatggggtctactgcccttgcctttgaatccagacaggataaatataatacagtggaagcaagattgctggctccaaggctacttcccttggttccttctcttaagacgctcgcccttggaacccagccaccatatgaggaggaacagccgactacaggaagcggccacagaaaggtgttccaatggagagagccccaactaaagtctactgtcacctagcaccaactgctagatatgggtgagcaagccttcagatctgtgctgtccaatatggtagccactagtgggtatttatatctaaa

SEQ ID NO: 83130 - DNA, 367 bp, Homo sapiens
  misc_feature (1)...(367): n = a,t,c or g
  sig_peptide (223)...(88): this location contains the signal peptide sequence, MKQSTASVFFLTKLFITAVIISIIITVIYASVSHKKLELSSLVQP, Run with SignalP
  misc_feature (246)...(313): similar to gi998609 in the genepept database release 114, Run with FASTXY 3.3t00, default parameters
ngttgtgtgagaaatccaagagtttcaatacacaaaaggaccggagaggaagctacggccctggtttttataaggaaggaagagagccgggttgcactaggctagacaattctagtttcttgtgactgactgaagcgtaaatgacagtgataatgatagaaataatcacagcagtaataaataatttggttaagaaaaaaactgaagcggtgctttgcttcatttcttaccatctttttggcaaacagaatgatgctgaaaatatcaaaacagggcagcagccaggaggaagggaaaatcaagcggtattaaaaaatgacagacagaaaaatcagctcctaagttacttagagttgatgcactggca

SEQ ID NO: 83131 - DNA, 399 bp, Homo sapiens
  sig_peptide (204)...(339): this location contains the signal peptide sequence, MIKNFSLLSQNSGSVLFVLTYLITFTVISNLALLLLTYPKIACLI, Run with SignalP
  misc_feature (264)...(390): similar to gi216001 in the genepept database release 114, Run with FASTXY 3.3t00, default parameters
aatgtgctttataaacaaatatgcttataaaccctgggttcttaaaccgctatacaaattgaaagggtgtcagcactccctccattccccaacccccaacactttccctagcaaaaatccgtagcagtttctgccttaagaaagatcatttaatccaagccataacatttgtgacttggctaattatgaaatacaattaaaaaatgattaagaatttttcccttcttagccagaactcaggaagcgttctctttgttctcacctatttaatcaccttcacagtcatttccaatctagctttactccttttgacatatcccaaaatagcctgtttaattctggccggagatgttctttcttcttatctgaactggctctgtctctgctctattggctgcg

SEQ ID NO: 83132 - DNA, 341 bp, Homo sapiens
  sig_peptide (164)...(299): this location contains the signal peptide sequence, MKREVTGPLEGSASVCQPFLFLLPGALFIQTALWLLTSKMLYEAL, Run with SignalP
  misc_feature (207)...(344): similar to gi2996158 in the genepept database release 114, Run with FASTXY 3.3t00, default parameters
ccatctcagacaaaaacaaaaacaaaataaaactatcccattagtaagacaatgttgacttacaaatgtaaaggtatttgtggtaataagaaggtggatagagttgaaacagtggagataaggtctaaaagcaatccagtttgctttgaagcaaaagcgacgtatgaagcgggaagtcacaggacccttggaaggcagtgcatctgtgtgccaacctttcctatttcttctgcctggagcactcttcattcagacagccctgtggcttcttacttcaaaaatgctgtatgaggctttgtattattacacccagcacccagcacccagcatgtccctgtttt

SEQ ID NO: 83133 - DNA, 533 bp, Homo sapiens
  sig_peptide (52)...(187): this location contains the signal peptide sequence, MLTLPQSLWMLTRRTICFVPTIVSCRGLLPSNPHHELARLISVSQ, Run with SignalP
  misc_feature (16)...(189): similar to gi4584824 in the genepept database release 114, Run with FASTXY 3.3t00, default parameters
caccttgtcttgtctccagccagtgggaataaccgaggtcaccataatgccatgctgacccttccccagagcctttggatgctcactagaagaactatctgctttgtccccaccattgtcagttgccggggactgcttccctccaacccccaccatgaacttgccagattgatttctgtgtcgcagcacagggtgtggccacacccagtaggcactcaatacctttaactggagaaatgcagagggaatgccttcatttggctgcctctgctgccccctgctgtctgagactggttggtacaacattaaagggctggttctggaacttaatggtttcgggaccccttttcttgcctaaaaattattgaggaccccaaagaacatctggttatacggtttatggctattggcatttaccggaatataaaattaaaatggaatgggtttgaaaaaatcctattatttgaataaaacaataaatgtggtgggacaacacaattttagaaaaaatatttcccaaaataaaaaaaaaa

SEQ ID NO: 83134 - DNA, 421 bp, Homo sapiens
  sig_peptide (359)...(224): this location contains the signal peptide sequence, MHCWFLASVCPALLPGAYVGSQIPTMSQLAGWVHGVQLTFYFLQE, Run with SignalP
  misc_feature (346)...(422): similar to gi17740 in the genepept database release 114, Run with FASTXY 3.3t00, default parameters
catattgaccacttgttctgttcagagcataaaccagaagcaggggcatcagagtgagtgagctctgaaggaactcacattaatgtgccagaggagctatatctggaagcagggctaagtcctgtaagaaatatttttccaaaatgttgcatgactttataagagggagagatcatttcttattggagagataatagggagcaggaactggaaatatagtaggttcctggaggaagtaaaatgtgagctggaccccatggacccaaccagctaactgtgacattgtgggtatttgagagccaacataggccccaggcaacagtgcaggacaaacactggccaaaaaccagcagtgcatgtatctgtcctgcacttcatcagtcaaccaatttgttggccacctgcaatgtgccaacattct

SEQ ID NO: 83135 - DNA, 697 bp, Homo sapiens
  misc_feature (1)...(697): n = a,t,c or g
  sig_peptide (162)...(297): this location contains the signal peptide sequence, MKCRAQLLAGHRHAALLRVLLLTQPSSKLPEASSMKPKMKISQRI, Run with SignalP
  misc_feature (97)...(15): similar to gi2921869 in the genepept database release 114, Run with FASTXY 3.3t00, default parameters
gggaggcatggaggaaacattccaggtgttgaggcctgcccggcacggctctgctgattaccactgtgtgacttttggccaagccattcaccttccgcatccgttttcctatccctgcctcgggtgatccctgcctcagtgtgagcactgagagagcccgtatgaagtgccgagcacagctcctggcaggccacaggcatgcagcgctgctgcgagtattacttctcactcagccaagttctaaactcccagaagcctctagcatgaaacccaaaatgaaaatctcccaaaggattctacttttccaacccagtagggtcgtggtatctggataaaggcacttccccctgctttataagctcctcatgacaagactgattccctgcaagaaatcaacagggacttgtcactgctgcctatgagagagatttacattttgtaaagcagataacttacctcagagaaagaacagcgaggttaaaaaagtctaacccatgtaagggaccttaattctttgccaaatattccctgaggaaattatgtgagacactcacagagttctatattggccggccataacaaaaacaatgaggcttattaaaccggcggagctaattcccttagtgagggtaatttagtttgcactggccgcgtttacacgtcgggttgggggaaaagnnccccccccccccccccc

SEQ ID NO: 83136 - DNA, 712 bp, Homo sapiens
  sig_peptide (148)...(283): this location contains the signal peptide sequence, MYLTMISCKPDLHLVVNLLLAPLVLQHYPRAKELLLIFFSQFSQC, Run with SignalP
  misc_feature (141)...(47): similar to gi829043 in the genepept database release 114, Run with FASTXY 3.3t00, default parameters
aatttcagcattgaattttcgcattagagcctgaatagtttgaaaatattcaaaagtagtttgattctttgtaagcagtatcaacaatgataacaataaatttagtatttttagaaggggtgttgtctttagtgctctaagaaatgaatgtaccttaccatgatttcttgtaaaccagacttgcaccttgtggtgaaccttcttttggctccgttggtcctacaacattaccctagagcaaaagagctgctattaattttcttctctcagttcagtcaatgcacagcagagccagtttaggaaaggttggccaaagtttttatgtttcttttttattttctgggtagaaaggaaaatgttccattttattgctgttttaaactattacagcaacactgatctttttcaaattggttctcaaagttacggaagacaggtctacctggtattttcagtacaaatgatgtgacactttctgtgtaagtgaccggagtttgatctttctgcaagggggtttcaacatcctcacattctgtctttggctctcccttgggtataactatatggggaggtatatgaaaataatttttatttagcggggatgctgggaatgttgttcccttaaatgcagctagggagtacttaggggttactcttggttataggttacaaatccaggacattcagaagcccctgataggactctgtgttt

SEQ ID NO: 83137 - DNA, 720 bp, Homo sapiens
  sig_peptide (83)...(218): this location contains the signal peptide sequence, MQFASNEIQIEFCILLLPLLVLIPLSLQERIAVLQSSHCYKQRQF, Run with SignalP
  misc_feature (173)...(23): similar to gi404799 in the genepept database release 114, Run with FASTXY 3.3t00, default parameters
aaaaaattatacaatcctatagatatgtttatgctattcccctccccactcctacaaatcttgaatacatctagagagataaatgcaatttgcctcaaatgaaattcagattgaattttgcatcttgctccttcctcttttggtcttgattccactttctctgcaggagagaattgctgtactgcagtccagtcactgttataagcagagacagtttccttggagcagctgacctcattgggccagtcctatttagtaataaagaggggtttgttatagctttcccatgaaaagatttaagaggagcaattcagagaaatggaaacattcttaattagcaagcacatcatctcaagtttccaagattttttaatccatagagcagagacatgtttaaaaggagagacaatatggtttgaaggactaagcaccaaactgaccgagggaaatgcctttatcctactgatttgccacatgttcccaacaagtcatttggccatttaggcttctgtttccttggggaggatgctatggtaaggcctgaagaatcacctgtaaaactcgctgcaaatattgacttctgatgatcttggtcaaccttggcacggaaggcttctcaccaaaataatacggttggaaggccccccggaagcctttggaacccttgccccttattgggagagacccacctggttgggtccttaacccgggtcatgaacc

SEQ ID NO: 83138 - DNA, 408 bp, Homo sapiens
  misc_feature (1)...(408): n = a,t,c or g
  sig_peptide (216)...(351): this location contains the signal peptide sequence, MLGLKRVLALLVRGITLHGGEVTPRTTWPGAAEPACWAGTRKPPQ, Run with SignalP
  misc_feature (270)...(384): similar to gi5917736 in the genepept database release 114, Run with FASTXY 3.3t00, default parameters
aaatatctgttcgttgttcaaagtttgctaaaaaacggacaagtagagagaaaaatacttgcctagaatccaaagacagtattttgaaatctaccaagattttctgttgcttttttcctagttgtgatcatgctgtatagacatctttgcatcttgcttttatcttgtatcatggtgacataagaataagataagcatttttgtcaaagcatggaatgttaggtctgaaaagggtcttagccctgctggtccggggcattactttacatggtggggaggtgacacccagaaccacctggcctggtgcggccgagcctgcatgctgggcgggaactaggaagcctccccaacctctggccccgtggagccctcagcctcagctgcagtggaggcacctcgggctctggn

SEQ ID NO: 83139 - DNA, 400 bp, Homo sapiens
  sig_peptide (243)...(108): this location contains the signal peptide sequence, MGNSCIGRFIRFLCRLSLNLTSNGQLDRGFEFTVLLDPDTRWFMG, Run with SignalP
  misc_feature (293)...(402): similar to gi3093373 in the genepept database release 114, Run with FASTXY 3.3t00, default parameters
ccccacttagccatacagagtccctaagaagcacaggcgggccggtgacaactgtttaaatccagcgcccacatgccgctgggatattctgacccactctgggctgcccccataaaccagcgcgtgtccggatccaaaagcactgtgaactcgaaacctctgtcaagctgcccattcgaggttaagttcaaagacaggcgacaaaggaaacggataaagcgtccaatacaagaattccccatttcagacgcacaagacgaagagcacaggcggtgtcaggacatgttaggatccgtccccaactccgccgtcttcatccccacaaagccacgaacaactgtcccccggagcccagctgctaaaacagcccatgccgcattctgcacgatgcacgccaagg

SEQ ID NO: 83140 - DNA, 902 bp, Homo sapiens
  sig_peptide (705)...(570): this location contains the signal peptide sequence, MCQYQSLPVCAMGYFMRCPQTQLATYTASCFLFTVSWALPPALLM, Run with SignalP
  misc_feature (234)...(67): similar to gi807589 in the genepept database release 114, Run with FASTXY 3.3t00, default parameters
atactctctcattaattttaataattatctatctcaaaacctagattataaggacctagaaggatcttgcttgcttctaacaatcccccaaaagacttaacgctaggcacatggtaggcatccagctgatactggctgatacatattttcaaaagagattttaataaaaaaagaagaaggctggaaggaaataaaacaatgacagtaacatgcgttacgatgttgaggttataggtttccttttctctgtttttcaaattttctgcaatgtgcttacaactgtttttataaccacaactcttttgatgacgtcttttaaaaatgaaaaaaacaagtgactatactggagttgaggttcaccagcatgcatcttgggagacatgagccctaaactgtgtcttcaagcaaaggaattaatttaacacacacaactggcagagaggagaagggaaatgtgtgcgagaaagccctgcagtgggactgagcaaagtgctcattcgaaaacagcctgccttggagaagaaaccagagagaaggtttgagaaggtttcaaagtcacgagtttggcatgaggagagctggaggaagagcccaggagacagtgaagaggaagcaagaggctgtatatgtagccagctgtgtttgggggcacctcatgaagtatcccatagcacaaacgggcaaactctggtactggcacatttactaaaagacaaaactccacataaacctgagtccttccaaccaacccggagacttacccaaatctaatctaaataacaacaacaaaaaagaaaaaatcactatgagcctgtaagtcattaagggggtacatcttcaaatgacatgctatcactaaccatgggcttaaaaccccacagatccctaaaacttaaagtata

SEQ ID NO: 83141 - DNA, 506 bp, Homo sapiens
  sig_peptide (268)...(403): this location contains the signal peptide sequence, MFCLWNQWVVTAQRLLVSWLSHAQRQPCPLSLFCGRRNPLAWTIF, Run with SignalP
  misc_feature (99)...(1): similar to gi2447143 in the genepept database release 114, Run with FASTXY 3.3t00, default parameters
aattcccgggtcgacgatttcgtccgacttggcctgaaggaagtgacatgagcataaggaagtggggtgcggtgggagcgggtcaagtgacagaggagggctgggaaatattaatgaatagagtctgttgagaatcagccaatgtgacttgaagcaacaggcaaccagaatcgtgatgggtcagtatttcccccaggcctatccagaccaggtcttatcctcctagcaacgcggccctctcggctcttaaggcgtgacttgccatggatgttctgcctttggaaccagtgggtggtcacagcacagaggctgttggtttcatggctgtcacatgcacagagacagccctgtccactgagcctgttctgtggcagaaggaaccccctagcctggaccatctttgggtggaaacaccagcccctcacgtctgactgtcattttcagatgtgaagagaacacacagtgttgccgatgtgtttgtattgcctgtaaacaacgattgtatt

SEQ ID NO: 83142 - DNA, 845 bp, Homo sapiens
  sig_peptide (231)...(96): this location contains the signal peptide sequence, MLVFMNCQVVLVCKSLSTARGIAHKRSVVSHISYSREERLVAPLP, Run with SignalP
  misc_feature (136)...(435): similar to gi28915 in the genepept database release 114, Run with FASTXY 3.3t00, default parameters
accgggtcgacccacgcgtccgagtatccgttccgccaaggggggaaaggaggagctggagacagattgtaggaccgagcgcgggcaggcgggaggcaacggagctaccagccgctcctctctgctatatgaaatatgggagacgacagaccgtttgtgtgcaatgccccgggctgtggacagagatttacaaacgaggaccacctggcagttcataaacacaagcatgagatgacattgaaatttggcccagcccgaactgactcagtcatcattgcagatcaaacgcctactccaactagattcctgaagaactgtgaggaggtgggactcttcaatgaactagctagctcctttgaacatgaattcaagaaagctgcagatgaggatgagaaaaaggcaagaagcaggactgttgccaaaaaactggtggtattcagacctaggctatttttattgtgctttgggataattttcttaattggttaaaacacaaaatcatgggcttagtagagtaaaaccagtaaaaccagatagtagtcactaatcccagtcagccattcaggtctttaggagttccagatgatggatcagcacaagtctgtcgtcaccgaaaattagtcctcttgttcttccaggggagtattagtttaataatcggttttttaaaaaatatttatattataaatatgttgaagatgttaaaaggtgataaattactcagattttgttggataacatatttgttgccaaattccactcttttctgagctgatcagacttctcagctacactgtttttttgaatcagcaagtcaataaacatttatcaaatttccactctta

SEQ ID NO: 83143 - DNA, 1152 bp, Homo sapiens
  sig_peptide (283)...(418): this location contains the signal peptide sequence, MGVLVVLTVLWLFSSVKADSKAITTSLTTKWFSTPLLLEASEFLA, Run with SignalP
  misc_feature (289)...(1141): similar to gi790585 in the genepept database release 114, Run with FASTXY 3.3t00, default parameters
tttcgtggcggactgaccacggcccgggcatgggctgcttgggagacgcgagcggtgcgtgtgccgcgggtgcgctgccggtgacaggtacccaggggtggcgtgaggaggcctcgtggacaaagagagggtttggggcacaaggcgaccctgtgcccctgtcacattgagcttccgcctctaccgtgactcagtttaccctctggtgtcccatcccttcccctattcgcgagcgccccgagttgccctcagtggtcttcttggcaaggagtttgctataaaatgggagttctggttgtactcactgttctgtggctgttctcctcagtaaaggccgactcaaaagccattacaacctctcttacaacaaaatggttttccactccattgttgttagaagccagtgagtttttagcagaagacagtcaagagaaattttggaattttgtagaagccagtcaaaatattggatcatcagatcatgacggtaccgattattcctactatcatgcaatattggaggctgcatttcagtttctgtcacccctccagcagaatttgtttaaattttgtctgtcccttcgttcttactcagctacaatccaagccttccagcagatagcagctgatgaacctccaccagaaggatgtaattcgtttttttcagtgcatggaaagaagacttgtgaatctgatacccttgaggctcttctactgacagcctctgaaagacccaaacctttattgttcaaaggagatcacagatatccctcgtctaatcctgaaagccctgtggtgattttctactctgagattggctctgaggaattttccaattttcaccgccagcttatatcaaaaagcaatgcaggcaaaatcaactatgtattcagacattatatatttaatcccaggaaggagcctgtttacctctctggctatggcgtggaattggccattaagagcactgagtacaaggccaaggatgatactcaggtgaaaggaactgaggtaaacaccacagtgattggtgaaaatgatcctattgatgaggttcaggggttcctctttggaaaattaagagatctgcaccccgacctggagggacagttgaaagaactcagaaagcatcttgtagagagcacctgtatt

SEQ ID NO: 83144 - DNA, 714 bp, Homo sapiens
  sig_peptide (199)...(334): this location contains the signal peptide sequence, MVTGIFMLLVFIFHKMASVTGLERCPPKCLPCFCYLRLMRPLGPF, Run with SignalP
  misc_feature (162)...(51): similar to gi606881 in the genepept database release 114, Run with FASTXY 3.3t00, default parameters
actcccgggtcgacgatttcgtccggaggccatgttaatggagtcacagcaggatataggagtagacaattaggaaggtgaagtttaaggtaattaagaataactcacatggcattttaattatagaaaacgataataaaatacaaagatggaagatagttggataatcctatgacatctctttatagatatatcaaaatggtaactggtatttttatgcttttagtatttattttccacaaaatggcaagtgtcacagggcttgaacgctgccctcctaagtgtttaccatgcttttgttacttaagactaatgagaccattgggaccctttatggagctctgtgccaggccctgtgctgagcagctcacataggttatgccgtgtcatcctcaggagaacccctgggaagctggtcctgatgggcaggagagaaagcaggcacagagagtaggtaagtgctaaggattcaaatctacagggtctggctgtagagcctttgctcttcagcttttagctataagatcccctagttaagtggggtgaaagactgagagggaggggattgggaagaccaaatgaaacagtgaaggatattttgaccagaggtgtagaagcttcaaaatcaagtgctgggtttagcgattacccaatctcaaccaaggaaagaatgggaacagtccagttccaggattcattatgccacactgtatt

SEQ ID NO: 83145 - DNA, 1177 bp, Homo sapiens
  sig_peptide (702)...(837): this location contains the signal peptide sequence, MSLRLGPAWRHLTCLGTKHSKANSVLASQHAGFFVAQGRWAIHRA, Run with SignalP
  misc_feature (228)...(14): similar to gi18541 in the genepept database release 114, Run with FASTXY 3.3t00, default parameters
tttcgtcttggcatagcctgctagaggggtgcagctgcatctcctgcctctggcattcccgcagcagatgcacatggccctgcactgagaagcgcccagctcactgcacctgcactcaggaattgtaggactccctctaggagttgggcacatgtcgttggtgggagccctgtccctgccttgagaaagctgtaggtgttctgtgtccagctgtgcacctgtcctttgtttttgtgagtcttcttggatgcacctgaatcctgcattcaggaggcctatcccttgttctctgctagcaaccctgcctgctatctctcttccggtgccctctcagccatcagaccagagcttgcttcttccctgcttgggcagggaagtgccaggtaaagggtggtctcctttagccacaaggggtggctgaccttatgacctcccgcctctgagcagaaaggtgacaggctgcttttggttaccctcagggcccagcagagtcccctgagaggcagcctctgttgggagcaggtggcacaactttgtttagctctacaaggcaggaggagtttaatagtacttctcattagcactgaaatttgtttccaaagcacttgtgtgtacaatatttaatttagatcttctcagtgggcctgtgggttagaatagcatgtgggattgatgggttcatcattttacatctaaggaaaatgagccttcggttgggacctgcctggaggcacttaacatgccttgggactaaacactccaaggcaaactctgttctggcaagccaacatgccgggttctttgtggctcaagggcgatgggcgattcacagggccttctcgagcaggacttctcccacacctcctcgtgggcccctgctgctgcctggcagacacccgctcctttcccgacgacgagctcaggcgatccggtcctcgacgcggccgtcgttgccggcgcacctctttaaacctgctcctgcgatcgcgctcatagtctctccgctccgcttcccccgccgtacttcaccgtgtcacctcagcggtcctcccgcgcccccgtgccgtactctccacacgcttctccggccggtctgcgtcgtccgccgcacgccgcctgtcttcttcacctcattcactcctgcccgagctgcggtggcgtcacatccaacaccccg

SEQ ID NO: 83146 - DNA, 391 bp, Homo sapiens
  sig_peptide (119)...(254): this location contains the signal peptide sequence, MPCLLSVFLVTLLLAYLSLLFMKTNEICIAFLKFRIDILLFEALM, Run with SignalP
  misc_feature (146)...(285): similar to gi5730291 in the genepept database release 114, Run with FASTXY 3.3t00, default parameters
tttcgtggaaaaggtattttatagttaaccaaaacataagtagaagcaattcaaacttttctaaacaaaaaattacagattatgtcctattttctcctataatagaaatgaatttgcaatgccctgtttattatctgtcttcctagttactttgcttctagcttatttgtcattactgtttatgaaaacaaatgaaatatgcattgcttttttaaaattcagaattgatattttactttttgaagctttaatgtttatctggcctgatccttctcaaatgggcatatgtatacactgggggatacatggctaatgctaatataccaaggggatataaaaatcataagatgaaaatggcatggtttcctagagaatatatttttctaatatt

SEQ ID NO: 83147 - DNA, 573 bp, Homo sapiens
  sig_peptide (275)...(410): this location contains the signal peptide sequence, MLFIPHCNSYRILILLILSFCLQPTPAINYWAHLLDLPFLRHFTW, Run with SignalP
  misc_feature (308)...(509): similar to gi3132513 in the genepept database release 114, Run with FASTXY 3.3t00, default parameters
agtagttcagttcgaggttacagcacacccattaaggcctctctggattccagcatgacgcatcataccttaccacggcatgactagggcccaacctgctaccacaaataaaggaaatgacgatgcagaacccacaaccctggatgatgtggcttccttggatgacacaggccccagacattacctgctgaatgctgagaaacacaactcatgaggctgaacaaatctgcttcagacacagataccattcaatccatataatttgttctttgctatgctttttattccacattgcaactcttatagaatactgattcttcttattctctctttttgcctgcaacccacacctgctataaactattgggcccatcttctagatctgcctttcttacggcattttacttgggaaggtacccccttctcagcctctgacaacgtgaccaattggctgggaggtattgacttacccccggtggggtccctcagtaatggcacacattggactcaggtgccaagtaacattacatatcaatccttgattggaaaagaataatattgattatactcaaa

SEQ ID NO: 83148 - DNA, 456 bp, Homo sapiens
  sig_peptide (296)...(161): this location contains the signal peptide sequence, MITRLLILLLWHYHLKVISAKNYFRVLSVSQLALLFILYSNHFIF, Run with SignalP
  misc_feature (294)...(417): similar to gi924303 in the genepept database release 114, Run with FASTXY 3.3t00, default parameters
caataaatgtaaattgattaatgaaattgcaaattttacaaaagaaggaggtctttccaaagttaatgacgttgatgtagaacagttcaaaacatgtgcaaagcagttagacctattctgatcaagagaaattggcaagaatgattgcacaataggcttttaaaaataaaatggtttgaatataaaataaacaaaagcgctaattgggaaactgataagactctgaaataattctttgcagaaatgactttcaggtgataatgccacagaagcagaatgagaagtcgtgttatcatacaattttattgaaagaatcatgtcaaaacttgacaaacaatttaaatgaagaactgaagtatagctgcaattacaattttgttacacagtcacacaattacaattttctgtataaaaagaaacctcgtgccctcgtgccgaattcgtgcagcgggagct

SEQ ID NO: 83149 - DNA, 416 bp, Homo sapiens
  sig_peptide (252)...(387): this location contains the signal peptide sequence, MLFFLLGFECFATFPTLGDSACPPSILVWIRKVWASRPDAAQWGL, Run with SignalP
  misc_feature (149)...(21): similar to gi3877412 in the genepept database release 114, Run with FASTXY 3.3t00, default parameters
cagtgcggcggaattcgccgggtggggtggtgggaaagaggaaggatatgggtgcctggtgtcacacacttggtttgatgtcttttccaaaatggatgaactttgatcgagcaatgaaaagtgtttttctttccttaaatgggctcttctagcatcagagtcaggttagctttagaagaaattcagcgcctataacccaaagcccttgtttctggagtggctcttgttgaggctgtttcttgcccagcttgatgcttttttttcttcttggatttgaatgttttgccacctttcccaccctcggggactctgcttgtccacccagcattctggtgtggattagaaaagtgtgggcttctaggccggatgcagcccagtggggcctggcctgacaagtgagcgagggccactcaatc

SEQ ID NO: 83150 - DNA, 371 bp, Homo sapiens
  sig_peptide (19)...(154): this location contains the signal peptide sequence, MCSSHPILMLLLFMDVPITIDSIVLCVLRINIKMIPYPMCEIFSS, Run with SignalP
  misc_feature (282)...(374): similar to gi4587234 in the genepept database release 114, Run with FASTXY 3.3t00, default parameters
cattgttttgaaattaacatgtgttcttctcatcccattttaatgcttttattatttatggatgtacccataacaatagatagcattgttttgtgtgttcttagaattaacataaaaatgataccttacccaatgtgtgagattttctctagcaggtacccataagaatggaactgctggggcatagagtatcttcactggctataacaataaaccccaaataatgatgggttaaataagtagaagtttatttctctctcatattaaaaaaaaaatcagtcctaagggaggagaccacccctcatattgtcttatgcctaatttctgcctccaaaaaaagaagaagtaggaactataagacagaaatgaaa

SEQ ID NO: 83151 - DNA, 599 bp, Homo sapiens
  sig_peptide (293)...(428): this location contains the signal peptide sequence, MGLGQPQAWLLGLPTAVVYGSLALFTTILHNVFLLYYVDTFVSVY, Run with SignalP
  misc_feature (386)...(520): similar to gi2088706 in the genepept database release 114, Run with FASTXY 3.3t00, default parameters
tgtggtggaattcgattgcggcccccatctgtctgacttttcctcgtgtgacccatcttttcaaattcccttacctgaggaaggagcccgattacaaggatatttacctgctcccacccggatctaggctctctgtttcctcgagtcactcccagattagtggtgtctagctcagcactgtttctgttatacttcattcataattcccagcgctgttggacgaggatgggaagaccgcctgtggccatgagccctccccggtgctcctggggctaaggctggggctgcagccatggggctgggtcagccccaggcctggttgctgggtctgcccacagctgtggtctatggctccctggctctcttcaccaccatcctgcacaatgtcttcctgctctactatgtggacacctttgtctcagtgtacaagatcaacaaaatggccttctgggtcggagagacagtgtttctcctctggaacagcctcaatgaccccctcttcggttggctcagtgaccggcagttcctcagctcccagccccggtcaggcgccgggctctcctcaagggctgtggtgctggcccgggtgcaggccctga

SEQ ID NO: 83152 - DNA, 443 bp, Homo sapiens
  misc_feature (1)...(443): n = a,t,c or g
  sig_peptide (30)...(165): this location contains the signal peptide sequence, MWWACLCGGIDTCLSGWRVDHRAGGRADGAQGSRWEDEYKWCCDE, Run with SignalP
  misc_feature (335)...(421): similar to gi2599389 in the genepept database release 114, Run with FASTXY 3.3t00, default parameters
ttcctntacttcatgcttggcacgaggcgatgtggtgggcgtgtctatgtggaggaatagacacttgtttatcaggatggcgggtagaccacagggcaggcggacgagcggatggagcacaggggagtcggtgggaggatgaatacaagtggtgctgtgatgagtgggcacgcaggctttgcatttggacaggctgtggcttcagtcccagcactactagagtaaatgtgcccacctctctgggtctgtttcctcatctctcaaacgggtgcaactcccactgcagacggagcatcgtgagacccatacagctccaggtgcagaggcctcacatgggcactctccctgcaccctgctcaccctccagatcactgggttttgggtgtgcaggctgacattttcctgtcttcctctgttagctgatgaggaggacgagacccccc

SEQ ID NO: 83153 - DNA, 416 bp, Homo sapiens
  misc_feature (1)...(416): n = a,t,c or g
  sig_peptide (221)...(356): this location contains the signal peptide sequence, MKNCLSTVCLIENLLSLQFISSIILLIFIASASKDTSCCVIMLPI, Run with SignalP
  misc_feature (248)...(418): similar to gi6009498 in the genepept database release 114, Run with FASTXY 3.3t00, default parameters
atcaccactgggttaaggaaccggnccgaggcaaaatattttataatgcacagcaagctttatttacctatgctgnaagnggacctgttctttgctggagggggagacatatctctgtttccccaggcttttccctaatacgagcatccttgaaaagatagtctgtaacaaagacagtcaggatttctgctcacaagcctttcagaaatgcaagagacacatgaagaattgtctctcaacagtatgtcttatagagaacttgctttcattgcagtttatttcctcaataattttactgatctttattgctagtgcttccaaagatacctcttgttgtgttataatgcttcctattataacatcagagatgccatatttaatattgattgtaacttgtgtctggaattataagtcca

SEQ ID NO: 83154 - DNA, 420 bp, Homo sapiens
  sig_peptide (331)...(196): this location contains the signal peptide sequence, MPFRLTLRKRLPFLSLFYHILLMCIRNYSKTATDFPPDLYSCWFG, Run with SignalP
  misc_feature (349)...(409): similar to gi5817331 in the genepept database release 114, Run with FASTXY 3.3t00, default parameters
accagtgagcatagccttgagatttggtagccaacaaaccacacttgtttttacagcactttccatagcgttttttttgcacacacacactgcctccagtacaaaatgtttataaagctgatgggaaggggagcggatgtcctgacaattcatctctgcaataatttttttttccagcaagcagccaaaaatcattccaaaccagcaactataaaggtcaggagggaaatctgttgctgtctttgaataatttcttatacacattaggagaatgtggtagaacagggaaaggaatggaagcctctttcttagtgtcaacctgaaaggcatgagacctttccttccctgcctctccgcccacctgctggcatcactcacaccatgccaaggcctcgtgccaagctaggcgtaacgacgacg

SEQ ID NO: 83155 - DNA, 389 bp, Homo sapiens
  sig_peptide (170)...(35): this location contains the signal peptide sequence, MLSVKRFRAMVMFFMAMVAMMKNKCQQTNEAKFCVHMYLHFYFSS, Run with SignalP
  misc_feature (50)...(391): similar to gi4886489 in the genepept database release 114, Run with FASTXY 3.3t00, default parameters
cgagcggagaggagatgcacacggcactcgagtgtgaggaaaaatagaaatgaaggtacatatgcacacaaaattttgcctcatttgtttgctgacatttatttttcatcattgcaaccattgccatgaagaacatgaccatggccctgaagcgcttcacagacagcatcgtggaatgacagaattggagccaagcaaattttcaaagcaagctgctgaaaatgaaaaaaaatactatattgaaaaactttttgagcgttatggtgaaaatggaagattatccttttttggtttggagaaacttttaacaaacttgggccttggagagagaaaagtagttgagattaatcatgaggatcttggccacgatcatgtttctcatttaaata

SEQ ID NO: 83156 - DNA, 461 bp, Homo sapiens
  sig_peptide (224)...(359): this location contains the signal peptide sequence, MWLLILVAYMFQRNVNSVHMPTKAVDPEAFMNISEIIQHQGYPCE, Run with SignalP
  misc_feature (224)...(460): similar to gi14749 in the genepept database release 114, Run with FASTXY 3.3t00, default parameters
gtccggaaattctgcgaagacccacgcgtccgactaagcttgcctaatttgcttcagaattggaagagggaattgcagcaggaaaatatgtgaagagtttttaaacccacaaattcttcttactttagaattagttgttacattggcaggaaaaaataaatgcagatgttggaccatgttggaaaccttgtcaagacagtggattgtctcacacagaatggaaatgtggcttctgattctggtggcgtatatgttccagagaaatgtgaattcagtacatatgccaactaaagctgtggacccagaagcattcatgaatattagtgaaatcatccaacatcaaggctatccctgtgaggaatatgaagtcgcaactgaagatgggtatatcctttctgttaacaggattcctcgaggcctagtgcaacctaagaagacaggttccaggcctgtggtgttat

SEQ ID NO: 83157 - DNA, 436 bp, Homo sapiens
  sig_peptide (126)...(261): this location contains the signal peptide sequence, MCTKTIPVLWGCFLLWNLYVSSSQTIYPGIKARITQRALDYGVQA, Run with SignalP
  misc_feature (201)...(439): similar to gi471241 in the genepept database release 114, Run with FASTXY 3.3t00, default parameters
gtcggaaaatccgcgagccccacgcgtccggcttgaggacaccttgactaacctccaagggcaactaaaggatcaagaaaggcccagcacagcagaagatcagctggatctagctcctgcaggagatgtgtacaaagacaatcccagtcctctggggatgtttcctcctgtggaatctctatgtctcatcctctcagaccatttaccctggaatcaaggcaaggattactcagagggcacttgactatggtgttcaagctggaatgaagatgattgagcaaatgctaaaagaaaagaaactcccagatttaagcggttctgagtctcttgaatttctaaaagttgattatgtaaactacaatttttcaaatataaaaatcagtgccttttcatttccaaatacctcattggcttttgtgcctggagtgggaatcaa

SEQ ID NO: 83158 - DNA, 685 bp, Homo sapiens
  sig_peptide (134)...(269): this location contains the signal peptide sequence, MTWMNLLFRASSVPFLSTSPFPGPIQSGKACSAGFSYLSFLNQPL, Run with SignalP
  misc_feature (42)...(5): similar to gi4981976 in the genepept database release 114, Run with FASTXY 3.3t00, default parameters
aaaacgcatgacaccacttagaggaaagaagaaaaataagcatagaggtgactgagcaggcagaaaggactaggaataagcatgtctggccccgtctctgcatttttttccccttgcattagtaacttccctgatgacttggatgaatcttctcttcagggcatctagtgttccctttctgtccacttctcctttcccagggcccatacagtctgggaaagcatgctctgcaggcttctcatatctttccttccttaatcagcccctagcatctctacataacccatatacacctggagttccacatgtcccagtctttgcactgcagtgaattcaaagaatggtagactctagctgggcacatgggctcacacctgtaatcccagcaccttggggcgctgaggcagatggatcacttgagcccaggagttcaagaccaggtctggccaacatggtgaaaccccacctccaccaaaaatacaaaaattagctgggctttgtggtacatgccctgtagtcccagctactggggaggctgaggcggaagaactgcttgaactcaggaggcagaggctgcagtgagccgagatcatgccactgcactccagcagcctgggcaacagaacaaggcccagtctcaccagtctcaaaaaaacccaaagacaaaactaaaccaaaaaaaaaa

SEQ ID NO: 83159 - DNA, 786 bp, Homo sapiens
  sig_peptide (442)...(577): this location contains the signal peptide sequence, MGFLLGGLFVDVVAFCLFVFLLTVGPLFCRSAAVCWRSTPDPVRL, Run with SignalP
  misc_feature (398)...(5): similar to gi339776 in the genepept database release 114, Run with FASTXY 3.3t00, default parameters
tcacaccttatttcagcaaggtgatcttcaatctgtggtatcctttcttccgcttgatcgattgagctattgatacttctgtatgcttctctgatttctcgtgctatgtttttcagttccatcaggccatttatgttcctcgctaaactggttattgtagttagcagttcctgtaaccttttatcaaggttcttagcttccttgcattgggttagaacatgctgctttagctcagaggagtttgttattacccaccttctgaaatcttttgttaattcatcagtctcagtctccatccagttttgtgcccttgctggagaggagttgtgatcatttggagaagaagcattctggcttttggaattttcagcgtttttgtgctggtttatcctcatcttcatgatttgtctacctttggtctttgaggctgatgacctttggatggggtttttattggggggtctttttgttgatgttgttgctttctgcttgtttgtttttcttctaacagtcgggcccctcttctgcaggtctgctgcagtttgctggaggtctactccagaccctgttcgcctggttatcaccagtggaggctgcagaacagcaaagattgctgcctactccttcctctggaagctcgtcccagaggggcactgccctgatgccagccggagctttcccggaataggtgcttgcaacccctgtcggaaggcttctcccagcagcaaccccgtatagggaccccttcacgaggccccttgtccttaaccaactttctccttcccc

SEQ ID NO: 83160 - DNA, 399 bp, Homo sapiens
  sig_peptide (173)...(38): this location contains the signal peptide sequence, MLLKIKFLYAVSRWFADDLPVVLKKRSYIEVTRMFCLCVWRNIFR, Run with SignalP
  misc_feature (234)...(330): similar to gi5832902 in the genepept database release 114, Run with FASTXY 3.3t00, default parameters
cataagtatcagcattccacgtatctgctgtggcatattctaaaaatgttccgccaaacacacaagcaaaacattcgcgtgacttcaatgtaactcctcttctttaacacaaccggtaggtcatcagcaaaccatctagagacagcatacaaaaatttgatttttaacagcatttgaaccagtactttctcaaaccgtgcaactcaaaacacttactgataagtggtgggattctgattagcaattcactgcttcttactcatccatactatatatttgtatatacagtaaataagattttgttcaataacaaacataagattatttgaaaaccatacatctaactttattttaaaagagtgggcatttaaataaatttgtctcttaaaaactgttttc

SEQ ID NO: 83161 - DNA, 508 bp, Homo sapiens
  sig_peptide (379)...(244): this location contains the signal peptide sequence, MYSPTNPLSFTLSSFFLYSLILIHLLNTYYMLSIFIVPRVSKIWH, Run with SignalP
  misc_feature (338)...(202): similar to gi2650536 in the genepept database release 114, Run with FASTXY 3.3t00, default parameters
ttcgaggaatatcctttcttaccttgtctgtttttcctgtcttgaaaaactgttattgtttttataattggcaaaatctcctatatgcagttttccccaattcttcccccaaccctcaaaatgttagctatttactcctctttgcaggtgattctgtgcataaatctgtgttgtcatactacattctagcttatcgtttgtatttgaatattggtatcttccagcaacttgggtacgaaggaatgtgccaaatctttgaaaccctaggaacaataaaaatgcttagcatatagtaggtatttaataagtgtatcaggatgagggaataaaggaaaaaagaagagagggtgaatgagagggggttggttggggaatacataggtgatgacacttattaccttagataagctactacctcctttcttttcagttttttgagggaaaaataatacctgtctagcaggtttgttctaagattctaaagaaaagtaaaaggaaaacactggaa

SEQ ID NO: 83162 - DNA, 365 bp, Homo sapiens
  sig_peptide (215)...(350): this location contains the signal peptide sequence, MPRIYLMLFLISQWVTWEWRINSHSNDFISTLLATHPASTPLTFW, Run with SignalP
  misc_feature (224)...(352): similar to gi5814003 in the genepept database release 114, Run with FASTXY 3.3t00, default parameters
tcaaaatctctgagagtgagacccagggattggtagtttttaaagctccccgtgtgatttcaatgtacagttaagattcagaacaactgatctaatccaaacattttctcactccgtcaaccacaacccaattttcagatgaagaatctgaggcttaaagtgagttaataaattgagacatctcacaactagctagtgacaggactaggacaggatgccaagaatttatctaatgcttttccttatatcacagtgggtgacttgggaatggagaattaatagccacagcaatgactttatatctactctcttagccacacatcctgcctcaactcctctgacattctgggagaatatattcttgg

SEQ ID NO: 83163 - DNA, 354 bp, Homo sapiens
  sig_peptide (157)...(292): this location contains the signal peptide sequence, MGRAALPLQALKTLLFPPTLHGCQQLVVTVILGPRCPAQTLFPCP, Run with SignalP
  misc_feature (111)...(327): similar to gi1418241 in the genepept database release 114, Run with FASTXY 3.3t00, default parameters
ccttgaaggaaacctgggaagcctgtgctttggggccagtgcattcctcgctttatttactggggctgccgtaaaacgtgactccagcctgggcagtgtaaaccacagaaaggcatcttctcgccattctggatgccagaagaccaaagctgaggcatgggcagagctgcactcccactgcaggctctgaaaaccctcctcttccctcccactctccatggatgccagcagcttgtggtgaccgtcatcctggggccacgctgcccggcccagactctcttcccgtgtccatcctgctgtgctcactccagcctctctctctccttaaaaagacatcgtcctggtattaggacc

SEQ ID NO: 83164 - DNA, 349 bp, Homo sapiens
  sig_peptide (157)...(292): this location contains the signal peptide sequence, MGRAALPLQALKTLLFPPTLHGCQQLVVTVILGPRCPAQTLFPCP, Run with SignalP
  misc_feature (111)...(334): similar to gi1418241 in the genepept database release 114, Run with FASTXY 3.3t00, default parameters
ccttgaaggaaacctgggaagcctgtgctttggggccagtgcattcctcgctttatttactggggctgccgtaaaacgtgactccagcctgggcagtgtaaaccacagaaaggcatcttctcgccattctggatgccagaagaccaaagctgaggcatgggcagagctgcactcccactgcaggctctgaaaaccctcctcttccctcccactctccatggatgccagcagcttgtggtgaccgtcatcctggggccacgctgcccggcccagactctcttcccgtgtccatcctgctgtgctcactccagcctctctctctccttagaaagacaatcgcctgggatag

SEQ ID NO: 83165 - DNA, 442 bp, Homo sapiens
  sig_peptide (325)...(190): this location contains the signal peptide sequence, MAPLYLGNYQTLFLKLISISVLAFLFRNVWSNIGCHFSSWVTMVI, Run with SignalP
  misc_feature (353)...(429): similar to gi994736 in the genepept database release 114, Run with FASTXY 3.3t00, default parameters
catgaaattaaagtggaatttgagagtgtggagtacacatttctctttattttagccagctaaagttactgctcttcatgaagaatcaccaacaatcgctaaactgatttgaagacagataactgaggaaaggaaatcaggtttcagctgagtaatccgtgcttcccttccagtagtcagcagcaaaatcaccatggtcacccagctggagaaatgacatcctatatttgaccatacattccggaagagaaaagccaacacggagatggaaataagtttcagaaacagtgtctgataattaccaagatagaggggtgccattttatgcatacttcattatcctgccgacgcgtgtgcttcagggcgagtaagatgggtatcgccagggatttcacggtcacgacgatgtacgggtacggacagagaatccgtaagcaggtca

SEQ ID NO: 83166 - DNA, 384 bp, Homo sapiens
  sig_peptide (168)...(303): this location contains the signal peptide sequence, MFLLTLVSGQGFPAAPLTPPVESCRRCTGLLWERLGWDREGERHR, Run with SignalP
  misc_feature (232)...(349): similar to gi895999 in the genepept database release 114, Run with FASTXY 3.3t00, default parameters
gtaactccaggtctcctgtctgcttgaggtaccgtgcccgctctttgccttggcagactccatctccagggtggcgtcttattaatgttcccagtgttgctgactcaggcatcacaggccagggccttcagtgacgctgacaatgtcttattctttaagaaataaagatgtttcttctcaccctggtctctggccagggtttcccagcagctcccctgacccctcctgttgagagttgcaggcggtgcacaggactcctctgggagaggctggggtgggacagggaaggggagaggcacaggccatcacaggctgtacttgatgcctgcagggccagccctcccatctgaagcgccctgagctgccggatttcagtgtgctgat

SEQ ID NO: 83167 - DNA, 377 bp, Homo sapiens
  misc_feature (1)...(377): n = a,t,c or g
  sig_peptide (269)...(134): this location contains the signal peptide sequence, MSQKVNLLGFVSHVVSVGPFLLLSRKTAADNTKPMSLVLFSLSYF, Run with SignalP
  misc_feature (254)...(376): similar to gi2224518 in the genepept database release 114, Run with FASTXY 3.3t00, default parameters
ccatncatttattgtgtattctctgtaagctaaccatgaattttatttttttttaatggttcaaaaatgtagaaggagaatgacgttttgtgacatgtaaaaatgatatgctgttcacgttttcaagtccatcaaaataagataaactgaacagcaccaggctcatgggtttagtattgtctgcagctgttttacgtgacagcaggagaaaaggtcccacagagaccacatggctcacaaagcctaaaaggttaactttctggctcattactggaaaagtttgctgatccctgactatttttattttattttattttattttattttattttattttattatttttgagacaggatctcactctgtcacccaggctg

SEQ ID NO: 83168 - DNA, 1224 bp, Homo sapiens
  misc_feature (1)...(1224): n = a,t,c or g
  sig_peptide (239)...(374): this location contains the signal peptide sequence, MAVLYIQAFVLVFLLGKVMGKVFFGQLRAAEMEHLLERSWYAVTE, Run with SignalP
  misc_feature (128)...(1115): similar to gi3877655 in the genepept database release 114, Run with FASTXY 3.3t00, default parameters
cgccccggaagtcccgggtcgacgatttcgtgttgttaaccggaggggcagccgcagtcgcgcggattgagcgggctcgcggcgctgggttcctggtctccgggccagggcaatgttccgcacggcagtgatgatggcggccagcctggcgctgaccggggctgtggtggctcacgcctactacctcaaacaccagttctaccccactgtggtgtacctgaccaagtccagccccagcatggcagtcctgtacatccaggcctttgtccttgtcttccttctgggcaaggtgatgggcaaggtgttctttgggcaactgagggcagcagagatggagcaccttctggaacgttcctggtacgccgtcacagagacttgtctggccttcaccgtttttcgggatgacttcagcccccgctttgttgcactcttcactcttcttctcttcctcaaatgtttccactggctggctgaggaccgtgtggactttatggaacgcagccccaacatctcctggctctttcactgccgcattgtctctcttatgttcctcctgggcatcctggacttcctcttcgtcagccacgcctatcacagcatcctgacccgtggggcctctgtgcagctggtgtttggctttgagtatgccatcctgatgacgatggtgctcaccatcttcatcaagtatgtgctgcactccgtggacctccagagtgagaacccctgggacaacaaggctgtgtacatgctctacacagagctgtttacaggcttcatcaaggttctgctgtgcatggccttcatgaccatcatgatcaaggtgcacaccttcccactctttgccatccggcccatgtacctggccatgagacagttcaagaaagctgtgacagatgccatcatgtctcgccgagccatccgcaacatgaacaccctgtatccagatgccaccccagaggagctccaggcaatggacaatgtctgcatcatctgccgagaagagatggtgactggtgccaagagactgccctgcaaccacattttccataccagctgcctgcgctcctggttccagcggcagcagacctgccccacctgccgtatggatgtccttcgtgcatcgccgccagcgcagtcaccaccacccccggagcctaaggatcagaggccaccccctgccccatgtattcgnccgctcgganntccccncaacgtactgaacaa

SEQ ID NO: 83169 - DNA, 480 bp, Homo sapiens
  sig_peptide (108)...(243): this location contains the signal peptide sequence, MQSMINMIVSLLGLVATVTLIPAFRGHFIAARLGGQSLGKTSRQH, Run with SignalP
  misc_feature (84)...(249): similar to gi488559 in the genepept database release 114, Run with FASTXY 3.3t00, default parameters
ccctcctgcataggctcgagacatgtagctcagcttgcccgttacctgaacagcgggcgcagtcgggcccctgaacggtcaccatgtgggccttttcggaattgaccatgcagtccatgatcaatatgattgtctccctgctggggttagtggccacagtcaccctcatcccggccttccggggccatttcattgctgcgcgcctcggtggtcagtccctcggcaaaaccagccgtcagcatatgtgagcagcggcacacgggtccgggcagggggcaagggctaaggaaggagtggctagggcaggggcgggaaccggggtgcttgaccacacgtgaagactcagaactaacccaggcagcctggaactcggagaggtgatgagcagaacttactcgcattggggaaaggatgggtagggaccctagggtatatctgggactctggcagtggtgctttcctccctccgccccttgtatt

SEQ ID NO: 83170 - DNA, 639 bp, Homo sapiens; identical to SEQ ID NO: 61963
  sig_peptide (282)...(417): this location contains the signal peptide sequence, MAASLLAVLLLLLLERGMFSSPSPPPALLEKVFQYIDLHQDEFVQ, Run with SignalP
  misc_feature (366)...(639): similar to gi3879146 in the genepept database release 114, Run with FASTXY 3.3t00, default parameters

SEQ ID NO: 83171 - DNA, 407 bp, Homo sapiens
  sig_peptide (27)...(162): this location contains the signal peptide sequence, MLLLGLLLLLPLLAGARLLWNWWKLRSLHLPPIAPGFLHLLQPDL, Run with SignalP
  misc_feature (27)...(407): similar to gi30322 in the genepept database release 114, Run with FASTXY 3.3t00, default parameters
ctcagggccctgacgggcgtctcgccatgctgctcctgggcctgctgctgctgctgcccctgctggctggcgcccgcctgctgtggaactggtggaagctccggagcctccacctcccgcctattgccccgggcttcttgcacttgctgcagcccgacctcccaatctatctgcttggcctgactcagaaattctggcccatctacaggctccaccttgggctgcaagatgtggaggagctgaactccaacaggaccattgaggaagccatggtcaaaaagtgggcagactttgctggcagacctgagccacttacctacaagctggtgtctaggaactacccggacctgttcttgggagactacttcatgctctggaacgcccacacgaagatcacccgctcaggc

SEQ ID NO: 83172 - DNA, 412 bp, Homo sapiens
  sig_peptide (139)...(274): this location contains the signal peptide sequence, MSRSHVALLGLSLLLMLLLYAGLPSPPEQTSCLWGDPNVTVLAVS, Run with SignalP
  misc_feature (34)...(344): similar to gi4884084 in the genepept database release 114, Run with FASTXY 3.3t00, default parameters
ttcgtctggccgcctagagccggagcggcccgcggagctgtggaggcagccatggtcggggcgctgtgcggctgctggttccgcctgggcggggcccgcccgctcatcccgttgggcccgactgtggtacagacctccatgagccgatcccatgtagccctgctgggcctgagtctgctgctcatgctcctactgtatgcggggctgccaagcccccctgagcaaacttcctgcctctggggagaccccaatgtcacagtcctggctgtctccacccctgccaactcgcccatgttctacctggaggggttaccactccaccttgcccacagggtggacgtgatccctctgtcctctctaggccctcttgtatctcctctccgttgtcaagcattgccccctcgcctctccc

SEQ ID NO: 83173 - DNA, 384 bp, Homo sapiens
  sig_peptide (153)...(288): this location contains the signal peptide sequence, MKINVSRPLQFLQWSSYIVVAFLIQLLIILPLSILIYHDFYLRLL, Run with SignalP
  misc_feature (153)...(369): similar to gi625100 in the genepept database release 114, Run with FASTXY 3.3t00, default parameters
ctgcatccgtcgactagtgattcagatctttctcaggcaagattattaaaaatataaatgcgcgtaagacagaaaaatagagacagcttacggcaaattatcaaaatgtgaatccaaggtttcaagaaaataagataaagtgaataggaaggatgaaaatcaatgtatcccgtccattacagtttttacaatggagttcatatattgttgttgcatttctgatacaattgctaatcattcttcctttatcgatcttaatatatcacgatttttacctaagactattacctgcagattcctctaacgtagtcccccttaatacgttcaacattttaaatggcgtacaatttggtacaaaattcttcacgaaatcgtcgacccggg

SEQ ID NO: 83174 - DNA, 1930 bp, Homo sapiens
  sig_peptide (1355)...(1490): this location contains the signal peptide sequence, MGRRKFLPPPLLSLLSSSLPLPICHPPAPLTPGLGIPPCGVVGRE, Run with SignalP
  misc_feature (214)...(1337): similar to gi3875291 in the genepept database release 114, Run with FASTXY 3.3t00, default parameters
aactgatacaatgcatctgacacgccagcttggacgaggaccgagcttggctgtgtttatctcgttggggactaaggcgtcggttggcgcgcaacgggttctaggctgcaggcagctcgaggacccgcggccccgccccggctcggcctggcagatagcagaggcagcaggccgtgccgggggggcatgttgctgtaaccagtggcccaggggatgttacggtggacagtgcacctggagggcgggccccgcagggtgaaccatgctgcagtggctgtcgggcatcgggtatactccttcgggggttactgctctggtgaagactatgagacactgcgtcagatagatgtgcacattttcaatgcagtgtccttgcgttggacaaagctgcccccggtgaagtctgccatccgtgggcaagctcctgtggtaccctacatgcgctatggacactcaaccgtcctcatcgacgacacagtcctcctttggggcgggcggaatgacaccgaaggggcctgcaatgtgctctatgcctttgacgtcaatacgcacaagtggttcacaccccgagtgtcagggacagttcctggggcccgggatggacattcagcctgtgtcctaggcaagatcatgtacatttttgggggctacgagcagcaggcggactgtttttccaatgacattcacaagctagataccagcaccatgacatggactcttatctgtacaaagggcagccctgcacgctggagggacttccactcagccacaatgctgggaagtcacatgtatgtctttgggggccgtgccgaccgctttgggccattccattccaacaatgagatttactgcaaccgcattcgagtctttgacaccagaactgaggcttggctggactgtcccccgactccagtgctgcctgaggggcgccggagccactcggcctttggctacaatggggagctgtacatctttggtggttataatgcaaggctgaaccggcacttccatgacctctggaagtttaatcctgtgtcctttacctggaaaaagattgaaccgaaggggaaggggccatgtccccgccggcgccagtgctgctgtattgttggtgacaagattgtcctctttgggggtaccagtccatctcctgaggaaggcctgggagatgaatttgaccttatagatcattctgacttacacattttggactttagccctagtctgaagactctgtgcaaactggccgtgattcagtataacctagaccagtcctgtttgcctcatgatatcaggtgggagctgaatgccatgaccaccaacagcaatatcagtcgccccatcgtctcctcccatgggtaggaggaagtttctgccacctcccctcctgagcctgctgtcatcttcactgcccctgcccatctgtcacccacctgctcctttgacccctggacttggtatacctccatgtggagttgttgggcgagaggtgttctctgtgctgtgaattcagtggggagctgtagcggggtgggggctaggttcctccccccttgggccgagggccccttccccttggtgctctgtccccatccacctcctttcagctgctcctgggcctcagctctgcccagggccagccaggttctgctgggaagggaagggaatggggagaagggagaagcaagcagtgtctgagcctcaggagcttccccctccccctttgcctatcccctcccctctgcttgagccttgagccttgactgggagctgaaaggagttgcagctgttggcatgagacctccttctccccgtcttggggaggtggggaccagcagataaatcccacccttccttgagctgtcgctgtactctgaagttcagccagctcagattttataaaaattaattaaaatctccaaaaaaaaaa

SEQ ID NO: 83175 - DNA, 1256 bp, Homo sapiens
  sig_peptide (107)...(242): this location contains the signal peptide sequence, MLQGHSSVFQALLGTFFTWGMTAAGAALVFVFSSGQRRILDGSLG, Run with SignalP
  misc_feature (107)...(1135): similar to gi1707057 in the genepept database release 114, Run with FASTXY 3.3t00, default parameters
ggcacgaggcaggaagtgactgcgggagtggagccggcgagagagtggcagcgggggctgatggaagtgcagtgggggctggagagggcaccctactgtatccagcatgctccaaggccacagctctgtgttccaggccttgctggggaccttcttcacctgggggatgacagcagctggggcagctctcgtgttcgtattctctagtggacagaggcggatcttagatggaagtcttggctttgctgcaggggtcatgttggcagcttcctattggtctcttctggccccagcagttgagatggccacgtcctctgggggcttcggtgcctttgccttcttccctgtggctgttggcttcacccttggagcggcttttgtctacttggctgacctcctgatgcctcacttgggtgcagcagaagacccccagacggccctggcactgaacttcggctctacgttgatgaagaagaagtctgatcctgagggtcccgcgctgctcttccctgagagtgaactttccatccggataggtagagctgggcttctttcagacaagagtgagaatggtgaggcatatcagagaaagaaggcggcagccactggccttccagagggtcctgctgtccctgtgccttctcgagggaatctggcacagcccggcggcagcagctggaggaggatcgcactgctcatcttggccatcactatacacaacgttccagagggtctcgctgttggagttggatttggggctatagaaaagacggcatctgctacctttgagagtgccaggaatttggccattggaatcgggatccagaatttccccgagggcctggctgtcagccttcccttgcgaggggcaggcttctccacctggagagctttctggtatgggcagctgagcggcatggtggagcccctggccggggtctttggtgcctttgccgtggtgctggctgagcccatcctgccctacgctctggcctttgctgccggtgccatggtctacgtggtcatggacgacatcatccccgaagcccagatcagtggtaatgggaaactggcatcctgggcctccatcctgggatttgtagtgatgatgtcactggacgttggcctgggctagggctgagacgcttcggaccccgggaaaggccatacgaagaaacagcagtggttggcttctatgggacaacaagcttctttcttcacattaaaacttttttccttcctctcttcttcatctc

SEQ ID NO: 83176 - DNA, 1576 bp, Homo sapiens
  sig_peptide (592)...(457): this location contains the signal peptide sequence, MRAVLLQHLFILLDRQTTKKNSNLDIGHVFREALIFLADLKSQLP, Run with SignalP
  misc_feature (1741)...(457): similar to gi587146 in the genepept database release 114, Run with FASTXY 3.3t00, default parameters
tagagggaagcctgcaaccggaagtgaaggcagatttccctccttcgtcgctgttgctgccgccatacgcgctctccctgtttagttatggcagagaacgatgtggacaatgagctcttggactatgaagatgatgaggtggagacagcagctgggggagatggggctgaggcccctgccaagaaggatgtcaagggctcctatgtctccatccacagctctggctttcgtgacttcctgctcaagccagagttgctccgggccattgtcgactgtggctttgagcatccgtcagaagtccagcatgagtgcatccctcaggccattctgggaatggatgtcctgtgccaggccaagtcgggcatgggaaagacagcagtgtttgtcttggccacactgcaacagctggagccagttactgggcaggtgtctgtactggtgatgtgtcacactcgggagttggcttttcagatcagcaaggaatatgagcgcttctctaaatacatgcccaatgtcaaggttgctgttttttttggtggtctgtctatcaagaaggatgaagaggtgctgaagaagaactgcccgcatatcgtcgtggggactccaggccgtatcctagccctggctcgaaataagagcctcaacctcaaacacattaaacactttattttggatgaatgtgataagatgcttgaacagctcgacatgcgtcgggatgtccaggaaatttttcgcatgaccccccacgagaagcaggtcatgatgttcagtgctaccttgagcaaagagatccgtccagtctgccgcaagttcatgcaagatccaatggagatcttcgtggatgatgagacgaagttgacgctgcatgggttgcagcagtactacgtgaaactgaaggacaacgagaagaaccggaagctctttgaccttctggatgtccttgagttcaaccaggtggtgatctttgtgaagtctgtgcagcggtgcattgccttggcccagctactagtggagcagaacttcccagccattgccatccaccgtgggatgccccaggaggagaggctttctcggtatcagcagtttaaagattttcaacgacgaattcttgtggctaccaacctatttggccgaggcatggacatcgagcgggtgaacattgcttttaattatgacatgcctgaggattctgacacctacctgcatcgggtggccagagcaggccggtttggcaccaagggcttggctatcacatttgtgtccgatgagaatgatgccaagatcctcaatgatgtgcaggatcgctttgaggtcaatattagtgagctgcctgatgagatagacatctcctcctacattgaacagacacggtagaagactcgcccattttggaatgtgaccgtctgtccttcaggagaggacaccagggtgggggtgaaggagacactactgcccccacccctgacagcccccaccccatggcttccatcttttgcatcaccaccactcctgaacccccatttctgatttgtcagaatttttttttaacaaaactaaaaatgaaaaaaaaaaaaaa

SEQ ID NO: 83177 - DNA, 1464 bp, Homo sapiens; identical to SEQ ID NO: 58749
  sig_peptide (288)...(423): this location contains the signal peptide sequence, MRSLGALLLLLSACLAVSAGPVPTPPDNIQVQENFNISRIYGKWY, Run with SignalP
  misc_feature (288)...(1347): similar to gi24479 in the genepept database release 114, Run with FASTXY 3.3t00, default parameters

SEQ ID NO: 83178 - DNA, 1905 bp, Homo sapiens
  sig_peptide (510)...(645): this location contains the signal peptide sequence, MFLLLPFDSLIVNLLGISLTVLFTLLLVFIIVPAIFGVSFGIRKL, Run with SignalP
  misc_feature (876)...(1752): similar to gi2317725 in the genepept database release 114, Run with FASTXY 3.3t00, default parameters
ccaggcgggcgctcggggagttcccctccacaggagctatcaggatttttctggcaccaagtttaactctttttcgtgcttttgggggggacagatctgggggacagatttatctgttgaatactcttgggcaggaaaaccatgtaaaacctctggaagcagcatcaggacagcagagcagagcccccgtcctcactgctcacttgcacagaaactccatctggactcggatgcttttactgaagacccatctagcttcaatcatctttagagtccatccattctggagagacctggcgtttgcagttgcctcctgtggccgtgtttttctgtcattctgttcccaggccttctattcaggcggttgaagggtgtggactttggaatggggtttgctgttcttcgggaacttgcttcctttccctggctggcgctgtcaggaaggaccatctgaaggctgcaatttgttcttatggaggcaggtgctggcctggcctggatcttccaccatgttcctgttgctgccttttgatagcctgattgtcaaccttctgggcatctccctgactgtcctcttcaccctccttctcgttttcatcatagtgccagccatttttggagtctcctttggtatccgcaaactctacatgaaaagtctgttaaaaatctttgcgtgggctaccttgagaatggagcgaggagccaaggagaagaaccaccagctttacaagccctacaccaacggaatcattgcaaaggatcccacttcactagaagaagagatcaaagagattcgtcgaagtggtagtagtaaggctctggacaacactccagagttcgagctctctgacattttctacttttgccggaaaggaatggagaccattatggatgatgaggtgacaaagagattctcagcagaagaactggagtcctggaacctgctgagcagaaccaattataacttccagtacatcagccttcggctcacggtcctgtgggggttaggagtgctgattcggtactgctttctgctgccgctcaggatagcactggctttcacagggattagccttctggtggtgggcacaactgtggtgggatacttgccaaatgggaggtttaaggagttcatgagtaaacatgttcacttaatgtgttaccggatctgcgtgcgagcgctgacagccatcatcacctaccatgacagggaaaacagaccaagaaatggtggcatctgtgtggccaatcatacctcaccgatcgatgtgatcatcttggccagcgatggctattatgccatggtgggtcaagtgcacgggggactcatgggtgtgattcagagagccatggtgaaggcctgcccacacgtctggtttgagcgctcggaagtgaaggatcgccacctggtggctaagagactgactgaacatgtgcaagataaaagcaagctgcctatcctcatcttcccagaaggaacctgcatcaataatacatcggtgatgatgttcaaaaagggaagttttgaaattggagccacagtttaccctgttgctatcaagtatgaccctcaatttggcgatgccttctggaacagcagcaaatacgggatggtgacgtacctgctgcgaatgatgaccagctgggccattgtctgcagcgtgtggtacctgcctcccatgactagagaggcagatgaagatgctgtccagtttgcgaatagggtgaaatctgccattgccaggcagggaggacttgtggacctgctgtgggatgggggcctgaagagggagaaggtgaaggacacgttcaaggaggagcagcagaagctgtacagcaagatgatcgtggggaaccacaaggacaggagccgctcctgagcctggcttcagcttgcttggggcc

SEQ ID NO: 83179 - DNA, 1882 bp, Homo sapiens; identical to SEQ ID NO: 81671
  sig_peptide (56)...(191): this location contains the signal peptide sequence, MLLLLLLPLLWGRERVEGQKSNRKDYSLTMQSSVTVQEGMCVHVR, Run with SignalP
  misc_feature (56)...(1458): similar to gi5295850 in the genepept database release 114, Run with FASTXY 3.3t00, default parameters

SEQ ID NO: 83180 - DNA, 346 bp, Homo sapiens
aaaacctagagcctggttaacgccaacaccatgccggggcctttcggctctctttatttattgctctggaatatccctgtgacctcttccaacagttttcactcttggcagggaaacttccttaaatttactcgcaacacaactaagaggaacttcagatgaccacttgggagagagtacacttttgaacagctttgaatctagaatgcgtttccctgttacacatacacatgtaccagacacctaccacccgctcctaatgtcgctcgtgactctcatttgcctacttgctgagccccctataccagccctgtcctccttctctagcctttgattgcccagccct

SEQ ID NO: 83181 - DNA, 336 bp, Homo sapiens
cggatctctaggatctggaaggccgctgctgccaggaacaagaagtcagagagggccaggctgagcaggagcagcgccagacgcgtgccagctccatgccgggcctgggagccggccagccacgccatcaacccattggctggcagcccaaggagcagcagggccaccaggaagaccgtgtcccagccaccttgggggtaggagtcctcatcatcaagctctgtgcggggcctgtggccagtggcacccaggtcagcttccatggtagtgtccatttggggtccccagagtcctgctggacacggagtgggtgcctggtgaatcaatgatggtgtg

SEQ ID NO: 83182 - DNA, 377 bp, Homo sapiens
  misc_feature (1)...(377): n = a,t,c or g
aattttaaacatgtgtgcctgtttactcgccctgccggagcctcgctgactgccccgtagccaggcaacgctatctgacctgggggaccacgagaaggactttccatgccaggcaggtcacctgggcagggttatctacgtgctgctcatctgagcaaaagncagtgcctccgtccctccacaccttctccaccctcacccccaggcgaccccggacacgcaggctgtcaaccatgggcagtccactttgtcaggacgaaacagagggtgcccctggtcctcctgggaatggaagcagtggcgtgattagaaccggacagaagcagattgcaggattaggtgtcattatcaatgtgggaaccagctttgctgtttcc

SEQ ID NO: 83183 - DNA, 380 bp, Homo sapiens
atacctctctcctttcataatgctgtgaagtagctcatataattcatcttccacgtttatatacgtatgtctcttttgtgcccagagcatcattttgagattcttttttcattatcaaaatacattggatctatgttattcataactaatctgaggctgtatttgttacatttgagtattttaaatcattaatgccatatgtattgtataccaaaatttaccatctaaaacacctggctattcttttgtagggtttttcttttcattagcttttttgagctaaagcttaaagaaaatcagggaccaaaggaaggttagaaagtggctggaggtatcataaacaccaactaagttctttgagaagcagaaggtgcatcatg

SEQ ID NO: 83184 - DNA, 467 bp, Homo sapiens
ccgacttttccagattttggttcagatttattctatattttcattattctctgcatatctattcattgtacagtattctttgaatttactctttctaatgattcatttttgacaggtggatttaacagacgtttctaagtttcatagtgattatcagaggttaatctacgtttattactactgattagatgaaacaatgagtaataaatgactcacgtaatgaatacacatctccccaaagtcaaagggaataaacgtgaagcaccctttagtttgttttttcctctgttcttttgcaaggttatagttaacctactgatatgttacaaaatcatcatattcatcaaattaacatgatgttctgtagcctgaatattaaaaaatagataaaatcatgtataataagactttgataaaacttaatagatattgcaatatagaacagttcttcataacttctttttatg

SEQ ID NO: 83185 - DNA, 557 bp, Homo sapiens
  misc_feature (1)...(557): n = a,t,c or g
attgaccaacaaacttctgctcctgttttatctccaagttatccttctcttccttcacttctgaccagtccattacctcttcctttaccttctcttcctttacctctggttcacccaccttcgcttcttttaccactaaactactatccgtctcctgcttcacctccaatacgcctgcgttctcatccttcacctcaggcctatcctccacctcctgttctacccactggccagccaacctgccttctgtacctggccagtctataatttcctgcttcactaccgttaggtccatcggtatttcctctggcctttgtccacttccttcctctccatcccctatctcctttatccctggcagccctgtcccctcctctcngccgccgaactcctccgcccctgctaagtcccttactccctccctgccaggctctggacttagccgcacncccnctagtacgctgtggagacctcccccagacttcccttcattttcagcagcaaactccatcaactcacgatccttggcctctgctgccactctatccttcaatgtg

SEQ ID NO: 83186 - DNA, 395 bp, Homo sapiens
tctcaactggtttagcttacataatattgactgaaacattaaaactgagcaaactttccactcaatgttttgacaaaacccttgtgcccagatcagctgcagacaagagcagagctttcaatggaactttcaaacaagtgggatcaagaccctgaaggacttctttgaagaactgtaacaggggatgaaacagggctttttcagtatgatcctgaaaacaaagcacaatcaaaccaagaggtggaagtggcccagttaaagcaaatgtggaccagtcaagagcagaggtcatggcaatggtcttttggaatgctcaaggcattttgcttgttgactttctgaagagccaaagaccaataacatctgcttattatgagagcatttattatgagaaa

SEQ ID NO: 83187 - DNA, 326 bp, Homo sapiens
  misc_feature (1)...(326): n = a,t,c or g
naggatagccttagacacgatattagcagaaagaggattttgcatcatgattaaaactcaatgttataccttcatcccaaacagcaccgcccctaataaaagtataacaaaagcactgcaaggtctcactgctctatccaatgagtcagacagcaactcaggggtaaatgacccctttacaggatggctaaaaaaaaagtagttcggtaaatggaaaggaataatagcctcaattcttcccttgcagccataataggtgtacttattcttgtcgggtgctgtgtcataccatgcatccgtaagtagatgcagaggctcataaaaat

SEQ ID NO: 83188 - DNA, 318 bp, Homo sapiens; identical to SEQ ID NO: 40316

SEQ ID NO: 83189 - DNA, 812 bp, Homo sapiens
gagtttctgtttagaaacaacagtctatgatagtataatcctctcttttttgtacacagagtaaagaggacaaataggtgaaagaataaatgaaaggctggaatcccacttcccccgctgtcccagggcattggatattgacggataggaggcagcaaaccactcacagagccaggaagaaatgaatgcgttggtattgccaggaggggaagccggcccggctgaaatacgctatgaccatagccaggagatactgatggagagaaaggaacacagagagggagaggtcacatcttggaagaggaagattgtggagagggggaatgagggtctggggaggggctgcccatcagagaagggacctcagtgttggggtgactgtactcatttggaaattgcgggatggaggggtattcgaaggtcggatgcaaatccgagaagccagaggaagggttttgggtgatgctcccaggatggtgggctccgatgggatctttggagggggtgtgtctaggtcggctggtgtcaggagggtcttttgtgtgccaggcagagaactgtcccgaagagctgagagtagaggggccaggagcttcagggctgcggccagactgtggcccagagctcagatcccaaaggacccataggagaggcaggggccactcattcactctgcaagagaccagcagaatcctgagggagatgctgacaaatcataaaaagaccaagaatagccgggagtggcagctcaagcctgtgatcccagtacttttttaagaggttgaagacaggaggatcatgttaagcccaaa

SEQ ID NO: 83190 - DNA, 651 bp, Homo sapiens
agaagcagaggtggtttaacgggaagacttcaggcttcatcggacggccgggaaggaatcagagcaggggtgaggttggctttgtgcggggtggggtggggtgccaggctctgtgtcgggtgggggcagcagcacatcttttgtaattaatcattgccgaggctctgcctgtacgaagtgtggtccggggagggctgatgaggctgcaggatgagggggcttgacagacccctttccccagaagagggcccccaaaaggcattgcccctgaagagggctccccaagacctcatccctgaaaagggactcccagggtcacccccctgaaaagggctcctcaaaaggccccccgaacggggtccccccaagactgccctctgaaggaggcccccgaagacttcccccgtgaaggtgccccccaagacctgccccctggaagagggctccccaagacctctccccctagaagagccccctaagacttttaccctggaaaagggctctctgcaaagcttccctggacgtgcgccttcgagctgggcaggtagggaggagctgtgtactcgacatcatccttaggatctgttgtcctcccgcttcccctgccccggcccccagatgaatccagaggctgttttagagccagacggg

SEQ ID NO: 83191 - DNA, 391 bp, Homo sapiens
ggcacgagggctctatgcgctggtgcatgcctgcatgcccacttgcttgagatgcttaaccggtagactcacttggaccctgaaagcaaaggacgcttcgtgccacactcgcatgattgccctccactctggccatcggagagaccactccgtgatcgtgatgtgcactgcttttcatgacaatgaagagacatttttgacaaaatacttatatgaaattgccacaagacattcttacttttatgccccggaactccttttctttgctaaaagggatccatctgcttttacagaatgttgccaagctgctgattgagctgcctgcctgttgccaaagctcgatgaacttcgctatgaagggaaggcttcgtctgccatacagagactcaag

SEQ ID NO: 83192 - DNA, 649 bp, Homo sapiens
ggcacgagatgaacgatgatgaagcgtggtgtgtactgatgctaggctatgattctgtgtgctcttatttgtattgtactcttcctattgagaagtaacataccatctaatggtaacttacataacatagaaaggtaactacatcctgtgtgacacgtgtgatatatattattaaatccattagattcaggaaattttagagccagagaagaccttactaatcatatattctaaaagtacccattcatttacacagacaggttagataatggctgagacacattcagtgactgagctagttcctggtttgttttagggggaggggaaggcctgtgttagtcttttgtttttgaaacagggtttgctgtcacgtaggctaaaatgcagtggtgctgtcatggctcactgcagcctcaatctcccgagctcgtaatcatcccacttgagcttcctgagtagttgggactaggtgcacgccaccatgcctagctgggttttgtagagacggagttttccatggttgcccacgctgatcttaaacttctgggcttaagggatctgccggcctcagccttccaaagtgctgggattacaagtgtgaacccctgtacccacgttatagttttttttcccaaccttctattatctc

SEQ ID NO: 83193 - DNA, 285 bp, Homo sapiens
aaactgtaccatggcgagtagcatttcatcatgcagggcttacttttgaggacagggatatcattgaaggagcctttcggcaaggtctcattcgggacttggcggcgacttctactttttcttctggggtgaatttacctgcacgtcactgattattccaacccctatttttggtggtcgacctctagatattgttacttataagcatatggtaggacgtgctgacatgaaaggatagtacacagtatgcgacagtatcttaatatgaagccgacccgactagcc

SEQ ID NO: 83194 - DNA, 323 bp, Homo sapiens
gttttttttctaaaagtttaataggttcagctcttatgttcgggtctgtgattcactatagttaacttttgcgtaggtgtgagggaaggctccatcttcattcttttgcatgtggatatccagttgctccaacaccatttgttaaaaaacaaaacaaagaactgttcttctgcccactgaatcgtcttggtactcctgttgaaaatcaatgaactataaatgtaaaggttaacttccggactctcaattatattccattgatctatatgcctagccttatgccagcgccacaatgtcttgttattggagctttgtggaagttc

SEQ ID NO: 83195 - DNA, 383 bp, Homo sapiens
  misc_feature (1)...(383): n = a,t,c or g
aaaacctacaagatacagcaaaagcagtgctaagagggaagtgtttatagcaatgaatgcctaaatcagacaattagaaatatttcaaatgaagagcccagttatgcacctcaaggaactggaaaagcaagaataaaccaaacccaaaattggtagaatgaaagaaataataaagatcagcatagaactaaatgaaacagagactaaaaacacaatacaaaggatcaacacaatgaaatttggtttttcaatagataaatggctaaaagaagcctcaaataaaatcagaagtgaaaaaggagacattacaactgaaaccaacaaaatacaaaggatcattagaggtttgtgaagaattatacactaacatactggaaaacctn

SEQ ID NO: 83196 - DNA, 243 bp, Homo sapiens
aggaatcatgtctggtttctttcacttagtatgattttaatatatatatttatcttgttacttttctgtgatactttttttgaagtagaattatcccacagacctaccaactggtcattttctctgtccccaagtgtataattgggattgacaaactcagcagttaaagatagcacccatactggatacttgacctgttgaataagaggtgtcatagtgggaaggcttccacttagccttccc

SEQ ID NO: 83197 - DNA, 348 bp, Homo sapiens
ggcacgagtgttaaggaagtcagcacttacattaagaaaattgggtacaaccgcgacacagtagcatttgtgccaatttctggttggaatggtgacaacatgctggaaccaagtgctaacatgccttggttcaagggatggaaagtaacgcgtaaggatggctatgccaacgtaggaatacttattgaagctctggacttgatgttatcacacaacttgtcaagctgactagctctagtgccagacggtcatggatgctctcagattttggggtcatggtgggtttaacttgtcgcttttgcatatggtgctccataatcttaggctagtgagcttgtagtgggctag

SEQ ID NO: 83198 - DNA, 317 bp, Homo sapiens
aacccttccgagaaaacagcaacaagctgagctgctgtgacagaggggaacaagatggcggcgccgaaggggagcctctgggtgaggacccaactggggctccctccgctgctgctgctgaccatggccttggccggaggagcatttacctcttggaattcaggatatgctctttatctttaacttctttttcccgagactttgctttgggttctgccacgaggaggtcaaattgctttttccggcctgtgactgccctccgatggcttaacgaatgtgtcttgcaggtgacggatcttgtgcaagggttctttgtc

SEQ ID NO: 83199 - DNA, 951 bp, Homo sapiens
ggcacgagcagccaaccaactatgcaacaaaccaaccaactgacaacaaatagggaaacaatttaacttctaaccagccaacctaccaaatagtcaaccatctaacaaatcagccaaacagcaaagcaatcagccaatggaacagccagataaccactcaactaactgtgttctctagccagccaaccatccaaataaccagccagccaaccatccaaataaccagtcatccaaccatccaaataaccagccagccagtcagtcaaataaccagccagccaaccatccaaataactagccagccagtcagtcaaataaccagccagccaaccatccaaataaccagccagccaccatccaaataatcatctaagattcagccaaacaacaaaccaggcaaccaactaaccaacctgctaaccaggcaaccaactaactagccatcaaaacaacttaccaaccaaaatgccaaccaacaactcaatcagtcaaccaagctaagaactagccaaccaagcagccagccaattctccaatgaaccaccagttagtcaactagccaagcaaccaactggccagtcagctgaacaaccaatcaagcaaccaactgatcaaccaactagccaatcaccaaacatccatccatcctttcatctacccacaacaatcaacccaaatacctatggagcatccaccatggaccccaggcctgtgaaggctacaacaaaagtggagaatcccaagccctggccttaaaggagcagaaaaactcagccagtaaagcaagatgagcaccaattaaaacagctggagatcccctaaaagggcagcaaccggggaggcttgacccaattggcaatggcccaaaaccctctgggagcggggaagaatatctgggcccgggaaaaattcgggagggatccctggaaaaaccggaactggacctgcctt

SEQ ID NO: 83200 - DNA, 933 bp, Homo sapiens
  misc_feature (1)...(933): n = a,t,c or g
ggcacgagcaaatatcaagagaccatggctggattaagctagataataattttgaggtcaattttgataaagatccaatggaaatgcgcctccctattcgtagccctattaaacgagactttttatcaggaattcagattgaatttaagcagtcttctcaccagagaagtttaagggccaggttgtactggcttcaggttgataatcagttaccaggtgcaatgttccctgttgtatttcatcctgttgcccctccaaaatctattgctttagattcagagcccaagcctttcattgatgtgagtgtcatcacaagatttaatgagtacagtaaagtcttacagttcaagtattttatggtcctcattcaggaaatggccttaaaaattgatcaagggtttctaggagctattattgcactgtttaccccaacaacagaccctgaagctgaaagaagacggacaaagttaatccaacaagatattgatgctctaaatgcagaattaatggagacttcaatgactgatatgtcaattcttagtttctttgaacatttccatatttctcctgtgaagttgcatttgagtttgtctttgggttccggaagtgaagaatcagacnaagaaaaacaggaaatgtctgcagttcattctgtcaacttgctgctgaaaagcataggtgctactctgactgaaggagatgaccttatatttcaacttgcttaatatgaaattcgatatcagttctacaggagagatcagcttatttttggaatgtgttaggcatttacggggaacaagtcctggaaacagaatgatggccttggatattggggctcaaggacctggaaaccccttcgggtttaaattaaaaggcctgcccgaaagaatggaagccttattccttgaaaccctcttcagggggctggtaaag

SEQ ID NO: 83201 - DNA, 294 bp, Homo sapiens
ggcacgaggaaagatttaaagattaaagagttttcctagtttcacagagatagttaatgatgcatgggaactaaaacctgtgtctttgtattgtcagacctgttctttaatatatagacagctgggtgtttcagtagttttctttaaaagagccttttctttttttttctttttttttttggaaaaaggggtttccgttttcggcccccaggccaaagggttggggggaccaaaaatttgcccctggccttttacccgggaaaacaaagaaaaccttgttggggaaaaaaaaaa

SEQ ID NO: 83202 - DNA, 258 bp, Homo sapiens
actatacatctatataactgacaggagcatagcaatatcccaactaaccttcgtgtgcttcgttcaatcctggaaaacctgagaagcataatacaaaagttacaatctgatgtctcagctcaaatggaatattgtcgcaccccatgcactgtcagcttcatattcctgaggagactgataacgaatgttaagacataatgataacagaaggtacatcatctctaatagactaatactactagaaaaccactatgcgcc

SEQ ID NO: 83203 - DNA, 371 bp, Homo sapiens
ggcacgagggtaagtggaataaaaaattgagagtccagaaataaactcttattatatttatgggccattgactttcaacaatggtgccaaaatcatttgatgggaaaagagtaatcttttaaacaaatgatgcaggaacaacttcatatccacattcgaaagaatgaattggactcctatgtcataccatatgcaaaaattcacccgaaatacatcaaagacctaaaacgaatataagagaactataaaactcttaaagcaggtatacatttttgtgatcttggtttaggcagtggtttcttagatatgacaccttaaccacaagcagccaaagaaattatagataaattgagctacatcaaaataaagag

SEQ ID NO: 83204 - DNA, 338 bp, Homo sapiens
ggcacgagtgattgtaaaataactacatcaggacattgtatcatgttttattttgtgatggtgggttgacgccactactacgcttgtaatatctacattttctcttaactgtctcctttcctacacccccgccactgatacctaatttcctcttcatctcaaacctccatctattcctcccaccattccctcctgtactccatgtccacttacaccagcctttctaccaagtgtcactcattcctactcaaccctgctgattccctctccctctcctcaacctcccacccccccctctcccaccctccaccatctcccacccctcaccctctccaccg

SEQ ID NO: 83205 - DNA, 341 bp, Homo sapiens
  misc_feature (1)...(341): n = a,t,c or g
ggcacgagatgcttcatatcatatgtcatcagagaatcacaaattaaaataatcgaccattacaaacctaccagaatagccaaaatccaaaacattgacaccaccaaatgctggtgtgtggagcaacaagaattctcattaattgctagtggaaatgcaaaatggtacagccattttggaagatggtttcgcaggctcttacagagctaaacatactcgtatgacttaacagtagacatgttgcgaggaactcacagaaaatgacaaataggttggaacattggcttggatgaactccatcattggagtgacttttatgatattacggtattttcctgaan

SEQ ID NO: 83206 - DNA, 366 bp, Homo sapiens
ggcacgagcactcttgaaagatatatgaagggaatgttggcgcaatcagtctagaaacatatttctcccataacaataagccagttctttttgctttgaatcagaaatagctccatcaggcccatgaaggaaagggaaacaaaactgagtgccaagcatatgataacatgctcagcatcatatgacattaggggattgcaaattgaaacaacagtaccaccacacacctatcagaatggccaaaatccagaagactgacatcaccaatgctagtgagaatgtggagcaacaggaactctcattcacggctggtggggatgcaaagtggtggagccacttgggaagacagtctggcagattcctaaa

SEQ ID NO: 83207 - DNA, 371 bp, Homo sapiens
ggcacgaggcaaattgaaaatgaagaaaacaattccatttaagatagcatcaggataaaatatttgggaataaatttaataaaagtgcaagacttatactctgaaaactatgaaacattgttgaaaacaattaaagaagacccaaataaatggaaagataccccatgatcatggatcagagacttaatattgttaagatggcaatacttcctgaattgatctgcaatccctatcacaatccaagatgccttcattagcggaaattgacaagatgatcctaaaattcacagagaaatgtaagggaaccagaacaaccaaaagaatcttaagaaagaagaacaggctgggggcagtggctcgcactctgaccg

SEQ ID NO: 83208 - DNA, 376 bp, Homo sapiens
ggcacgagaaatgtctcaccaataagtccagtgtgtttgctacttcttgctcactggatccaatcagcataatgtcatcaaactaatggaccagtgtgatatctcgtggaaacgaaaagcgatcaaggtctctccaaataagattatgacataaagccggagagtttactgtcctacccctgaggtaggacagtaatggtgtattgccggccttgctagccgaagtctaatagcttctggtgctctctatggacaggattggataaatagtttctagtcatggtatttggggtatactagagtactcagtaggaggataatttgtctcatttagtggtttttcttctctgtcttctgtttttattttatacctctt

SEQ ID NO: 83209 - DNA, 700 bp, Homo sapiens
ctattccttataccatcaataggtatttgagagactaccaaagagaaggaacccggtttctttatggacactacatccatggaggagggtgcattctgggtgatgacatgggacttggaaaaacagtacaggttatttcatttctggctgcagttttgcataaaaagggaactcgtgaggatattgaaaataacatgccagagtttttactaagaagtatgaaaaaggaacccctttcttctacagcaaaaaagatgttcttaatagttgctcctctttctgtcctctacaactggaaggatgaattggacacctggggatatttcagagtcactgttttacatggaaacagaaaagataatgaattaattcgtgtaaagcagaggaaatgtgaaattgcctctaacaaccttatgaaacacctacgcttatgccctggatgaacttaacagtttggaatggtcagctgtcattgtggatgaagctcatagaatcaagaatcccaaaagcctagagtaacagaagttatgaaagctttgaaatgtaatgtccgcattggcctcactggaaccatccttcagaacaacatgaaggaactgtggtgtgttatggaactgggctgtgccaggccttttagggagtgggacctacttcaagaagcagttttctgacccagtagaacatggtcagagacacacgg

SEQ ID NO: 83210 - DNA, 388 bp, Homo sapiens
accaagcgaccgctttatacatcatatgggtgtttcacattctgtatcacccccaatcctcgggtacattcgagcaggcgaatgccctcttagcacagcagttaaccaaactttccctagagatcaaggtgaccactgaatatcacttcttcccttgggccttatgtgcctcacggcccttcctggaatacctctagatctacgtccttttgaacttttgtatggacgttctttcgtcctacagaactatgctccatccgctcccttacaggacacctgtccagcactgcacctcactcaacacttactccgacagtacactgacactcacctccccaaacctgaggattcttcccaattcactttcttacccttacagccaggagag

SEQ ID NO: 83211 - DNA, 391 bp, Homo sapiens
accactcgtacgcccacgcgtccgcccacgcgtgcgcccacgcgtccggctgaaagctgagctaggaattcccttggaagaggttcctccagaagaaattattcatttaacacgaattctctacaaagctcaggctgatggtatctggggcgaacatgagagggattacattttgttggcgaggaagactgtaactttgtaagcctatccggaagagattaaatgctattggtatgatgtgaggaagaactagcttaacttctgagaatagcagtcatacttgatggttagattcctccatggtttaaaattatggcctcgaggattgtctttatgtggtgggatatctaagcgcatctgaatgacggagatggatcatgtcaatcaaccc

SEQ ID NO: 83212 - DNA, 358 bp, Homo sapiens
cccacgcgtccgggatcccatgcctgaaatttggaagcatatgtacaaaaatcatttttacgttggattttgggtaaatcattgtgtttgaccgtacatgtctaacattttttttctaggatacattccgtaccgttttttatattattttttcttatgatacatcacattatactattcttatcaatatatcatcctattttaatttcttatattctttatttcccttatctttttatattctattgatctttactatttatttatcctgattctttatactcttaaatctatattttttaatttttctcttttttatttctctacatatattctttatcttacaccttttgtattt

SEQ ID NO: 83213 - DNA, 340 bp, Homo sapiens
caaaagcgaacttgacttcatgtttaaggaggaattttctagaaagaaatcaaggcggcaaagagaggggacagaaataacagaaattgaggaagaatacgaaatctcaaaacatgctcaaagagaatcatcctcatctgcgtctagactactgagacgacggcgctccctgtctccaacttatattgagttaatgaggccagagtttgagctgatttatgtacttctcttccgtttgattaattctattaggatacatagattgtcattctccgcatctactagtatttactttattttcctattaataatcatcctttcactttatctattaactctc

SEQ ID NO: 83214 - DNA, 373 bp, Homo sapiens
  misc_feature (1)...(373): n = a,t,c or g
agaagattggctctggaggattcggattgatatatttagctttacccaccaataaaccacagaaagatgcacgacatgtatgacaagtggaatatcacgaaaatggcccgttattttcacaacttaaatcttatcacagagctgcagaagaagactgtcgtaagtaaaattagcaaagcaggctacttgcatatatgcgcttgctaaatcagaaagtggatagaacgcatacaacttgattatttacgaattcctctgtattatggatctgggctgactgagatcaagggaagaggttaccgatttatggtcatggaaagactatgaatagatttacagactatctcaggccacaatggtacctttaaaaagn

SEQ ID NO: 83215 - DNA, 417 bp, Homo sapiens
catgacgccttagtactgtccgcattcctggtcgaccacgcgtccgcagttttaaaattcttcttgttattaactttcagttcaatttcattgtagtcagagtaggtacttgatctgagttcaattttttaaatgttttaagacttgttttgtggcttaacgtatggtctgtccttgagaatgttccatgtgcttaggagaaggatgtttattctgccattgctggatgaaatgttctgcatatatgtgttatgttcgctgggccccattttctcattgatggctcctctcctgtagatttaccactgactgatcttctgtcctcctctaccaccctattgaatcattctcacttactcgtctcttggcgctccatgtcgtgctcatgtacttgttcgtccgttttgggaaatcacc

SEQ ID NO: 83216 - DNA, 363 bp, Homo sapiens
gaaaccctatgttagaagcactggcactgacactggactcaatattaatggatcttcacaggtgaacccttcatccggaaatcgatcactgtaccagagttcagaggcttcacaaaccgtagttacttaaaccgaagataaccctgtctggattatctcaggcacacctagtaacgaatatcgacccagaggagaataacgaaattctttctgatcacgcttcccatggcaacatcaccactgaccgaggcttgatcctaacagtaacagcagctggtgcagagaatatccaactcaatacagatgacaaagcttatgaatcgggacctcccgccccttccatacccatgagaggacgtctat

SEQ ID NO: 83217 - DNA, 360 bp, Homo sapiens
cttatgaactggcttaaacaatacaactctcgggatgacctggaccgagccattgaggaagttacactgtactgtgctggctactagtgtatcattcttatgtcctagggattggtgacatacatagagacaacatcatggtaagaaaaactggccagctcttccacattgactttggacatattcttggaaatttcatatctaagtttgacattcacagggagcgagtgcgttttattcttacctatgatttcatccgtgtcattcatacaatgaataacaggagttacagaaaagtttggccgcttacgccaatgttgtgaggatgcatatctgagtctacgacggcatgggaatctc

SEQ ID NO: 83218 - DNA, 403 bp, Homo sapiens
acgctctgtcgtcctgtatggagagtgcggacctttctgaggctggcgctggatccaccctgggtctacaaccaaggctgactaaagggtagagccgagtcttactcctacactaggattggtacacgttgcgccacacaatgtcattttcctctagttacaaggtgcagcattttcattggcacatatatttaactatttaaagaatgatttccacctttatgttttaatatcctaagcatctgctgtaataatattctataaaatgtttggaatttaagaaataacttgcgttactaatttgtataacccatatctgtgcaatggaatataaatatcacaaagttgtttaactagaacaaaaacctgagattcgttaaaatttctctccatagaagatgcg

SEQ ID NO: 83219 - DNA, 359 bp, Homo sapiens
cccacgcgtccgcccacgcgtccgtcgtgttaaaggataacagtgaactggagcagcagctgggggccacaggtgcctaccgagcacgggcgctggaactagaggccgaggtggcagagatgcgacagatgttgcagttagagcatccatttgtgaatggagctgataagctgaggcctgactctatgtatgtacatttgaacgagctgtgacagagcctggtggaaaacatgttactgactgttgtggatacgcatatgaacgcctatctagcgctcatgcaactatactcttgcattgatacttttcctctaagagatgtcatgtatttactcgagcagatctgaatattcatgcct

SEQ ID NO: 83220 - DNA, 368 bp, Homo sapiens
cggacgcgtgggggctaaactgatggaacagaatagaaaactcagacataaactcatgcatttttagccaactcatttttgacaaaggtgctaagaacagacaatgaggaaaggacagtctcttcaataaatggggctgggaaaattgaataaccatgtgcagaagaatgaaattagacccctatctttcagcatatataaaaattaggaaaaaatttaagatctgaaactatgaaactactgaaagaaaatgttggggaaacactccaggacattggcctgggcaaggatgttttgtgtgagacctcagaagcactggcaatcaaagcaaaaatagacaaatgggattacatcaagataaaaagctt

SEQ ID NO: 83221 - DNA, 335 bp, Homo sapiens
ggcacgagggttctgaggttcctttacacgagcaactgcattccgggtgcggggaagctaaacatgggcgctcggaagccgactgattccagttcattctttaaatctttcgctgaacagtattggtgccacactgacagatgtacaccatgtgatttttaagcttgcattctttgaactcaactatcaggttcatacaacatccgatctaccctctgaagtcttacgacactattcataacaggccattaagcaaatgtatgtactcattcttggacttgatgtcttgggaaatccattaggcttaattagagaattttctgaaggtgtagaag

SEQ ID NO: 83222 - DNA, 347 bp, Homo sapiens
ggcacgagatgcacatgaagatatggagcaggctgtggaagaatgtgacccttactctggcctcttgaatgatactgaggagaacaactctgacaaccacaatcatgaggatgatgtgttggggtatcctatcaattttgactagttttgtacaatcgtactcaattacttaataattctttcctttcactcgtctgtaattcttaagtcttgatgactatatccttcagaatgtactagtttaatctattactattctatatttgcatttctatccattattctcttatattaaattcttctcgtattcctttagtattgcacttgttcattattatgtaacttct

SEQ ID NO: 83223 - DNA, 437 bp, Homo sapiens
  misc_feature (1)...(437): n = a,t,c or g
cccagctgcttttgagtcccgcctggagaaacgcagtgaatttcggaagcagccagtggggcattccaggcaaggtgattttatcaaatgtgtggaacagaagacagatgccttggggaaacagtctgtgaacagaggattcactaaggacaagactctcagttcaatctttaacattgagatggtaaaagaaaaaactgcagaagaaataaaacagatttggcagcaatattttgcagcaaaagatacagtctacgcagttattcctgcagaaaagtttgatttgatctggaaccgggctcagtcctgtccaacatttctatgtgctctgccaagaagggaaggttatgagttttttgtaggacaatggacaggtactgaactccactttcactgcacttataaatattcagaccccgaggggaaagcctncaagc

SEQ ID NO: 83224 - DNA, 406 bp, Homo sapiens
ggcacgagctcttttaaacattctttatggtcagcagcccttggctggtgcagatggtgataggaccagtgggtcccaccgcatggccacactgcacatgcttcgctgtcaagagggtcctccaccaagatactgcacggatagcaggggcaaacctgtggatcacgaatatcaacagcccccagaaagtggtgctgactgatgggatcacaacacgacacgaaaaccccactattgaataggtgcctatccctgtgaacatgaacctctggccctttcaggatggaaagagtgcaatgtagtcaactccttacttaaggtctgcttggtcacctaaagaaatagagccctaccacggaagatcattgggttcaaatgctgatgagtaggacatttataagtggcc

SEQ ID NO: 83225 - DNA, 431 bp, Homo sapiens
cccacgcgtccgatcaagctgtgtaatcaaaagacagagattaacagaatggataaaaacacttgatctaactgtactgtctacaagagattcagtttagatccaaagacacaaataggttgaaaataagaggatagaaaaagatagtataaggaagtggtaagagagagcagacgtgactaatatcagacaaaatgattttaaatcaaataaaggttgcaagagacaaagaagaacataatatatttaagtttcaatacagtaagaagatacaacagatataaacatttgcacagaccgataacaggccaaaatatatgaagcaaaaactgaaggaagaaatagttctacagtaatagttggaaacttcattaccctactctcaataatggatagaagaaccagacagaaggtaagtaaggaaacagagg

SEQ ID NO: 83226 - DNA, 412 bp, Homo sapiens
tcgcccacgcgtccggtgagtcacagattcagagtcaaggttagcaaatagatgtgaaaagtatcctggagatacatgaagacttcatgaagaaatcaccatttcatgagcatattataactgactcagaaccacattcctgcaatggatcgaatatggcaaaattattagtgacggctccaatctgatattaccgttatgagagaaaccccatccatgtggtgagtgtggaaggggcttcagttatagcccatggcttcctcttcatccgaatgttcatacagtacagtattgcttaagtcagagctcacatctgcgaactcatcagagaattcactcatgatagaaactcagtagatgtcatgaatctggtgattgcttcaataagagctctattcattcttatcagtcg

SEQ ID NO: 83227 - DNA, 391 bp, Homo sapiens
cactggtatataacaggtttgagacagcatgatattgcgccatcacttgaggcttcaattggtgacactacagcgatccttgcttaggattaaaggggaaaccaatccggaggatagtcctgctgaccagactctgattggtcagtcccagcctgtggaggtcatctatgatgctaaaactgtcaatgcataggctgaactgtttgaatcaaataagggattggatcttgagcttataacatcagcaacattgatgaagcctgaagaaattaaggatgaatcagctacaggacttacactaattattgacactcgaaaagtacttctatcaggaataattacatactcttctatatacatctcttccttcatttttcatcctaatcaaccg

SEQ ID NO: 83228 - DNA, 398 bp, Homo sapiens
cagaatccttccctgttcccatgcttatcactgcaagtgtgtagacccttggctaactaaaaccaaaaaaacctgtccagtgtgcaagcaaaaagttgttccttctcaaggcgattcagactctgacacacactgtagccgagaataaaatgaagtgacagaacatagccctttactgagacctttagctgctggcagtgtgcagtcatcattggctccatcgggactcctgatcacattcgatcatgactgaatgctttagactatgaggaagaccaccatagttatctctgcttagttttttcaaacagtgaatatatgggtcttcatcgagcgtgataagtattttcgctatctttataagatgtctaatgttcaggttttgtctatatgattaa

SEQ ID NO: 83229 - DNA, 483 bp, Homo sapiens
attagacgcctgcagtaccggtccgtattcccggtcgacacacgcgtccgcggacgcgtgggcggacgcgtgggttgtggtagtgcttaaagttgttggaatgaccttatttctactttatttcccacagatttttaacaaaagtaacgatggtttcaccaccaccaggagctatggaacagtctcacagatttttgggagcaggtccccaagtcccaacggcttcattaccacaaggagctatggaacagtctgccccaaagactgggaattttatcaagcaagatgtttttttcttatccacttatgaatcatcttggaatgaaagctgggacttttgcaaaggaaaaggatgcacattggcaattgtggacaactccgagactctgaagttgcttcatgacctacatgatgctgagaagaattacattgccttgccctaccgtagttctaagtacatgtctacatgtaatggaacatttg

SEQ ID NO: 83230 - DNA, 347 bp, Homo sapiens
atggcagagcgtgcggcgctggaggagctggtgaaacttcagggagagcgcgtgcgaggcctcaagcagcagaaggccagcgccgagctgatcgaggaggagggggcgaaactactgccactggaggcaccgctggaccctgaagtaagcactctgagaatatgtgctcttctctacccatggacttggaaactatatattacattataaggaaatataacttaatgggatagacatgagcattcgagtcttgcagacctgaattggggtcaaggctgcgccactcaaaagctatatgacctctatatgagcagctaatgtagcctcttttatcctccattttgtcg

SEQ ID NO: 83231 - DNA, 450 bp, Homo sapiens
tgaaacagcctttatatggttgccacatttgatagtaagataattcatactggcaaaattcctacaagcatgaagaatgtggcaaaacctttaatcaatgtgtacatcttattttgcaggaaagctattatccctgagaaaaattgtacaaatataaagaatatggaaaacccattaatgcctactcacatcttactcaacataagaaggttcatagttaatgaaagcattaaaagtgcaattactgtcaaaaaatctttcagaaaatataagcctttaaagtgaagaagagtatttattctgaagacaaccattacaaatatacaggaggtttattacacacattttgtactagaggaaaatcctgaagcagttgctcaagctttgctcaacatcagagaacttatattggagaagagtcctgcaaatgtaatgaatttggaaacactt

SEQ ID NO: 83232 - DNA, 421 bp, Homo sapiens
cggacgcgtggggaaaatttggaatagaagggaacttaatctgataaagagtaattataaaaaaatctattgctgatgttatgtataatggtgaaagtctgatgcctttcacctaaaactgggtcaaggatgtctactctcaccatgtcaacattgtattgaaagtcttaggtaagtaaagtgaaaaaaggaaaaatataaagatgagaaaggaagaaataaaactatcttttcacagatgacatggttgtgtatgtggaaaatcgtaagtaatcaagaaaaaaaaccctactagagttaatacatgaattaaatgaattttagtaaggtcacaggattcagggtattcaaggtcagtattcaaaattcagttgtatatctatatattaacaacaaacaattgcaagagtaaatttttaat

SEQ ID NO: 83233 - DNA, 425 bp, Homo sapiens
ctgatgcagggatttgcccgcgtttcgatcaactttttaacgactatggaacttctttcacgagctgagttgtagttaccctggagaccactttatgacatggtagaaggattattatattccccgacactagcacctaggattaactcggttgcctaactctggagaatgtattctcacaacactcgcgaacagctgtcgaccatattttccagccgatgccaccgctgacatgctagaagaatggcgaactttaatgtgcccttttgacgcaaccatgcaaaaggccatcacttatttggaaatatgtctttgtacctccctttgtacagaacttcatcatacaggatgtaaactttggcttgatgaattaattggcctttgggtttcagtgcataatctgccacaatgggaggggcagctag

SEQ ID NO: 83234 - DNA, 403 bp, Homo sapiens
ttcattgtagttcatacattcaaagcatctgaactgtagtttctatagcaagccaattacatccataagtggagaaggaaatagataaatgtcaaagtatgattggtggagggagcatggtttaatattatttgttttgtaatttctattttatgtttatcgtaatagtgtatattagttattgtataatatgtgttatctttatcgtattcttctgactgtactctaatattatctttttcttcatattgggatttttttatcttaatctatctgtattttttatattattttctttatttttcatttgttgttgtgtttcttatactgcattgtttattacgttttttatgtaatgattatttatataactattcttttattatatgtatatatatttttg

SEQ ID NO: 83235 - DNA, 425 bp, Homo sapiens
ttcattgcaagtgtatagaaaaacacttttgtatattgatctagtatccagcaactttgcagaagttattagttctaatagttttctagtagattccttaggattactatgtaggaaatcatgtaatctgcttataattttacttcttgtccaaactggatgccttttatttctttttctttcctaattatcttgctagaacttccagtatagttgaacagaactgtcgaaagcagaaatccttgtcttgatcttaggtggaaagcatctagtttttcactattaaagtatgatagtagttatggtttttttcatagatgccctttatcaggttgaggaagttcccttcttttcttagttcattgagtgttttttttatcatgaaagggcattagattttgtcaaatgcttgtgtgtccattgag

SEQ ID NO: 83236 - DNA, 430 bp, Homo sapiens
  misc_feature (1)...(430): n = a,t,c or g
aagcttacgattgtctgcaactccctaagattttttttaaaatgggtcctactatgagcatgcgagggaggttcataacgggggaccacttccgccttgggacggaatgcccccttacccctgaatggaacaaccgctactaccgtccttactatcagcaccatgctccaccgcgtcaagctcatcccacttactcaggacattgtgcggtacgacttcaggcaagaaactaagataatcgagtactcagtgcccagggatgcataggtgtgagggaactacttagaattctgtaggtaacttaaatatggggagaccatagtatgatgattgatggaccattgcatattcttactgcagactggtttggaataattctgtttgtttttattanaaatgcctgattatgcccctttggattatatagatn

SEQ ID NO: 83237 - DNA, 1299 bp, Homo sapiens; identical to SEQ ID NO: 68888

SEQ ID NO: 83238 - DNA, 5305 bp, Homo sapiens
aagcgtctctactcccttaactactttggatgctacttctgataaaaagaagaaaacagtttaagctatgaagaaggacatccctcacactctgaaacagatctccttcagagacagagttttgcagcctctcatcagcttcctggatatgctcccacacctcagcctactggtctttctggaatatttgatactagtgtgaacagtgccagcagtaacactaaagagtcttcagtgatgaattttctgtctactgctgaatcccgaactgctcaggctgctgcttcaggaactactctcttaccacaattcagggctccatcctggcagacaggcatgcattcctcagcagcaactgagctgtttgttactggacctttgccaagcactggaacacttccaccatctctctctgcttatcagcatcccaccaccttcagcaatagaaactttgctaccacttcacctttggtgcttcaggattcaacttttaacactacatcaaatggaattttaagtcatcatgaccctttgctacaaatcaagacttcccagggaactgttccaactgctttggcatttgagcgcctgggcagttctgtattaagtaacagcataccacctcagtcttcaacataccgctcagctcaagagtctgcaccccatcttttacaacctcaatttagtttgttgccttcagcacttgggggatcccagcagactcctcaagcctacagttcaactctctttactagttctactgcttccattgaaagagctcttcttcgagaatgtagtgttattaaacaccatcagcggccttcaggtacccagtcaattcagggcacaactgactggttcacaggcactccttacatagttatctatcaaattcaagtgtaggttaattttcaggaaacaaccaggcagtcatctttatcctgtagcccaattggagattccactcaggtgagcaacggaggattacaacagaagacctcccaggtctcagtggaacttgctcagtcttactcatctgcgattccatcatcagggtatcctccttctactacaaaaataaaaagctgttctacagaacaaccactgacatcaaccaagacccctaaacctcaaagtataattcctcctgtgcaaacactaagctattccaaacctttacataatcagagttctgtaatatcgggccaagcacaaatttattctacagcgcagctaccaagccttttatcagttagtcagtcccaaaattacggtttagtacagccacataatgtgccatctattgttcattcacaggtttataggtccagcaaggttgagaaattgccacccttgtataaaacattgactttttctgggtcatctcagactataactcctgaaaatcagacgcttaattattcatctaatcagcaagaggtattgtcttcagttacaaatgagaattaccctgctcaaacaagagatctgtcttcagtaagtcagtctcaaagttactcatctggtcactctcagggtttatcaccagttagccagacacaggttagctattcatctcaatcacaagttttgtcagttgttagtctttcagaaagctatgcttcaggggagtccctaacattaacagccccttctctttcttattcttctgcctctcgggctcagaatttgccagactctagcccgacccagaattatatttctatgcattcttcccaaaatgttcagactcaagagtcatcatctccccagtcccagaagtttttgcctgctgtccagtcatcatcttttgcatcctctactcattgtcagacattacaaaataacataacttcccctgacccaaagtcttatgctgaaagaaagcttgactcagatgtgtatccatcttcaaagcaagaagatggttttcccaatgcaagagttacaggtgttgcagccacaagcatctcttgagtcatcaacccaaaggctatctgatggagaaattaatgctcaagaatcaacttataaggtgtcaaaggcagatgacagatattctcagagtgtaatcagaagtaattcccgtcttgaagatcaagttattgggagttgctctgcaagcatcaaaaaaagaagaaagtgttgttggttcagtgacacaacttaaccaacaaattggccaagtcaataatgcagctacccttgatcttaagaactcaactaatttaatacagactccacaaataaggttgaatactaaagacttaaagcagcaacatcctctcatacttaaggtgcatgagtccaaggtccaggaacagcacgatcaaataattaatgcttcatctcagattcaaattccaaatcatgctttagggcatggccatcaggcatctcttcctaatacacaggtccttttagattctgcctgtgatttacaaattcttcagcagtcaatactgcaggcaggtttaggtcaagtaaaggcatctttacaagcacagcgtgttcaaagccctcaacaaatagtacatcccttccttcagatggaaggtcatgttattcaaagcaatggtgatcattctcagcagcaactccatcctcaaaattctgaagttatgaaaatggacctctctgagtcttcaaaaccattacaacaacatctaacaacaaagggccattttagtgaaacaaatcaacatgattcaaagaatcagtttgtttctcttggatcgatgtgtttcccagaggcagtgcttcttagtgatgaaagaaatattttatcaaatgtagatgatatcttagcagctacagcagcagcttgtggagttacacctactgatttttccaagtcaacttcaaatgaaaccatgcaggctgttgaagatggtgattctaaatctcattttcagcagtcattagatgtgaggcatgtgacttcagattttaactctatgacagctacagtaggaaagccacagaatataaatgatacttccttaaatggaaatcaggttactgtgaacctttcaccagtacctgcccttcagtcaaaaatgactcttgatcaacagcacattgaaacacctggtcaaaatataccaactaaagtaacttcagcagtggttggaccaagtcatgaagtccaggagcaaagttctggcccattcaagaaacagtctgctaccaatcttgaatctgaagaagacagtgaagctcctgttgatagtacattaaataataacagaaaccaagagtttgtttctagtagtagaagtataagtggagagagtgctacatcagagagtgaatttaccttagggggtgacgacagtggtgtgtcaatgaacccagctaggagtgcacttgcactgttggccatggcccaatctggggatgcagtcagtgtcaagattgaagaagaaaaccaagatttaatgcattttaaccttcaaaagaaaagagctaaaggaaaagggcaagttaaagaggaagacaacagtaatcagaaacagctgaaaagacctgcccaaggcaaacgccagaatccaaggggaacagatatttacttaccgtatactcctccttcctcagaaagctgccatgatggttatcagcatcaagaaaaaatgagacagaagatcaaagaggtggaggaaaaacaaccggaagtcaaaacaggatttattgcttctttcttagattttctgaaatccgggcccaagcagcagttttccactcttgctgtacgaatgcctaacaggactagacggccagggacccagatggttcgtacattttgtcccccaccacttcccaagccttcatctacaacacccacacctttagtgtctgaaactggcggtaacagtccatcagataaagttgataatgaacttaaaaacttggaacatttatcttcattttcttctgatgaagatgatcctggatatagtcaagatgcttataaaagcgtctctactcccttaactactttggatgctacttctgataaaaagaagaaaacagaagccctacaggtggcaactactagcccaactgccaatactactggtactgctactacttcctcaaccactgtgggtgcagttaagcaagaacctctccactctacttcatatgcagtaaatattctggaaaatataagctcttcagaatcctcaaagcccattgaacttgatggtcttccttcagaccagtttgcaaaaggacaggacactgttgccatagaaggttttacagatgaggaggacacagaaagcggaggagaaggccaatacagagagcgtgatgaatttgtggtaaagatagaagacatagagacttttaaggtgatgtcagtgttcaccagtgtaaaggaggctttaaaaacaggaaaagaacctccagctatttggaaagtacaaaaagctttattacagaaatttgttcctgaaattcgagatggtcaaagagaatttgctgctacaaatagttatcttggatattttggagatgcaaagagtaaatacaaaagaatatatgtgaagttcattgaaaatgcaaacaagaaggaatatgtcagagtgtgttctaaaaagccaagaaataaaccttcacaaactatcagaactgttcaagctaagccaagtagtagcagtaaaacttctgatcctctagcatcaaaaactacaactacaaaagccccttccgtgaaacccaaagttaaacagccaaaagtaaaggctgagccaccaccaaagaaacggaaaaaatggaaagaagaattttcatcatcccaatctgactcatctcctgagatccatactagtagtagtgacgatgaggaatttgaacctcccgctccctttgtcactcgctttttgaacacaagagcaatgaaggaaacctttaagagctacatggaattgcttgttagcattgccttggaccctgacacaatgcaagccttagagaagagcaatgatgagctacttttacctcatatgaaaaaaatagatggcatgctaaatgataaccgaaagagacttcttttgaatcttcatttggatcagtcattcaagaatgctttggaaagttttcctgaactaacaataattactcgagattctaaagcaaagagtggaggaactgctatttctaaaatcaaaatgaatggcaaagcctataataagaaaactctaaggacttctaaaacaaccaccaaatctgcacaagagtttgctgtcgatccaaaagaaaatacagttgtattctttgtatcattcactccatcattata

SEQ ID NO: 83239 - DNA, 393 bp, Homo sapiens
atacaatataaggaaggagaatagagaagttcaaaaaatgggattactaacagtcaaaaattaggaaatacatgacctaaacagcactatcaatctacttcatctaattgacacatagaatattccatccaacaacagcaaaatgcacattcttctcatgctcacgtggagcattttccaagatagaccacattcttggccatatatcatccattaaaaatttaaaagaatagtaattatacaaaagcaggttttcagaccacaatggaatgaaacaagaaattaataacaaagctcaaaaatccagaaatacctgtagattaaacagcacacttctaaataacatgtagatcaaaaaaatctcaataaggatttttagatattttgaaaaac

SEQ ID NO: 83240 - DNA, 368 bp, Homo sapiens
aggaacaaggcaaagatgtttactctcatgttcctatttaatatcataccagaatcctagctaataagaccagataaggaaatgtagctttatacagattgggaaggaggaataaaactgtctttgttcacagtcaacatgattgtctctatagaaacacatacaaaaagtctcctgaaactaataagcagttatggcaaggtcacaggatataaggttaatgtacaaaagtcaattgctttcctatataccagcaatgaacaattggaatttgaaattttaaaaaagtatgtatgttgaaggcagggaagattgggaattttatgagtgaagaattggcaggagagtgggctaaagaggtaaaatga

SEQ ID NO: 83241 - DNA, 428 bp, Homo sapiens
  misc_feature (1)...(428): n = a,t,c or g
cggtgcagggcgcggtgctgtgcgtaggtgtcattctagctggggngaagccgcagtcctcgcacacgtgcagcttctcgcggcgctcacggtaagcgtatctggccggctgtccatgcaccttagcacggtgagcttccagggagcagcgctgcgtaaacgcctgcccgcaagcactgcagcggaagggccggatccctgcacagatgggcgcataggggagggctggacagagagggcaatgggctctggactaaagcgcccccaccctgctttccagcggtgagcatcactggtacctattacaagctcttcagactattccgcccatgacccaccatctgctaccgtcacccagtgcagacatggggcagacacctgtgtctccactctccctcaccaggatgctcactacccgtggggacggc

SEQ ID NO: 83242 - DNA, 514 bp, Homo sapiens
gcgctggatttgacgccgtggtaccggattgaattctgtgtcgacccacgcgttcggatagttcattttaagatgggacgagatgaccattaagatgaggcccatggcagcggaccatccacatcattttatgaggaaaaaattcatcttattcgtgcctaactgaagagggccaacaattcacagcaaaagcagtagccaaacaccataggcatctcaggtggtttagcttacacaattctgactaaaaaatcaaagttgaacaaattttccactcaatgggtgccaaaactgttgtgctaagattagctgcacacaagagctttcagtgaaaaattcaaacaattggcattgagatcctaaagcatttctcgaaagaattgtcacagcagatgaaacatggttttgccagtacagtcctgaagacaaagcacaatcaaagcaatggctaccaagaggggcacatggtgaacagcaaaagtcatggcaatagttttatgagatattcaaggca

SEQ ID NO: 83243 - DNA, 414 bp, Homo sapiens
aatttctatatgctaacaacaaacaattgcaaattgaaaatttaaaatgccattttcagtagcatcaacaattataaaatccttagagataaatttagcaaaatatatgtaagggttgtaggctgaaaactataaaaccctgctgagaagaattaaagacctacatagaaaaatcgtacttgtggatcaaaacactcaatatcatcaggaagataattattcacgtattgatcatctatagattcaacacaatttcaatccaaacaccacgagacttttttgtagaaactgagaaatggagtctataatttatatggacaaaggacctagaatattcaaaatcattttgaaaagaagaattaagttgaaggacttacttcaccaggcttcaagacttacttgaaagttacatta

SEQ ID NO: 83244 - DNA, 362 bp, Homo sapiens
cggacgcgtgggtggcaagcataattggcctttgttgtatgctaaggtgccatgatatgcaataccaacaatccttttttgggatcccaccggaacaaggaggagctactcttggcatgcatatatatttgtagttatttctatagtatttaagggtaagttaccacagacgggtgagtctagtatgctgcccgacaggcatccaagtacagagaaacaggcccttggtaaaagggagggaccttggtttggcttaagaggaaattttcctttgacattgcgcgaatcttacaccattcaccaagcgaagatttagagtcagagaatacataaggtttgttattttctgggccacaaatagg

SEQ ID NO: 83245 - DNA, 371 bp, Homo sapiens
tgtatacagtgtgagaaattggtccaattttatgattttgctgttagatatcagttgttgaaaagactattctttccccttagaattgtcttgtcatcttgttcacaatcaatttttcacaaatgcatagttttgtttctggactctcagttctattttacggatgtatatgtctatcctgatgttggtaccacactgtcatgattactgcagctttgcattaggttctgaaattgggaagtgcgagtccttcaactttgttctttttcaatattattttggttagtctgtaccttttacatttccatataaaattttaggaccaatttgtcaatttccacaaaacaggaagctgacatctgctagggatt

SEQ ID NO: 83246 - DNA, 394 bp, Homo sapiens
cagtttttattttaaaggaatgttgaattttatctaatacatttttggcatcagttgaaatgattttatagttttgcctttccttctgttgatatgatgtattatatttacagatttgtatatgttgagccatccttgcatccatagggtgaatcccacttgaccattttgtattactttttatgtgctattaaatttggtgtgctagtgtttggttgaggattttcttaatctatgttcatcagagatattggcctgtagttttctttttgttgagttgttgtgtctttgtctagttttcatatcagtatgatactttcctcctagaaggagtttataagtattccttcctactcaatttcttggaatattttgtgtaggattggaatagttt

SEQ ID NO: 83247 - DNA, 413 bp, Homo sapiens
  misc_feature (1)...(413): n = a,t,c or g
cccacgcgtccgcccacgcgtccgtttttttatggcttctttgatttttttatttgtgttttgtagtttttagtgtaaggatcctatacatatttgataggcttattcctaagtagtttatattttttggtgctattgtaagtaattgtgttgtttttgtttcactttccaattgcttattactaatgcaaatacagcttatttttgcatattgagcttgtatcttgcaacgttactaagctcagttattagttcttaaattctttgggtttttctacatagacaattatgtcttctccaaacagagacagttttatttcttcctttccaatgagtatgcttttaatttattttctctcacctattgcactggctaggacctctagtgtgatgctgaataagaaaggttgagn

SEQ ID NO: 83248 - DNA, 418 bp, Homo sapiens
cggacgcgtgggataagtagtaaaaataagttttgcacttgttttaaattaagttctaagtatttttatatgctgttgtcaatgaaattattctgttaatttattttcatattcctcatcactaatgcacagaaatacaattgatttttatttattaatcttacatcttacaacctttttaattgtttataatcactttttagtggactctttaagatttttatatacaatataatatcatctgcaagtagaaataattttctttctttctaatttgagtgcccattgttttcttatctaattaccctggctagaatctctactacagtattgaatagaaacaatgaaattgtacaatttctttctcattttagggggaaagcatccagtcatttagcattaagtattatgtgagctg

SEQ ID NO: 83249 - DNA, 376 bp, Homo sapiens
ctgacctgtagtccctgtgccccacctccattgacctgtagtccctgtgccccacctccattgacctgtagaccctgtgactccacctccagtgatgtgtagtccctgtgctccacctccattgacctgtagtccctgtgctccacctccactgacctgaagacactgagctccacctccattgacctgcagaccctgtactccacgaccattgacctggagtcactgagctccacctccattgacctgcagaacgtgtgccccacctccattgacctgtagtctctgtgctccacctccattgacctgtagtccctgtactccacgtccattgacctgtagtctctctgctccacctccattgacctgtagtccg

SEQ ID NO: 83250 - DNA, 489 bp, Homo sapiens
tccagcaccaggaagagtggctctaggagggagaggagcccagggactgacccaagatgccgttgactccagagccgccctctgggcgcgtggaggggccccccgcatgggaagcagccccatggccctcactgccctgtgggccctgcatccccatcatgctggtcctggccaccctggctgcgctcttcatcctcaccaccgctgtgttggctgaacgcctgttccgccgtgctctccgcccagaccccagccaccgtgcacccaccctggtgtggcgcccaggaggagagctgtggattgagcccatgggcaccgcccgagagcgctctgaggactggtatggctctgcggtccccctgctgacagatcgggcccctgagcctcccacccagcaacttgggcccccagaccgtactggaggtcccagcccggagcaccttctgggggccccagccctgggaggggaggccccccgccacaggcctg

SEQ ID NO: 83251 - DNA, 374 bp, Homo sapiens
  misc_feature (1)...(374): n = a,t,c or g
gttttcttttgcatgtgtgtgtccttatctggtgcttgtgtcatggtaatgctggcttgtggagtgagtttagaataattccctcctcttcattattctgggaaagtttgagaagaattcatatttaattcccctaaaatgtttggtagaattcagcagtgaagccatgagatcatggactttcctttgatgggtgactttttattactgcttaaatcttgttactcacaattggtcaattgaaattttctgtttcttctaggttcaatcctgatgggttgtatgtgtctaggaatttattttctgtaggttttccaactttttggtttgtagttgctcataatagnctctaatgactctgtatttttgaggaa

SEQ ID NO: 83252 - DNA, 401 bp, Homo sapiens
  misc_feature (1)...(401): n = a,t,c or g
nattcttcaaaatcaaaatcgaacagcaggaaatactttcaaacttgttatatgaagccaacattactcacttatcaaaactagacaaggacacaacaaggacaaaaactataagccaatatcactgaaaaatataaatgcaaaaatcttccacaaaatactagcaaactgaatgcaacaacagattttcaccatgatcaaatgggctttatcacaagggtgcaatgagtccaacatacacaaatcaatgaagatgatacatcacgttaacagaaccaagaacaaaatccatatgatcatttcaatacatgctgaaaaagcattcaagaaaattcaacctccctttatattaaaacccttcaataaactgggtatagaaggggcataccttaaaataacaa

SEQ ID NO: 83253 - DNA, 421 bp, Homo sapiens
cacagccagtgccctgttttcctgccctgatggtggctctctggctggctttgcaggtcgaagggcctccttccacctggaatgtctgaagcgacagaaggaccgagggggagacatctctcagaagacagtcctgcccttgcatctggttcatcatcaggtagctcacacttttggacaggccactgtcacctgccagcaggccagacagtccccagggtgacggacaaatcctgaagacttcagtgggtcttgcctgtctcagatggctggcacgtcctgcccctgccataagagccatccctgtagggcttcacactcctgtgcaggtgagggccccggcaaggtctccagcatcgcaggtgggggcctaggaagtgctaatgcacaggagctcattgtgtgatcctgaggacccaca

SEQ ID NO: 83254 - DNA, 414 bp, Homo sapiens
agcacctacatcaaaaaagttgaaaaacttcaaataaacaacaaaatcatgcatcttaaagaactaggcaagcaagagtgaagcaaactcaaaatgagtagaaaaaaatgaagattagagcaaaagaaattaaaacaaaaatatagaaaagatcaacaaaattaaaagtttgttttttgaaaatataaacaaaatcaacaaaccttcgccagactaagaaaaaagaagacccaaatacataaaatgaaagataaaaaagaaacattgcaactgatactgtgaaaaaatcaaacaatcattagagattactatgagtagctatatgctcataaatctaaaaacctaaaagaaatggattaatatctagacaatacaaactaccaagattgaaccacaaagaaatccaaagcacgg

SEQ ID NO: 83255 - DNA, 479 bp, Homo sapiens
  misc_feature (1)...(479): n = a,t,c or g
agagtgcccccnnaggcccccctatngccctggtagtgcccatacggacgccgaccacgcgnncgatttacattcctcttgacggataaactgttgcattgggaggcttttgaccaaagtcacacgattcaatggttagttcaggctacacagagtagaatttggttctggagttctcatttctttggctaggtatcctaatgccatctttttctcatgttccaggcagggttaagtctcttggttagagtttgggcacacaaaccaccttgtggccagcttaactggccttttcttatgaggctttagtagagacgtacgtgagtctatgtgaggagtaagctgattctttgctttcaggctctgaaaatggctcatgtgggcatctcattatcagagcaggaggcatctgtggcctcacctttcacttccaaaactccaaacattgagtgcgtacctcaccttatcaagtaagtagg

SEQ ID NO: 83256 - DNA, 167 bp, Homo sapiens
aataaacaaatcataagagactactataaataattatataccaataaattgcgtaacctagaataaatggatacattcccaccatgcagcgtatcacatttatttacacatactctctaccaagactgaatcatgaagaagggaaaaatctgaacagaccaatcatg

SEQ ID NO: 83257 - DNA, 850 bp, Homo sapiens
gacgctcaacagaatctattttccagggcacattaaagggatcaaaaagcagtagtgggtggctaagggaaggttaaagggttacttttggttgttttgaagtatttctttgagaaaactgcagagtagcctcaaacctccctggagttttcttctctgaggatactgctcaaagcggcagctatatgaggatttctgcccaccccccaaatgctgggggagaagttagcaatggccccaaaagaaagctgaccctaatgttgaatttctcgctcccttcttcaggtctgaatgctggtgctttttatgccttgtccactcttctgaatcgcatggtgatctggcactacccgggggaagaagtgaatgctggaagaattggcctgacgatcgtcattgcaggaatgcttggggctgtgatctcaggaatctggctggataggtccaaaacctacaaagagacaaccctggtagtctatatcatggacactggtggggcatggtggtgttacacgttttaccttggaaccggggacacctgtgggtagtgtttcatcactgctgggcacaatgggcttctttatgactggctatctcccactgggatttgagtttgctgtggagctcaagttacccagaatcagaaggcatctcctccggcctcctcaacatatctgcacaggtatttgggatcatctttaccatctcccagggccagattattgacaactatggaaccaagcctgggaacatcttcctgtgtgtgttccttactcttggagcagccctcactgcattcattaaggcagatctccggagacagaaagcaaacaaagaaactcttgagaac

SEQ ID NO: 83258 - DNA, 390 bp, Homo sapiens
gtggccttgggctcaagctagctggtctaatatacattttttaatatcatttgttgaaaaggtaattctttccctattgagtttcttcccctttctctatcctttgcccattgagttctcttggcatttttgttgaaagtcaactggtgatgtatgtgtggatctgcttttggactctctcctgttgcttttgctgtctgttcttatgtcggtaccatattatctttatctataactttatatgaggtttgaaattggttagtgtaaatcctccaactttgttccttattttcaaaaattttctgggtattataggtccttttgtgtttcaaaagtattttaaaaaccaccttggttaggttttttaaaaaagaaaacaccttgtgggtt

SEQ ID NO: 83259 - DNA, 451 bp, Homo sapiens
  misc_feature (1)...(451): n = a,t,c or g
gtttactcggccgcgggcctttttatctgcggaagagatagttttatttctttctttccaatctggatgacccttatttcttttcctcatgacgagaacctccaatacactattgaatagaagaggcgagaggagccttctcttattcctgagctttgaggaacagtttttagttattcaccattaactctgatattccttgatgccattgatcatgctgaggaaatatttctactcttagttgaatatttttatcatgaaaagatgttgggtaaaagcttttacattgctgcttttattaaaatttaacctcaggttattgatcttatagacgaataattattctcaaaaattctgagcacatacagcagtatctaaaaagtttttttactccaactgtatttgacagggcatttcagctttaatagattanaaactttctttttttaan

SEQ ID NO: 83260 - DNA, 376 bp, Homo sapiens
gttttcccctatagggacattttcccccaaaaggagaattgaactggaaacaatatagtacataggattatataattatgttcaatttcttaatgagaatggttttcttacatgctgggctcaaatatgagtgtatatcacagtccatagagcttggaacccctgtgcaaggtgctttcggagtcttgagcttatctgcgagttccttttatcagaatcttacttaacgcacgttaaattagaaaggcatacaaaagaatgtcattagaaataaaacttctcatagcgaataatgtctgtttcaggaaatgggcctgagtttacagtggctgtattctgctcgtggagacttcttccgtgctacttccagactaac

SEQ ID NO: 83261 - DNA, 407 bp, Homo sapiens
cttgctggtagggactcttcagaggctggaagcggtatgggacatcacatggtgagtagatgcagaagcagattcagagtaaaaaactgaaaagcccaatgtcaaactttactatggactagtttgctgtgagttgctgtcttcaagcaaataaaatggatgttacgaagtatccacataattggaactctcatacattgttggtgaaaatgtaaaacagtacaagcactttgaaaaatgatttgtcagtttcttgtaaagttaagcatatacctatacaacccagctattctacttctatatatttacctaagagaaatggaaacacatatccacaagatgacttgtatgcaaatgttcatggcagctttaattataagaagagaaaacctggaaacaatgcaaat

SEQ ID NO: 83262 - DNA, 492 bp, Homo sapiens
  misc_feature (1)...(492): n = a,t,c or g
nctgatcgccttcgganactgcaagntcatccgaaggnccacccacgcgtccgtcagaactgtactggatgaagtcatgttttctgttctgttaaaattagattaagtgcttcaggatcttgattacacttgtttaaaatttccatcgaaaactcagcacttgtctgcagctcatttaggtacaaaggttttggtaaccatcaagtagagtttgcttaactttaattttttagtccgaatggtgtaagtggaaccaattgaaatgtcagtgttgtagcttttgtttttgcttttaatcattgcttctcttcaattaggatacaaataagataacttttttccttgcaaattgacataaatcatttgttcctgcaggcttcatcttcaatatcatctcatcccttcttaaaatgagtttctacttgtaaactggtcatttctttggggcattgctcccataaacttttttgaaagaattccggccttaacatt

SEQ ID NO: 83263 - DNA, 618 bp, Homo sapiens
cacggcgatgagaacagcgaggtgtggcggagcctgttcgcccgcagtctggcagaagaggctctgcgcacggacatcctgtgcaacctgcccagctacaaggccaagatacgtgcttttcaacatgccttcagcactaatgactgctccaggaatgtctacattaagaagaatggctttactttacatcgaaaccccattgctcagagcactgatggtgcaaggaccaagattggtttcagtgagggccgccatgcatgggaagtgtggtgggagggccctctgggcactgtggcagtgattggaattgccacaaaacgggcccccatgcagtgccaaggttatgtggcattgctgggcagtgatgaccagagctggggctggaatctggtggacaataatctactacataatggagaagtcaatggcagttttccacagtgcaacaacgcaccaaaatatcagataggagaaagaattcgagtcatcttggacatggaagataagactttagcttttgaacgtggatatgagttcctgggggttgctttttagaggactttccaaaggtctgctttataacccagcagtttctgctgtatatggcaacacagaagt

SEQ ID NO: 83264 - DNA, 1138 bp, Homo sapiens
gcttgcaccatcaaccaacaagatctaatgaacattgctaaagtgcttcacccaagcagcagcagtaatacacatccttttcaagtatccattaaatatatacgaggatagaccatatgctctggaccataagacctcaaaaaatttaaaatcatggaatgtgtgatttttttcaacaacagtggaatcagattagcagacaaggaatatcacaaaacacttgggaaataacacttctaaatgatccatgggtcaaagaggaagtctcaagggaaattttaaaaatattttgaacttaatgaaaagtaaaacataacgaatttttttgaggcacaactaaagcaataccgagagggaaactcacagtattaaatgcttatactaaaagacaggaaaagggccaaatcagaaatctaagcttccacctaacctgaaaaaagaagagcaaaagaaacccaaagcaagcggaaggaaggacataataaagaaaagccgagaaatcagtaacattgaacatgagaaaacagtagaggaagtcaacaaaacaaagggctggctctttgaaaagacaataaaattgacaaatagcaagactgacagagaaaaagggaaggcaaaaatttccagtatcaggaatgaaaaggatataactatagatcttgcagatatcaaagggatcacaacaaacaactctgcacatataaatttgacaacttagataaaacgaaccaattctttgaaaagaactcaataggaattagataatttgaatagtcctgtaactgttaaggtaattacatttataatttaaaacctcttgaaaggaaatctccaaatcttgattgtttcactggatacttgtatcaaacattcgaagaacagtgaacaccaggtctgtacaatttcttttcaaaaaaaaagaaaggaagaggaggaaacccatagtcctgtgacactattcttacctgatattaaaccaagacagttcttaaaaaaaacagtatcccttatatgtgtagttggtaaaattctttccaaaatattagcaaatggaattaagcaatttataaaaagaattatatattgtgactaggattgatttccgggattcaagactggtcagtattttaaaaatcaa

SEQ ID NO: 83265 - DNA, 179 bp, Homo sapiens
tttgccctggttctgggccccctcggcctttgtgccctgattctgggccccctcggcctttttgccctggatgtgggcacactcagccttcttgccctggttctaggcacccttctatcttttagccctggatctgagccctctaggcctttatgttctgattctgtacaccctcagcc

SEQ ID NO: 83266 - DNA, 1882 bp, Homo sapiens
  misc_feature (1)...(1882): n = a,t,c or g
gagatggtaaaggaaataagcataagaaacacagaaaaagaagaaaaggggaggaaagtgagggttttctgaacccagagttattagagacttctaggaaatcaagagaacctacaggtgttgaagaaaataaaacagactcattgtttgttctcccaagtagagatgatgccacacctgttagagatgaaccaatggatgcagaatcaatcacttttaaatcagtgtctgaaaaagacaagagagaaagggataaaccaaaagcaaagggtgataaaaccaaacggaagaatgatggatctgctgtgtccaaaaaagaaaatattgtaaaacctgctaaaggaccccaagaaaaagtagatggagaacgtgagagatctcctcgatctgaacctcccaattaaaaaagcccaaagaggagactccgaaggacttgacaatactaaatcatcatcttcctctcagaaggatgaaaaaatcactgggaacccccaggaaaagctcactctaaatcagcaaaagaacaccaagaaacaaaaccagtcaaagaggaaaaagtgaagaaggactattccaaagatgtcaaatcagaaaagctaacaactaaggaagaaaaggccaagaagcctaatgagaaaaacaaaccacttgataataagggagaaaaaagaaaaagaaaaactgaagaaaaaggcgtagataaagattttgagtcttcttcaatgaaaatctcgaaactagaagtgactgaaatagtgaaaccatcaccaaagcgcaaaatggaacctgatactgaaaaaatggataggacccctgaaaaggacaaaatttctttaagtgcgccagccaaaaaaatcaaactcaacagagaaactgggaagaaaattggaagtacagaaaatatatcaaacacaaaagaaccctctgaaaaattggagtcaacatctagcaaagttaaacaagaaaaagtcaaaggaaaggtcagacgaaaagtgactggaactgaaggatccagctcaactctggtggattacaccagtacgagctcaactggaggcagtcctgtgcggaaatctgaagaaaaaacagatacaaagcgaactgtgattaaaacgatggaagaatataataatgacaataccgcgccagctgaagatgttatcattatgattcaggttcctcaatccaaatgggataaagatgactttgaatctgaagaagaagatgttaaatccacacagcctatatcaagtgtaggaaaacctgctagtgttataaaaaatgttagtacaaagccatcaaatatagtcaagtatcctgagaaagaaagtgagccatccgagaaaattcagaaattcaccaaggacgtgagccatgaaatcatacaacatgaggttaaaagttcaaaaaactctgcatctagtgaaaaagggaaaaccaaagatcgagattattcagtgttggaaaaggagaaccctgaaaagaggaagaacagcactcagccagagaaagagagtaatttggaccgtctgaatgaacaaggaaattttaaaagtctgtctcaatcttccaaagaggctagaacgtcagataaacatgattccactcgtgcttcctcaaataaagacttcactcccaatagagacaaaaaaactgactatgacaccagagagtattcaagtttcccaaacgtagagatgaaaagaatgaattaacaagacgaaaagactctccttctcgggaataaagattctggcatctgggaccaggaaaaataaacccaaggggaagaagagagatttgncctaaaaaagggaccggggggttcccaaaaaaggtaattcctaggtcccccagggggccggaaacctccttggttccc

SEQ ID NO: 83267 - DNA, 1359 bp, Homo sapiens
gggctgacaagagcatctactttcgcagtgcccagcagggttcggatggactacactttgtccgtacccaccacgtagcagagaaaaccaccttgtatgacatggacattgacatcacccagaagtacgtggccgtggcctgccaggaccgcaatgtgagagtctacaacactgtgaacgggaggcaggaggcgtgctacaagggctcccagggtgacgaagggtccttgctgaaggtccatgtggacccctcaggcaccttcctggccaccagctgctctgacaaaagcatctcagtgattgacttttactcgggcgagtgcattgccaagatgtttggccattcagaaattattaccagcatgaagttcacctatgactgtcatcacttgatcacagtatctggagacagctgcgtgttcatctggcacctgggcccggagatcaccaactgcatgaagcagcacttgctggagattgaccaccggcagcagcagcagtacacaaatgacaagaagcggagtggccaccccaggcaggatacgtatgtgtccacacctagtgagattcactccctgagccctggagagcaaacagaggatgatctggaggaagagtgtgagccagaagagatgctgaagacaccatccaaagatagcttggatccagatcctcgttgcctgctaaccaacggcaagctgccactgtgggcaaagcggctgctaggggacgatgatgtggcagatggcttggccttccacgccaagcgcagctaccagccccacggccgctgggcagagcgggccggccaagagcccctcaagaccatcctggatgcccaggacctggattgctactttacccccatgaagcccgagagtctggagaactccattctggattcactggagccacagagcctggccagcctgctgagtgagtcagagagtccccaggaagctggccgcgggcacccctccttcctgccccagcagaaggaatcatctgaggccagtgagctcatcctctactctctggaggcagaagtgacagtcacagggacagacaggtgggtgtcctttccaccaagggagccttagttggaggaacccccagctgatagctgcatcctggaagaagtgctctctgccttcccagtgggcttgtgggagtggggccagttgaggcctggatggggcaggagcccagccttagttccctggttccaggtggggtacaggagggcctgacctgggggaaggagggggcatttggaggaggcggggaggctgtcgcagtgctcctgcaggagcagcgggtacaggtgcctaggggctccgggtggggctagctgttgag

SEQ ID NO: 83268 - DNA, 491 bp, Homo sapiens
ttttttttcacattttaaaatgtattttattggctttttaaaaaacgtacaaaagtcatacataattgccattacaatctaaacagcgtgaaatgtgtctcaatatgaggcccacggtccctgcttttcaccaggaatcacccgtacatctttttctctagaaattatcttagaatttaaaaactcaaacaatgatatacacaatacttgggaactttacattacagatagatagacatccatacacacacatttgcattacacaactgctttacattacagatagacgtccatacacacacatttgcattacgcaactgctttgcattacagatagatgtccatacacacacatttgcattacgcaactgctttacattacagatagatagacttccatacacacacattcgcatatgcacactccaaccaaactactcctgcacacacacagaagcatgaacagtcactgcacacgcgcttcagggtgg

SEQ ID NO: 83269 - DNA, 541 bp, Homo sapiens
  misc_feature (1)...(541): n = a,t,c or g
ccctgttggtctgaagaagatagtaaaaggttcattatggttcagctctggtcacccaccagagaatccacactggagagcagcaccattatgaacgtagtgtgtgagggaaggcctttatttggaagctagcacttaccaatcatcagaatacccatgctggagagaaaatttataaatgtaaaaatgtaaaaaagctcaatcttatacatcagaaaatccacactggaacaaaactgtatgcatatgaccatagggaagctaacagtgttagctcattgcttaaagggcatcaagattcccgcatggggaaaagctctttgtaaattatgtgggaaaaccttcagtcaaagttcagatcttatccagcatcagagtccacactagatagaagctttatgacttggacaaatgtaagaaaacattttgatgaactcatcctttactaagcaacaaaggntacacaacaaaaatgancctcaataatcaaatntgtggtagagagntagtagaggaatttttcaatgtcatctgtcatgat

SEQ ID NO: 83270 - DNA, 507 bp, Homo sapiens
  misc_feature (1)...(507): n = a,t,c or g
attgaacatagatgactntccgagccgcaattcccggntcgacccacgcgcccggcttttgagatccttttatttactgataaattaattttatttgataacctaaaagaaatagaccaattacttgaaaggtacaatctaccaaaactcatacaagaagaactagataatctgaacagcctggtatgttttaatgaaattgaatcaataactaacaaccttgcaaattaaaaagcaccaggcccagatggggaagtctactgaatatttaagaaagaaataattctccataacttttctcaaaaaatagaagcagaacgaatacttcctaattcttttgaggactactgcattaccctaatgcaattcatctcatccacaggctaatgaagaaaagccatatgatcacattcatggatgcagaaaaaacatttggggaaacccacccccttttaggttaaactttctacgagagtggattaagcaaacttctctactagataaact

SEQ ID NO: 83271 - DNA, 1287 bp, Homo sapiens
cacaaatagcataaaaataaaggtataaagaaagatataccatgttaatactaatcaaaagaaaactggagtagcagtattgatatcagataaggcaaacttcagagggagaaaaatgatcagggataaagaggggcattatataataagagggtcaatactccaagaagacattgttaaatccttaatgtgtatgcacctaacaacagagcatcaacgtatgtgaagcaaaaactaatagaactgcaagagaaatagacaagtccactattatagttggagacttcaacactcttctatcagtaattgacacatttagcaggcaaaaaaatcagtaaggatatagctgaactggacaatactgtcaagccactgaatctaattgacatttacagtatacttcattcaacagagtacatattcttctcaagctcacaggaaacatccaccaagatagactacatacttggccttaagatacaccttacaaatttcaaagaatacaaaccatataaagtgtgctctcagaggaaattaaacaaaatcaaaaacagaaacgtagatgggaaatctcaaaataactggagattaaacaaaacacttctagataccagatgggtcaaagaagaagtctgaacagaaattttaaaatgttttgaactaaataaaaatgaaaatacaatgtatcaaaatttataggaagcagtgaaagtagtggttggagataaattataatattgaatgcctatattagaagagattaaaaagatttaaaattcataatctaagtttccatcttaggaaactagagaagaaagatcagtgtaagcctaaagcaagcaaaaggatagaaataaaaattatagtagaaatcaataaaatagaaaacaagaaaccaatagaaaaattcagtgaagtaaaaatgtgctaatttgtgcagcagcaatagaaaaaagaaataaaaacagtactttcacaggtcagtaaaatgtataaacctctagctaagctaactaagaaaaaaaaacacagattgctgataacagaaatgagaaaggggtcatcactactgatcccaaggacattaaaaagataacaaaagaatattatgagcaactctgtacccacagatttgacagcttaggtgaaacagatcaatttcttgaaagacacaaacaaccaaaactcacacagggaaaagagatgatctgaataggcctatatctattatggaaattgataaattatggaagtcaataaacaaccttgcaaacaagaaaaaaaaaa

SEQ ID NO: 83272 - DNA, 1949 bp, Homo sapiens
caccctctcttcagcctgcctgattggagacgcctggaaggagctgaccatagtggcaggtgctgtttccaaccagctcttggtctggtacccagcaactgccttagcagacaacaaacctgtagcacctgaccgacgaatcagtgggcatgtgggcatcatcttcagcatgtcatacctggaaagcaagggattgctggctacagcttcagaagaccgaagcgttcgtatctggaaggggggcgacctgcgagtgcctgggggtcgggtgcaaaatattgggcactgctttgggcacagcgcccgtgtgtggcaggtcaagcttctagagaattaccttatcagtgcaggagaggattgtgtctgcttggtgtggagccatgaaggtgagatcctccaggcctttcggggacaccagggacgtgggatccgggccatagctgcccatgagaggcaggcctgggtgatcactgggggtgatgactcaggcattcggctgtggcacttggtagggcgtgggtaccggggattgggggtctcggctctctgcttcaagtcccgtagtaggccaggtacactcaaggctgtgactctggctggctcttggcgactgctggcagtgactgatacaggggccctgtatctctatgacgtcgaggtcaagtgctgggagcagctgctagaggataaacatttccagtcctactgcctgctggaggcagctcctggtcccgagggcttcggattgtgtgctatggccaatggggaaggtcgtgtcaaggttgtccccatcaacactccaactgctgctgtggaccagaccctgtttcctgggaaggtgcacagcttgagctgggccctgcgtggttatgaggagctcctgttgctggcatcgggccctggcggggtagtagcttgcctagagatctcagccgcaccctctggcaaggccatctttgtcaaggaacgttgtcggtacctgctgcccccaagcaagcagagatggcacacatgcagtgccttcctacccccaggtgacttcctggtgtgtggtgaccgccggggctctgtgctgctattcccctccagaccagggcgtgatggagcctactaccagctgtttgtacgagacggccagctccagccagtcctaaggcagaagtcctgtcgaggcatgaactggctagctgggctccgtatagtgcccgatgggagcatggttatcctgggtttccatgccaatgagtttgtggtgtggaaccctcggtcacacgagaagctgcacatcatcaactgtggtggagggcaccgttcgtgggcattctctgatactgaggcggccatggcctttgcttacctcaaggatggggatgtcatgctgtacagggctctgggtggctgcacccggccacacgtgattctccgggagggtctgcatggccgtgagatcacttgtgtaaagcgtgtgggcaccattaccctggggcctgaatatggagtgcccagcttcatgcagcctgatgacctggagcctggcagtgaggggcccgacttgactgacattgtgatcacatgtagtgaggacactactgtctgtgtcctagcactccctacaaccacaggctcagcccacgcactcacagctgtttgtaaccatatctcctcggtacgtgctgtggctgtgtggggcattggcaccccaggtggccctcaggatcctcagccaggcctgactgcccatgtggtgtctgcgggggggcgggctgagatgcactgcttcagcatcatggttactccggaccccagcaccccaagccgcctcgcctgccatgtcatgcacctttcgtcccaccggctagatgagtattgggaccggcaacgcaatcggcatcggatggttaaggtagacccagagaccaggtaatatatgctcctgggcagggtgtggt

SEQ ID NO: 83273 - DNA, 1591 bp, Homo sapiens
ttttttttttttacctgttgaactcatttattactttttatggattctttagcattttctatatacaactatgtatcaactgtgaatacatatagtttcacttcttttgcagtataaacctcttttctttattagcttatttgatttttagatgttgaacaaaccttgaattcctaacctaactgctgtggctagaacttcaaggtacaatgctgaataggaagtagtgccgagtgaacatccttgtccttcttcccaatcttaaggggggaaaacattcaggccttcaggtctattcaccatgaagtataatgttaggtgtgggcttttcatagatgttatatttatcatatctaggaagattccttttattcctaagtttgttgagtgtttttatgaaagagttttggattttatcaaatgctgtaataagacaatctgtgtgggttttgtgctttattaaatatggtacagttgatcctcattattcaaggttatgtatttgtgaatttaccaacttgctaaaatttataaccctcaaattgatatccgtggcacttttgcagtcatttgtggatatgtgtaaatgggtgaaaaatttgagtcacccagtacacatgttcccagctgaggctgaacaagatgatgctctgccttcctgcttcagtctcatagagaaatgactggagggtggaaatggcaggggcaattctgtgtagtacaagaagctctggctccggggccagctggatggggtttgaatttcagctctgacacctgttaggggggtgcctcaggcatgtcacttaacacttctgatacctcactttcacttctgtaaaataaggtagaatttgctaggatgaattaagaattcaagctcataatgtgtgtgagataaacatatgtatacacacatatacacaaatacactttctcctaaaagcagttgttccatatttaattcagtgtttatgggagaatattctgtagaacataattactgtgaataatgagaactgactgtatattagcttatttgatttttagatgttgaaccaaccttgaattcctgggataaattccacttggtcatgatatagaatcctttttataggttgctggattcagtttgctaatatttttgttaatgatttttgtgtttgtattaataaggaatattggcttatagttttcttgtgatgtctagtctagtatcagggtaatactgacctagagtaagttgggaagtgttctttcctctcctacttttagaaacagtgtgcaaaaaattagtgctaattttaatgtttggcagaattcaacaatgcagccatctaggcctgggattttctttgtgagagagacttttaaaattactaattcagtatttttccttgttaatgccaattgcatttttaaccaacttttaggtagagccaaagataagagtattatctcattaggccagtgaaattcaagaagaaaatacatattatcaaggaagatgctaaatatttgggaaattctgataggcagctatgaaaattatccattatatcttgattcttaacctctatctagctttaac

SEQ ID NO: 83274 - DNA, 604 bp, Homo sapiens
ttttttttttttatagctaattattttattacaatgttttcagaattagatctaggtgacataaaatacacaaaagcataaagccatctgaatagtacagtcaacaagcaacaaccagtacaatcagcaataatagagaacttttaactttgtatgtcacagagaatgtatatacctttttaataaaaagcctgaataaaccaataactattaaagaaatcacaaagctgattaaaaatctactattaaaagtgtcatcaggattagattgttttacactttgtcctagctaacttttaacaaacaaataattctaatgctatttaaattattccagaccacaggaaaaaaattgaaaactcacatattcatatttttttaaagctagcacaacttcaataacaaaacttgataaagatagcatcagaaggacaaaatacaattttactttggaatgaaaatgcaataattctaaattaaatactggtaaataaaatccactcatgtagcaaatcattatttcacaatgaccaagtagtatttgttccagaaatacaagtttggttccacatcaaatgcctaccattctaattcattctcgtgc

SEQ ID NO: 83275 - DNA, 389 bp, Homo sapiens
cctttgttatgtgttatgcaggaaatccatgtattcgttgccaacagcaaagtcatgaagcttttcctctatgctttctgttaagagttttacattttgagttcttacatttaagtctttaatccatttttgttgatttttggggggactacagttagttaagggactttttttgggtatataatattctgttttcttaacacaattagttgaagatactcttttccctattgggtattggaggcacttttgtccaacaacagctgaccgtgtgtgggaatttgtttctgagctatcatgttttattggtctatatgttggtttttatgccagtagcacactgttttacttactgtatcattgcaatattattttgagcccaagatgtg

SEQ ID NO: 83276 - DNA, 401 bp, Homo sapiens
gcttcatttactattgcacgtagtgatccacacccaataaagttctgcttcttaccactgcaactttgagctctggaagtttaaagaccttagttcccaagggaagaatgtctctaccagggaatacgatggtttattgcatggagagttgagactgccacctggacatttggagttcattacaccactaagccaataggcaaaggggaaggttagtgtcctggctgagaagactgacccctaatatcaaagaacagagatttgctccacacatggggacaaggaggaatatgtctgaaatccattacatcctttgaagatgctctttctatttcattgtccaaagggagaaatcagtggaaaactacagcaacgccatacaggaaaaaccatctagtgcg

SEQ ID NO: 83277 - DNA, 447 bp, Homo sapiens
aggaatgtggcaaaggttttagccaactctcaaaccttactaaacacaagaagattcatactagagagaaaccctacaaatgtgaagaatgtggcatatcttttaaccagttctcacaacttgctatacataagatgattcacacttgaatgaaaccctacaaatgtgaacgatgtggcagttgttttaactagttctcgaactttactatgcataagaaaattcaaactggagagaaactctacaaatgtgaagaatgtggcaaagcttttaaccaagtctcaacacttactatacataagataatttatactggagcaaaaccttggaaattcaaagaatgtggtaaaacttataatcctcaaaacttcttacacctaaaattcatgcaggagagaaaccccacaaatgtgaaaaatttggtaaattctttaacaagtcttcaac

SEQ ID NO: 83278 - DNA, 378 bp, Homo sapiens
  misc_feature (1)...(378): n = a,t,c or g
atttttttctgtaaggggtcacatagtaaatattttaggctttgctggcaatatgctgtctgttgtaactgctgatatctgctattgtagcatgaaagcagatgtagactgtatgtaaacaaatatacatggctatgttccgataaaattattacaagaccaagtacaggactggatttggcctctggaccgtagtttgctgaccagtgatttagacttctaacatggtagattacattgattgattttttgaatattgaacaagtgtagcattcctgggataaaccctacatggngtgggatattactcttcttatgttcctgagtttgatttgctaatatgttcttgatgatttttgtgtttatgttcacttagga

SEQ ID NO: 83279 - DNA, 613 bp, Homo sapiens
ataacccatggatcaaagaaaaatctcaagaaaaatgtttaaatatttttaattttaatgaaaatacagtttatgaaaccatgtgggatacagctgaaacagtgcttcaaaatttgtagcattaaatgatgtattagaaaagaaaaagaacctaaaatcaataacctcagtttccacctttggaaactagaaaaagagaaacaaattaaacctgcagtgagcagaagaaagtaaatactgaaaattagagcggaaatcaacaaagttgaaaacaggaaaacaatggagaaaatcaacaaaataaaaagctggttctttgaaaagatcagtaaaatgataaatctctagccaggcaaccaaggaaaaatgagtacaccaattgccaatattaggaatgaaagaggcgttattctgctaatcccatggataaaatacaggattagtaagagaatagtataaataagctctcactcacatatttgataaattagataaaatagactagttccttgaaatacacatataaacttaaaacagcttctagacagcagacccagatggttgtactggtgaattctaccagccagccagtgtgacacaaacgaaatcaatc

SEQ ID NO: 83280 - DNA, 393 bp, Homo sapiens
cccacgcgtccgacaagtcctagcagaatgatttgaaatttgagaagtcctaatttatatgcttctgaaagggcaggaaataagcaagataataaatccagtgacaagcagctgcgtattaaacatgttacaaggttcacaagggagagaagttagtccatcatatgtgagagaagactccaaccttgagtcatctcagttgactgaaaactccaagttttatatttttaccatacctcaaaattttggaagaccggtaaaaattattccatctgaccctttcctttctaaggttgttaaggaaaatataagccccactatgaaagaagctcccagctttataaggagatctaccttaattaccccagctaaaagtgaaaatgttgatgttgg

SEQ ID NO: 83281 - DNA, 359 bp, Homo sapiens
  misc_feature (1)...(359): n = a,t,c or g
cctgttccaggctttgggaagtcctgatgtctcatagttgaggtccaaaagggggagtttgggaaagcaatgaatgagggcaagtgcctcttctgaatccctgcaggaaaatacctgaccctagagaatgtggctgatctggtgaggccatccccactgaccctccacacggtgcaaaaatggctcttggcagccggagccaaaagtgccattctgtgatcacacaggactttctgacttgctggctgagcatccggtgagaggaaatgattgctccatggagggcaccagtcatcccatcagtgagatggatggngaagagngagagcttgctggggcttgtgggtgggagctaatgc

SEQ ID NO: 83282 - DNA, 438 bp, Homo sapiens
ccttatcagatatgtgatttggaaaataaatattttcttcctattctgtaggttggctttttactttgctgatagtgtcctttgaagcacaagtttttaattttgattaaatccagagtatccattttttcttttgtagcttatgcttttggtgtcctatctaaaaagctattttctaatccaaggttacaaagatttacacctatgttttcttgtaaaagtgttactgcgatatcccttaaatttaggtctatgaagtggcccatttttgaagttgcattttaagatcttagatttgtttgttccatgttgcttttcaagactcatcaaatcaacacaatcatctttccttgaatgtagttaatatccttttttgaatatacgattactgtcttcctgtactggactacatgcaatttttggtcgacgcggccgcgc

SEQ ID NO: 83283 - DNA, 378 bp, Homo sapiens
  misc_feature (1)...(378): n = a,t,c or g
tatgcctgatatttgtgtaattagggctatacagaaaattatctgggcatcagcatgtggggcattaggactagtttttagcccaaatgaagaaataactaaaatttatcagatggtaagaattattacagaaatagatttttaagaaaatgttgcttcattgtacatgtgattaaattttcatcatttctgtcaccttatagaccaagtcgcttgtatctaatggtttaaaatttattgctacctataaataaaatgagaatatattgttttattttggaaataaaatactctagaagcctgctatgaggcagctttcttttcctacttttttaaaaagacttctcattgactcaaatatagntatactggaataan

SEQ ID NO: 83284 - DNA, 373 bp, Homo sapiens
caaacatcagtagtaccaaaataaaattgatacacatctagtaggactgatgaggaaaagcagaagacacaaattcccaatatcaacatgaaaaatgtgacatcaatacaaattctatcaatattaactgcgtaacaaaagaatgtgatacaactttatgccagtaaatttgacagcttagattaaatagactccttgaaagacacaaactaccaaaactcacacaagaagaaatagataacctgaatagctctatgtatattaaagaaatttaattcatagttaaaacctttccacaagggaaactccagatctagatgcctttactggggagttctactatagatttaagaaatatcaccagttctacaca

SEQ ID NO: 83285 - DNA, 354 bp, Homo sapiens
ttttttccagtttgctgagtgggagaatttcaacactgcgagatgaaactggtgctatattgattgatggagatccagcagcatgtgcacccattataaagtttcttctgactgaagaactacacttacggggagtgagtatttatgttctcaggcatgaagcacaaatttacgggatcactccattaggtatgtgctcttttaatattaggcgtttatgatctgactcatgtatgagagcagccctaaatgataggggtttatatcaggtactaattcttgacggacttgttcagtgcttaggttttgtggattctgatagcagaaagatggtgtcaactcttacttaattaa

SEQ ID NO: 83286 - DNA, 402 bp, Homo sapiens
  misc_feature (1)...(402): n = a,t,c or g
ctgaattcatgacctcttttcccttatttgtagattggcaaactaattgagttgcaaggcatctagaatagccaaaacaaccttgaaaaagaaaaaggaggaggattcacactttttctgacttcatatagatcaaaggaatagaattggaagtccagaaataaaaccatgtgtcaatggtcaaatgattttccactagggtgccaagattattcagtgggggatagaagagtctttttaacaaatgatgctgagctaactgtatatctacttagaaaagaatacagtttgaccctaccttataccatatataaaatatgaactaaaaatatatcanaaatctaaatgtaagagctaaaactataaaactattagaagaaaacaaaggggtaaatcttcata

SEQ ID NO: 83287 - DNA, 375 bp, Homo sapiens
cacatgcacacaaagcgtgcacacatgcatgcacatttgcacactcatacaagcatgctagcatgcacagcaacacaatgtgggcacgcatccacacacacacaagtgcatgcacatacccaatcaatccatgctcacacgcatacatgtgtgcacacatgcacaccacgcacacacacacagggttgactatagcctgagggtttcaccagcctggcctcctgccttggctcttgcgataaataggctctttcctccctccctcccgctactcttggtcccgccccactcctgtccacgtcccacagcccatcctccacccagtgaccagagggatctgttaaaacccaagtcagatcgtgacacttcccagct

SEQ ID NO: 83288 - DNA, 359 bp, Homo sapiens
ggataacactgttaataggcaactcagagggcacccttgccctcttgttcagcgactcatgaccatttcaggatcagacgagaagccaacgtgacatcctcgatactactgtggatatgctgagggtctgtctgtccgccaattggttgaaaaacgatgacgagatcctcaagtgccttgatgggttcaccatccatgtggcacaaaaaatcagagaatctctttcgaggtgctggccgccttcaacgctctgagtaagcattgctgggtgtcaggagagaaaagccaaagaagggggtgccagacagctctgtgcaacctctatgccatgagtgggatagataccactgctgctctaa

SEQ ID NO: 83289 - DNA, 376 bp, Homo sapiens
ccatcttgagttaatttttgaataacgtttaaggaaggggtccaggatcaactttctgcatatggctacccaattctcccacaaccatgaattaaatacagaatcctttcctcattgcttattttcatcagggttgccaaagatcagacggctgtacgagagaaatctcatctctggattctctatgctgctccattggactatgtgcctgcccttgtaccacccccatcctcttttggttactgccccgcttgtaggagagtttgaagctgtatagtgtgatgactccagttacgatgtttctgcttggattgtcatggctattcgggctctttgtggctccatatacatattaacagaagctgggcatggtgcg

SEQ ID NO: 83290 - DNA, 387 bp, Homo sapiens
attagatagttgtaaatacatggatatatttctggtttctttgggttcatttttattccaatatactgctttggtcactatagctttgtagtatatttcaaagtaaggttgtgtgataccttcaacctttcttttttgcttgattgctctgggtatttggggtcttttgtggtgccatattaattttaaatacattttaaaaattttatgaagtcactggtattttgatacaggttacattttatctgtagattattttgtttaacacacatatttagcaatattaatagtaccaattcaggaatgagtaatattttccatttgtgtattacttaattttttacttttatgttctttagattataatataaggtgtttcaccttttt

SEQ ID NO: 83291 - DNA, 364 bp, Homo sapiens
cttcagtgtcatggtgcaagaacagattggtgggtcagtctaggggtcctcgatagcaggtgctagtggtggtcatttggggctccatctgtagaatcatttgcagtttcatggattctattctggaagagacaaattttacaaggaggttaaaaatgcagggtccagagataagcaacatcacaatagccaccaagggtcccaagaaggggagaaaccagggcatccattggttgacaatactccaaagtcctgtgtcttggagctcttgtgcctggcactgtatctggtctcgaagctccttaaccttttttggtgacaattctgtattgattaacaaaatagtaacactcttctcctagaa

SEQ ID NO: 83292 - DNA, 364 bp, Homo sapiens
cagtatacagatttattttcaacttttgttcttctttagtattatgttgactatctgagtcttttgagtttccatacaaactttggaatcagtttatcagtatctacaaaataacttgctgggattttaatgggatggcattgaatctgtagatcacctaaaagagaactgacatcttaatatggagtctttctacccatgaacgtaaaatatctcttgatttatttagatcatctttgctttctttcaggaaagttttgaagtttttctcatagagattctatacatattttgttggacttatgcttaagcatttcattttatggtaactgacataaatggtatgtttttaatttcaaatttc

SEQ ID NO: 83293 - DNA, 347 bp, Homo sapiens
tttcccttatattttcttctaagagttttatagtattagctcttagatttaggtcttcaatccattttgagttagtttttaagtaacttagtgtaaagtaagggtccaacttcattttcgttgtagtgaatatccggttttcccaacacacttcgttgaaaagactgtcttttcccctttgaatgttgttggcactctagttgaaaatcatttcattatgtatgtgaggggttatttctggcctctattctgttctactggttcatatgtctcttttcttggcagtatcacactgttttgattaccacagctttgtaataagttttcaaatcaggatatgtgagtct

SEQ ID NO: 83294 - DNA, 366 bp, Homo sapiens
gctgggatgatacagctaagaccatgttccggattccctggaaacatgcaggcctgggcaatatttaagggaaagtataaggagggggacacaggaggtccagctgtctggaagactcgcctgcgctgtgcactcaacaagagttctgaatttaatgagggtcctgaaagggaacgtatggatgttagaaactctctacaaggccgttcaatttggtgccaacaggaatcgaaattggtcatagcaggcactctggatttcctgctgctcaatgggttcgttctgtagccattgcggggcgctaaaaattcattcttactataattgctactacaacctctgttcgtggtttaaacatcattaccc

SEQ ID NO: 83295 - DNA, 395 bp, Homo sapiens
  misc_feature (1)...(395): n = a,t,c or g
cggacgcgtgggttcatatctaagaaatcttttcccaacccaaagtcaaagatgttctcctgtgttttcttaaggaagttttgtagttttaggttttggatttctttttgtataaggggtgtgatatgtgttgaaggttgaggttcatttgtttgcatgtggatgcaaatatccagttgtttagcaccacttgctaagaaagaggatcctttctctattgaattatctttgcatttcgtaaaaaaaaatcagtagacttaatattgggtggctttagtctgtctcaatctgtgtgtctatcatttcaccaatactacactgtcttgataactgtgtctttgtagttagtctagaaatcaggtaatgtgatccctctaactttagtctttaacaan

SEQ ID NO: 83296 - DNA, 387 bp, Homo sapiens
cggacgcgtgggctcctgccttcttcttctccactttcttcttttgcatggggatatcagcttttcccagcactatttatttattgaaaagacttattccccattatattatattagcacccatgtcaaaagtcaatgagcaataagtatcagggtttatttctggacaatcagttctgatctattgatttatatggcttttcttatgccagggtcacactcttgactgcggtagctttgtagaaattttaaaattgggaagggtgagtcctccaaccttgttctttttcaagaatgatttggctattctagggccatggcatttcaatatgaattttagggtcaacttgtcaatatctggagaaaggctctcctagatttgttaag

SEQ ID NO: 83297 - DNA, 390 bp, Homo sapiens
ctagagcccaatcatgtatatacttccatttgatgatggaatgctgctgtgaacacctgactttatggctagatggattagaaagcacccagttcatgacaggcagttctggtcacatggtgacttgatgacccatagtcaaacattctgtttccaccaaagcccagtaacaggtaaagatctgtctcttaaaaagagcatagctatctgtggaagatggcagggccttgctccaaaatcctagaggtctccactgtgattcacctatggaggcctgccagtggcatcctatctgccactgacacctcaaccaccattggattggctgggtcatacggcccaagtggcagagcaacttgcacagtagtctggacccgttgcgaaccttct

SEQ ID NO: 83298 - DNA, 410 bp, Homo sapiens
cccacgcgtccggagaacaactgctgcactctagccttttgtccccactttccatcaaaggagtaagcccccatcttaagggggtaccagtatcccgtgtctcaattgactatattttctttcttccaatatccatgattgaatggttgaaaaagcaattcaactgctctaagggccgtacccatacaccacagattatacttgagaggcaccaaaaaaaggaaattcatctggggaacaatgaaaaaaatgtcctagggcctctaccatccacatgaaaattacagatctgtcttcaaattgtcctgatgtgggagaccatacacgatggtggggaactggcctttcaaagtggccatcagatggcaacacctgcctaaattccagagggcaccatcaactaggaactt

SEQ ID NO: 83299 - DNA, 388 bp, Homo sapiens
cggacgcgtgggcggacgcgtggggatagatgtccagattctggatcccagtgcatttcaactaggataaacctaaagaagtctacactgagacacattataatcaaattgccaaaagtcaaagacaaagagggaattctgaaagcagcaagataaaagtggatcatcacatgcaaggtatccttcgtaagaccattagcaaattcctcagccaacacaatgtaggccaggagggagtagactaagacattcaaagtgctgaagaaaaaactgccaaccaagaatgttatactgcatgaaatggtccttcataaatgaaggagagataaagatgttaccaggcaaacaaaagttcagagagtttatcactgctctagacccgccttat

SEQ ID NO: 83300 - DNA, 761 bp, Homo sapiens
  misc_feature (1)...(761): n = a,t,c or g
taatttcagttggaataaaaagtaggtgtcaatatttttcttagctgctatgaatttctccctgcctgctggtctgaaataaaataactgcatcatgctttagcttgattgttttagtttttgcttaaatgcacagtctgatgactgtatgtggctaattttgccttcctttgtctttggtccctggctgtatttgtgcaatgtctttgatatgctacttggtgctgtttgtaaagaagcatttacaatagtatatgatgtctgaactctcctgaataggttaaagaactccgagaaaaggctgagttttataggaagcgagttcaggggacgcatttttctcgggaccatctgaatcagattttatctgatagcaactgctgttgggatgtctcctcaaccacaagctcagaaggaaccattagtagcaacatcagagcattagatcttgctggagatcctacaagccataagactttgcagaaatgtccttctacagaaccagaagaaaaaggaaatatcgtggaagaacagccccagaaaaataccacggagaaattgggtgtgtcagctcccaccattacccgttaggaagggcggctggcttggggatacagagaacacaagtgaagacgttacaggaaacagcccgggggaggaaagagggagggagggacggacaattgaaggagggaagggggacagggaaaacggggcaaggcaggtttttattggggagagccaggagagtttgggtntta

SEQ ID NO: 83301 - DNA, 394 bp, Homo sapiens
catattttcatttattcagttctacatgttttctaatttctagggcagatattttttcctgacctatggattatttagaagtatttatttttaaaaattccaaaacatctcagcatttggctttatttttctttctttcattctccttttggctgcacccccgggaatccctttgccgctggggtaatgtgggcagcggcgtttcgaatggaggcacttccgtgttcgtggcacatggtttattgagcaaagttctgaaggccatttttatccactgctgggcagaacaggagactccattttagaaccagcgtctcctttcaggaacaggaagaggggcaccttgggacacaatttgcgacgcgactacttttctaatgtgtctgcagagctg

SEQ ID NO: 83302 - DNA, 1249 bp, Homo sapiens
taaaggatgtagaacacaggaaaaggttgacaggactgaggtgattcgcacctgcataaacccagtgtactcaaaactgtttactgtggacttttactttgaggaggtgcagcgcctgcggtttgaagtccatgacatcagcagcaaccacaatgggctgaaggaggccgacttccttggtggcatggagtgcacacttggccagattgtttcccagagaaagctgtccaaatccttgctgaagcatgggaacacagcagggaaatcttccatcacggtgattgctgaagaattatctggcaatgacgactatgttgagcttgcattcaatgcacggaaattggatgacaaggatttcttcagtaaatctgacccatttctggaaatttttcgtatgaatgatgatgcaactcagcagctggtgcaccgaactgaggttgtgatgaataacttaagcccagcctggaaatcattcaaagtatctgtaaattctctatgcagcggagacccagaccgccggctaaagtgcatagtatgggactgggactccaatggcaagcatgacttcattggagaattcacctcgacattcaaggagatgagaggagcaatggaagggaaacaggtgcagtgggagtgcatcaatcccaagtacaaagccaagaagaagaattacaagaactcaggcactgtgattctgaatctgtgcaagattcacaagatgcattctttcttggactacatcatgggtggctgccaaatccagtttacagtagctatagatttcactgcctcaaacggggaccccaggaacagctgttccttgcactacatccacccttaccaacccaatgagtatctgaaagctttggtagctgtgggggagatttgccaagactatgacagtgacaaaatgttccctgcctttgggtttggcgccaggatacctccagagtacacggactctcatgactttgcaatcaactttaatgaagacaacccagaatgtgcaggaattcaaggagttgtggaagcctatcagagctgtttttcctaaggctccaacttttacgggtcccaccaacatttgcccccattcatccaggaaggttgccaagttcaggcgttcagagggaaactaacaccaagggagggcattcgcaattattttcatcctggttgatcctggacaggtgggtgtttattcacaggacatggggccggacaacccgggaggccattttgttcc

SEQ ID NO: 83303 - DNA, 359 bp, Homo sapiens
  misc_feature (1)...(359): n = a,t,c or g
tgactgttgaggtacagcggctttgttttaaattatgtgagggtaaaacaaaggaagtttacaaattgttagacagtccaggaaaagtcctcctgccgtccaaggaccatattactgcaggaaatgcagctagaaaatgcttggtttaggaattgggattattataaaactgctcaccagttgaatttttcagttattacaggaagcaggtagtaaaactgccttcaccataaaatgaggggagacggctttcattgcctccgtaccgtgaaaacagacctttcagatgagtatctcngaagaatatcatcctggttcttttctcttaagaaatcctggtgtcacagaatgatataact

SEQ ID NO: 83304 - DNA, 370 bp, Homo sapiens
cggacgcgtgggtttggaatctcccctaataccaaaacaatcttgaaaaaaaagttcaaagactcacgcttcctgatttcaaactggctataaaactaccatcatcgaaaccacatggtactgtgtagggacagacatacagaacacagatcctagaaagaaaatgcttgcatatgtggtcaaatgattttttgacaacagtgccatgatcattcaatggagaaaggatggtctttaaacatatgttgttgggaaaactgggtatctacattctaaagaataaagttggacccttaccttatatacaaaaattaattttgagtcaaagatctaaacttagaagccaaaaccatagaagacttagaagaga

SEQ ID NO: 83305 - DNA, 374 bp, Homo sapiens
catccagtggctgcagaaacatattctttacctcagcacatggaccattctcaaggatataccatatgttaagccacaaaaaaatcttaaaaatgtcaaaaaatatcaaattatatcagctaacttctctgactaccgtggaataaaactagaaatcaacaacaagagaaattttggaaaggatacaaacatatgtaaattaaacaatatgctcctgagtgacctctgggtcaatgaagaaattaagcagataattgtaaaacttcttgaaacaaatgacaacggaaacacaacacaccaaaacctgtaaaacataccaaaaaccagtgaaagcagtactaagaggaaagtttatagctatacgtgcctacatt

SEQ ID NO: 83306 - DNA, 380 bp, Homo sapiens
gtatctattatatatgcttttttctcatttattagttaaaatgctaaattacattatttgggtttctaataataaaccaaccaggcattcctgaaataaacaagatttggtcctgatttattacaattgttatatattgctggattcaatttgctaatattttgtttaggatttttagatctatgtctgtaagagagattcacctgtaattttcctttctgtataatgtctttgtgagattttggtatcaaaggtttgctggcctcctaaaactagttgaggaatacaattcttctttggctttcttcatttaaaaaccaggcaactgaggtccaaggtgtttagattatttttcataactgcattaaatccaattattt

SEQ ID NO: 83307 - DNA, 385 bp, Homo sapiens
  misc_feature (1)...(385): n = a,t,c or g
accattctttgtactatgcctatgaggccggcgtgaccctccatagaaacctggagctctaccgcctcctacgtctacctgaccttgtcttactactttgaccgcgatgaggcggcttggaagaactttgcctaatactttggtgcccagccccatgaggagagggaacatgctgggaacctgttgaagctgcccaaccagggagggggccgaatcttccttcaggatatcaagaaactcccacttgtgatgactgggaaagcgggctgaatgcagtggagtgtgcattacatttggaaaaaaaagagaatcagcctctactggaactgcacaaactggccactgacggaaatgacccccatttgcgtgacttcattgagacacn

SEQ ID NO: 83308 - DNA, 370 bp, Homo sapiens
aaaaaaaagtaataatagaatgcccaaaaataaaaataaaaatggaataagggggggtagtttttaacaaaaaagagggggggattcgaatccaacagcaacagttggtaaaatcattgcttaaagttgggggaggaaaccaaacccttactgtgaatgtttagggcactaaaacattggcagaagatcagacagaagttgttatttataggagccgaccgttcgccgggggggactttaagaagagttccacctacaacgctatatgccctttttgaacaatccaatatttaaacacaattgcgggaacttggtgtaaccctttctatgactagaacagaactttctcctgcacagatcaaacagaatt

SEQ ID NO: 83309 - DNA, 484 bp, Homo sapiens
  misc_feature (1)...(484): n = a,t,c or g
catagaacgctntcatagagcggccctgaaatcccgcgncgacccacgcgtccgaatattttaaagtcttatttaacataattttacactatgtctttaaatcaggcaatgtattcctttaactttgtacttcttttcaaattttttctgtttttattttggtttggttttggcttttctaagttcttcgcatttccatatgaattttagaatttagttgtcattttctaataaaaatatcgtggattttgattgggattgcattgaatatatgtatatcaatttgaagagaattttaacgttaacaatattgagtgttgtaacccataaacgtggcatatctctccctttatttagatctttaatttttctccgcaatcttttatagttttcagtgtatatatcctgcaaatcttatatgtctcaagtatatgttgtatgctcttgtaaaaagtactcttaaatttcaattttaaattaggcg

SEQ ID NO: 83310 - DNA, 399 bp, Homo sapiens
cacaaattgatctatagattcaatgcaatctcaagaaaaatccctgcaagttattttgtgaatattgacaaacttattctaaaatttatatggaaagataaaagacttagaatagccaactcagtgcagaaagaaaagaacaaagtcagaggactgaatctatcctacttcaaaacttactataaagctgcggtagttaagatattgtgctatttgcaaaagcacaagaatggacaaatagatcaatggaacaaatagggagcccagaaacagacccacataaataaagtcaattaatttttgacaaaggcacaaaggcaatacaatgaagcaaagatagtcttttcaacagatggtgctggaataactagacattgagattccataaaataaatctag

SEQ ID NO: 83311 - DNA, 368 bp, Homo sapiens
cactgatccagcacctggtgccctcagccgactactaccccgagaaagcctacatggtcaccttcgtgctgagctctggcctcttcatcgagccccgggagctcctggcccgggtctgccacctgtgcatcgagcagcagcagctggacaagccggggctggacaaggcccgggtccggaagttcggccccaaactgctgcagctgttggccgagtggaccgagaccttcccaagggacttccaggaggagtcgactatcgggcaccttaaggacgtcgtgggccgcatcgccccctgtgacgaggcataccggaagaggatgcatcagctcctacaggctctgcaccagaagctggcggctctgcgc

SEQ ID NO: 83312 - DNA, 862 bp, Homo sapiens
  misc_feature (1)...(862): n = a,t,c or g
gaaaaccagcccccgggtaaaattttaaaaaacaatccgtaaccaactttcagcgcgcaggtagccgggtgttttcccccctacccctaagaaatttttatttaccttcagcgctcatatcgggagggggttgttcaactaaattcccccccacaaataagggttctttccaaaaattcccaagttgccgatttccccgtcccccccttgttaaaacccgccccggccctggtttttaaaaccccccccataagggaaaaacttttaccttcccagcccccgttaaatttggcccccccaagggttttttaaaacgggcccccccnnnnnnnnnnnnnnnnnnnnnnnnnccaaaaacaccattttaataaggaaacaacagaaataaaagattgttctctggctggagcccagaccccatataatacattacatgtacaaagtggctttcagccagctcctgggcgtctccctggggctctcctaccacctgttccatgccaaattcctgggtccttggacctctgctcctctccagaatatgcccaccccctccccttatcccataacacagtggttcaagagggagagcctgacaagtgggctgggaattgggaggaggggactattaggggtgaaggatgtttgcaacagcttaaattaaacatcgggagggaaagtctccctttccttcagggtattaggggtgggtcagtgggaaaatgggcgtgttcctgctttgggtgtgggagcatgagtgcccaggggaagcccaacctgaggtgggggtagggtccccctgaaccccttaggatctcctaaaattactgcctccactgggacagggcaggaggcagaactg

SEQ ID NO: 83313 - DNA, 3657 bp, Homo sapiens
gctgcgcatgctcgcgctgtgaccccggcttgaggtaacaccgcgagctgaggctggggcccttggcgcggaggctgagggacccgccgcggcgctgtcgccggagagggagggcaccgctgtcgtcggccagaagccaaggagtcctcagtgacggtgggatccacaacatctccacatcgctgtccccacccagccagggcagcgccagcactagctcagacgcaaggacggaaccgctggactccaggttccttgcctgggagtaggagaaatccacctgctgggggctgagtgtggcctgagggacaggccctgggtcccgggatgcccctgcccgagcccagcgagcaggagggtgagagtgtgaaggccagccaggagccatcccccaagccaggcacagaagtcatcccggcagcccccaggaagcccagaaagttctccaaactggtcctgctcacagcctccaaagacagcaccaaggtggcgggggccaagcgcaagggtgtgcactgtgtcatgtccctgggggtgcccggacccgccaccctcgccagcaccttgcagatcctgccagttgaggagcagggaggggtggtccagccagccctagagatgcctgaacagaagtgcagcaagctggatgcagcagcccctcagtccctggagttcctgaggacaccattcgggggccgcctcctggtgctggagtccttcctgtacaagcaggagaaggcagtgggggacaaggtgtactggaagtgccgccaacatgctgagctgggctgccggggccgggccatcacccgaggcctgcgggccacagtgatgcggggccactgccacgcgcccgatgagcaaggcctggaggcccggcgccagagggagaaactgcccagcctggccctgccagagggcttgggagagccccagggtcctgagggccctggaggccgagtggaggagcccctggagggggtgggcccgtggcagtgccctgaggagcccgagcccactcctgggctggtgctgagcaagccggccctggaggaggaggaggcaccccgagccctgtcactgctgagcctgccgcccaagaagcgctcgatcctggggctgggacaggcccggcccctcgagttcctgaggacgtgctacgggggcagcttcctggtacacgagtcgttcctctacaagcgggagaaggctgtcggggacaaggtgtattggacctgccgggaccacgcgctgcacggctgccggagccgggccatcacccagggacagcgggtgactgtgatgcgtgggcactgccaccagcccgatatggagggcctggaagcccggcggcagcaggagaaggccgtggagacgctgcaggctgggcaggacggccctgggagccaagtggacacgctgctccgaggcgtggatagtttgctctaccgcaggggtccgggtcccctgactctcaccaggcctcggcccagaaagcgagcaaaggtcgaagaccaggagctgccaacccagcccgaggccccagacgagcaccaggacatggacgcagacccaggaggccccgagttcctgaagacgcccctggggggcagcttcctggtgtacgagtccttcctctaccggcgggagaaggcggccggggagaaggtgtattggacctgccgggaccaggcccgcatgggctgccgcagccgcgccatcacccagggccggcgggtcatggtcatgcgcaggcactgccacccaccggacctgggcggcctggaggccctgcggcagcgggagcacttccccaacctggcgcagtgggacagcccaggtgcgtgtggaggatcctctccggcccctggagttcctgaggacttccctggggggcaggttcctggtgcacgagtccttcctctacaggaaggagaaggcggccggggagaaggtgtactggatgtgccgggaccaggctcggctgggctgccgcagccgcgccataacccagggccaccgcatcatggtcatgcgcagccactgccatcagcctgacctggcaggcctggaggccttgaggcaacgggagcggctccccaccacggcccagcaggaggacccagaaaagattcaagttcagctgtgcttcaagacgtgttctcctgaaagccagcagatttatggggacatcaaagacgtcagactggatggcgagtcccagtgaggcgatgtgggcagaggagctccgagccgcccacccaaggtgcgttcacatccacacaggcacttcccatccacctaggtttggcttagcagaaacttcttttcattcttccaaagcatcgatggtcttcgcgtctcctcaggaggtctcccaggaggaattcttggatggtgtcctcatgtcggcggagaacagtgctcagagctggcgcttgcagacgcagctgtcgtggggcagggcggtggcgccttcctgacctttggaagacatgacaaagctgcctggacacggacgcccctgctgtacggccacagcacccctgggtttgcagagcacgcagccttcctagggctttccacctggcgaggccccgctctgctcagcacggtgcaaagtgaatgctgctgtcttggagcctgggcacgtttggggaagttcctgcttcaaactgagctgccccgcataggccaggtcaacccacaccaatctcttctggacaggtgctgggtaggccttcctggtctctggccgcctgctgccagggtgtggccatccccagcaaccggagctggccaaaccagaggcctcgctccgcactccacactttcctttctgtgctccttccaagttaaattaaaccccctctccacgattcccacggcaggcgtcattcccgagatgggagccagtccaggggtcagcaggagccagcgctgggcacacgtgccctggctgaggccagcggcatcctgggtggcccaggtccatcctgggcagcaaaggcgtgtccccttctgtcagacagcttcacagagtgtggcttcaccagtcagagggagcagtccggagaggcaagatgaccccaccgggactgcagagcctcctccttactaacaaggacctgtccgcagccgcgaggtccttcactcccaccctgtaattgtggggggagtgccagcaacaggcctgtcccctggcaagttggccacggaacccaccatgcactgcaaggctgtgacagcctgggcacccctgcttctcctctgcttgtacggttcccccaataaatcctattttccatctcaccgtgtggagctggtacttgttcacatccctcttgcagcaacagttggccgccgtgaaaccacactccgtcacatctccatgccagtgcccagggggagacccctccccatgcctgggctgttacagtcacctggcccagacgtaacctggaccaagagtggacggagacacctggggttggggcctctggaagggctgctggggggccagctgcagcctgtggcctctcccaggcccggatatggcaggacatttgcgtcgtgttgctggaagaggcaggatgctctgttctcgccattaacctgcgttacgcctagactcatctgcataagcctgggcaagtg

SEQ ID NO: 83314 - DNA, 441 bp, Homo sapiens
acatctatgtcatgatcactccaagcttggcacgagggcaaaagagtggtgacaataggcacataactacagcatctactacggacctcgccatccagaagcagccagtctagtagaataggggaatgggctattgaaagctcagctaagactccagctcaaggaaaataggccacaaagttggagcactctcctttgggcatgcaatatatgtgtagaactaacagctaatatatgggccccagtagttagaatacatgggtctgggaaaaaggcatggctttggccatcattactcccagtgaccttcttatggaatttgtgttttccatttgtacaaacttagaattttccagggcttaggaagcacgtgttcccagagatccaataagggtttatgctgcacttaaaactgcagcttcccacaggggttacttttga

SEQ ID NO: 83315 - DNA, 454 bp, Homo sapiens
cgttgcacatctattagacgactacgccaatcttggcacgaggcccagataacccaactcaccccccgataacagtcacccctaccagataacccagtcactgccagataaaccaggcacctcccaaagaacccagtcacctctcacataacctattcaccccagataacccagtcactgccagataaaccaatcaccccaaataacccaggcacccctcacataatctattcaccccagataacccagtcactgccagataaaccagtcacctcccaaataacccgggcacccctcacataacctattcaccccagataacccagtcactgccagataaaccaatcaccccaaataacccgggcacccctcacataatctattcaccccagataacccaggcactgccagataaaccagtcacctcccaaataacccggtcacctctcacatg

SEQ ID NO: 83316 - DNA, 1125 bp, Homo sapiens
tttttaaagaaaaatttaaaagtttattgttcaaacaagaagtacagaccacaatctagaagactcaaatcaagtggtaagaaattaatcttacagcagttacaacacagtttataatgcataaagggggggaatattttgaccttttttataattggctgttatacattctttttagggcaagttgagctgtttaagcttgttggtctatagctgattggtttaatttcagtgaatcatgctggcaaggatgtaaagcttacattttgcatttcatttatgatcagagacagcatttcaggaaaatcagaatgattagttttggttacacggttgcgggtagtcagccttagggtatttctaaactggggggcttccatttttatttttccggtaaataatacctgcatgagatgggcagctcaggtcttaaggtcacataccagtgcttcaagtggtcaagtgttctgtttaaattagagtccaatagcaaggctaagtagctgccattcaaagggaatgtatatggcaacccatcttgggtaatttatatgtccaaaacccaagggccctggtgcatcctgatagcagtctcttgttgccgcagtatccaatctgtatgggtaagagtcaatgagacctgtagttccatgggcctacattaatgtcaggcccatgttaatgcatagtaggcctctcgagtctgctgttgttgagggccccattcagaggtggctgtgttgtgggtaattttaactaaaggaggcaaaataatactcagatgtgatacatgttatctccaatagacaaacaggcataccagctattgagcttcttttaggtgggggctgccaaggacaatatttgactttatcaggaatactcctctaattactggaccaggtagctccagggactgcacttgttgggcaagtcttgggatcttatcagggctgacaactcaacctgcatgtgtcatattatctatgaccttatgtatggagtggtcaacttgtttcataggctggcaatgagcatgttattaatatagtggatgacaagtacttttcgaagtaactggacatgttgcaggtcaggggaatggaagtattgctatggactgaa

SEQ ID NO: 83317 - DNA, 482 bp, Homo sapiens
  misc_feature (1)...(482): n = a,t,c or g
cggcgctgggtttganncccattgagnacactagtccgtgcggtggaattccaactgtctccttggtttcctttattgaagagaaatccttaatattttgtaatgaagtccatcaactgtatttttgtttgtgtgtcttttttaaaagaagtcttccctatactgagatatcaaagatactcttaaaacatctcctacagttttaaatttcacatttactactttaattcatctgggattcatctttgtgtttgatggggatcatgttttatttttctttatataatgggccagtgtgttcccacaactactaaatagttcaccttttccccataggttagtagtgtctcctttgctatactgaaagctcccattataggtgggcctgtgtctgagttccatcttgttccactgttctgtttgtctcttcttgtgccagcggcctagtattttgattactatgacattgtagtgtgtgttag

SEQ ID NO: 83318 - DNA, 458 bp, Homo sapiens
  misc_feature (1)...(458): n = a,t,c or g
attcgatgaccattcgtccagtgcggnggcattcctctgttattaccctcaccttactacacactcctcctgccaagaggattcattgttactgaccgggctggtgcttttgctcaggacctccaggacctcccggtgtgcctggtccagctggaagagaaggtcccctggggaagcaggggaacataggacctcagggcaagccaggcccaaaaggagaagctgggcccaaaggtaggtggctggtcttgggccagtctgagaagggaaaggaggaaggacaagggtccatgatatgacctgaggcgtgctcagagtgccagggagagcccagacccttgatgctgcaaaggcttgccatgcaccctcccaatccccacaactgcaatattttcctctcaccctccacagaggagccccagaaagcaaggagagtctccccacttctctctctgacc

SEQ ID NO: 83319 - DNA, 512 bp, Homo sapiens
agcgaaggaagaagcgtccctccaggagccaggaaggtaactcagggaggggccccgggcaccgtcccacgccagggcgctggcacccagccggtccctccccttccccattgggcactgcaagttccagcggcacccaggagaggtgacttgggtgcggcacgggagaggaggcggcagtgcgtccaccgcagggcggctatgtgggctgccgcggcccgtgcaactattcctccaaccctactaattccgaccttcacgccacctccgttagggagtagggggcggacaccgggcaccaggtcccaggcaagtggctgccatgtggcttagtggccagagaaccgggcagccctcagagggtgttggcatggctgtcccgggccccccagccccacccactccgagtcagggttgcttctgtgtgataagccgttgagtgcgtttcttttatttggaagcagaggttccccctgattctgatgataataaaacaaagaaactgtgaaaaa

SEQ ID NO: 83320 - DNA, 514 bp, Homo sapiens
  misc_feature (1)...(514): n = a,t,c or g
ggcaacaggacaaccagggcaacccccactgatgcagactgagagcctcgaaaccncggtcgacccacgcgtncgagaggctgctgttcaaaaggtggcacatgttcctctttcagctaacaccataactagaagaatggatgaaatagcagagaatattgaggcacaattgttagagaggattaatgagtcaccgtgctacacaatccacaaaagggttttgtcccagaaatagactcatacatatatgatcagtgattttcaacagtggtacaaatgcaagtcagcgcagaaaaaataatctcttcaacaaatggtgcaggaacaattggatatccataaaatgaactcggatccacgctttgcaccatatgcaaaaattgactcaaaataggtataggtcctagacctaaatgtaacaacctgaaactctaaaatttctcaggaaaaaaatgggataaaatctttgtggtcttggattaggcaaagatattttcttgtgtttgtgggtaaa

SEQ ID NO: 83321 - DNA, 444 bp, Homo sapiens
ttgagacgcatgcgttcgctaaccgatgcacaatatatattcttttcatcagcacatggaatatcctccaggatagaccatacgttagaccacagaacaagtctcaacaaacttagaagatcaaaatcataccaggtatcttctcagatcacaatggagtaaaattagaagtctgtaccaagaagaactctgtaaactatacaaatgcataatttctactatttaaatatgtatactatacaaatatatacaactatgtatatacaaatttgcaacatggaaattaaacatgcttctgaattaatattgagtcaacgaagaaattaagatggaaataataaagtattgaaacaaacgaagataaaagcacaatataccaaaacctgtgggatacagcaaaaacagggctaaggggaattttatagcaataaatgcctacagcaa

SEQ ID NO: 83322 - DNA, 384 bp, Homo sapiens
ggcacgttctattgggatgggcgaagttaatacagtagacaaataccagtgaatcgtgcccataaatcattgatgatctttaattgctgcctgtacggtgcaataataccagtatcagagggtgtgcctccagccttaccaaatatggaggttacgaaaactatgagtatgggttctgttacattgctcacaccacctttttcaactatgttctggcgctggaaccttgtctgcattaaggaaacaaacaggattgttgggttcaaatactcccatcaaccaaggattatcataataggccgtgtattattccaggtccagcttcacatctttaaagtgacgttggtttatcactgcattggccactgtgtttgagcacactcc

SEQ ID NO: 83323 - DNA, 461 bp, Homo sapiens
  misc_feature (1)...(461): n = a,t,c or g
natagagttcgatagcatgngcggnggcantcatcntatggcatggcatggctcccactcaccaagactgatctagctattgctgctgctgagtgttcggcctgccagtaacagagaccaactctgagcctagatatagctccatgccttgagaacaaccaacagccacttgggaagctggctatattaaaccctgtctaccctggaaagagctgtgattcattttcactggcatagatgtatattccagatacgagttcatcttcactgcttgtagagcttcatccagcacaactctcaaagggcttatagaatggctaatctactgggatagattatgggatctatagattatgggatagtcatacaggatcccatatgattccacagcaaaggaggtgcagcagtgggcacatggggacagggtccacttgacctttcatctactgcgctatcctgaa

SEQ ID NO: 83324 - DNA, 256 bp, Homo sapiens
ttttttttttttaaaaaaaacaaatcctccccccgggaaaaagaaaccggggggggaacccttttaaaaaaaagggaaaaagtttttaaggggggaaaagggcccccggttggcccaaaggggccctgtgaaaaggcgggccccccccccggggttgggctttcggacttaaaacccccccgcccaaattggggaaggaaggcccttgaaagggggccccccccaggcgccccccccaaaaatgggatttttttgg

SEQ ID NO: 83325 - DNA, 1489 bp, Homo sapiens
  misc_feature (1)...(1489): n = a,t,c or g
ggaattcccggaagacgggggcgatcaaaagggcagacatgctgaagtatgtcatcaaaaggtacaggagcttcctccctgagattttcaagaaagcctctgacctccccgagttagtctttgggttctatctgaaggaacttgatccagcagagcactcctatgtcttgatcagaaaaatcgatcctgccctggtttggggcctgacaggcgaccagggcacaccaaagacccggctcctgatgattactctggactcgatcttcatgcaggccagctgtgtccccgaggaggtggtctgggaggtgttgagggtgttggaggcacatttcgtctaaaaagcatttcgtctttggggagtccatgaagctcatcaccaaagctagtgtgcagcaggagtatctggtgcacaaataggtgtcccacagcaatcccacgctctaggtattcttgtgggggctctcaaaggaaacaagacagatggaagtcccggagtttgtggccaaagtgaatgacacccaccccagttcctttccgtggcagtaaatgaggcattgagagaagaggaggagataccccgtgcccgagatggcagctgccgttggtgacgtgacaagtgccagtgttagtgccagttccagttccagggcctatgccatggctgaagcaagcatcagcaccagcaccaatgcaagtgccagttgccagtgccagggctagagccatggctggagcaagtatcagtacctgggacagtgccagtgtggttgcaatctcaggctagtgtcagggactcctcctgccagcagtgaaggctggggctgagtcttcactttgttttgctgtgggtagtcaaaagggccccacagcagtgggtgctggggtcctgacttttcaagagtcgaggggtagagtggggttagggagaacctgccgcccatggtatctgtgttccagttctatttgtctttctcagtgatttagctttcaatttgcatactgcaaagttttgtttgccttaattaacttttttttataatgatgatcattttacaggaaataaactggttaaaactacatgatgacagaattatatcagagttgaaacaaacgccatacctaagcattttttcaaaatcctttgttccatagacacttgattgagtacttaagttgaacatctaggtctatgaatgacgttggtcaaatgttttattgttctctgtttcggttttagcaggagagatttgctgtttcataaaagaaattgggagagtatatcattttatgcctgtaacttattatagcattggaataagctgttctttggaggtttgagagactttaccagtacaatcattccccccctcccccaaatataaaaagataaaataaaaagccggtcagtgtctgttgcacaaaattacaaccgctctctgcttgtatttgcctagttctccagaatgtaggagcggtnnnnttcaaacga

SEQ ID NO: 83326 - DNA, 617 bp, Homo sapiens
tcgttagcagtccctagtcagtgtggtggaattccgggccgtggtgagtccgggctcccgtggccgcgtgctgggaggagactggagcccggttaggaagaatggagttggcgactcgctaccagatccctaaagaagtggctgacatctttaacgcccccagtgatgatgaagagtttgttggcttccgagatgatgttcccatggaaaccctctcgtcagaggagagctgtgatagttttgactcactagagtcagggaaacagcaggatgtgcgctttcattccaaatacttcacagaagagctaagaagaatttttatagaggacactgactcagagactgaggattttgcaggatttacgcagagtgatctgaatggaaagactaacccagaagtaatggtcgtggagtcagatttgagtgatgatggcaaagcatctttggtgagcgaggaagaggaagatgaagaagaagataaggctacccctagaagaagcaggtctagaagaagtagtattggtcttcgagtagcctttcagttccccaccaagaagctggccaacaaaccagataaaaacagttcttccgagcagttgttttctagcgcacgctta

SEQ ID NO: 83327 - DNA, 360 bp, Homo sapiens
tcgcccacgcgttcgcccacgcgtccgttttaaataaagggtttaaatatattaattaaaagacagattgccaaaatggttttaaaaaacaatatccactctaagagatgtatgaggaaaccattttaaataaaaagactcagatagattaaaaaaaagagagagaaagtcttactatgctaacaaaaatcagaagaaagcttgagtagctatattaacttcagacaaagtagacatcaaaacaaggaatattatcagagacaaagagaggccttacataatgataaagaaatcaattatctgaaaacaacattacatttctaaaagtgtttgcacctaacagcaaagtgtcaaaacaag

SEQ ID NO: 83328 - DNA, 336 bp, Homo sapiens
ctttgttgcatgttttgagattgggaagtgcgaggcctccaattttggtctcatttttcaagattattttgactattcagggtcccttgagattccgtatgacttttaggaaggtttttttctgtttctacaacaaattccattggagttttgataggcattgcatttaatctgtagatcactttgggtagtatggacattttaacaacattaagccttccaatccataagcaggagatgccttttcatttatttgtacctttctttgatttatcttagcaacattttgtagttttcactgtagaagtgtttcactaacttggttaagtttattcc

SEQ ID NO: 83329 - DNA, 324 bp, Homo sapiens
ggatatcagagcacaggatcgaggcctcgggaaattacctggcacagcgactgacatcatccttcctgaggggactgagctcttggaaatcaaaccctctcatgttgtgtggatggacgattctcctcacacttacgatggtacaaggggaaccatgaggcccccaaggggatccctgggtgtccacacgaactcctcctaccctcattgggggacggtcgccaagcctcctgctggggattaggatctattacctgcgcctggacaggaggggactcctcttttcacccgctagtctctgtgcacatactgccctattgaccg

SEQ ID NO: 83330 - DNA, 371 bp, Homo sapiens
cgcttgtgaagaatgtgacagagctttccgtgtgaaatcaaaccttgaaggacataggagaatggatactggagagaaaccttacaagtgtaatgagtgtggcaagaccttaaatcagaaggcatattttatatgccatcatagacttcatactggagagaaaccttataagtgaaatgaacgcgacaagaactttagtcagaagtcatcccttatgtgccaccatagacttcatactggagagaaaccttacaagtgtaatgagtgtggcaagacctttagtcagaagtcaaaccttacatgccatcgtagacttcatactggagaaaaacaagtgtaatgaatgtggtgaggttgttaatcaacaagca

SEQ ID NO: 83331 - DNA, 329 bp, Homo sapiens
caccaatgaaacagtatagagaatctagatataccaactcatctttaacaaaggtgccaagaacatacaatgaggaaacgatggtcttttcaataaatggtgtgggggaaagctagataactatatgcagaagaatgaaacaagaatcctctctctcgctatacacaaaaatcaaatcaaaatggattaaaggcttaaatctaagacctgaaactacaaaactagaagaacacactggagaagtgctccaggaccttggtctgggaaaagatttttttgtttaagacctcaaaagcacagacaacaaagcaaaaacagacaaatgagat

SEQ ID NO: 83332 - DNA, 700 bp, Homo sapiens
ggtacacctgccagtctggagcagcccccggagccccaagcctcagcttcaccgtccaggtggctgagccccctgtgcgggtggtagctcccgaggcagcccagacgagggttcggagcaccccaggcggggacctagagctggtggtgcacctctccgggccagggggccctgtacgctggtacaaggacggggagcgactggcaagccaggggcgggtgcagctggagcaggccggggccaggcaggtgctgcgggtgcagggggcacggagcggggacgctggggagtacctgtgcgatgcgccccaggacagccgcatcttccttgtcagcgtggaaggtaacagtgtacccctcacaccctgtgggctgtggcaccccaaggaccatctgccactttctagggcccccttactcctccacccccgctttgctgcttctggctccaaccagtgcgtgcatgaccatcacttggataggggctcagggctcctctttccagaaaccctcatgttgagagcagcataaaccagtggttaaaagcaggggctctagagtccacccagccaggttccagcctagattctgtgccccagtagctgtgtgacattggccaagttgttcaacctgtctgagccccggctctgaaaagaggggatagtgcttttcttataggcctgttgtgacaagtaaatgcg

SEQ ID NO: 83333 - DNA, 749 bp, Homo sapiens
ttctcagaaggcatacctcactgcacaccagagacttcacacaggagataagccttataaatgcagtgattgtggaagaaccttctattttaagtcagacctgaccagacatcagaggattcatacgggagagaaaccttatgaatgtagtgagtgtgaaaaagcctttagaagcaagtcgaagctcattcagcatcagcgtactcacactggagagagaccatattcatgcagagaatgtggcaaagcctttgcccacatgtcagtcctcattaaacatgagaaaactcacataagagagacagccataaattcactgacggtggagaaaccttcctcaaggagtcatacctccttatacatgagcgaactcatacaagagcaaaagactgtgaacacagtacctatagaaatgccttcctcaggaaccccgccattgttaaacaagagtgagcgcctagtgggcagaaatgtagtgattgtggaacaaccttttccaagaaatcaagcctttgtagttaatcaggaatttgaacagagaataagcctcacaaatgaagtgaatgtggccccatcagtaataaattatatcttgtatcttacagatattgtatcagaataaatcttctgataccagaaaggtgggaaaatctttagtaggaatcctccagccattatatcccagagagctcatttagggctgaaacactgtggaggcagtggttgtggaggacatttctgtgagaagt

SEQ ID NO: 83334 - DNA, 369 bp, Homo sapiens
cttttatttaacattgtcttagaagttctagccagtgccatcaggtaaaataaagaaaagccgtacagattgaaaaggaagaagtaaaactttcccaatttagacagcatgattttccatatagaaaatcctcaagattctgcaaaaaagctacatgaactaataagtacattcagcaaggttgaaagttagaagattaatatccaaaaagcagttgcacatacatttattaacaacaagcaattgggaattaatttattataacaaatacagcaccatttacaatagaagcaaaaacatgaaaaatttaggagtaaatttgacaaaatatgtgtaacctgtttactgaaaacttatacagcattgtag

SEQ ID NO: 83335 - DNA, 316 bp, Homo sapiens
gtcgatgcagtaaggtaagaaaaagaaatgtatatggattgggaaagaagaaataaaactaccatcattcacagatgacatgcttgtgtatgcagaaaattctaaggaagctacagattaaaattattaagagattagcaaagtcagtgtacaatatcaacatcaaaagaccagttatatttctatataccatcaacaagcccttagaaaatgaaatttaaaccaatatttaatttatagtagtatacacaattaccttgaactaaatgtaataatagacgtacaaaacctcaagcaaaagttatgaagctttgtt

SEQ ID NO: 83336 - DNA, 313 bp, Homo sapiens
ggcttgcctttttatttttctagcaatgccttttgaagagccaacattttaaattttgatgaagtccagtttatcaatttttaaaattttatagattgagatttttgtgtcctatttaaaaaatgctcacctaacccaaattgctaacattttctcttgtattctcatctcagagttttatagttttagcccttacatttaggtctgtcatccatttcaaattaattttgtttgtgatgtgtggtgggaatgagctcatttttttttctatatgtggctatctagttgttccagcatcatttagaaaatatta

SEQ ID NO: 83337 - DNA, 370 bp, Homo sapiens
gatatgctgtataacagattctactgtaaagctatggttgcacaacagactaaattatcttgtaaaagttgtgctaaataattgaattgccctggattacttactggctaaacaggaaattatctgtgcagctgctggcacttcttgttgctcatggaggaatttaacatgtattttagagattcagttgtagggaattgatagactgtttggttaaagtgagtagactgtttatctagctcattctttgatctatttgattttacgtggtttggtttatgggtaccctggttaaggaacacactccaaactcttggtattatcctcctgatagtcataacagtagtctctctggtgcaccgctcgtgcc

SEQ ID NO: 83338 - DNA, 398 bp, Homo sapiens
  misc_feature (1)...(398): n = a,t,c or g
ggcacgagaaaatgtgtatggaactgcaaaaaaaccctgaatagccaagtcagtccgagcaaaaagaacaaagctgtggacatcatactaactgattctgaactctaccaccaagtgatgttagttaaacagcatgatgttggcataaaaatagactaattgaccagtggagcagaatggaaaactcagcagtgaacctattcatatatagtcaattgatgttaagcaagggtgccaagtataaccattggaaaaaggacatcttttcattaaagggtgttgtgaaaaatgtatatccatgtgcagaagaatgaaattagatcattatctcacagcattaacagaaatattatcaagtggattaaggaggtaaatgtaagaccttaaactgtaaaacn

SEQ ID NO: 83339 - DNA, 351 bp, Homo sapiens
tgcacgagcttggagggaaaaagattggaggtctaggggagagggatgtggatagacatacgggaatgagcataaagtgcataaaatgtgaacatccaccagagagcaccctcaaaagaggcactaaaaaccaagtagccaaaatgtcctaaccagttgactgacagacatctctgtcattggccaccccagtgttggcatgatagacacacgaatcatgtgaccgtggtagcagagattgaggtcactcatggaacaagcattgtggattcccatttaccaagactgccactacaaaacgtgcagctgccagcaacagagactagggaagaagttgactacattgggccg

SEQ ID NO: 83340 - DNA, 1225 bp, Homo sapiens
  misc_feature (1)...(1225): n = a,t,c or g
tttagccagaaggaaaacctcattatacatcagagaatccatactggagagaaaccttatgantgtaaagggtgtgggaaagctttcattcagaagtcaagcctcattagacaccagagaagtcacacaggagagaaaccttatacgtgtaaggaatgtgggaaagccttcagtggcaagtcaaatctcacagagcatgagaaaattcatattggagagaaaccctacaaatgtaatgaatgtgggacaatctttcaggcagaagcaatacctcatttaaaccatcacaatattcatacaggagagaaaccctatgaatgtaataaatgtggaaaagccttctctcgaatcacatcacttattgtacatgtgagaattcatacaggtgataagccttatgagtgtaaggtctgtgggaaagccttctgtcaaagctcatctcttactgtgcatatgagaagccatacaggtgagaaaccctatggttgtaatgaatgtgggaaagccttttctcagttctcaacccttgctctgcacatgagaatccatactggcaagaaccgtatttcaaaaacaatactatgtgaatataaacctgatggaaaagttttgaaaaatatttcagaactagtcattagaaatataagccccataaaagagaagtttggtgacagtactggatgggggaaatcactcctcaataccaagcatgagaaaattcatcctgcagtgaatctccataaacaaacagaaagagttctcagtggtaaacaggagcttattcagcatcagaagagacctcaaacagaagagaaaccctttcactgtccttactgtgggaataactttagaaggaagtcatacctcattgaacatcagcgaattcacacaggtgaaaaaccttatgtttgcaatcaatgtggaaaggccttccgtcagaagacagccctcacccttcatgagaaaacacatatagaggggaaaccctttatttgtatcgattgtgggaagtccttccgccagaaggccaccctcactagacatcacaaaacacatacgggggagaaagcctatgaatgtcctcagtgtggaagtgcctttaggaagaagtcatacctcattgatcaccagagaactcacacaggagagaaaccgtatcagtgtaatgagtgtgggaaggcatttatccagaagacacccctcactgttcatcagagctcgtgcc

SEQ ID NO: 83341 - DNA, 354 bp, Homo sapiens
agcacgagtaccctgccacgactgcctcccagcttaactggcaccactttcttgaagccacttccctttcacggtccacagctggaaggaagcccctttccctgggggcacccacaggaccccagttgggtttctgtatcatactccacaacaggcaggccacacacctgcccacctataaacacagtgctgtctgatgccaacacgttgtggcacatgctgtgcctctgccagaaatgccaacccagagccttcgtggctcggctccagagcctcctcttccaagaagtctcccacaccttccttggctacagctcatcagtccccctgctcttgtacaaccaggacactggg

SEQ ID NO: 83342 - DNA, 361 bp, Homo sapiens
ggcacgaggtggaagatgctggaggagaaaccctgggaaggggtctggttgtctacccatggacccaaaggttctttgacagatgttgagatcctcccttttggggagccatcgggggccaaccagaagcgaatgcacatgccatgaatgagctgactccattgggacatgccattaagcacccggatgatccaaagggcacctttgcccagctgaatgaactgcactgtgacaagctgcatgtggatcctgataacttcgagctactgggaaatgtgctggagaccgttttggcattccctttcggcgaaaaaatcacccctgagtgcaggcttcctgggcaaacaaggtgactggagtg

SEQ ID NO: 83343 - DNA, 345 bp, Homo sapiens
ggcacgaggataaatgaattcagtaaagtttcaggatacaaaatcaatgtacaaaaattactatttaccagtaataatcaagcttagaaccaaatcaagttgtcagtttgttagcatttacaatagctgtaaaaataaaatatctggaatgcatttaaccaaggaagtgaaaaatacctacaaggaaaactatcaaacactgattaaaggaatttgagatgacaaaaataaattgaaaaaatcttatgctcttgaataagaggaatgaatatcattaaaatgtctatattatctaaagcaatctacagattcatttcaattctcatcaaaataccaatgtaattt

SEQ ID NO: 83344 - DNA, 368 bp, Homo sapiens
  misc_feature (1)...(368): n = a,t,c or g
ggctcgagtagatataaagcacacagggaactcatcttatccatggggttttccttgttcgatgactggacagaaggactgtggtctccatctagctctgaactcttttttcccccttctagttcaacttttacacaagctcagtgttcgagcagctgatggcccccagaagcttttgaaggtgaggtattgaaacctgttagttgaaggctggttctgggaatgtttctggggctgacttttctctcttttttactttagggaattaagaatccagtatcagatcactttccagttggatgtatgaaagttggcacttctttttccatcccggatgtcagtgatgtgcgtgagctggtgcccaccan

SEQ ID NO: 83345 - DNA, 373 bp, Homo sapiens
ggcacgagaattgcattaaaccaaaagattaatctgggggagaattgtcatttttactatgttggggcttccagctcaggactgtctctccatttattagctcgtctttcatctacagtttgtgattttcagcatacagctactatacatggtttcttgagtttatgcctaagtattaattttctttgaagtgattgtattaagtgatattggtttatatatttttccatgtgttcattggtagtttatagaaatgtgattgatttttgtgtgttgatcttgtatgctatgaccttaccaaacttactaattccaggtgagttttttctttcttttgtagattctttgatattttgtatgtagataacatgtg

SEQ ID NO: 83346 - DNA, 667 bp, Homo sapiens
gggccgtttcctttctttctgatatatatgagattaaatgtgttctctatgagaagactgagggttggtgttttaagtaatgcttgttttaactggttaaggcttttgagttttaagattccaagtattagttgcttgagtttcttttatgaggtggtataaagggtgaggtatttcaccatatccaggtacccacagtctgcaaaattcagtaattcctaagaatccccttaactgttaaaggaaatgggcttaatcctttccttacctggtgctcttgtcccttctgataagactagacctaggtactttactgaagtctgacagagctgagctttagattttgaagtcgtatatcccctttctgccaagaaattgaagagagcctcagtgctttcctgttacttccttggttggagcacagaggagactgtcatttatatacttcaaagtttaaacttgagggtgagaaaaattagaaaaacatttggacagggtctgtttcagcaacttccttctgatatcggggggtgcctgagtaataaacctgctctttattgaattgggagacagggaggtgtgtttcactaaggcctctctcagcctttccataacggctgagggattttcatctgatttttgatttaacatggattgttctcgtgcc

SEQ ID NO: 83347 - DNA, 360 bp, Homo sapiens
ggacagctttgtgcaaagaactgaagttcacagctgctagtgcctgggagatcaaatagtataaatgagggcagacaaccctgaggggcagatggagctttccagacaatcttggcatgaggatgagtgagtttcaaatcagtcctgccgaggcagatggcttcctccagctctgcttactgaatgcgaagtcacagtcagtaagaaaactggttttcttcttcccaggcgctgccccatacctgaagaccaagtttatctgtgtgacaccattcattgatgcagtttggaaataatggtgaaggtgctgaaccctcagcaggaagggcagttgagtccctcaccttttgacatgaagtg

SEQ ID NO: 83348 - DNA, 2797 bp, Homo sapiens
aggggcacactacagcgagctcgagctggatgtcctgggtgcccaggcatgaaaaatgttcaccctcctggacgtggtgaactgcaaggcccgcttcatccacgatggccctgaggacacctctgaccagctggtgctggaggtgtcagtgatggcttggttgcccatgccctcatgcctgcggaggggccaaacagacctcctgcccatccaggtcaaccctgtcaatgacccaccccacatcatcttcccacatggcagccttatggtgatcctggaacacacacagaagcctctggggcctgaggttctccaggcctatgacctggactctgcctgtgagggcctcaccttccagctccttggcaccccctctggcctcaccgtggagcaccgagaccagcctggggagccggtgactgagttctcctgctgggagttggaggccggcagcctagtctatgtccactgtggtggccctacacaggacttgacattccgggtcagcaatggactgcaggccagccccccggccatgctgaaggtggtggctgtccagctggccatacaaatccaccgcagcacagggctgcatctggcccagggctctgccatgcccatcttgcctaccaacctgttggtggagaccagcgccgtggggcaggatgtgaccgtgctgttccgtgtcaccggaggcctgccgttcagggagctgcagaagcagggggctggtggggtggaggatgctgagtggtgggtcacacaggcgttccaccagcaggatgtggagcagggccacgtgaggtacctgagcactgacccacagcactacaccgaggacaccgtggagaacctggatctgcaggtgcaggtgagctgggaaatcctgagcaatctgtccttcctagtgaccatccagagagccactgtgtggatgctgcagctggagccactgcacactcagaacacccagcaggaggccctcaccacagcccacctggaggccaccctggaggaggcaggcccaagccccccaaccttccactgtgaggtggttcaggctcccaggaaaggcaactttcaactacagggcacgatgctgtcagacggtcagggcttcacccaggatgacgtacaggctgcagaggtgacctatggggccatggcacgtgcctcagtggcagtggaggacaccttctgtttccatgtcacagctccaccatatttctccccactctgtaccttctccatccatattggcggtgacccagacatgcctgtcctcgtggtgcccgagggtggtgggtgtgtcctctctgctgaccagctcttcatcaagagtctcaacagtgccaggtacctctatgaggtcatggagcagccccgccatgggaggttgacttggcgtgggacacaggacaagatcactatggtgacatccttcaccaatggagacctgatgcatggccagctgaccatcagctgcgtcttccacgtggcctggggtaggtggcggctgctgactacagacaacatggccttcagcaatgctgattcgggctttgctgaggcccagctggtgctgacccaccaggacctcctctctggcagtatcatggccacggatgagcccatgcagcccatctgccgcttcatccaggaggggcctcaggaagaggcgagtcctgtgtccgatgggcagcaccaggccatcacggtgctggaggtgcaggccttggagccttacctctgtgtggccaatggctccggcctcatggttcctcaaggaggccagggtaccatcaacatggccgagctccacctgggcaccaacctcaacatctgcagtagggatgaggcccactaccacgtcacagacagccctcactggggacagttgctccaagccactcagccagccacagccttctctcagcaggacctgctggttggggctgttttctatggccacaatggcagcctcagctcccgcaacaccctggccttctcaatggatgtgggaccagtgcacacagatgccaccctacaagtgaccattgccctagagggcccagtagccccactgaagctggcccagcacaaggagatctacatcttccagggagaggcagctgagatcagaagggaccagctggaggtagcccaggaggcagcgccgccagcagacatcgttttctcagtgaagagcccaccgagtgccggctacctggtgatggtgctgcgtggcatcttggcagatgagccacccagcctggaccccgtgcagagcttctcccaagaggcagtggacacaggcaggatcctctacctgcactcccgccctgaggcccggagccatgccttctcgctggatgtggcctcggcctgggtgctccccttgaggacgtcacgtggagctggaggtggaagagcatctgatccagtacctgcacgatgggagcaagacactgacggttttgtcctgatggctaatgcctctgagatggaccgccagagccatcctgtggccttcactgtcaccatcctgcctgtcaatggccaacccccgacctcatacaaactcaggcctgcagaggctctgaggagcatggatggttactctgggcccaaggacctggtgtacaccattaagcagcccagcaatgggtgggtagtgcggtgggcggtgccgggcactgaggtgcgcagcttcatgcagacccagctggatggtgggctcgtgctgttctcacacagaggaggctgcgtgagcatctggacccagcacatgatcaca

SEQ ID NO: 83349 - DNA, 767 bp, Homo sapiens
  misc_feature (1)...(767): n = a,t,c or g
tttgacgacttctagtccgtgtggtggaattccctaactggccggccagcagttctgggcagccccttcctctctcctgccttggcgcctccatctagacttatgggcgatctctgggatggccagtcagcggggtggtctcctgggtccccagcctcgccattctgtggggggtggtgactgggcgaactctcagatgcctcagcaccctcccaccccttcctcaggcagaacgagatcttgtggcgggaggtggtgacacttcggcagagccacggtcagcagcaccgggtcattggcaagctgatccagtgtctctttgggccacttcaggcggggccgagcaatgcaggaggcaagagaaagctgtccctgatgctggatgaggggagctcatgcccaacacctgccaagttcaacacctgccctctacctggtgcccttctgcaggacccctacttcatccagtcggaagagaagatggaagccagccttccccccaaccagacccaggccctccagcatggactgagcctcctccctcaaaccttctcccttagacctggcccagcctctcccagagacaaatttgggccttaccctcacagcggcagggccanntcatctctgacatcccagagactctccatccctgaggaccaggctttctcctccagtgatgcgagagccccccgcactgctgtggtgtgtgcaggcatctgggagggagaggagctcagcctgagggccagggatgccacagctga

SEQ ID NO: 83350 - DNA, 383 bp, Homo sapiens
gataaatttagctattcttggcggagcaaaaagggaacgcaagttccaccagtccattggcaaacactactcttctggctatggacagggagacgacctgcaattctatatcactgctggaagatgctcacaacagagcagatacattgccagacacatacaaagataaggctttgataaaattcaagagttatttgtattttgaggacaaccattttgggaatcactcatggaacatgcgatcctgaatgccccctactgagatgccacctttaaattactagcccttgccttttttcttgcaacaacagcccaggctgctccaaggatcattactgggcctgggccgggtctcccaccaacttgccttggcgactcctacg

SEQ ID NO: 83351 - DNA, 418 bp, Homo sapiens
  misc_feature (1)...(418): n = a,t,c or g
cccacgcgtccgggcaaaatgaggctttaccagaactatcctgaagacaaacacaatcaaaacaatggcaacaaagaggtcgaagtggactagtcaagagcaaaggtcatggacacagttttttgggttgctcaaggcattttgcttcttgactttatggagggccaaagcacaataatatctgtttattattagagtatttagggttagccaaatatttagcagaaaaatgcccaggaaatcatcaccagaaaatccttcttcaccacaacaattctcccactcattcttaccaaacaaggggaattttttgagagtttcagtgggaaatcattaggcatccaccttacagtcctgacttggttctttctgacttcttttatttcagaatcttaaaaaatctgtaagggcaccaatn

SEQ ID NO: 83352 - DNA, 753 bp, Homo sapiens
ttctcaaatggtgaatggtgacctctgtccccctcaacttcccatgcggtatcggtcaaaggaaggtgacaggctggtcattcttcagccaagagatttcaggggtggggtctcctgagacgatgcaagtcaagcacagggtcttatcttccatgatagtggccacatccggcagacctctcaccactttggcacgattcttctcgatgatggccaaggttttcagtctctggtgttcagccattgcatcctcaaaaagcttgccctgagagatctgttgagagctgccggacttccttcccctgcagctatttccagagtgtatttgcccttgtctgaagtctttggggtcccaggatgtggaagcccaagatctcatccaggggtggtgcccgtccttatccgatcaccactctccagacgtttgtctttgtggaaccaggtggttttcatgtactccacgttgtagtacttgaccttgctgaagatccggatcccttcctcggtcccctggattttcagtggagttgcagagagggcaccaatcctgcccaactcggtgaagatggcatccagggcgtcacccgtgaggtccaatatggtgtcgtcctcccctcgatcgtcagaaaccatcgctctgtaaattcccttgtcctttttggacaactcttcaatgcagagaagtcccgtaaaaatatggaacgcttcacgaatttgagtgtcatccttgcgcaggggccatgctaatcttct

SEQ ID NO: 83353 - DNA, 411 bp, Homo sapiens
cccacgcgtccgctggtttcttcacttcatcctgttgagaccaggaatacgtcctgctggtctcctacctcactataaccttgctacactccattgggttgacgagtcttttgtggatttcttgggatttctatgtagatgatcatatcacttgtaaatagggacagttatatttcttcattttaagtttttatttcttatattttaaaattgttattgtagtagttagaatttctagcacaagattgaatgggagaagttagagtgaacgtccttgccttgttcccaatcttaagagaaaagccaatattcttttatcattaagtatgatattagtcacaggtttttcttagatgttcttcaccaggttgaggatgttccttaccattcctactttgctgagaatttcta

SEQ ID NO: 83354 - DNA, 446 bp, Homo sapiens
  misc_feature (1)...(446): n = a,t,c or g
nattgaacccctgagaccntgcccggaaccccggncgaccacgcgtccgggagcagctgagaccaagccccggctgccagggagatggggtcttcatccgacggggcagacaccctgagatggacccttgtccaggggagggccctgccacccacaattccttggcattcctgcaccaacaagacgggctgagggaggcgcctcaccagtgccagcgcccagcattactgtgccccggaggagggggaggcccttccgagcctgggcctgggtgtggatgagggcaggtctctcacctttctgacctcagcttcctcaactgggaaggggggccacagcacccccttatgggtgatgaggaagagggagctcaaggaggaccccgggcagggctgcctcctcacctctcttcggcctttggacactggagctcagaggaccaagtg

SEQ ID NO: 83355 - DNA, 401 bp, Homo sapiens
  misc_feature (1)...(401): n = a,t,c or g
cccacgcgtccggccacgcgtncgtattcagataccaaaatataaaagcaaatattggcagaactgaagtgagaaataggtagaaatacaaaaagaggttgaaattttgttatcctactttaattatggatagaaccaccagaaaataaagagagcatttgaataacactatagaccaactgaacctaatagacatatccagaacttccaccaaacaaacagcagcagaattcattgttttttcctcaaactgatattaaaatttctccaggaaagatcacatgttaggtcacaaaaccagtcttacaaatttaagaggattgaaatcatattaaatatctttttcaagcacaatggaatgaaattagaaattaataccaggagaaaactggaaaattaan

SEQ ID NO: 83356 - DNA, 469 bp, Homo sapiens
  misc_feature (1)...(469): n = a,t,c or g
gagganaaantttgatcccttcggaaccggccttggattcccttgtcgacccacgcgtccggtctagaaagcagccatttgtaatctatcctgtatatgacacagccattgacaccaaaattcacttctctcttttagatgggaatgtgggggaacctgacatgtctgcggggttttgcccaaatcacaaggcagccatggttttattccttgacagggtctatgggattgaggttcaagacttcctcctccatcttcttgagggtggctttctgccagatctccgggcggctgcttctttagatacggtgagattggagcgatggacttcctcctctcttgactcttcactctgtgccttatgatgttcttttttatatatccattcattaatttattgacaatgaatgtttattgagtacctgttatattttcaggtaagccatgggtaaacagaaaataaactatg

SEQ ID NO: 83357 - DNA, 1283 bp, Homo sapiens
ttttttttttttgcaattataaagagagctagtataatcattcacatacaggtttttggtgtgaacacaggctttgcatatctcctgggttgaacaccacaggagagggactcctggggcataaggtgagtgcacatacaaagtctataagaaaagcacccacctgtttccacagtggcatgttccctccagcaatgcatgactttcagctgttcctcatcctcgatgacagttggtattactatcagatttttttttttattgtagtcatttttcaatgggtgtaagtgatatctcactgtggctttaatgtgcatttccctgatggctatgctgaacatcttttcatgtgtgtatttgatatctgtatatccactttggtaaagtgtctgttcaagtattttgcccattttcaattggcttgttttcttcctgttgagttttgagatttctctgtatattcagaacacacactggatatgttctttgcaatattttctcctaatcttagcttgtcttttttattctcttagcatcatccttttgcagagcagtcatttttagttttgatgaaattcaatttatcaacattttctgctatggatcacgcttttagagtaaaaagtctttgcccaagtccaggtgatgaagattttctatgattttttcaaggaggtttatagttttacatttcacacacttagatctatgatcaattttaagttcagctgtgtatgagatgtgaggttgaggtgttgttttttagatatggatgacaactattccagtaacatttgctgaaaagactgtcttttctccattaaattgatttttgtacctttgttaaaaaaaacccattgaccatatttgtagaaatctctcgtctccattccattgacttacgtgtctgtcccttcaccacattgtcctgattactgtagcttcaaaatcaagtagtatagttcctccaactttacccttcttttaaaaaattctatcagctactctagttctcttagtccatttttgtgttgccagaaaggaatatctgaggctgggtaatttataaagaaatgaggtttatttggctcatggttctgctggttgggaaagttcaggattgggcatccagtgagggcttcaggctatttcccctcacggtggaaagcaaaggggagctggcacgtgcagagaccacagggtgagagcagaggcaagtgggcgtgccaggctctttttcacaaccagctcttgttgggacctgaaagagccctgtgccgaat

SEQ ID NO: 83358 - DNA, 418 bp, Homo sapiens
ttttaatgtcatatgtaagagaggtttgtcttatcttcagtcatgaagattttcttatttttattttctaagagcaatgtaatgatagcattgtgggtgatacttagtaatgaaaacgatactggaaaaagaggaaggtctttgctccattttgaattaattttcgcacatgatagaaagactctcccttcattcttttgcatatgatattcagttgtcccaccaccatttgttgaaaagactagtctttctcacattgaattatcttgtcacctttgttgaaaatcagttgaacacaagtgtgagagtttatttctggactctcaattctttttcgttgacctatgtttattcttacatcagtactatgctatcatgatattatagctttatgggaaagtttaaaatcaggaagtat

SEQ ID NO: 83359 - DNA, 408 bp, Homo sapiens
ttaagacaaagcagacttctgaacgaggaaaactgcttgggataagaggaggcattacagaatgataaaagaatcacttctccaagatgatacaacaagcaataatttagatgcacttgtaacagagcatcaaatatatgagtaaaacaacataagactgaaaggtaaattagataaatctacctttataggtgaagacttcaacatccctctgaaaataattaatagatcaataatagcaaaaaatagtaagcatataaatcacatgaacagcattagcaatcgacttgttctaacttacatttgtagaatactggattcaacaacaaaaaacacacattcctttcaagcttacctggaacacaagatatcaacaatgtggctttgtaaaacaaacttaattaaaag

SEQ ID NO: 83360 - DNA, 792 bp, Homo sapiens
aggaaggctgattttatttagccgtttcttttttcttggtttgcacagtatctgggtccagcctgcagccctagggtccagttcagagtctgtcatctgaaccatgaggatctggtggtttctgcttgccattgaaatctgcacagggaacataaactcacaggacacctgcaggcaagggcaccctggcatccctgggaaccccggtcacaatggtctgcctggaagagatggacgagacggagcgaagggtgacaaaggcgatgcaggagaaccaggacgtcctggcagcccggggaaggatgggacgagtggagagaagggagaacgaggagcagatggaaaagttgaagcaaaaggcatcaaaggtgatcaaggctcaatgaggatccccaggaaaacatggccccaaggggcttgcagggcccatgggagagaaaggcctccgaggagagactgggcctcaggggcagaaggggaataagggtgacgtgggtcccactggtcctgaggggccaaggggcaacattgggcctttgggcccaactggtttaccgggccccatgggccctattggaaagcctggtcccaagggagaagctggacccacggggccccagggtgagccaggagtccggggaataagaggctggaaaggagatcgaggagagaaagggaaaatcggtgagactctagtcttgccaaaaagtgctttcactgtggggctcacggtgctgagcaagtttccttcttcagatgtgcccattaaatttgataagatccacatcactg

SEQ ID NO: 83361 - DNA, 406 bp, Homo sapiens
cccacgcgttcgcagaaaaggacccacacaaatattgtcaattcatctttaacaaaggagcaaagacaattcaaggaagaaaggacagtcttttcaacaaatagtgcttaaacaactggacatttatgtgttaaaaaagttaatctagacgaccttatacctttcataaaagtgaactcaaaatggatcacaaagctaaatataaaacaaaaaactataaaacttctagaagataacatagaagaaaatctaagtacccttgggtttgctgatgactttttagatacaacatcaaaaatatgatccatgaaaaaaattaataagttggatttcattaaaattaaaaatttctattttgaggaaagcttctgttaagagaatgaaaagataagccacaaactgggag

SEQ ID NO: 83362 - DNA, 399 bp, Homo sapiens
aagaagaaacttaccaatttcattataaaaaagaaccaaacagaaattctgaaactgaataattcattgaataaaatataaaatacattcaaaatcttcaacaacagactagatcaagtagaagaatctcagaacataaagccaattcttttgaaataacccagtcagacaaaaatagaaaaacaaaaaaagaagaagaaacaaagaccctatatgggacatcataaaacaaccaaatatttgaaattttgagggcccagagatgaagagaaaaaataaaggaaagaaaatctatttaatgaaataacagctggcaactttccaattctagcaagagatgtagacatccagatacaggaagctcagagatacccaaatacataacaacacaaaaaggtc

SEQ ID NO: 83363 - DNA, 397 bp, Homo sapiens
caaaattaagagataatttcttaaaagagtaaataaaataaatctttgccaagattaagaattaaagagaaatgagtgaaataaaatcacgagtgaaaatggagacagtacatgtgatatcacagagatacaaagatcctgggaatatgatgaacaactataaactgacaaatttgagaacatagaagaaaaaaaagaaaaaaagaaaactatggaccaatatccccaattaacatagatgcaaaaatactcaacaagatactagcaaactgaattcaacagcacattaaaaaggtcattcgctgtgattcctggggactcaaagatggttcagcatatgtaaataaataaatatgatatgttactttaacaaaaaggaagataaaaaccatatcat

SEQ ID NO: 83364 - DNA, 401 bp, Homo sapiens
  misc_feature (1)...(401): n = a,t,c or g
tatacctgtaaatgcttatattaaaaaagaaaaattttaagttaataacttaatcatattttaagaaactataaaaagaaaagcaagataaattccaagccagtataagaaataaagattagagtggagatcaataaaatagagaaaaaaagaaaattttaaaacataagttgattttttaaagcaatcagcaaaatggacaaatctttagacaaagaaaaaaagaaaaattactgaaatcagaaaagaaattggagacattacttcagacactaagaaaatgaaaaagattttgagtatattatgaataattgtacaccaacaaattagataacattgaaaacattttaacatagaaaacaattttaaacaaatttaaaaaatttctggaaacacacaan

SEQ ID NO: 83365 - DNA, 372 bp, Homo sapiens
ctagctgggtatagaactgtaaaattaaaaataatatcttttttatcagctcagcactatggtatattactccattgccttctggcatctattgtccccaaattacaagtctatcatcaacctaattttcacatttatgtagaaaagatgtcttttctctcagctagccttttaaaaatcaatggtcttcaattacactacaacgtacatagatacaaatttatttttatttgctctgctcaacactcaagttatactttcaatctgaggtctacaattctggaagattcttggtagttattatgtgaacattgcttctccctatcatattattttgaaactcttattatataaatgttgcggacgcgtggg

SEQ ID NO: 83366 - DNA, 419 bp, Homo sapiens
cccacgcgtccgggagacaggccttggctcttggatggtatttctggacctaacctgggccagaggggaatttaccactctgaagggtgagtcccagacctggcagcattcaccacaagctgactgagagaagacaaaaggaaaaaacaataaaagtcagaggagacaaaagaaaaaacaataaaaacaatgatgtacacctacaggatctagaaaatgctctcaaaagggcaaatctaagagttattgtccttaaggaggaagtagagaaagagatagggaaagtttattcaaagggataataatagagcacttcccaaacctagagaaagatatcaatagccaagtacaagaagtttatagaacaccaagcaaatttacctaaggaagactacctcaagggatttaataagcaaact

SEQ ID NO: 83367 - DNA, 393 bp, Homo sapiens
  misc_feature (1)...(393): n = a,t,c or g
aaagaaactaaggacgctctgtcatctagtttacaaaagcacaagccgatgacaccggttctcggctggaacgaaatttttattgaaaagcttaaagaaagaagttcaaagctgcgggaggacttggataaatattctccggccttaagaaaaaacgaaatcttaagacagaccataaaggaaaaagaccgaaggcttggatccactgaaagaggaaaatactcatctgcaaaaacaattggaacgactcagggaagaccacattcgaaccgcgcctgtggctgaccctaaaacccttgatagtgttactgaactatcatctgaggtatctcagctgaacacgatcaacgaacatgttgcataggaaattatacatcatcgaaagatagatgn

SEQ ID NO: 83368 - DNA, 414 bp, Homo sapiens
atttcttatagtagtgtgagaacaggctaatacaatctgttatataggaaatccccaagaatccacaagaaagctaccagagctatatacaaatccatcaaagttgtaggttataagatcaatgcataaaaatcagttgtgtttctccacaccagcaatgaacaatccataaaagaaatttagaaaggaattctatttataatagtatctaaaacaataaaatgcctagaaataaatctaaggagatgaaagacttatagactgaaaattacatggcattgctgaaggaaattaaagaagacctcaataaatggaaaagcatcccatattcatggattggaagacttaatattgttaagatgtcaagactacccaaagcaacctacaaatttagcacaatccctatcaaaattt

SEQ ID NO: 83369 - DNA, 431 bp, Homo sapiens
  misc_feature (1)...(431): n = a,t,c or g
agcttccaccttaaaatattagggaaaaaaagagcaaatttagtcctaataagcgggagaaaggaaataaaaaccagagcagtaatcaacaaaattgcaaacaggaaatagaagaaaatcagtgacaccaaaagctgattctttgacaagatcaataatattgataagcctctagccaggatacctaagaaaaaaagagaaaagacacaaaacgcttctatcagaaataaaagaggagacatcaccttagatatgattgatactaaaatgataatcaagtcatattatggaaaattctatgcccacagatttggtaacttatataaaatgaacaaatttcttaaaagatatacctgccaaagtccacacagtggaaattagacaacatanattgtcttatatctattaaagagatggaatccatcatcagg

SEQ ID NO: 83370 - DNA, 424 bp, Homo sapiens
aagaaatttacagcaatagagtaatagcagaagacttgtatactccagtttcagtaataaatggaacatccagatagaaaattaatgcagaaaggatggacttgaacaacactaaggaccaaatggccttaacagacatctgtaaaacatttcatccaacagcaactgagtatactttcttctcaagtgcacatgaaacattctccagaatagatcacgttaggtcaaaaaataagtgaacaaatttaagaaaatcaacatcatactaagtacctttttcaaacacaatggaatgaaattaaaattcaataaccatgagaaaacaaatacaaatatgtggaaactgattaacacattcttgaacaaacaccagtcaaagagaaaatcaaaagtgaatttttgaaatatctcaagatgagtaaag

SEQ ID NO: 83371 - DNA, 399 bp, Homo sapiens
tcctagtcaacaattaaataaggataaagaaaggctaccaaatcagaaaataaataatgttatctctgtttgcaaatgacatgatcatgtacatagaaaagtctaaagactcaataaaaaaccgttagaactaataaatgaattcagtcaagttgcaggttataaaatcaacatactaaaaatcaatcatatttctatatacaaggaataaagtatctgaaaagggaattaaaaaatcaatccatttacaatagcaataaaaataataaagtactcacaaacaaccaaacaggtcaaagatttatacatgaaaaattataagacattaataaaggaagttgaaaaagatacatgtaaatggaaagacatcccttcatagataggaagaattaatattat

SEQ ID NO: 83372 - DNA, 409 bp, Homo sapiens
ttttgattctctgaacagtgccattcacaaagcagaagttttaatttttataaagtctaatgtatcaactttttctttcataaatcatccttttgatgtatccaaaaactcattacgacaccaaaggaaatctagaatttctcctatgctatcttatagaagtattatagttttgtgttttatacctatgtctatgatccattttgagtcaatttttgtgaaacatataagagcttgcatattggacagaaccatttgttgaaaacactatcctttctacatttaattgactttacttctgtgtcaaagataattactatatttgtgtgtgtctatttctaggcactctgttctgttccactgatttatctgtctattcttttgccaataccatgctgtaatgatgacg

SEQ ID NO: 83373 - DNA, 360 bp, Homo sapiens
tttcaacaaatttacattcatatgcagggtagtgaacctagacacaaatcttatacttttgacaaaaattaaaatggaccataaaccgaaatctgaaatttaaaactagaaatcttctggaagaaaacacaggaggaactctaggtgaccttgggtttggctgtgagtttttagatacagcaccaaaaacataatctgtgaaagaaaaaaactgataagttggactttattaaagttgaaaatttctgctctatagaagacattgttaagagaattgaaagacaagccacagactgggagaaaatatttgcaaaatatgtacctaataaaggaattgtatccaaatataccaataactct

SEQ ID NO: 83374 - DNA, 324 bp, Homo sapiens
aaatcataaaccaaaagcaaaactgcatccctgaaggtaactgcagagatttatgcaaaaattaaagatgtgatacaggtctggtgattactattatattcccatttatttcactgtctggcctgtacagaaggtaaataggtcttggaaaatgactgtgaataatcatatacttaatcaagtggtaactccaacctcaattgttgttctactctgttttctttattgaagcaaatcaacagagtcccagcacctggcatgtagctattgctctggcaagtgctttttattctctattaccaatttgcgaggaccactagaaga

SEQ ID NO: 83375 - DNA, 262 bp, Homo sapiens
ctgacatttatcccagagaaataaaaatttgtgtctacacgaaaacctctgtacaattgctcattgcagctttatttataacaaccaaacctgaaaacaaccaaaatgtcctacaaatagtgaatggttaaacaaaccgcagtatattcattccatggaatactactcagcaaagaagaagaataaactatggtcctggtacacagaacaacttgaatggatctcaagtgcattatgcttggttataaagtcgacgcggccg

SEQ ID NO: 83376 - DNA, 348 bp, Homo sapiens
cctcaatcttatataaagtatttacaaaaaagcctacagctaacctgacacctagtgatgaaagaaagcttttccccaaagatcaagagggaaataaggatgccctctttcaccacttctatccaacattttcctggacattctagccagtgcagtcaaacaataaattataattaaaaagcatccacattggaaaagaagaagcaaactatctttattcacaggtgacatgatgacatatgtagaatatctaatggaatttaaaagcattttttggaactagtaagtgaagttagcagtgttgtaagatagaaaatcaatatagagaggtcagttgcatttttacaa

SEQ ID NO: 83377 - DNA, 357 bp, Homo sapiens
ggttttgcctcatctcagacaaatgaggcctgcagtgtgtgggccacaacatgaggtactgtggagagtgatggtagtacataaagcactggacgccttgcggaaaaaggaactgtagtttgtgagagtagagactgaagaaaaattgatcatcacacattacttcaaagcattgtaaacagaactgacttatatacacgtgtcctgtccaactctggatggggacagactcctattaagcataatactgcctgggatactgaaacatcacctagagtggagcgaaagactgactattggacagaggccttgggaaagctttcaacacaaacttttaaattcaggggcatgtttaag

SEQ ID NO: 83378 - DNA, 342 bp, Homo sapiens
gtcaataaacaaataaatttaaccagggaggtgaaagattggtacaatgaaaactattagacattgctgaaagaaattaaagacttaaatacatgtaaagacatccaatgttcatggattggaagacttaatattgttaagatggcaataccacccaaaacaatgtacaaattcaatgcaactcctatcacaattttttgcagaaatagaaaagccagtcctcaaaatcatatggaattgcaaggggcctcaactgtccaaaacaatcttgaaaaagaacaaagttaatacatcatcactttctgatttcaaaactgactgcaaagctacagtaatcaaaac

SEQ ID NO: 83379 - DNA, 354 bp, Homo sapiens
aaattattaatatcagaaatgagagaggtaatatcactacagattatggagatattgagcgatgataaagaaattattcaacaacacagataaaatggacaactccaatgaaaaacacacaaaacatttactcaagaaaaaaatagataacctgaataccccctatatttcataaattaaatttataatttaaaaatttctcacaaaaaaaactacaaacccagatggcttcactggtaactttgcaccaaacattttagaaagaataatgccaattttctgaagggaggaaattcttcccaactcactctatgaaaccagtgctacctcagtaacaaaaccagacaaacatgt

SEQ ID NO: 83380 - DNA, 567 bp, Homo sapiens
cgacccacgcgtccgcccacgcgtccgattaccattgggcaagccattgtgtatgtcatgacggggatgtatggggaccctgcagaaatgggtgccggaatctgtctcctgatcatcattcaggatcaacacagcccttagacttatcctttgatggcagtgtacatttccatcttgctattataccagaattcatctgactttttacttccttggaggtactgagtttgagggtgcagtcatagctctgttccatttgttggccaccaggacggacaaagtccgagctttacgggaggctttttatcggcagaacttacccaatctcatgaacctcattgctacagtttttgtgtttgctgctgttatatatttccaaggatttcgcgttgatctgcccattaagtcggcccgttaccgaggacagtacagcagctaccccatcaaactcttctacacctccaacatccccatcatcctccagtcggccctggtgtccaacctgtatgttatttcccagatgctgtctgttcgatttagtggcaactttttagtaaatttactagg

SEQ ID NO: 83381 - DNA, 346 bp, Homo sapiens
ctaaagcccaaaaagggtgacaaaattagtaaagttaaagccctgctgggccctaaaaatacagaaagatgaacacaaagagaaaatcttaaaagcagcaaaagagaaaatgcttatcacacacaatggaccctcaatgagactaacagctgacttagcatcagaaaccatagaagtcagaaggtagtggaacgatatattcaaacggctaaaagaaaaacactaaaccaagaattctttatccaaataaactaccctacaaaactgaggcagaataaagacattcccaggtaaagactgaggaatctgtaaaaatagtaaagatgtcctgcaggctaaaaggaaa

SEQ ID NO: 83382 - DNA, 489 bp, Homo sapiens
tggtgctagtgtaaatggtattgtatttttaattcaaattccaattgttcattgctggtatataggcaagcacttgacttttgtgtatttatcttgcactctgaaaccttactataattgcttagttccaggaatgttgttttttgtcattgttgattctttgggattttatacatagacaatcatgttatttggtgaacagaaacttccttcccaatctgtatacctttcatctccttttcttatatttttgctttacgtaggacttccagtacgatgttaaatatgagtggtaagtgaagacatctttgccttggtcccagtcttagggggaaaacatctagtttctcaccataatgttagctgtacgttttctgtataagtatttatcaagctgaagaagttcctctctatttctagtgtgatgagaatttttatcataaatgggtattggactttatcaaatgtttcttctgtatctagttttat

SEQ ID NO: 83383 - DNA, 356 bp, Homo sapiens
agcaaagtcactttggaggccagaaattcctcagagaaattaccaactgagttatcaaaggaagaaccctctaccaaaaatacaactgctgacaaactggctataaaacttgtctttagccttacccccagcctgtccaccaccttttgagccagaacgccttcttccaacagcacctgctgtctgtgatgacagcccttggcctggacgacctcttcctgaaatgggccttctgtcttttgaatatctgattttctccggtctttcccagacatgctgcatttgtttgtgaccctttcttttaattttttactaacgatttttttcaaagtcttgtttttctgtctgtaaagtcg

SEQ ID NO: 83384 - DNA, 338 bp, Homo sapiens
  misc_feature (1)...(338): n = a,t,c or g
tcttgatattggtaatttgtgtcttttctcttttttccctaatgagtctggcaggaggtttatcaatttactgattttctcgaagaatcagcttttggtttcatttgtttttttatttcctagtttctcaaggtggaagctatggtgattgctttgagaacttcttttctaatagagttaggtagtgctccaaatttccttctcagtgctgctttatctgaacctcacaaatttagtagttgttttcattttcattcagttcacaatactttctgatttcccttttgactcttctttgatccttggcttatttagaagggagtcatttacatttccan

SEQ ID NO: 83385 - DNA, 350 bp, Homo sapiens
taccaagtatgcaataaactgcctcagatcccaaagaagaaaccaggtatcatgttttcttgcttgatgaaagatgtgaggatgtgataatttatcctttactttgaaggggatgttctaggatgccccagaccaatgaatccctaacatttaactgattgaatcaggtccttgaaccctcagaatgcttatctcctaccctcttacctagtcttccaatgtacttaccttgccactttttgatgatctgatccaaccaatatgatgccatcaatataatggaccaatgggatgttgtgtacatagctgatctgtctagatccctccagaaaatatcatgatagagggta

SEQ ID NO: 83386 - DNA, 496 bp, Homo sapiens
  misc_feature (1)...(496): n = a,t,c or g
ctatctttgctcctctatataatatgttctttttttactctggcttttagtaacttgactaggatgtgcctcaatgtgattttcttcgtatctaccctacctaggttcatcaggtctatagccttcatcatatgtggaaactctagctggccattatttcttcatactttttccgcaacccctcccctcttttcctagactccaattacatgtatcacctcagaaatcaccctagtcctgcctactgagcagtaaatacctgtcaaaaatcagctgaccagaaatctaaagttttatttctggattctcaattctattccactgatctgtacatctgttctcaggctagcaccacactgtcttattaccacagctttcttttaagcactgaaatcaggaaatttgaggcttccaactttttctttttcaagactgttttcattatacagggtcctctgtatttccatatgaattntaggagccacggacgcgtggg

SEQ ID NO: 83387 - DNA, 332 bp, Homo sapiens
atttctttattatttccttccttctgcttgttttgggtttaatttgcaaagtagaaggttgaattataaatttgagatctttcttcttttttaatacaggtatttaccaccatacatttctctctaagtattacttaagttatatcccatattctagtaccctgtgtttttgttttcattaacctctaagcattttttaatttcccttgtgatttcttctttggtccattggttatttagatatatgttggttaatttacatgtatttgtaaatttttaaactttccttcagttattggtttctaatttcatttgaatgtggttaaagaaaa

SEQ ID NO: 83388 - DNA, 344 bp, Homo sapiens
  misc_feature (1)...(344): n = a,t,c or g
aaaggcgaggtggatggtgggaaagagggaggaggaccctatgaaggaggactgtgggaaggggagaaggatcatgggaaagagagaggaggaccctgggaaggaaggagtactttgggaaggtgaggaggactgtgggaaagagggaggaggaccctgggaaggaaggaggactgtgggaaggggcggaagactgtgggaaagacagaggaggaccctgggaaggaaggaggactgtgggaaggggagaaagaacttgggaaagaggtagggggaccctgggaaggaaggaagaatgtgggaaggcaaggaggactgtgggaaggggagaaagaccatgggan

SEQ ID NO: 83389 - DNA, 350 bp, Homo sapiens
caacactcccggtgtgatggtggataagagaacttgttaactccctcctcttcagcaactccttcttcatcgtcctcctcctccacggctggacaacactaccggtgtgatggtgtatgagacatgtctaggctaggattataataaagcctcctatgatgatagaacagaaataactataggtgtcatgaagaccacggggggctcccgagctagaggctcctaccctaaaggctgggagtattggtcacgagaggcgtccgaagacattgggaaaatgctatacgagaagctgtgaaaggagatactgccctagtccccgatactaagcaaaccccaaaggctgggag

SEQ ID NO: 83390 - DNA, 350 bp, Homo sapiens
gtttatagctacacatcagaaaaaaggaaaaatttcaaataaataatctaatgatacatcttaaagaattagaaaaacaagaagaaaccaaacctaaaattagtagaagaaaggaaataatgatctgaggagaaatgaatgaaactgaaatgaagaaaacaataccaatgatcaatgaaaaattaaacaaaattgacaaacctttagcctgactaagaaaaaaaggagaagatgctaagtaataaaatcagaaataaaaagacacattacaagtgatactgtagaaattcaaaggatcatgagtggctactatgagcaacaatatgccaataattggaaaatcaagaaag

SEQ ID NO: 83391 - DNA, 353 bp, Homo sapiens
gttgtaatataccacattaacagaatgaagagaaaaatacatgttcatctcaattgacgcagaaaaaatcctgacaaaattgatcaccctttcatcataaaaacaaaaatggaaacaaattataaatgaaaggaaactacctcaacatgatatgagctatacctgaaaaactcacagtaaacattatagtcaatggtgaaagactgagcacttttcctctagtaccaggaacaaggcaaggatgccagcttttaccacttctgtgcattatagtactggaaggtctagtcagagcaattaagcaagtaaaatatttaaaaggcagattatataatcttatatatagaaaacct

SEQ ID NO: 83392 - DNA, 310 bp, Homo sapiens
tactggagcaattatgtgtacataatattaaaaacttaacactgattcataccttacaccatatatgaaactcaactcaaaaatgaaccatagacaaaatgtaaaacctgaaactgtaaaacttccagagaaaacatagaaaatctttgtgacactgggtttagataaggacttcttagatataacaccaaaagcacaatctataaaaaatgaaatttataaactggacttttgctttttgaaagataatgttgagaactaaaggacaaactagagtctggaaaaaaaattgtcaaatcatagatctgag

SEQ ID NO: 83393 - DNA, 395 bp, Homo sapiens
caaacctttactgaattcattttacagtgctaacaattttttggtggggtctttataggattttctatatatagaattatgtcattagcaaacaaaattttacttcttttagattttgttgccttttaattttaattaacttatttatttacttattgcctaattgcactggctatgacttccagtagtaagttgaacaaaagtgtcaagagtaggcatccttgtcttattcctcaggatttcatcattgcatatgatgttacctgtgtgcttgtcatatatggcctttattatattgagtatatttttatttacctatatgttgagaatttttattatgaaatgatgttgaattttgttaatgttctttctgtacatattaatatgatcatgat

SEQ ID NO: 83394 - DNA, 393 bp, Homo sapiens
  misc_feature (1)...(393): n = a,t,c or g
gagaggncccccctganacatgagattcgtacccgatacccactggccgagggctgcagaacaacacttacctccaggaatgacaggccacgggagcccacgatagctcaacatccacgaatcaactgctcttcctgcgcttcgccatggagcagtcgncagcgcaaacactggcgggggcggcgggagagcaacatccacctgatcccgacatcattcacactgtgcttacgcctgaacacaacccgagcaacttccnagaagagaagaacctccaggctttctggaacagcccaagagaagtgggtggagaggcctttgaagggacagccctactatttacagtcttggccttacatcctgcccctgacagtggaagcccacgtgtggaat

SEQ ID NO: 83395 - DNA, 473 bp, Homo sapiens
ggctcgggatcacctctttcagcccgcattgtaccagaggggaggaggctgaggttggaggggccctcgacgtgcctgaagtcaccagccaatcaccaagcccaagaggggctgccatccacgacccccggccgcgaacccaagcctgccgccttcgccgcgcccaccccccagccccctccctgccccggcgccatcccaggtcgacgtctctaaccaaaacaagcccctcccccggagccccctccccctgcccgaggcccagggtcagcagccccaggagggacctcctccccaccccactcccccacgggagaggtgcgagatttcattgtcagcctggccactcgaccgcgcgtgagactggggcgcagggcaagagggccactgggcaggctctcgtgcggggagtggggaggggtctccaggggaagtgtttgaagccactcctgcagctctgtccagatccggag

SEQ ID NO: 83396 - DNA, 908 bp, Homo sapiens
  misc_feature (1)...(908): n = a,t,c or g
ggggatggggcctctatacttgcaagggagaggaacagggaccaggctgccccacggtccctgaagggtccaaggaggggccctccccatggccctggagagtgggcctgggtggtacctgctccaggcagggaaactgggggctcgcccttctcctgtgaggggagccaggcacacagggcccattggtgtttgggatgtggacagaggggcagggggctgggagaaggctaagccgaggggtcctgtttgtgcctccccttagtcccttccctcccgatttcccgattcccccaccctccctctacacttgaggaccacagttgggggtgtagggaccacccagaccctggttgaattgtttctctctcctgcttgttccaacccttttcactctgggcttctcccaaaacccatcctggcatgacctgcaactccaggtggtggatttgttccaaagcctcaatccctaccccctccaaggggcaggtttccagtccagcctcagagatcaggctctgggacccctgcctggggggtggccttcatgcaccagccacttccgcaggtgctgactcccgcactccctggcattttttgcggacaagggcttgggatggaccctcagccccatggtacgccctgcccagtttccagatgccctgtccacttaccctaggtagccccccaccccatcagtgccgagtccttgtccctacctccagcttcctccagcctcaaaccgcctctggatctagctgtccttctccgagtggcacgcctgccccagggatgccccctttccctcccccccatgcccagagccccgnttgcctnaagcgggtcaaggctttaagaacaattgncaacccacccagttttataaattcccgttncttttcagggaa

SEQ ID NO: 83397 - DNA, 478 bp, Homo sapiens
ctcccgattgaaaacactatgacctgatttacgccaccttggcacgagggacatttttacctcttcctttgcagtcagatgcattttctttctttttcttacccgattgcttagctgagaactccaatataatggtgactggcaatggtgaaagcacacatctatgccttgctcccagttttagagggaaagcatttggtctttcaccattgtggatgatgttagctatagctttcatatgtgttaattatgaaattgaggcagttcccttctatttctagatagttgattattgagcgtttttatcatgaattgatgttggattttgtcaaacgctttgttctgcatgtattgaatttttctcatttattttgttaacatgcgatattacattaattgattttttttggatgttaaaccaactttgcatttctgatataaatccccattagttctcggatgtgacccattttatata

SEQ ID NO: 83398 - DNA, 498 bp, Homo sapiens
cggggtttgagaccgattgatgatcattacgccaagcttggcacgaggacaatatcacttataaacttataaatattgaagtaaaagtgctaaacaaattattcgtaaactaaccaataccgcaataagaaatcaatgcaccatgaccaaatggtgtctttttcccaggaatgcaaggttggttcaacatgaggaaatctattagtgtactatattaaggtatctaaggaaaaacataatgattatctccataaatactgaaaaccctttgaaaaaattcaatatgcattcctgatatatcattgaagaaaataggaataaatagatgcttttttaacctgaaaaaatatttgaatcctaaagtcaggatgcttgttgatgggaaaacactagaggcatttccacttaaagaccaggatcaaggcaaggatattcattatctctgctactatcccacaattgtactggaggtattagcaattaggtaagataaatcag

SEQ ID NO: 83399 - DNA, 496 bp, Homo sapiens
  misc_feature (1)...(496): n = a,t,c or g
tggggtttgagagcgattgaccatctattacgccagcttggcacgaggaattcattggcaacagtatccaaccaatctcaaaaattttctgagctcttgttttgtttctgacacaggtagggatatgataccttcaatccattcaaagccaattctctgccttttgcttttgcctttcctcatccctccgtacatatacattttcattctctttaaaagctcttctatgggatggactttccaattttctatctttcgtaatttctttgtaatatctggtgacaaaacggagctctaacattcctcatccaagggggttttctaattctaggccagcatatttcctcctttgctctttaagcctctctaagaattccgnaggtcctttatcctttccctgtggnatattaaaagctttggtatattttgagttcgaggaactgattcccgaatccctttaattatcctatctctaagaactctcatattccctcaa

SEQ ID NO: 83400 - DNA, 417 bp, Homo sapiens
ggcctcaacactgtctataccatagatgacagaacccgagctagcctatctgagcagagaaatgctatgagccttttgtctaagaactgatgcaaaacttggatgcgcccttttacttgaactgaagatagcactggagagactacctagaccagatggcctggataaacaagagaggggcctccgaatggagaaagaataaggcagattatccttctttgcagaagatatgatctcatgtttggaaaacctaaagactccaccaaaaaactattagaactaataaacaaatttagtaaaactgtgggatataaaatcaacatatgaaaatcattagcatttctacatcctgacagcaaacaatctgaaaaagtcaagaaactaatcatatttacaatagcttcaaataaaatgaag

SEQ ID NO: 83401 - DNA, 413 bp, Homo sapiens
gggtatttacaaatgacatgatcttgtatacagataatactaaggaatctctaaaaactattagaactaataaacaaggtctggatgtttacagatgtaagatcaataaggaaaaatcaattgtatttctgtatagtatcaattaagtgaaattaagaaaaaaatccacctataataacatcaaaaagaataaaatactttggaataaatttaataaaagaattttaaaacatattctgaaaactacaaaaatatctcaaatagacattcattttcatgaatgagaagacttgttaagataacaatactctacaaattgatctatagatttagtgcaatctctatcaaaatttaagccatctttcttccacaaatggggacatgtcgctaaaattcatatggaattgcaaagg

SEQ ID NO: 83402 - DNA, 685 bp, Homo sapiens
  misc_feature (1)...(685): n = a,t,c or g
acgccaagcttggcacgagggaagaacttggcaaggatctctttgattgtactttgtatgttctattgaaatatgatgattttaatgctgacaagcacctggctcttgaagaattttatagagcattccaagtgatccagttgagtctgccagaagatcagaaactaagcatcactgcagcaactgtgggacaaagtgctgttctgagctgtgccattcaaggaaccctgagacctcccattatctggaaaaggaacaatattattctaaataatttagatttggaagacatcaatgactttggagatgatgggtccttgtatattactaaggttaccacaactcacgttggcaattacacctgctatgcagatggctatgaacaagtctatcagactcacatcttccaagtgaatgttcctccagtcatccgggtgtatccagagagtcaggctaggagagccgggggtaactgccagtcttagggtgccatgcaggaggggcataccaaagccttcagcttgggctgggtttgaaggatgggaattggatatttacacccaaagcttttcccaaacaacttcacggttttcaaggcaatggggcagttgagggtttcacattaaggcattgttncgctatggaggttacngggggcttacanttgttttcgcaaggattgagt

SEQ ID NO: 83403 - DNA, 927 bp, Homo sapiens
ccggacttcccgggtcgagaagggactacgaaaggccggcgccgctgttaccatggagtcagatgagtggttttctcaggctttaccagcaaacacctcagcacaaaaggctgaattgatcgccctcactcaggctatccgatggggtaaggatattaacgttaacactgacagcaggtacgcctttgctacggtgcatgtacgtggagccatctgccaggagcgcaggctactcacctcagcagaaaaggctatcaaaaacaagaatcccccgtcttcaaagcctaacagatcaagcagctctctggggaacaacctgcgaccaggtaaatgccaaacaaggtcctaaacccagcccaggccaccgtctccgaagaaacttgccaggagagaagtgggaaattgactttacaaaagtaaaaccacaccaggctgggtacaaataccttctagtactagtagacaccttctctggatggactgaagcatttgctaccaaaaacgaaactgtcaatatggtagttaagtttttactcaatgaaatcatccctcgacatgggctgcctgttgccatagggtctgataatggaccggccttcgccttgtctatagtttagtcagtcagtaaggcgttaaacattcaatggaagctccattgtgcctatcgaccccagagctctgggcaagtagaacgcatgaactgcaccctaaaaaacactcttacaaaattaatcttagaaaccggtgtaaattgtgtaagtctccttcctttagccctacttagagtaaggtgcaccccttactgggctgggttcttaccttttgaaatcatgtatgggagggtgctgcctatcttgcctaagctaagagatgcccaattggcaaaaatatcacaaactaatttattacagtacctacagtctcccc

SEQ ID NO: 83404 - DNA, 427 bp, Homo sapiens
attttggaaaattcacaaatatgtggaaatcaagaaaagccaatggattaatgactaaatttaaagagaaattttaaaatatcttgagagaaatgaaaatggaaacacagtttacaaaactatggggtgcagcaaaaggagttctaataaggaaattttgtaacaataaacacctacattgaaaaagtcatctcaaacaacattatacttcaaggaagcagaaaaagaacaaactaatcccaaaattagtacaagaaaggaaataatgaagatcaaagcagaagatattagaaaaacaatagaaaagattgatgaaaccaagagttggtttttttgaaaagataagcagaattgacaaaccttagctagattaagaaatgaaaaaagacccaaatatataacatcagaaatgaaaaaggagacatta

SEQ ID NO: 83405 - DNA, 350 bp, Homo sapiens
aatctaagagttattggccttaaagaggaagttaaaaaataatcgagatgggagtaaaaactttattcaaaggggtaattacagagaacttctcaacccaagagaaatatatcaatattcaagtataaaaaggttatataacaacaagcagatttaacctaaaaaaagagcagaagacacttaataatcaaactcccaaaggtcacggataaagagaggatcctaaaaggagcaagagaaaagaaataaataatatacagcagggctccaatatgcctggcagcagacttttcagtggaaactctacaggccaggagagagtggcatgacatttaaagagctgaaagaag

SEQ ID NO: 83406 - DNA, 224 bp, Homo sapiens
cagcctcagatatcacagtaatggtagagctggggaaaataatgaaactgtccagactatcctcaagtttacagacagtgagaaatacccaaatgaagctcctttttatgaaacattcttggaaaatctagaagataatgtctcagacatttaaaaattcttagcattacaagctgaagaaatcttggcatggtgatgatctttagtgacagtcgacgcggccg

SEQ ID NO: 83407 - DNA, 373 bp, Homo sapiens
ctgcattggtgcacacagatgcctgaccagaggagagacccaattaacagctttcaagtattacatatagaaaataacattttcaaatgccctttaagatatcgtcaaaaccatcaattacctagagataaatctaacaaatcttgtgcagaaaattacacgatattacaaacaaaaatttgtaggtaccttaataaatggagggatgtgccgcgtttgtggattaaaagattcattattataaagctgtcagttttccccaaattcaacaataaatttaatacaatctcagtcaaaatcttagaaggatttttcatgaaaattgataaactgattctaaaacttatatgaaaattccaaaaggcaagaataa

SEQ ID NO: 83408 - DNA, 341 bp, Homo sapiens
cttatatatagaaggccctaagtactccaccaaaataactgttagaactaatgaatgaattgagtaaagttgcaggacacaaaagcaacataaaaaattgtaagcatttttataaactaaaaatgaactatctgaagaagtaatccagaaaactgccccatttgcaatggttgtaaaaaataaaatgtctacgaataaatttaaccaaggaggtaaaagatctctacacccaaaactatacgacaatgatgaaagaaactgaagaagactcaaacaaatagaaagatataccatgttcatggattggaagaattaatattgttaaaaaatccatattactg

SEQ ID NO: 83409 - DNA, 363 bp, Homo sapiens
atgtcagttgccagaacacactcaaagcagcccgtcacatcagtgttaaatctggtgccatgctcaaagccagcaggcttcttttggaatgagcaaaagaactaaatattgatgtcactggtgtcagcttccatgtaggaagtagctgtaccaatcctgagaccttcatgcaggcagcctccaatgtccactgtgtctttgacacgggagttgagtttggtttcagaatgtaactgcttaatactggcagttgctttcctggatctgaggacgtgaggcttaaatctgaagtattaccagtgtaatcaacccagcatcagacaagtattttccaccagactctagagtgagagtcacagctga

SEQ ID NO: 83410 - DNA, 342 bp, Homo sapiens
cccttcttctgctcttcattgtggaaggactgtcaagaattcttgtgtacgtgggtttttcctaagaggaaattctacctccctctgccaacctgagggcacctggagctctccactgtcggaaagtgttccagtagaaagtccccaacctgaggaaaaccccaatggaatcattgatgtgcaaggccctgcctatctcatcacagctctctatacctgcaagccaagctttgaataggtgggaaatactaccaccctttgtggagaaaatggtgcactggcttggaggaaaaccaccatgtgaagccattgagtgcctgatacccagggagattgtgaatg

SEQ ID NO: 83411 - DNA, 366 bp, Homo sapiens
cctggatgtaaataaaaacacaatatgtcaaaacctgtggagctaaaattaatcttaccaggatatatataatactgaacacctatattaaaaaagaataaaggtcttaaatcagttatttcagcctccaccttaagaaactaagaaggaagtaataaagatcagagtagaagtcaatgaagcagaaagaaaaaaatagagaaaaaaaattaatggaacgaacagctaggtcttgaaaggatgagtaaagtggataaatcttgagccagactgattaggggtaaaaaagaaagtgaaaacacaaattactaatatcagaaatgagagaggtaatatcactacagattctacagatatcaacaagag

SEQ ID NO: 83412 - DNA, 552 bp, Homo sapiens
ccagaagagtgaccagataaaaatgagaaaaagggacaaaaaagaaaaagtgatcgattggaatctctgataccaaacgcaaaagcccttctgtccattcaagacaactggttttctaagccactgagctcatctgttagcaataacaaaagaatagttagtacaaaaggaaagtcagccacagagtataaaaatgaggaatatcaaagatctgaaagaaacaagcgtctagatgctgatcggaaaattcgtctatcaagtagtgcctccagagaaccttataagaatcaacctgaaaaaacctgtgtccggaaaagggatcctgaaaggagggccaaatctcctacgccagatggttctgagagaattgggcttgaagtggatagacgtgcaagcagatccagccagtcttctaaggaagaagtgaactctgaagaatatggctctgaccatgagactggcagcagtggttcttctgatgagcaagggaacaacactgagaatgaggaggaaggagtggaagaagatgtggaggaagataaagaagtagaa

SEQ ID NO: 83413 - DNA, 378 bp, Homo sapiens
gttttccatcaaggtgtcaccaatcttccagtctcccaggcagaagtttttgagagacaagtggatggaaaaactttttggccctcttccttaggatcagaagagcttcaaccagcactactacttgaggacctatgcagtgtttgtccgtgagcatggaatgactcatactggcctcagagttagggactcactttaaaggaaaggggatgcagtagtgggcacatgactaagaaatccaccgatcctctcatatactgcaccaccagaagctgctggattagcagagcaaagatacatggatccacaaaccagttcaagatacaaaatatttccagtaccttagaaggcttccttttgctccttcccagtcaatat

SEQ ID NO: 83414 - DNA, 383 bp, Homo sapiens
gttgctggtatgggggccccacgactgcagacacagtcctcacgggtgctgccccgatggccacacggcatctctcgggcctcagtggcaaggctgccctggggccccctgtcagcagagcaggtacgggtgctgccctgacagggtatctgtcgctgaggggccccatcacgctggctgcacaaagtcgtatggtggtgacagcaccgggggcatgcccaggtcaagggcagtggcttctacagtccacaacacccaccagccccaggcccagcagaatgagcccagtgagtgccggggctcccagtttggctgttgctatgacaacgtggccactgcagccggtcctcttggggaaggctgtgtgggccagcccagccatg

SEQ ID NO: 83415 - DNA, 472 bp, Homo sapiens
cgacgtcgatagcgtatgctatatctatctagatgaagatgaccatccccacccaaacccagagatatatatctgttgcggattcgcagtcgcgtccacgtggaccttttatctattgagtttatcataagggggtatgatccttatgtaccaagttctttaaagagtttttatcatgaagaaatgttgaattttatcaagtatttatttggcatatattggaatgaccatatgttttttgtcccttattctgttgatgtgaagcatcacacttattgatttgcatatgctgaaccatctttgaatccctgaaatgaattccactacatgatgatggataatctttttcatgtgggttgagttgagtttgctagtatttttgtatgcatattcatcaaagatcttggcctgcaagtttgtttggttgtttgtgttggttttggcccggcttaacatcagggtaatactgtac

SEQ ID NO: 83416 - DNA, 367 bp, Homo sapiens
gtgcttttggtatcatagctaagaaaccgctgcttaagacaaggtttcaaacaaatcatactagaataagccaataaatatccacatgccaaggaatgaatctagacccattcttcataacatatatggaaacaaaatcactcaaagtggatcgaagaacttcccgtaagagctaaaactcttagaaggaagcataactgtaaatgtttgtaaccttgtcttaagcaacggtttcttagctatgataccaaaagcacaagcaaccaaaggaagaaaagataaattagacttaatcaaaatttagaacgcttacgcttcaaaggacacaccaagaaggtgaaaagaaaatgcacagaatgagagaaaa

SEQ ID NO: 83417 - DNA, 366 bp, Homo sapiens
gtctctggacaaagtggagaaagaaaaagatgagctcagggatttgaattcccagctcaaagagtttcataaatgatctaagagcttctaggtgtgccctgaaggagagccttctagcctgtagttgcagggctgaaatttctgaaaattaaatgcacaacctcatcctgcaattggctgaattacaatgcaaattggactccccaccacacagggtgtctgctctaaaagcaagggcaagggcattgatcagaaaagaatgggatcccataaggtgggaagactctgatgaagaccctaatgaagctggggacattgagcccctaaattctgacaagtcttttttttaccagtggaagtggcctc

SEQ ID NO: 83418 - DNA, 380 bp, Homo sapiens
  misc_feature (1)...(380): n = a,t,c or g
cccatccttcaacaacacatgactatatataatgcaaacactagtcaaaagaaagccaagtagctatattaatataaaacaaagacatcaaaaaaagaactgcctagcatagagggacataacgcaataataaaaggatcaaatcaccactaagatctaaaagtcctaaatatgtatgcacctaccaccagagcttcaaaacacatacagcaaaaccaatacaagtggaaagaaaaatagacaaatccacaatagcaactgaagacttcaaaactctcagcccactgtcaccactgttactcgacatagtactggaagtcctagctagagctatcggacaagagaaacatatagggggaatccaaattggaaaggaaatn

SEQ ID NO: 83419 - DNA, 435 bp, Homo sapiens
aaaccaccaaatggctcaggaagatgctcttcgtctctatctagctggtgaggggagactagggaccgatgaagcgtgctttaacatgatccttgccacaagaagctttcctcagctgagagctaccatggaggcttattctagggtatgagcttttcttttgaagatttggcttctgctgtaagatacaaaaatatttaaccctttaattttgtttgcagatggctaatcgagacttgttaagcagtgtgagccgtgagttttccggatatgtagaaagtggtttgaagaccatctgtaagatatttttgtgctttgctttattttctttttaaatgagtgggagctttgaatagttgctcccattaaatgttgataatatagtccacgtggaatctgcttaggcagtagctgatctaatcctctggggtttgg

SEQ ID NO: 83420 - DNA, 419 bp, Homo sapiens
aatttgttgaacattttttatcattaaagaatgttgaattttgtcaattttttatgcgtctattgaaatgatgaatttcattgattcattagcttatgttgaaccatccttacacacatggaatgaatctcacttgatcacagtgaatgattttaatttgctgttgaatttgattttgttgagaatttttgtatgtatgttcagatacattggcttgtagtttttaatttttttgtagtgtctttggctctggtactgggataatgttgctattgtaaaatgagtttggaagtattccctcctcttcaatttttggaagagtttgaaaagaattaatattctttgaagatttggtagtattcagcagtgaagccagtaattcctgtgttttttttcctaagttatccaatttgttagtg

SEQ ID NO: 83421 - DNA, 2925 bp, Homo sapiens
agtggcccttatgctgccccctcccaccccgctcgcatctgtagcatctggggactcctgggcttcgccgcccgctgcctgacatggtgctgcccgcctggcccactccccaaacgcctgctccccctagtgtccagcagcctcctggccactgtgctcccagcccggggcaatctcgtcctgcggagacggctcatttacattgggccacgcttcatgatcgggccggggtccgggctggtgtggcagctgctcgtggggcaggcagctggggccgtgaggccaccgtcagaggctacgccaagcctgtgtgctccctcctgcctcaggagcaggcccccagcacccagctgcccggctgccatgcacaaacattacaaagtccacttcgccaaggatgcccagagccccaacgggcactacttctgggacccagagttggggcaccgaaaaggatgctgtcatcagtggcgccaggactcagcggccctccgagcccatgggccctgtcggccttccccccaatcacactggcagctggcctaccacagccaccaagtgggtggcagtggctggcgccggggcctcctgccctccgtcctgcagcagcagcggcagccccagtcccagccctcacctcccagccccctgcggcagcggctctgccccattcacgaagcccagaaggggctgcctgcaacctccactgtccccaaggaacctgccagcgcccctcaggcgcccaccttacccaccacggcaccagccatggccaggagtggcccagctctaccctccgcggctggcgtcctcctgaagcccagcgagcccactgatgcccggcccctgcccgccccagcggcctgtggctccttcactgcctacagctccgacatcctgacagaggatgacgtctactgcagctgcctggccaagacactctgccacgtgccggtccctgtgaccgtgggtttctatgcccctttcggctgccgcctgcacatgatgctggacaagatcacggcgctgatgcagcaggaggccgcgcagcgcgagagcgaggagctgcagcacgtgcagtggcggccgcgtgccgtgagcggctggggcgtcccgcagctactgtggtacctggtgttcctgcagcccatcatcaccgaggtgcacctgcggcgcaggaacgtgcagttccttttcatccgctttagcgcctggcagtacgcgggcaccgacaagctgtgggccggcctggtgaccacgttgtgcgagggcatccgccgccactatggcgcactgcccttcagcgtgtactcggtgctgggcaacaagccggccaccaggcaggactgctgccagagcgagtggcattgtcggcgccgcgtgtgcctggggctgctggcgctgctggcggcgctgggcctgggtgtggggctgctctacttgtcactgggcggccacgcgctgggccacggcagcccgagcggcagcctgctcaaggtgtttggcggcgcggccaccacactgtcgggctcggggctgctcatggccgtgtactcggtgggcaagcacctgttcgtaagccagcgcaagaagatcgagcggctggtgtcgcgtgaaaagttcggcagccagctgggtttcatgtgcgaggtgaagaaggaggtggagctgctcaccgacttcctgtgcttcctggagatctaccagcggcgcaggctgcgcgtggtgctggaggtcaccgggctggacacgtgctacccggagcgcgtggtgggcgtgctcaacgccatcaacacgctgctgtccgacagccacgcgcccttcatcttcatcctggtcgtggaccccagcatcctggccgcgtgcctagagagcgcgggcaacatgaagggcacggccgataacggctacctcttcctcaaccgcactgtcacgctgcccttctctgtgcccattatgggccgccgcaccaagctgcagttcctgcacgatgcggtgcagagccgcgacgacctgttgtaccgcgagatgacgcgcaagccgtggctgccgggggacgccgggggcgagagcgcgcagctgctggcggtgcaggcgcaggcggggacggagcgcgggcagggccgcatcgacgacgaggcggcgcggcgaatccaggaggcgctcttctgccttcacgacgagcgcgactgcctctacgagtacgtgcccgacaacgtggtgtccatgcggcgcatcgtcaacaccgtgcccatcaccgtgcgcctgctgcagcagcagcagcagcagggggactttgggggccccacgccgcgccaggcggtggcgtgggtggtgctcgccaaccagtggccgtgccgcctgagctgggcgctgcagtgcctggaggaccggcagcagaccgggggcgcgcccgagggccgcgcgcgcctctgggacgttttccgcgacaacagccgcgagctgcacaccatgaccaaggcgttgcagaacgtgctcgacctggacggcgaccccgagctcttcgagcgcttcctgggcgccgacttccccttcaccgtggccgaggcgcagagcctgctgcgctgcacggtcaacctggaccactccatccgccggcgcatgggtctcatccgagccgtcagcgcgctcaagccgcccagcccgcccaagtcccctacccgcgataccccccacgctgcccaccgggccaacagcgcctccagggcgcccccgtcgggccgtgcctcagggcaagccggcgaaggccaccacactggggacttggcccacaggggcaagctatggccggtggcctgtgcgctcttccgtccagggcaatccagcccagggtacctgccttacgagtcactccagggccactggttagtcactgacactgaagccactgcatcagccccctga

SEQ ID NO: 83422 - DNA, 496 bp, Homo sapiens
  misc_feature (1)...(496): n = a,t,c or g
agtgtcccnnnncgccgccccactgaagatctgatggggacgttagnccangcggnggaattcgatcttgatcatggatgtgactgaggtggtgcccgagcccagccagcccttgaccaagaacaagttcagagtcctttacgagaaggagcagaaggggcccgtgactgccctgtgcactgcaaggccacctggtgtcggccatcagccagaagattttcctgtgaagcctgcgggccagcgagctgacgggcatggccttcatggtcgacaggcagctctacatccaccagatgatcagcgtcaggaacttcatcctggcagccgacctcatgaagagcatctggctgctgttaccaggaggagagcaagacgctgagcctcgtcatgggatgccaagaccctggaggtgtacagcgtggacttcatggtagacaacacccagctgggttttctggtgtctgacaacgactgcagcctcatggtgtacatgtan

SEQ ID NO: 83423 - DNA, 948 bp, Homo sapiens
caaatccaacatcgtggcagttttccctgtgtttccttatgagaggtttaggtctcacatttaggtctttgatgtactttgcactgatttttgtcagctgtaaagtaggggccaatttcattcctttgcgtgtggatgtcctgtttcccagcaccatcggtggaagcggctgtcttttcccattgaggagtcctgccatcctggcacctgtgccaaagcccattcgaccttgagtttgagggtttatttctgggtcctcgcctctgttcccttggtccatacaccacctttatatcaggacggtgatgctttcattcctgtggcttggcagtaaaattttgaatcaggaaatgtgagtctccagcttcgttctttttaggattgttttgggtaatcaggaacccttgagattccatgtgaatttagggtgggtttttctgtttctctgagaaatatccttgagattctgccaggaagatatattgttttgagggctttaaaactccctataaatattgctgtactttgggggcccttttcttcccacactgtgtttttgagatttacccatgctgttgtgagtacctcgctgaatgcagcacatactgcatcatacaagtgcatcctgatccatttcccctgacggacgtgttcattttttgttatggcaatgctgcaatacacgtttttagctgtgcctctttgtgcttgaatgtgaggggttttctaaggtgtgaacctcagaacagagtcgccaggccatagggtgtgcacagcctccgtctgtcctgggcggccccacgcgggctccacactggtttccgtctgtcctgggcagcaccacggtggctccacactggtttccacactggtttccgtctgtcctgggcggccccgcgcgggccccacactggttgtgcgtttctcaggccaccagcagcgtccaag

SEQ ID NO: 83424 - DNA, 459 bp, Homo sapiens
  misc_feature (1)...(459): n = a,t,c or g
cgccccccattgatgactcttagtcattcgtggcgaattcggggaatatcctcagcttgataaaaaacattgtccaaaaactaaaaaccctacaggtgacataaaactctgtggtggcaaatgagatgctttcttgctaagatcaggaataaggcagtgtcccctctcactattcctattctattgaacctcctgttggaagttctggctaatccagtaagataaggaaaggaaataaaaggcatatatattcagaatgaaggaacaacctactttgttcacaaatgaccaacacaatactgaaaagaacaaagtcaaagaactgatcctttaagacttgctgtaaagttatagtaatcaagacaatgtggtattagcaaagcagcagacaagtagattagtggaacagaagagtccagaatgtaccgcacaaatatagccaacatgtnttacaagggg

SEQ ID NO: 83425 - DNA, 1479 bp, Homo sapiens
  misc_feature (1)...(1479): n = a,t,c or g
cccacgcgtccggtgttttctctgtgcctatagaaacctcagctagtgtgccgaggagtctggtccctttggggaatgtggcagtcaggttctggcagggacctcgaagtggctggtaatgtctttcattaccaccaccacgtgaactggtcttacgacctgttagcttccttcatcaggcatgagcaccaggatggcaggggcctcatctgtcctattcctcctgtggcctgggtcctagcaccatgtctagtacagtgtaggtgctcaagggaagtttactttatagaactgtctacctgggagatgttgctgttagtctaacctgtaccattttgtaaacctgcagccattttgcagactctgatcacagtgaaacattccatgggaactagggcactgaaaacaatccttcctaaccacgtgactgcagaaacatctttattgccagcaaaaccctggggaggaggaaaccagcttagtgccagcaccaactgcctctcacaggctggggtgatcatgggactgggaaggaggggtgtgggcggtagagcttgctgcccggcaggatatggcaaggatgttcctgcagtcaggctgttgggcctttgcccgggagggtgcgataaggatgtttctacagtcaggtgatcaggaaggatgcttctcacggcccgagttcccaaggaatgtttcattctgaccagggtgtgcaaaacggcattcaatgtcttcagaattgccgtccctcagaactcttgcaccacgaggtggcagcactcccagtgtctgggtgtcttctgaggggtaccaggatccagtagaggccactggctgtgctgtcatatcctaagtggcagcaaggcaggcttgggtctcttggctgcttcagcacaaatgcatcactgaagtccaaaatcttgaacgtggcgttagccttgaggaagtcatcaacaccccggcaagtgagggtgcagtgctgctccaggatgatggtgtctaaagttgtgcaccaggtcgcaggccctgcagaagcatctcccctcaggagtgaggtagtacaggaagtctgtgcacaggcagatctgctggtgctgttacactatgagggcactgagctccaagatggtggcaatatattcactgggattcctgcagggtgaggttggagagaggaagcatctccataacacatatgaaaccctggaagcactttccagccagaaattcaggaccacgttatatgcagatatgggtgccctctgagcacacttgtctctctgtctcccactctgagctgcctcctggccccacatgccccagcctggcccagggcttagcccagtgggtgttcagtccatggtgttgactgctccctgggccaggagagcccttggtggctctgtgactcctcctgtggaacccgaattccaccgcnctgcctagagtctactatnanggnnctctattggcactgcc

SEQ ID NO: 83426 - DNA, 483 bp, Homo sapiens
cgccccgctttcgtagaccactagtccagtggagtggcattcattagaacttcttatctgaagccataccactcagagggaatgcaaaatacatattgacatctcctttaggatgtccttagagaattcatggaaaagaagttaaataatttaaaagtgcttttgggtacagctatttagcactagagggtaagattagacatagattgtaaagataataatagggttagggataggattaggatctgggtcagagtcagggccagaagtatggttagaggtggggtcatggtcagggtcgagatcaaagtcagggtcagaattagggaccaggatagggatcaggatttaggttcagtgtcaaagtcttgggacaaggttagggttagaattagaaccagagctttgttctcctcaggtcccacccgaggatgggtcaccatggctttggagcgcctggtagtgtggcatgtccacagtgaa

SEQ ID NO: 83427 - DNA, 478 bp, Homo sapiens
  misc_feature (1)...(478): n = a,t,c or g
tggagnncnnnnnctcgatagcactacactagtgcggnggaattcggaaaggtgccgcccgcatctcccgccagacctgaatgaactgaaatgatcgagtgtcactgagtgcccaggaccacccctaccccccgccgtgcaggccggccccgcccggtcaccactctcggacctgtcactgagcattcaggacccccacccccggtcgtgcaggccgatcccgaccaatcaccactctcaacctgtgactgagcatccaggaccggcttgccatgcaagccggccccgcccgggcactgatctcggacctgtcactgagcatccaggacccaccccgctccgccgtgcaggccggccccgcccagtcaacactctcgacctgtgactgagcatccaggacctccttgccatgcaggctggccccacccggncaccactctcggaccttgcaggggcttccctgctccttgagaatggg

SEQ ID NO: 83428 - DNA, 598 bp, Homo sapiens
ggaattcttcaaaatgaaaatatcagatatctaggcaaaagttgtaaataatcaaaattataaaattaaaagcaaagtagcaagatagaaataatcaaaagttatagcaacttagggacaagagtacttacttttttgggagtccctaaaacttggcaaattttaaagatttcatcgacctcacttgtccctgggaaaagtggccttaacatatagagttcagccatgatacttccaacagcccacacatcaatgggagaactataaactgaagatctcagtaaaacttcaggggcacgatacctatgaaaatagagaacaaaagaggtaattttgattgcaatttcaaaggtggatgggcagtagcattctacgctgtgtggtcatgcatttccatcaaggaacaggtattcagaccctgttccatctgtgtgtcaggcatttgtacaatgttctggggataataggacacaacacatgttccctgatcacagacaatgagtggggctggagacaaatgtctatgaaatgtccatcaagcctaagacaggaactcaactgaatagatatggaaataagtgccatctgatatattaag

SEQ ID NO: 83429 - DNA, 445 bp, Homo sapiens
  misc_feature (1)...(445): n = a,t,c or g
nattgattgcattcgtccgngcggnggaattctgacgtatgacgaagttgcattctattgccaccgtaaatgctgagaagccacagcaagagctgtgaattgtgggtctgagggtgtggttatgtggggcagagagatgggagtcatgatggtggaggtgaagaatccggcagaggcaccaccaactgagttgattagaaggggtcactttccttgatgacacaaccaggttgtgaagccaggttgctctaagagcgggaagacagcattcgagtgtgaaggcagctgtgagggaggaagcgaggggcaaaatcaggagggcgcaggtgtgggtatatgtgtgtttgtggttntgacgatcangtcttttgagcaggtgcccccgaggaaaggtgcacacatgcgcgcaaggcttgccgtgacgtgtgaggacgaagtcaagggt

SEQ ID NO: 83430 - DNA, 663 bp, Homo sapiens
  misc_feature (1)...(663): n = a,t,c or g
ggaattcggaggggaaggggctgcagcacaagtggtgcctgattcccgggccattccctggcagccaagtggctgctgggctctgcacacagcccatcccccccagtgctgctgcccgcgttccagcttgcccccacctgccaggctgtgcagtgggttcaggtgggaagcagttgctgggcccacctgtctggcaagggcagttggggagccctggctgcttagcacaggggtgaccccagcttctggctcacacatccctgcagactgtgggtgcttagtgtggaaagaggaaggacctctgccctcctggcccttcctccagtgggacgagaagcccaggaaagaggctgaacccaggaagggctctgggcagcctggccgctggtctcgcagtgtgtggctggtcttggcctcctgttctgcttccctgtcacgggggtccannnnnnnnnnnnnnnnnnnnnnnnnnnnnnaccatacagacaatcctgcgcgtgcatctttttctcctgcatgggcccttcttgatcaagaaggggaggcaggaggatctcaccccccacctcattctaccccagtgagagtggcctctttatgtacaggtggtcccaggatcctctaacccattattatcctgggaggaaggcagtggcttctccc

SEQ ID NO: 83431 - DNA, 575 bp, Homo sapiens
ttatccttgaagtttaatgcttttaaccccgttccacttcccgccagaagagtgtcctcctcccatccccacagcacaccatcttctgccttttcttctcagcacctggagctgttcctgcagcaactccaggaggtggtggtgaagcatgcagagccagcggtgcttgaggctggggcgcatgccctctacctgctctgtaatcccgaattcactttcttcagccgggcggactttgcccgcagccagctagtagatttgctgactgaccgcttccagcaggagcttgaagagctgttacaggtaggagctggggctggacaatgggacaccccaaacaagggtgggaggggctgcaagacgggggatgtggactgatgagttctgggggaaatgctattgtggatcttctttccttctcagtcgtccttcctagatgaggatgaggtatataatctgggcagccactctgaaacgcctctctgccttctacaagtgagtggctttcctcctcttccccatcccgtttttactggtgtctgtggagttggttccctctgttcttttccagtata

SEQ ID NO: 83432 - DNA, 480 bp, Homo sapiens
  misc_feature (1)...(480): n = a,t,c or g
aggggagtccccncnaatagaaaacccnatagatgacccttagtccagngcggtggaattccccatcatctttcccattatccttcccatcatccttcccatcaaccttccccatcatccttctccatcatccttcccatcatccttcccatcatccttcccatgaaccttcccatcatccttctccatcatccttcccatcatccttctccatcatccttccccatcatccttccccatcaccacctatccccaccatccttccttatcatctgttccattgtttgtccctagaccagctctgttgcctcatccctggtctctggactgtgagcaccaggcctgccacctgctgactctgtacactgacctccgtctctcccatctctgtcacggtaaaaacccaactccttcccattcccaccaggccctgaatgacctgcctggccacctccttgctctcacctcctccctttcttn

SEQ ID NO: 83433 - DNA, 576 bp, Homo sapiens
  misc_feature (1)...(576): n = a,t,c or g
ggcgacgtttcgatcccctnnnnnnnnncnntttttgatcactatccgtgtggtggaattcgaaaatgcaatagatccagatagaagaatggtgttagcatgggatcagtgcaggacagagggaagcatgaagaccgtttcataactgaagtggagaatgatattgggaccacagaactgcaagtttggatacaaagattgttcacttgtgagttcagaaaccccatcttgttggttgcattgaccgttgcagtgcagagaggtcggttcatgaccatggtagagagcagagggtggcagatggcagcatagcaggcataggtgatggcagagagcaagcagccattggtgccccaagaaaaaatgaaaaagaaactctaggtgatataaccccacaccaagataggtttttatgaaacaggaaattctgcagcatcttgggcagtgactgaggagtaacatatatctaggaagaaaaaatgtccaaggaagaattacatggnggtacggaggcaagaatcagcattgattaccaacagcatcatcagattccctatcanggtcaggagataaatn

SEQ ID NO: 83434 - DNA, 424 bp, Homo sapiens
  misc_feature (1)...(424): n = a,t,c or g
cacaaaaatcagtagcatttatatatgcaaacagtgaatagtctgaaaaagaaatcaagaaagcaatcccatttgtaacagctacacagaatataacatatctaggaattgatttaatcaaagaagtgaaatatctattcaaggaaaactataaaacactgatgagagaaattgaagagggcacaagaaaatgaaaagatatttcatgtgcatgaattggaagaattaatattcttaaaataacaatactacccaaagcaatttatagccaatgtaatccctatcaaaataccaatgacgtttttcagaaaaatagagaacacaaccctaaaatttatatggaatcacaaaagaactcagatagccaaagcaatcctgagcagaaagaacgaagttgggaatcacactacatgacttcaaaatn

SEQ ID NO: 83435 - DNA, 394 bp, Homo sapiens
tcctagttttgcctggttctatggttacattgtccatttcatccaaattttttatattcattggttgttcatagtatcttcttatgatgttaatatttgcaagatttgtggtggtctttttcatgcatgatactaataatttgtgccttttctgtttttcttgatcattcttgctaggggtttatacactttattagcttttccagaggactagcttttggctttgttggttttctttctattgaatgtttattttgcattttgttgatttttgttcttatcattattttatttcttatgtttgatttgggtttaatgtgcttttgtttttcaagctttttgagatgggtactgtattagtttgttttcacactactgataaagacatacctga

SEQ ID NO: 83436 - DNA, 449 bp, Homo sapiens
  misc_feature (1)...(449): n = a,t,c or g
gtgcagcnagaaanattttgaangcctgcggncttacggtcatcgcacgggccgacccacgcgtncgtccacatttatcaaatactaaattcctacacacacttggagcggtttctgaatttgntgtttgtttaatttttttatatcctctattccttaaccatgctgttaattattgccattttatcatttgctttactgggtgttaagtttcaatgggggtaaatgttactcttcttttttaaatatttttggctatattttttcatgtattctcgcagataagcttcagttatgttttggtcacattccaaaagaaattctattgccatttttgttggaattgctttaacaatatagactaatttggggagaattaccaactttgggatattaaatttcttattcaggaacttcgcatgggttcacgattctgaagaccatcttcn

SEQ ID NO: 83437 - DNA, 428 bp, Homo sapiens
  misc_feature (1)...(428): n = a,t,c or g
agacaagaaaaggaaataagaaataaactgattggggaggaaaaagtaaaactgtctttgttctcagacagcacaattgcttatgtagaaaatctgaaagagtcaacaacaacaacgaaacctcctggatctaataagcaattatagcaaggttgctagatccaaggttaatctacaaaagccaagcacattcctatatagtagcaatgagcaaatggaatttgaaattaaaaacatattaccatttatattagatagaaaaactgaaatgtttacatataaatctaacaaaacatatacaaaatctaaatgagaaaaactacaagactaaagaaaggtatcaaataaatatataaatgaagagacatggatacaaagacacaatattgtcagtatgtcagtttttcccaacttgatctatagatttn

SEQ ID NO: 83438 - DNA, 511 bp, Homo sapiens
  misc_feature (1)...(511): n = a,t,c or g
ccattgattggaatacttcatattgtaaagatattaattctctccaaattcttctacagatccaacacactacaaatcaaatcatgggtgctttttcacatatatctataatttatgttcacatgcaaaggattacaataatcagataactactagataatctgagaaaaaaatgggagctttttttgagggacaaataccaagtctttttctaaagcttgtattctgcaaggatagctgactaaacccatggaaaagaacagctagttcagaagcagaggccctcacatatttggacacttgatttttgaaaagagctgctctgcagagcagtgggggagaagatggtcttttcaataaatggtgctgggtccaccacatatccatatggggaaaaatatatcttcttccctaccttagactatgcacaanaatctangccagagagactgcagattttaaatgacaactgtggaaaagatagctttttaaaatacactatattttggan

SEQ ID NO: 83439 - DNA, 459 bp, Homo sapiens
atttgcctttttctttttcttgccttattcactatctgggtcttacaatacaaatttaaatgcaaatagtgagagtggatatgcctgctttgctttgtttgtgattttaggtagaaaacattaaatcttcaccattgagtttgatgttagctgtagattttttttataaccttaattggatgaggaagacttctattcctagttgttgagagatttagtgatgaaagagtgttgatttttatcaaatgttttttctgcatccatttaaataattatatggttctttttctgttttctattcatagagtagattatattgattgattttctgatgttaagccaaccttgcattctgagataaaccccacttggatatgatagatagtattctttttacatgttattgggtcttatttgctatattttggtaggaactttttgtttctatgctcatgagta

SEQ ID NO: 83440 - DNA, 430 bp, Homo sapiens
agaaggcattaataaaactgtccttgtgaagagatgacatgattgtgtatataggacattataaagaatcatcatcaacaataaccaaaatgtttaaaataaatgagtttaacaagatcttaggataaaagagcaatatataaaaagcaagtgtatttctaaactagcaagacataattagaaaatacaatttcaagtaaaatataccatttataatggcatacaaaaacatggaatatttaggaatacatttaacagaatatattcaagatgtacacagtgaataactgaaaacactgttggaacaattaaaagatactttaaatataagtgaaatgtaaattagtatatagatgctatacaatcccagtaaaaattcagtcatgctttttaaaacaattgacaagctgttgagtgcagtggttcatgg

SEQ ID NO: 83441 - DNA, 387 bp, Homo sapiens
  misc_feature (1)...(387): n = a,t,c or g
cccacgcgtgcgcttttgttattcataacaagcttcttaatattgttgatgccaattgttccctacttgatctctagattcaacgaaatctcaatcacaatcccagcatgctatttagagattctgaagtttacatggaaagaaaaagacccagtgtagccaacacaatactaaagaatagaaaagatggaatagtcacactactatatttcaaaacttactatgaagctatagtaatcaaaacagcatggcgttggcaaaagaataaataaatgaaacagtaaaaatctcataactacatctatataaatatagtcaacttatttttctcaaggacacaaaggaaactcaattgagaaaggctaaacttttcaagaaatgattctn

SEQ ID NO: 83442 - DNA, 486 bp, Homo sapiens
  misc_feature (1)...(486): n = a,t,c or g
nagagcgggtttctcannnnnnaaggcctttgnnanngncntnnncnntngggntaagnnaaccggncgagtttttttattgaacatacagacacgttcaattttctgtatttttaggactacagaggaagacagaggcggggatgactgtgttgtgtctgtctggaccaaacagcggaacaacagctgtgtgaaaagcaaggatgtcttctccaagcctgttaacatattttgggcattagaagaatccgtgcttggggtgaaggcgaggcagccaaagcctttctttgctgccggaaatacatttgagatgacttgcaaagtatcttccaagaatattaagtcgccacgctactctgttctcatcatggctgagaagcctgtcggcgacctctccagtcccaatgaaacgaagtacatcatctctctggaccaagattctgtggtgaagctggagaattggacagatgcatcacgtgtggtttn

SEQ ID NO: 83443 - DNA, 417 bp, Homo sapiens
ataaaactaaaaatgaactctcaaagaaacccttacaactgaacaaatacatagaaattaagaaatctgctcctgagtaatatctgggttaacaatggcataagatgaaaatttaaaaattaccttaattaaatggtaacaagttattgaaaccttaagaatacagcaaaagcagtggtaagaggaaagtttatagtgcctactgcctacgtgaaaaagccggaaagagcacaagttgtcaacctaatgttgacacgagaaaaaagaaaaaattaaagaaagaaaatataaatcaaaaaagagaaagaaacaagctgcctgtgttaggctgactcacgtcaaaggcagtaacacgcaaagtttcaatgatgttatctaagggccggagctcaaaggaatgggctctgaagactctcc

SEQ ID NO: 83444 - DNA, 416 bp, Homo sapiens
aaaatgtttttgagattcatccatgttgttttgtgtgtcaaaagtttgttcctttagccattccatggaatgaatgtatcacattcttgtattgatagatatttgaatgtatattgatagatatttgaatacaagaatgtatccattcttgtattgatagatatttgaatgtttccagtttttcctattacgaataaaactgctatggacattcttgtatatatcattttctgcacatatgttttaatttctcttggataaatgcttaggaattactgagtcatagaataggtagttgtttagttctgtaagaatatgccagacgttttttcccaaagtgtttatactattgtacattccaaccattaatgtatgaaggtgagaaagctttcgctacttccaaagaggcctctcta

SEQ ID NO: 83445 - DNA, 478 bp, Homo sapiens
  misc_feature (1)...(478): n = a,t,c or g
acgcgccccattgcccatcgtacccgcctgcaggaattcggcacgagtttaaacccctacacctgcgttaatgtgttaggctggactggctccagcctctcccctctagcctctcagcaacctccacagttaggccctcctggagacccctcctggctgcctcaggccatctcctgtacatccctcctcctcccctcacccagcttgttctttctccccacccccatcttccttatttttcttcttttctttgcaacctcaaaacataaaccctcaagctcatttccgcagcctgatgtgcagtcttcctctctgtcttgtgtctctcctctcacccatgcctccgtgggggacagaaggctacaccgtgtggctctggcagcccctcactccacacagtgtaggcatgtgctgttctatcacacatggacactaagagatcttgtcaagtagacagagactaagaggacctatgtgn

SEQ ID NO: 83446 - DNA, 1189 bp, Homo sapiens
  misc_feature (1)...(1189): n = a,t,c or g
gtctcgttcaggggtcaactatatgttagtgaccaggactgtgtcacttggctgccctgtctgcagtagaggctgggaaaggttctttttttaaaaaaagctgtgtgatctcctactaaaacaggggctctgtgagtgacataggaggggcacatgggagtgtggcaggcagcaagctgtttctgtcatagcctggcttgggaaggcagagaactgaatggtacttgctgcattgcacaagctagtcttcctttgccactttctttttttctagttttttccccttatttatctcatttataaaaataaacctttttttcttaaatcattgggttatttccttttaaaattctactgaaagtggtaactgtggtacagggtgcaagatgagatgcggggcactgatgatggttggatgagcattgaggatcactgcagttaattgttaataaggcaatgtgcaagacccttcagcttctgagaacacttacaagagcagcttttatatatttcaactagagcagatttgatttttaagagtcttgaaatttgatccactttggtgatttctataccaataatttcagcctggaatcgggggggcccccgaaaccagtacccccaaacgcgggggggggccgccccgcaccccgcccttataaagggcaagaaagaaagaatgcggcgtttgaaggagcggctagatgaacacactggggcccgacagaaacgcgtgcccgcgggggccggaaagggggacagtggaaaggcgaatcgggccgcggggcgggggccaccccactcggcttgcgggcgggcataaacagccgcgcgcctcgcgacacgggggacgggaacggggaaggccgccgggcggggcgcggtcacggggagcgtggaggacggcgcccccgcngacgggaagatggagcgcctgcgttttcgcgatgccggcggccggggacccgcggtacgcggaggagcggcgcgcgatccctcctcgaccgactcgggctgcgtccacagggcgcgcacccgcgcggctgtcggaactcgcgggcgaacggggagtgaggcccgacggcgtgtcgcgccgaaagatcggaacggcggctcggcgcacaaggcgggggcgccgggcggaggtcgggagtccgcgtatggcggcggacgagtccgcccgcgcggg

SEQ ID NO: 83447 - DNA, 526 bp, Homo sapiens
  misc_feature (1)...(526): n = a,t,c or g
gaggggagagccccnngnnnnnnnnagnnnaattgcccgcccctcngaaccttgatncgcgtgcangaattcggcacgaggttttcctttgattggtatggtaagtctgatgacgccaccttgccttacaaagataccttcttggtatctttcatcaagttcataatcaggatattctggaaaaaaaggtagggtttcaatttagcatttggggtagggggactaagaaataagtctatggcaattattgcagaaagcaaatgatcatatgtctcaccaagcatttcagtgactttgactgttcctggtacctcagcaggctcaccaggtccaccagcattacaagctaggacgcggaacctgtattctgcaccctgaggtaggtgtgttagagtatactctcgaatcttggttggagtggtgttacacttggtccattcatgttgatctactttttgcatttcaatcaagtagcctgtgactttagatcctccttcatcttctggaacactccaggccagggaga

SEQ ID NO: 83448 - DNA, 476 bp, Homo sapiens
  misc_feature (1)...(476): n = a,t,c or g
nnnngggtgggggnnnncctagacgatcgcggcatcggcacgagcacaagngaaancatctgggcttagagatatctttttgcggagattattggataactgattcaactcttaacacgtaaaggactattttaattttctatctatccttgaattagcgccacgaatgtgtggttttcaagaaacgtgtacattttacctaaatttttagatttaatggagtgtaagtatttataactttctcttattatattctgaatatctttacaaaatgtaataatgatcccttttttccaaaaggctaatttgagctttgcttctctcttttttttgtcccttactttctcctttcttcctttctctctgtctctttgtttctttcattaggcttactagtgctgctacttttccttttgaaagaacacacttttggctatcttaatcctttgattgcactctagtgattatattttatg

SEQ ID NO: 83449 - DNA, 1808 bp, Homo sapiens; identical to SEQ ID NO: 68669
  misc_feature (1)...(1808): n = a,t,c or g

SEQ ID NO: 83450 - DNA, 599 bp, Homo sapiens
tgcaggaattcggcacgagctggagagataccctacgcataaccgagaggaatgtggggcagcctttacctggtgcacaagcgttactaagcataggagcattcatgctggagagaaacccctcatgtgaagagcgtggcagaaacgctagctgatccttaagctttgacaaacattagagaattcatactggagagaaaccctacacgtgaagaatgtgggggggccttgacacaatccacagttctgaatgaacataacaaaattcatactggaaagaaaccctacaaatgtgaagaatgtggcaaagcttttagacagtccagaagcctgaatgaacataagaatatgcatactggagagaaaccctacacgtgtgaagaatgtgtcaagcttttaaccaatcctcaagccttattatacacaggagcattcattctgaacaaaaactttacaaatgtgaagaatgcagcaaagcctttactcaatcctcatcccttaataaacaagagaattcatactggtgagaaaccctacacatgtgaagaatgtggcaaagccttttataggtcctcacaccttactgaacataagaatat

SEQ ID NO: 83451 - DNA, 465 bp, Homo sapiens
  misc_feature (1)...(465): n = a,t,c or g
nctgagaccttgtagaggccttgaaancggacattncactattattaaaagttaaaatttccagaaagatataactattctaaatctattacctattaacatagattcaaaatggttaagtcaaatatttacagaaccataaggagagacaaatccacaattgtgttagaaaatgttaacacatttctcagtgttagaacaggcagacaaaaaaatattactaaggctaaaaaagatctgaataacacaataaataagcctgacttggttaacatatatagaacactgttgaaaaactgcagaacatatgttcttttcatgaacccataaacatttttcttaaaatggccatatagccatgaagtttcaacaaattttgaagtataacttcatacaaaataaattctctgatcacaatgcaattaaactagaaagtaaacaaaaagataactaggaaatcctcat

SEQ ID NO: 83452 - DNA, 462 bp, Homo sapiens
  misc_feature (1)...(462): n = a,t,c or g
atcgaccncatcgtagactttcgtccgngcggnggaattcctgaagggatgcactgaatctgtaggtcactttggagaatactggtatcttaacaacattgaatcttccaaactattaacatggaacatctttccatttaatcaggtcttctttaatttttttttcagcaatgttttgtagttttatgtatataagtctttcacctccttggataaatgtattcttaagtattttatacttttgcatactatcatcaaaaggattttttttcctttttaaattcttcatttccagcatatagaaacacaactgattgttctgtgttaagtatgtaccccacgacttgttcagattttgttctcctgatatctgttagttctttatccctggattctttcagctctttgaaaatattaatgcagctaatttacagtctttttctggtatgttcaatgtttggg

SEQ ID NO: 83453 - DNA, 1451 bp, Homo sapiens
gctctcacccacatccgggaccctcatgcctgggcggaggagggggggccctcattcgggaccctgcactccgtcgccggaagtgccaccgagaagcgccggcctcggggctgtctacagcggcccgggagaggctgtggtggccccgagcgcgagtgtgtaggtgacaggacagcggccaggcccgcccctcccctcgtgatggtcattgtcctccagagcagtgatggaggaaataccagcccaggaagcagcagggtcaccaagggtccagtttcagtctttggagacccagtctgagtgtctgtccccagagcctcagtttgtgcaggacaccgacatggaacagggactcactggggctccacctgttcctcaggtgcctgctcttccccgtgagggaagcccaggagaccaggcagctgcgctcttgacagccaggtaccagagcagccaggatgtgttatttcaggagtttgtgacattcgaggatgtggctgtgcaccttactcgagaggaatggggatacctggaccctgttcagagggacctctacagagaagtgatgttagagaattatgggaacgtggtctcactgggcatacttctccgccttcccaccacccggattcatagtgtgaattcctgcccggccctgagtcatacccaggcaagtgctttctctggagaaacacttgccgtccttacagcaggaatctccaagagatggcccaagtatcggcttcccatcgatattgctcgtccctgctcggaaactccttttccacgattgtgagatattaaaattgactgatggaatagaagctccccaggatgccaccactgtgtaaaatcgcagctcctcaaattacctctgtttaatttcaaatgttagggtccaaggaagccctctgttgcaaccagatatgttttgaacccagttcattcagaaaccatggttggtggtcatcatctacttgtattgtgaaaaaccagaaattccaaattcagctcttcagttatggtcttttcatattattttagaatgtgaaacttatgctgtgtgcccctccttttatgtggcgaacacaacctgccccgtatggtgcctaactctcctgtgaaccctgggcttccctcatgtttaacattctggtttcctccttccttgaagtccctggtggccctctttcaaggtcctaccttcctaccctttattctttgtggttctgtacagattgatgcaattatattgcctttcctgattaagtgttccttactctgtccttgatggaggggagaagggagggcaaagaagttaaatttatttcagggcatcaaattgaatatctacttaataactttgtaaactgtaaagtgacatacatataattgtaaagtactgttaattttatctaataattacagagtttccaacagttaaaaaaaaa

SEQ ID NO: 83454 - DNA, 765 bp, Homo sapiens
  misc_feature (1)...(765): n = a,t,c or g
gcggtggaattcgggagactaacacacttctctcagttactaacaaacaaacacaaaaaagaaaaataacaatataaaagattttaaccacacaataaaccaagaatggcaggatacacattcttttcaagtgcacattgagtattttacaaaaagactatatgtttggccatgaaataagtactaacaaattttaaaggactgaaatcctacagagtatgttatttgaccatggtgcagttaagctagaaatcattaacaaaaagataattaggcaattcctgtgtatttggaagttaggaaatatactttcaaataacacttgggtcaaagaagaaatcacaatggaaattagaaaatattttgaactgaataaggtgaatactacatatcaaaatgtgtgagatgcagctaaaaatcatgcttagagggaaacatatagacataagtacannnnnnnnnnaagcttccaggaagttaggaatttttcatttcaagaagttaggaaaagaacagcaagttaaaccccaaagaaacaagaaaataaacataaaagcagaagtcagtgaaataaaaaatcaacataaaaatagagaattaacaaggtcaaatattgattctctaaaatgatttataacattgataagccctgacaagacaaaaaggaaaaaagagcacaaggaagtacaaataacaaatatcaggaataaaaaagagaatactactataataactattgtaaaaatcataagtggatatgatgaa

SEQ ID NO: 83455 - DNA, 498 bp, Homo sapiens
  misc_feature (1)...(498): n = a,t,c or g
gagcgctnnnnnnnaattgaaaactgagtcgcntcggcggaatncaaaaagaaaagtaaagcctaagggatttatggcacaccattgagtggaccaatatacatattgtagaagtcccaaaaggagaaaagggagtagagagcttatttgaataaagagtggtgcaaaacatcccaaatatgaggaagaaaatggacatccagattcaagaatctcaaaggactccatgtaggaagaaaccaaagaaagggtaaagaagcccacattgagaaagattttaatcaaattgccaaaagtcagtggtagagaattttgaaagaagaaagagaaaagcaacttgtcatataacaagggagctcccataagattatcagcagatttgtcagcagaaacattacagtacaaaagggagtggggtgatacagttcaagtgttgttaaaaataaaaatacacccagccagccaagaatattgtagctggcaaaaccatctttcaag

SEQ ID NO: 83456 - DNA, 482 bp, Homo sapiens
  misc_feature (1)...(482): n = a,t,c or g
ganaaaagaaggaangntttgagcccttgagnacactagnccatgcggtggaattcgctgaatcaaagcagctgaatttgaaataagctcaatgttgtttccttcaaagattaattcatcgttctgggcttgagataccaaacaagcaacatttggccttatccaaaccctgaggatttatttttcatccaagaaatttcggatgtcaacaagagacccattctcctagataacgacattgatagggaagtgagcatgtgcagacctcgtcttgtaatggaagcccactgttaacacccttgatcatgttctgtgcatgactacaaagagtacagacagtagccaggtcttttctgtttctccatttgtcaaccggagcctctttttctttccaaggagactgagttctacattgatatgacagaagtcccttcacagggttcctctggggcccttcacaataactgtgtgtcccttcagag

SEQ ID NO: 83457 - DNA, 483 bp, Homo sapiens
  misc_feature (1)...(483): n = a,t,c or g
cgcgcgccccattgatcgcgtccactagtccatgtggaggaattcatttttgaaaccaaaagctggttctttgaaaagataacaaaactgataagcttctagccaggctaggaaaaagaagggcacaaattactacttttggaaggaggagatttcacttcagagcccatggacattggaaggataataaaggaatactatgaataattctgtgcccacaaatttgataacctaggggaaatagatgaatttcttgaaaaataaaatctgataaaactcacacaagaagaaatagacaatccagataggcctagatctattaaaggaatggaattaataattaataaccttccaaaacagaaaccatgagaccctgatcagttcactagtaaattctaccaaatacttaaggaacaaattatatcaattctctacagtcttttctaaaatatagaggcatatggaatatttactaactcattn

SEQ ID NO: 83458 - DNA, 469 bp, Homo sapiens
  misc_feature (1)...(469): n = a,t,c or g
agagttcggggaannnnnacctgatgatcatagataacnctggnggaattccaaagaccttatttctaaataggctcacattcacaggtactagaggtcacaacttcaacatcttttggagggacacaagccaccccataacatacattaataattttctaatgttgaaccaatcttgcattcctttgtcatgctgaattttttaaatacattgttgaatgtagttttctaacacttcatttagatttgacttaggacttccgcctatacattaatcaagattggcctgtaattttccttatacaattgtcctttgtctggcttggatatcaaagttgtcatagcttcacaaaataagttttagaaaataaaacttcctctttttctttctattttttacaatctttgtcttacttgggaaaatttcaaacacacaaaagtagagaaaataatataaagaacgcccttg

SEQ ID NO: 83459 - DNA, 474 bp, Homo sapiens
  misc_feature (1)...(474): n = a,t,c or g
nctgagaccctagnattgacggtcgatcgaangggctggaggggngaggtgggtgccccactgcggccactgggaccgcaccccctccctattcccactcctgggcccctgccccaaatccacctgtccccgtccccgccttccagcccagagatgttagaactgcttgggttgacagcgaggctggtccactgaggcacacctcagccccgcttccagttgcccactggctcacccgcggcccctccccagccctgctccagcagccccagtctaggccgaccccactctgctcatcggcacattctcaggcctccctggagaccactggggagctgtccagccccctcccaaccccagtgagtcatgagtgacctccaccctcatccncacttgggaaattttctaaattgcctcctctctcagctctcatcacacattagtttttcttccttctcanagcttctctgaaag

SEQ ID NO: 83460 - DNA, 384 bp, Homo sapiens
gaaaacatgaggtcaacagagaaagtcaataaacccaaaaggcaatgcctttaaaagatcaataaaatcgataaatccatagccaggctaaccaagtgaaaaagggagaagacacaaattataaatattgattccatagacattaaaaagataataaaagaacattacaaacaaatgtatactgacacttttggtaatttagaagaaatgaatcaattccttgaaagacataaaccatcaaaacttatggaaaagaaatacattacctaaatagatctatatttatttaaaaaatagataaatcattaataatctttcaaaaaagaaagcgtctcgcccagattctttcactaatgaattccaccaagcatttaaggaagaaat

SEQ ID NO: 83461 - DNA, 488 bp, Homo sapiens
  misc_feature (1)...(488): n = a,t,c or g
nactggaganaccctgggcagtgtgcgtggcattcaaacaggacttattaggggaggaggtaaagattggttatttgggttattccgggcacataggtcacaggcctgagttacctgctttaccattttaagtaagtcttttcctacaaaaagcctgggcattaattaaaacagggaatctctttccagatgagtagagagagtcatgcaaatacttagctattttccactgattagcacctggtagtaacagcttgttgtcattgataagccagccagaaggatcttgaattaaaccctgacctttagcccattcttgttcctcttcagtatacccaggttctgtcattaccatggctgagggcactaacatgctgacaggtccaactagctcctttaatgctgctgtcttagcagctgcatctgcaaaggagtttcccttagccgcactagagtctcctttttgatgtcctctgcaatggattaga

SEQ ID NO: 83462 - DNA, 445 bp, Homo sapiens
  misc_feature (1)...(445): n = a,t,c or g
cttcgccactgangatcataggccgngcggnggaattcggaaaagaaaagaaaccttctgggcctggagttttcttctctacattgtaaggttttaaactatgaattaaattttctttagtacatttaggactatttctctgatctgtttcttctggactgagtttaggtaatttgtgtctttcaagaaattggtccatttcctctaagttgtcaaacttatgagcatagagttgtttggaatattctcttattatccttttaatatctggagggtctgaagtgacatcccctctttcattcctgatattagcaatttatggcttctctctttcttttccttggtaaatctgtcaaaaagtttatgaattctgtacaccttttcaaagcttttggatttattgattgctctctatttttttctgtttttaatttcattgaattct

SEQ ID NO: 83463 - DNA, 400 bp, Homo sapiens
agtgtggaaaaatagggaacggattcttatcttttcttgcagaggaataaattttacaacagcacattgaacgcagcacttcagaatgttgacgcctaattctaaagcatgatactaatatggctcgcagcgataatctatctgtgataaacgagggttgtgaaatgaacaactggcttagatgcatctattttgaagctaagaaaaaacaggatctctatatgtggctttcaaattcacctgacggaccatctgctaaattccttgttcaaaatattcataccctcgctgaactgaagatgactggaaactgtttgaaaggttctcggccccttttgtcttttgaccctgcttttgatgaattaccacattatgctttgttaaaagaactcttacttca

SEQ ID NO: 83464 - DNA, 391 bp, Homo sapiens
ttatttaaagaaatggtggctgaaaatgtcccaaatctgggggaacatatgaacacctaggtgcatgaagctcaaagattcccaaatggcttcaacctgacgaagactttaccaagacagaataaaatcagacagtctaaaatcaaacataaagagagaattttcaaagaaacaaaacaggctagttacgtactggggaaactaccataagtctatcttttgtcacaggtgaggagagagtggaataatacattcaacatgttggaaaagaatactttccctggcaaagatgtccttcagaaataacagacatcacctggagggagttcatcaccattagacatgtcttacaagaaatgctacagaaagttcttcaacctgattcaagggc

SEQ ID NO: 83465 - DNA, 398 bp, Homo sapiens
  misc_feature (1)...(398): n = a,t,c or g
cgttcctcagaataaatccaacaaaaaatatatatgatagctatgggaaaatgattaaaacattcctgagatatgtctaggaaaatctaagtggagagatattccacattgattgattgaagacttgatattaaaaagatttgtagattcaatgctctaccagtcaaaattccaacatattttttgttgactttgatgaactgatttaaaagttactcagaaatgcaaagggccaaatacagtcaaggtattcttgaaaaaggaggatttgcactatcaactgttgctatattataaagctaatgtaaaaagacgctgtgatattggcacaggaatagacaaatagataaccgaaatagagtacagcccagaagcagaaatgtacatttaaaagcatn

SEQ ID NO: 83466 - DNA, 449 bp, Homo sapiens
  misc_feature (1)...(449): n = a,t,c or g
gaattgataccctccgaannncncnattgacgatcatctatccgtgtggtggaattccttgcattatctctgggataaatcctacttgcttatggtgaattattcttttaaggtgctgttgaatttagtttgttagtattttgttgtatttttgtatctatgttcatcagggatgttggcctgtaattttgttttcttgtgatgtccttgtttggctttggtattagggtaatgctggccacatgaaataaatttggaaatattccctcttcaaaattttggaagagtttgagaataattggtattaattctttaaatgttaggtagaattcagcagtacagtcatcaggtatttggctttactttgataggaggcattttattactgactcaatctccttaattattattggtctgttcagattttctatttctttataattcagtgt

SEQ ID NO: 83467 - DNA, 627 bp, Homo sapiens
ttgagaatcgtagtccgtgtggtggaattcaaacacctgtacggagagctacaaatcggatgcccagactgtaacattcggtggtctacactaacacatctccaacacttatattcaggaaggattgctctgctaagtagtatgtcaaccaaaccaaattgtaaggcaagaacatgcaatcctttaaattttactatcttaaagccagagctacctttttggtctacaggacagacagcactattatgagttgatagacaaggagtaggccttggagttccactactaattgtcaaaaagactagaaggattcaaatgtgtccaaccccacaattccgggtccataagtcattctataaacattttgatcagtcagtgcctgagctttcccatcaaccaaaaatttacttgctcaactagctaaaaacatatctggcagcttggaaatttccttatgctatgtatgcggagaaactaatataggggaccagtggccatgagaggcaaaaaaagtaatgccacaagataactttacttcgcctaaccctgccagtgaaccaacagcctcaaccagtgtttggttgtttaaaacctccgtaattgaaagtactgtatcgcctgagtaaa

SEQ ID NO: 83468 - DNA, 492 bp, Homo sapiens
  misc_feature (1)...(492): n = a,t,c or g
cattgaaaactgangnacgtgncgaggaancccacgaacacacgctccgagaaacacactcagctcacacgcactgagaagcacacttaagataaacactcaggtcacacacacaagcacactaagaaacattcagttcacacacactcagaaacacacgcactcagaagcacacaagataaacactcagctcacacacagaagcacactcagaaacattcagtgcacacacactcagaaacacacgcactcagaggcacacaagataaacactcagctcacacacagaagcacactcaaacattcagttcacacacactcagaaacacactccgagaaacagttcacactcgctcagaagcacactcagctcacacacacaagcacactcggagaaacattcagctcacacacactcagaaacatactctgagaaacacaatcagctcacacccactcaagcacactcaagataaacagctcacacaagca

SEQ ID NO: 83469 - DNA, 436 bp, Homo sapiens
ttgatgacatctagtccatgcggtggaattcctaaagtcacgatccagcagactgggctcagctttggcctcatcctatcattccccacccctgtgagctggtagtctgagttttattaatcaacaaagcgttttgcctttgtccatgcactcctgttgcctagaaagctctctgttctctccgtgtgaaaacctaagtctttcaaagctgaactcataaactgcttttgtcagcataatctctctaaacccaatttcccagatcatttgtttttttaaaatatgagaaacttcccagttcagtttctgatcacaaactctgttgctgatgtccttccttccttcagcacttcttaccttttatcttcccctattcctctcaccctgttgcctcctgtgctagtaatgtattcaaacttattgcctcccttactag

SEQ ID NO: 83470 - DNA, 363 bp, Homo sapiens
aaaacccttgggatgcagcaaaagcaccactgagagggaagtttatagcagtaaatgcctacattaaaaaaataagaaagatctcaaacagcctaattgtacacctcaaactagaaaaagaataagctaatcccaaagtgagcagaaggaggaaaataatttgcaacagaataaatgaaaacagaatagaaaaaaacaatagaaaaaaatcaaagaaagagttgggtttttgaaaagataagcaaaattgacaaacccttggctagactaagaaaaacagaagacacaaaatcagatatgaaagaggagacattacaattgataccatgaaaataaaaagtatcgtgagactattatgagcag

SEQ ID NO: 83471 - DNA, 380 bp, Homo sapiens
ctagattctcttttatcttctaggagttttatagttttgtgtttgatatgtaggtgtgtgatccattttgacttaagttttgggacgggtataaaatctgtgcctagattaatttttttgcatgtgagtatccaggtgtttcagaattatttgttgaaaaaactatctttgctccattatattgcctttgttcctttatcaaagatcagttgactgtatttatatgggtctatttctgggctctctgttctgtttcactgatctttttgtctgttcttttaccaataccacactgtctagattattgtaactttagataagtcttgaagtcagacactgtcagtctcccacctttgttcttcaatattgcgttgcgtatt

SEQ ID NO: 83472 - DNA, 346 bp, Homo sapiens
aatgaatgagtctattttatcaagttgtcaatgtatgcagagttattcataatattcctttatccttttaatatctgtaaggtatatggggatatcccctatttcattcctgatattgttaatttatgtttcctctctctttttcttagctacacgtttgtcaatgttactgatttttcaaagaaccagatttttgtttcattgaatttcttcactggttttcaatttcatttatttctgcctccatctttatatcaattttctgcttattttgagtttaatttgctctctccagattcttgaggtagaagcttagattactgacttgagactttcctcttttctg

SEQ ID NO: 83473 - DNA, 482 bp, Homo sapiens
gtttaatggaattgggtaggcctagtgctgggacattaaaagggcatctttcagtttttagaagcgggagttaatgggcaagctgggtccaaatgttctaggatggacccacgtgatgccgtgcagagtggtttggtcaacaggccaaagttaatgatccacagctggaagtacccaacaaggcccaaaaaggaagggtccttcttggtgtggggaaggggcacatcctgtattagctccttccatcgggctggcatggctcaagaattaggggttagggtgagtccaaggttagtgacttgggtttgggctacttgagcctttgtaggtaaaacctgatatccctggccatagaggaacctttagaagttgggtgatgtgttgatggatagatcaaaggagggactacacataaggaggtcattgatgtattgaaggaggctgctaggagcaaggggaagctccgattaattccctttggg

SEQ ID NO: 83474 - DNA, 372 bp, Homo sapiens
gacctttcagaaagaaaaatcaaaacagtattgaggacactcaaagaaattaaagataacacagagaaggaattcagaattctatcagataaatttaacgaagagactgaaataactgaaaagaatcaagcagcaatattggagctgaaaaatgcaacagacacagtgaagaatgcatcagagtctcttaatagcagaattgatcaagcggaagaaagaattagtgagcttgcagacaggctatttgaaaatacacagttgaaggagacaaagaaaagaataaaaaagaatgaagcatgcctacaagatccagaaaacagcctcaaaatggcaaatctaaaagttattggccttaaagaggaggtaaagaaa

SEQ ID NO: 83475 - DNA, 370 bp, Homo sapiens
  misc_feature (1)...(370): n = a,t,c or g
gggaaaagcattcagtttttcactatgatgcannttnnntgtagattcatcatagacattgtttatcatgctgaagaacttcccttggattcttatgttgctgagagaatttcttctttgaaacatcaggagtaaattttatcaagtgcctgtatctgttgggatgatcctatgggacttctcttttagttcgctttatggtaaataatgatgatgtttcaatgttaagccaaccttccatttctggaataaaccccatttgtttatgatgtattacctttttattataccattggatacaatttactaaagtctcatttagaatttattataaagactcttattttttagaccagttgtatgttcctgt

SEQ ID NO: 83476 - DNA, 348 bp, Homo sapiens
  misc_feature (1)...(348): n = a,t,c or g
ctaaaatttccctctaggaattgcttttcttgcatattataagttttggtattttgtgtttccatttttgtttttctgaaaataacttttaatttcttccttgaaccactgattgatatgttatttaatttccatgtgcttgtgaatattctaaaattcctcctataactgatttctagtttcataccattatggtcagaaaagatattcaatattacttcaatcttttaaaatttcttaagacttcttttgtgacctaacgtatgatttactctggagaatattctgtgtgcacttttgaaaaacgtgtattccactgctgttgaacagaagactgcatcaatgtcn

SEQ ID NO: 83477 - DNA, 338 bp, Homo sapiens
cattcataacgtgcatatgtgaaattgaacttttatccagaatacataaataacctacaaatgaataagaaaaaggacaaacaatccaattaaactggacaaaaaatttgaacactttaaaaatgaagatatatgaataaccagtaagcacacaaaaatgtgggtatcatcattagccatgaaagaaatgctcactaaaactacaatggaatctctacttcatgcctagtagaatggcgaaaattaacgcagcaacaaactcaaatactaacaagaactggggcagaacaagaccctctcgtatcttgttagtggagtataaaatgacccaacctttc

SEQ ID NO: 83478 - DNA, 373 bp, Homo sapiens
  misc_feature (1)...(373): n = a,t,c or g
ggtgaataaggtggagacagacgcggatgaggatacagatggagaagatggaggtagacgcgggtgaggatacaggtggagaagatggaggtagacgcgggtgaggatacaggtggagaagatggaggtagacgcgggtgaggatacaggtggagaagatggaggtagacgcggatgaggatacaggtggagaagatggaggtagacgcggatgaggatacaggtggagaagatggaggtagacgcggatgaggatacaggtggagaagatggggttagacgcggatgaggacacaggtggagaagaggaagttagacgcggatgaggatatagatagatgcatagggtggggatctaacccggtacgggtgn

SEQ ID NO: 83479 - DNA, 903 bp, Homo sapiens
ttgtggcgggcgcctgtagtcccagctactcatgaggctgatgcgggagagtggcatgagcccgggaggtggagcttgcagtgagctgagattgcgccactgccctccagcctggacaacagagtgaggctccgtcttaaaggaaaaaaatttctggaatgatgtccaataaatcagagagagggactagaagactaatgaggacagaagcttttattcttaacacctatattttgctaccatttatattgtcatcatatgcatataacattttaacatttaaaaactagtttaaacagaaatggttgccctggaatgtggcctgtgttctttcaagggaggccagcagtttctacagtggctgagatggtaccttcatctcacacacctacgcaggagtgcatttgtgctttgatgtggttgtcccttgaagaaggaagcagttctctttttcttttttcccttttccattataggatcagtcacttcttggggcattagtagtctcatttccagcggcatcttcccttggcaaaaggaatcccagataggacctcatctttctaaacaaatgctgttttgggtcctaaccatcccatgtttggtttgaatatgtttaagttgcctggaattatcaacaaaagaattaaatttattgtaggtcagggcatcttttgactcattgtataaaacattcactttaaatgtataccgaaatgtcctttaggccgcgcgcagtggctcatgcctgtaatcccagcactttgggaggccaaggcaggtggatcacctgaggtcaggagttcaagaccagcctgcccaacatggggaaatcccgtctctactaaaaatataaaaattacccgggcatggtggcgggtgcctgtaatcccaactactagg

SEQ ID NO: 83480 - DNA, 442 bp, Homo sapiens
gaaaaattaatcgctatcctatatgccagcaatgaacagttggaatttgaaattgaaaacaacactatttacatttaacccccccacccaccaaattacataggtataaatctaacaagatatgtacaaggtctaggtaaggaaaacgacaaaactgtaacgaaatcaaagacttaaattaatggagagatgttccatgttcatggatgggaaaactccatgtttttaagatgtcagttcttcccactttgacctgtcctaatcaaattcccagcaagttaatttctagatatcaccaaactgattctgcatttatatggaaaggcaaaagacccagaatagcctcgcagtattgaaccaagttggagaactgacactagcccactttatgacttactgtaaaactacggtaatcaagacagtgtggtgttgctgaaagaat

SEQ ID NO: 83481 - DNA, 445 bp, Homo sapiens
ggaattcacctagtagatgggcaaaaatccaaatgtttgagcacacattctgtgggtgaggctgtggaaacgtatgttcacatacattgctcttggatatgcagattacgaccgctcctgtggagagcagttagggaatatctttcaaaattaaaaaatgcagagttaagttttgatccaggagtctcactcctgagaatttatgctatagatatgcctacaagcatttgagatgaaaaagaagcattgctatttgcttttcttgcttttcatgaataacattgtaaaagtagaatatgggcagtgattcaagcattcatctttgggactggttaaggaaactatgatgctttcacagaatgaaattctatgcagctgtttaaaacaaaccaagacaccttctttcacatatatggaaagatgtccaaaatatactgttaaagtt

SEQ ID NO: 83482 - DNA, 654 bp, Homo sapiens
tttcgtggcaggcggacgcgcggacccctcggcgcagtgcggccccgaaggcggtagggcgagaaagagctgggacccccccgcaacttcgggatcggctgggtgaggctgggcaggcctgatgctcaggggttcgtgccgggaagttcaggtcctcggacaacctctctccagctctccgccgccggtacccacggcccagtctccacctggggaaacccccttggcgtggcttgtttcgttacaagttatcctggtagagtgggcatgaaggcctcggaggcagtgagtaaatctcatacttctgttcttggtggaatcctggatcccgggggctggggacgtggaaatggggagaaacaaagatagaacaaaccccaagttttgtcttgggaagcctgcaggtaaggcgtttagatctgagaactggagggagagccccaggccgtgacagcctgggcaccgtttgggctaggttgtgtgtgggctgtgacgatgctgggaaactctggtgctgatatgagcgaggtatcaggtatctggtgctgataccagaaactggcttccacgtttcttcgtggtatggggccaccctgggaagccagtttctggcaaccccggggtggacttcctggaacattttggcccacccgg

SEQ ID NO: 83483 - DNA, 1370 bp, Homo sapiens
ttttttttttgtggaaaagaggtacctttatttgaacagaacaagcaccctggccccagggcaaccacttccccaggtgcacagccagggccctcctgtctgcaggagaattcacagctggtgtgggactcagcccctaggccattcacagctttgtctggctctgtacattcattcagcacggggcaggggggccatgccaccagcctgggggctcaccaggcccctggatgcacacaactcaggcagggcacctgtgggaaggcgcatatcctggcggcagcagcacgtggcaccaggtgccaggccagttaggtggatcctggggccccagggagcgcagcttgctgggcagtttcataaaatgcagcccctgcccacacccacctggcttcaggctttggatgtctccaaaccaaaaacctcccactgaaaatccaggtgtgatgggccgggtgtggcggctcatgcctggtgaatccccgctaatttgggaagctgagggcaaggaggatcacttgagtccagaaggtcaaggtcacagtgagctgtggcaccactgcactctagcctgggcaacacagtgaaaccctgacccaaaaaccaaaaaccaaaacaaaacagatccaggcatggccaagcgattcatggctgggcagggccagtcccgtcccgctgcacgctgaccaccgtgccctgcgctcacgcctgcaagccactcagctggaacctggcctcctcggatatgccgaactgttccagggggtccttgcccgtcaccttccggatttcgttcctgtagaagatgaggcttctccgcatgaactcgtagctggcccgacgcagagcctccatccactcctgacactgctcctcgctgctgcactcaaagtgatacttcctctcagggtcctcaatgaagctgatggagaaggtgccgggctcttcccggacgactctgcagcgctccagcagcagggctccgacgggctcggcctcgtctgtccgaaagtagaagaggaaattcaccaccagcttcaccagccgccgcttcagcacgctgcccttcttggggcccctcatgcccagctcggccgccatctcggccggctgccgggacagagcctgcagctccttctcgttgtaccgcatggctccgcggggaacgggaacccgggccgcgccctcccggccgccgtccccgctcaggcagagggcccgtctcatttgccccggaagtgctttctttgcccgccgttcgccaaacgaagtcgtggaggtggcgaaacgaggaggagataacgcggccttgggctctggtgaggagtagaggcggttgagggcggcggccgacgcggaccgggggttcc

SEQ ID NO: 83484 - DNA, 411 bp, Homo sapiens
cgatttatggcttatgttctcattctcttgacattgtcttttgcagagcagaagttttaaattttaatgaagtccagattattatttatctttttcatggatcatgccttttgtgttttttaaaaatatcatcgctgtaactaaggtcatctagattttctcctttattatcttctaggagttttatagttctgtattttacattcattcagtctgtgatccattttgagttaattcttgtaaaaggtgtaaggtctgtgtctagaatcgttttcttgttgcatgtggatgtccagttgttccaacaccctttaacaagtctgtatcatgtgtccattgtattgcctttgttccctagtcaaatgtcagttgacttttatatgggtctgtttctgggctctctattctgct

SEQ ID NO: 83485 - DNA, 2355 bp, Homo sapiens
attaaaaatgatcgtagatcctgctgacagtagctacatgccgtccctggttgtagtgtcaggtaattcagttagtttacctaaaaagaagtaccttctataataaagacgcctttgtttgattctttacccattttttcctaggtggaaattccctgaataaccttattgaactaaagacaatcaatattaacccttctgacaccacagtgccccttctgaatgactgcacagagtatcacaggtatattgaaattgctataaagcagtgcaggagctcaggaatcgattgtaaaatccatggtctcatcctgctgggacggatccgtgcagaagaggaagatttggctgcagttcctttcttagcttcggataatgaagaggaggaggatgagaaaggcaacagcggaagcctcattagaaagaaggctgctgggctggaatcagcagctacgataagaaccaaggtgtttgtgtggggcctgaatgacaaggaccagctgggcgggctgaaaggctccaagataaaggttccttcgttctctgagacactgtcagctttgaatgtggtacaggtggctggtggatctaaaagtttgtttgcagtgactgtggaagggaaggtgtatgcctgtggagaagccacgaatggccggctggggctgggcatttccagcgggacggtgcccatcccacggcagatcacagctctcagcagctacgtggtcaagaaggtggctgttcactcaggtggccggcacgcgacggctttaactgtcgatggaaaagtgttttcgtggggcgaaagtgacgatggaaaacttggacacttcagcagaatgaactgtgacaaaccaaggctgatcgaggccctgaaaaccaagcgtatccgggatatcgcctgtgggagctcgcacagcgcagccctcacatccagcggagaactgtacacctggggcctcggcgagtacggccggctgggacatggggataatacgacacagctaaagcccaaaatggtgaaagtccttctcggtcacagagtaatccaggttgcatgtgggagtagagacgcgcagaccctggctctgaccgatgaaggtttggtattttcctggggtgatggtgactttggaaaattgggccggggcggaagtgaaggctgtaacattccccagaacattgagagactaaatggacagggggtgtgccagattgagtgtggagctcagttctccctggcgctcaccaagtctggagtggtgtggacatggggaaagggggattacttcagattgggccacggctctgacgtgcacgtgcggaaaccacaggtggtggaagggctgagagggaagaagatcgtgcatgtggctgtcggggccctgcactgcctggcggtcacggactcggggcaggtgtatgcttggggtgacaacgaccacggccagcagggcaatggcacgaccacggttaacaggaagcccacactcgtgcaaggcttagaaggccagaagatcacacgcgtggcttgtgggtcgtcccacagtgtggcgtggacaactgtggatgtggccacgccctctgtccacgagcccgtcctcttccagactgcaagagaccctttaggtgcttcctatttaggcgtgccttcagatgctgattcttctgctgccagtaataaaataagtggtgcaagtaattctaagccaaatcgcccttctcttgccaagattctcttgtcattggatggaaatctggccaaacagcaggccttatcgcatattcttacagcattgcaaatcatgtatgccagagatgctgttgtcggggccctgatgccggccgccatgatcgccccggtggagtgcccctcgttctcctcggcggccccttccgacgcatctgcgatggctagtcccatgaatggagaagaatgcatgctggctgttgatatcgaagacagactgagtccaaatccatggcaagaaaagagagagattgtttcctctgaggacgcagtgaccccctctgcagtgactccgtcggccccctcagcctccgctgggccatttatcacagtgacggatgacccgggagctgcaagcatctttgcagaaaccatgaccaaaaccaaagaggatgttgaaagccaaaataaagcagcaggtccggagcctcaggccttggatgagttcaccagtctgctgattgcggatgacactcgtgtggtggtagacctgctcaagctgtcagtgtgcagccgggccggggacaggggcagggatgtgctctccgcggtgctttccggcatggggaccgcctacccacaggtggcagatatgctgttggagc

SEQ ID NO: 83486 - DNA, 380 bp, Homo sapiens
tctatccttaggcaaaacattctattttaattattatagttttgaatatgttttcatgtctgatagcataagtcctccagctttactctttttcaggttgttcttggatattcatggccttttgcatttgtatatacattttacaagtagcctatcaatttatatttttaaaatactagctagaattttgattgtgatgatgctgatcatcattgcaatcagcatattgcatgatgctaatgcaatagggataattgtcatttttacaatattgagctctctgctaatagttctcaaacattgaatagccttccatttaattactttgtctttaatatgtctcaccgattttttaaaagaaagctctaccttctagctcg

SEQ ID NO: 83487 - DNA, 400 bp, Homo sapiens
tcaatctgtagatgactttgggtagtgtggacattttcacaatattgacccttctgatctatgaaggtaggatagatttccatgtatttgtatcttcttcaatttctttcatcattgttttacggtttttagtgtacagatctttcacctccttggttaaatttatttcaaggggttttattccttttgatgtttgtaaataggatcattttctaaatttctcttttacataattcattgttagggtacataaatggaattgatttttgtatgttgattttgtattctgcaaatttaataaatttgtttattagttctaatacttttttactagagtctttagggttttatataatataagatcgtatcatctgcaaacagagatagttctactttaata

SEQ ID NO: 83488 - DNA, 456 bp, Homo sapiens
  misc_feature (1)...(456): n = a,t,c or g
cttatgaagctaatgangctgtgcgccggcccnnnntncccggtttacccacgcgaccggcttggagccggcagctcgcctgccaattccggctgtttaacgcttggcagcttttaggagggggcgggcccgggggtggtggccccaagagcggttgccgcggggaccgggcagtgacgcggcccaagggcggaagtgagaaagttgtctgcgtctcgaggacttgacgttcctgacgaagcaggagatcctgctgtaagtgctgccttgaaccctgcctccgaccccgggatcctctatagacagcttcgggggcgctgtcccgagggaggggcgggggctggcctgaggtctgcaaaggagcgggagctggaggccgggagacctatcccgggctgcgccctcctgccggcacgccctccccgccctctgctgaggccccagcgtggcaccgcg

SEQ ID NO: 83489 - DNA, 383 bp, Homo sapiens
  misc_feature (1)...(383): n = a,t,c or g
ataactttgcatgattttcattttttagaatttgttacagtatatttaatggcccagcatggggtctgcttgttgaatgttccatgtgaacttgagtggaatgtgtattctgctgttgttgaatggagtattctataaatatcagttagatcaaattgattaacattgttgtttagtttaactctatccttacagacattctgcctgctgggtttatcaaggttgttgaccggagtgttgacgtctctaagagngaatttctttcctcctttctgttctgtagntttcacctcatttattttgatcctctcgttaggtatatacgtgtttaggattggtatgtcttcttttcattcttgttattatacaacgcccctctttaa

SEQ ID NO: 83490 - DNA, 394 bp, Homo sapiens
aatagatcgtatactgagccataaaacatgtctctatacatttcaaaggatggatgtcatacatagaatattttctgaccacaaccaaattaaattagaaatcaatttttaaaaatctcaggggatttctcaaatatttggaaattaagtagtatactttaaataatccatgaggcaaagaagaaaattacagaatattttgcgctgaatgattaaaaatgcagcatattgaaatgcagccaatgcggcttaaattgaaattgatggctttaaatgcttattttagaaaataaagttttaaaaccaatgatgtcatcttagaagcttaaaaagagcaaattacaaccaagaaacatgaagaaatgaaaaataagagctgaaatcaataaaatag

SEQ ID NO: 83491 - DNA, 405 bp, Homo sapiens
ggaaattaaaaaatactttgagattaatgacaatggaaacacaatgtatcaaaacctacagtatgcggcaaagtcagttctaagagagaagtttatagcaataaatgcctacattaaaaaaggaaaaagatctaaataagtagactaacattatgccccaaggagctaaagaaagaacaaactaaacccaaagtgagcaaaaggaaggaaataatgaagatcagaacagaagcaaataaaatgtagtatagaaaaactatagaaaatataaataaaatcaaaagttggttctttgaaaaaataaaatctacaaactcttagctagattcactaaaaaaagcagactcaaataaataaaatcagaaatgaaagtggagacattgcaatagatacctcagaaataag

SEQ ID NO: 83492 - DNA, 396 bp, Homo sapiens
caagttcccagctttactggaatctctttgtatatccccttccagttctcagggcccctctccttcccaatcagtacccttactttaacaaaagaggtactacatggctgcaaattcaatttgccttgtaattcagccacccacaaaattagactttggatttagtttccctgtggctataggagattagggtttctttaagtagtcattggagcttccagattcttaatgtgagccttgagctggaaatttgaagtcccgagctcatcattttctttccttatgttctccagcccaatgagaagcatgtcctccttattttcattaaaaggaactacagcctcaaatgcttagtaacctagagcctagctttctataaaacttgattacaggtcg

SEQ ID NO: 83493 - DNA, 389 bp, Homo sapiens
cccacgcgtccgcccacgcgtccgctgattagtgatgtggagaaagtcaaggaaacaatgtatgaacaaaacagaaagattaataaagagagaaaaagcctaaagcaaaaccaaaaggcaattctggagctgtgaagtataataactgaaataaaaagtttgccagtaagattcaaagacagctttgagcagactgaagaaggaatctgtgaacttgaagacaggacaatggaaattgtcaattctggagaaaacagaaaaaaatatcaaagaaaagtgagcagagtgtaaagaatctgtgggatatcatcaagcagacaaatatacacgtaatgaaagtctcggaaggagaagaaggaaagagaaaagggaagctagattattcaaag

SEQ ID NO: 83494 - DNA, 408 bp, Homo sapiens
cccacgcgtccgcagacacgtcctcctcacacttttcatcatgtttggagcctccaggcaggaggcggcagcgatggacatgagctgacccaacacaggcactgactatgtcacagccctcaagacacaccatgggcccagaggcaggtttgatacacaacaccgacgacgcaggcggcggccccagcgactcgcaactgccttcagtaaagctgacactgtccacctaccaggaggcaaccagtcccaaggtcccccacctcgtccaggaaagccagaaggaccacccccacaaggaggaaaccaagcccaagggcccccacctcgtccgggaaagccagaaggaccacccccacaaggaggaaaccagtcccaaggtcccccacctcgtccgagaaagccagaacg

SEQ ID NO: 83495 - DNA, 405 bp, Homo sapiens
  misc_feature (1)...(405): n = a,t,c or g
ccgaaacccagctgcatgaaacaggacaagacattaaaagactctgagccatttttcaagcaacagaagttgaatgtcccaatatagaaagcagaagtgaaacgcatagtttatttaaatctgaaactgaaagattagtgaaaggaatgaaagagcaagaattggagattaatcctgaatcaaggaccagagggggaaagaaagaattggagaataaatttataagtaaaaataatatgactttaaacagatggatcagctgtccatcaatggggttggtcaggaagatacagaggtgcagggccttcaggctagaacagcttcagcctctgacacccagggcgttgctcaccttcagcagcaactgcaagcacctgctttggacagagaacaaatataggctgn

SEQ ID NO: 83496 - DNA, 410 bp, Homo sapiens
ggatttcgtcaaggaggagccccaaagaccagatgatccggttgtgctggagatggaagaccttgaccgtctggccattcggctaggagatggactggatcccgactcggtgtctctagcctcagtcacagctctcaccactaatgtctccaacaagcgatctaagccagacattaagatggagccaagtgctgggcggcccatggattaccaggtcagcatcacggtgatcgaggcccggcagctggtgggcttgaacatggaccctgtggtgtgcgtggaggtgggtgacgacaagaagtacacatccatgaaggagtccactaactgcccctattacaacgagtacttcgtcttcgacttccatgtctctccggatgtcatgtttgacaagatcatcaagatttcgg

SEQ ID NO: 83497 - DNA, 2163 bp, Homo sapiens
ttgtacatctctcctagacaagtccaaggaactactaacgagaagatttcaggaagaggcctacagcaattgcttggtgcttgggttcatttgcggaatcttggcaacaggtctacagagaagcagttccacggcaaaagagcttgctatgggaacgaattgggcctgaccagtgatgacgaggactacgtgccccctgacgacgacttcaacacaatgggatactgtgaagagatccctgtggaagagaatgaagtgaatgacagctcatccaagagcagcatagagaccaagccagatgccagtccacagctgcccaagaaatccatcaccaacagcacactaacatccacagggagcagtgaggcccccgtctcgtttgatgggctgcccctggaggaagaggcgctggagggagacgggtccctggaaaaggagctcgccattgacaacatcatgggggagaagattgagatgatcgctcctgtgaactccccttcactggacttcaatgacaatgaggacatccccactgagctcagtgactcttccgacacacacgatgaaggagaggtccaggccttctatgaggacctgagtggccggcagtacgtgaatgaagtcttcaacttcagcgtggacaagctctatgacctcctcttcaccaactcgcccttccagcgggatttcatggagcagcggcgcttctctgatatcatcttccatccatggaaaaaggaggagaatggaaaccagagccgagtgattccctacaccatcacccttaccaaccctctggaacacaaaactgccactgtcagggagacacagaccatgtacaaggcgagccaggagagtgaatgttacgtgatagatgccgaagtcctcacccacgacgtgccctaccatgactacttttacacaatcaatcgctacacgctcacccgtgtggctcggaacaagagccgactcagggtctccacagagctgcgctatcgaaaacagccctgggggttagtgaaaacgttcatcgagaagaacttctggagtgggctggaggactacttccgccatttagagagcgagctggccaaaacggagagcacttatttggctgagatgcacagacaatctcccaaagagaaggccagcaagactacaacggtgcggaggaggaagcgtccccatgcccacctgcgagtccctcacctggaagaggtgatgagcccggtcaccacgcccacagatgaggatgtgggccacaggatcaaacatgtggcaggttccacacagacgcggcatatcccggaggacacccccaacggtttccacctgcagagcgtgtccaagctgctgctggttatcagctgtgttctggtgctgctggtcatccttaacatgatgctcttctacaaactctggatgttggaatacaccacgcagaccctcactgcctggcagggtctaaggctccaagaaaggttaccccagtctcagacagaatgggcccagctcttagagtcccaacaaaagtaccacgatactgagctccaaaaatggagggaaatcatcaaatcctcagtgatgctccttgaccaagatgaagggactcgctcatcaaccttcagaacggcatcaggtcccgcgactacacgtcggaaagtgaagaaaagaggaatcgctatcattgacaaggcaggaacagggtggctgcaagaggcctgtgcaatacatgtacatagaccatataaatatatatatataaatatatatatatacagaatataaatatatatattatatacagattttaaaaaagagataatgcctatgtaccagggagaaggagcgggccctcccgcgccctgtgctggccggagcagcgttttcttatggtggagcagctgaggagggcaggaaccgcctctcagcaccgacctcccctgatctccctcctcccaccctctgttccccaccccttcccttgctggccattcttggcttttagaagggaaatgttgagccaaagttatgcctgcgaagaccctaaggtctcaaaaagaagtcttaagaccggcattgcttaaggtgcttcattccctaatccccttttgatttgtttccaaaataaaagagaatcttttcttccctacaaaaaaaaaa

SEQ ID NO: 83498 - DNA, 447 bp, Homo sapiens
  misc_feature (1)...(447): n = a,t,c or g
tttcgtgggggctgttggtgctgacttgcgggaccgcctggatgaggacccggcgtgagaggagggtgcggnggtcggggcagggaccggagtctaggggactgagggaccaagaggaacagagactcangcccgggactggggcaccggggtgggagatggaaatggaaaacctgggccaggactgaacccagccaggcctgggactgggttctggaaataaaagtgcggatggcggtttgggggcccagggccagacacgcaggcctatggattggggaccaatggatggagacccaggtccaggtctcggggacccagggacagagacccaggcccaagactggaggacatctanggctctgtgcttgaacctgatttgaggttcccataatggggccagggcatgtttgggggtgaagcagacgtcctggacccgagagagcn

SEQ ID NO: 83499 - DNA, 419 bp, Homo sapiens
  misc_feature (1)...(419): n = a,t,c or g
natcgtggcggcggcagcggaggcgcgagctgcccgataatggcggcctgcagagcccatgagagggagaagcggcagcgtctaccctgagaaacctcgaccttgaagatggtgagtagccagccaaagtacgatctaatacgggaggtaggccgaggtagttacggtgttgtgtatgaagcagtcatcagaaagacctctgcacgggtggcagtgaagaaaattcgatgtcacgcacctgaaaatgttgaactagcccttcgtgagttctgggcactaagcagtatcaagagccaacatccaaatgtgattcacttggaggaatgcatcctacaaaaggatgggatggtgcaaaagatgtcccacggctctaattcttccctttatttacagcttgtagaaacttcattaagaggaga

SEQ ID NO: 83500 - DNA, 460 bp, Homo sapiens
  misc_feature (1)...(460): n = a,t,c or g
actgaaacccttcacaagcggcaccggnnccgaactcccgggtcgacgatttcgtctggcagggatgtccgtggccttagggctggagcctgagccttgttgggctaggacctggggatgatgggggctgcagctctcctgcttcaagacccccaatggtggggaagaaacaggtggctgcatgcctgggccattctcctgggccagctcaaaggaagaggggaaaggaggcggggtcagagccccctcccgagtgggagagggtgcagagggaggcagcggatctgagtggtcccctggctcagggccaaaatgagcaaacaggtccaagggagttttgccttccatgcctttttctttccaggtgcccccactgggaggagcaagagagtggggagttcctgggagggaaggttcagggctcccaaaaccattctgcattcgatgaggccccacaggc

SEQ ID NO: 83501 - DNA, 466 bp, Homo sapiens
  misc_feature (1)...(466): n = a,t,c or g
attagaaacgttgacagcgtcaccggnccggaannacgggtcgacgatttcgtgtccagggcacggcagaccccaccactggacttcccgcccctggctctgcctgcctctcgcttgctctgcagagcccccaggggcccctttgcactttcagccttggctccagcactttctacccaagaccctggtctctctgtgtcccatctgtcccctcacccacagcgttcctcagccctgccgtctctggcccctgccggatattctgacctcccagacacaagccccaaagccatcccagcaccacagccacaagcccaggggacgcttccatgaccttcctctgttctagggaaggagtggaggggtggcaaggggagtcccacccaggcctcacccggggggccgcatccacgccgcatccaggcaggtcccacgctgtgaccactcctgccccgggctgtctcgt

SEQ ID NO: 83502 - DNA, 475 bp, Homo sapiens
ttttttttttttgcatgtggaagtccagttgttttggtaccatctgtcaaaaaaactttttttgggtcattttgttgcctttgtttttttgtaaaaaatcagttgactgcatttgcatgggtctatttctgagctctctgttccattgcattgatctgtttgttcttctcagcaatcccacactgtcttggttcctgtagctctgtagtaggccttgcagtcagttaccgcccctgttctcacttcagtgttctcttcaatagtgttttgactattctaggttttttccctctccatatacattttagagtcagtttgtcaatagtttacaaaataacttgctgagactttgattgggattacattgaatctgtagctcaagttggaaagatcttttatttctttcatcagaattttgtagttttcatcatatatagatcttgtacatatttttgttgttttatacctaaggatt

SEQ ID NO: 83503 - DNA, 471 bp, Homo sapiens
  misc_feature (1)...(471): n = a,t,c or g
nattgaaggctgtcgtctgtagcaccgcnccggaaatcccgggncgaggatttcgtggaggggccgggccgagcccgggggcgctttctcacgcgaagcaaccgctagagcaggacctggtgtcccgagaggtgagccggagaggcaggcctggagccacgcggaccccgggcagtagcccgaggtgagggaatagtgggcctggagccagctgccggcagctctgctgggggaggggcgtcggggtcgcgctccgtatcctgcgggccctgcagccccgatttacgcgccggctccgctcagcgaaccgtcccggacgcgtctccctggcggagagcttcttgcctctcctaccgagaagcgcaggctttggacgggaaggggcattcgacgacattccgcgcagcgtacacgttttacagatggggaaactgaggttcagagggggcgtgtcgtgccccaagtcagacc

SEQ ID NO: 83504 - DNA, 463 bp, Homo sapiens
  misc_feature (1)...(463): n = a,t,c or g
ccccaccccnnaatggaaattgagtgtcatacgccngcccnaccggaacggaattcccgggtcgagcgatttctgtgtacctgactcagaggaggttcatgggtaatacctgattttattatagattaatttcctggcagtaattttttagtagctgcttgagtgtctggatcatgcgcaccacttttcctgaactttgtggccgataggctgtgtgtaacttctattttatttttgacagttttgttaaattctgcactattttagctataaatgctggccattgtctgactttaaagctagagggagttcaaacttggggataaagttttttggcagtacttcagtcacttcttgtgctttttttgtcctggaggggaaggcctcaacccaccctgaaaaggtgtaaataagcactagcatgtaccgatagcctccggcatggggcaattttatgaagatt

SEQ ID NO: 83505 - DNA, 1812 bp, Homo sapiens; identical to SEQ ID NO: 68526

SEQ ID NO: 83506 - DNA, 1085 bp, Homo sapiens
ctgtttggacaaagggggctgctcaacagacttcgatctcctctgggggatgtggataccgctcaggcccgcacccctccattggtcctggagactgatatgggaggcggtatgtgccttggctccggagggcacctggagcacccctcacctggagaaccctcatccagagcactcctttcctggagcacccctcacctgaagcaccctcagttggagcatcctctcacctagagaaccctcacctggagcaccctgttacccggggcaccctcacctggaaaaccctcatctggagcaccttctcacctggagaaccgtcacctggagcaccctgttacctggagcaccctgttacccggagcaccctcatctggagcaccccctcacctggagcacccctcacctggagcacccctcacctggagagcccctctcctgcagaacccctaccaggagcatacttcaccgggaccaccccttgccttgatgcctcagcactgaggagtctcccatctagggttggggctcccttcctgcccccccatcaactcccctcgtccttgatgttgctcccccagggccccagccagccagctcctgccctggccgtgacagctgctattctgtgcccggcactgtggtgtccccagcgggttgttcggcactccgtggcgcagccacctgtccgcagccgctcccctgcgggacgtgggctgcctgtgccacgcactgctggggcccagctcatggcaaatgcagcactggtgtcctccacgggccggaacctgtgtctggggggagaacgcagtggccgaaggtgggaaccatgtggcagtgaccagggtctcgaccgcccccaccccagcaccccctcaggctgcagctccaagggccctctgggcaagacaggaacagaaaccaagtctcaggcttcgggacaagctgtgaggctggccgccctgccttgggctgaggggccttgtgatatggcgtctgtgtttggccacggccaggctgacccgcaggcgggagagatgattgtcccagactctgcactctccaggggtggcctcacgcgctag

SEQ ID NO: 83507 - DNA, 459 bp, Homo sapiens
taagaagccctcgcattgacaccgtccggaaacccgcgcgacatatctgcgtcgcttcgctggtccctttctcttatcgagcctcagatatctatttcataagccgggccagcagtgcccaccccacaggttggcgccagctccgtaagggccctaccaccgcggccggccagatcctcggcgggccagtcctggcgctgcggtcatttagcctgatgacccctggccaggttcagcctcaattgctccaaagaactccggacccgtaccccgagcccggcgtcccagcggcgaagttgatgggccccgcaggagcccttgcggtgagaaccgagtcctggagcccctggagcccccggagcccccggagctgcagccggggcagcctcctttccgccgggagtccagcgctctcgagagcccagaaactcaccgcgcgcaggagttggcgcgggcgtg

SEQ ID NO: 83508 - DNA, 478 bp, Homo sapiens
ggcacgagcgtgtactgaagatccagcgtttagttctcctttgatttcctctccctctggccacccctgcccccaatcgtaaaaggggtcagtctgctcaggcctgctttgatgggaccccgaaggccaggaaggaactggtcctgggttttctaagagctgggggcggatggaattctcctgcctgcgggtctttaaagactgaggtaacgcagtaggggagggaaaaagggagggcgaggggagaagggaagaaggggagggcagaggggaaagggccaacctgggtccggcgagggctgcggggctgggttttaggaaaagaagagctaagaggcgggtctctggggctagagggcgcccccaggcgctggaggggaaataggcagaggggcctctcaaacctgtcctaggaccctcgtacctctccgagctgcccccacacaaaccctggcgtcccgtcctgcgcgcgacgaaa

SEQ ID NO: 83509 - DNA, 1164 bp, Homo sapiens
tttcgtccgggcgcaggacagagcggtggaggggcgcctgggagctctgggggacaccaagagaagagaggttagggccagtgcgcagcaaacggggaggaactacgacgcgctgggtagaaagagtaagagaggcgcacccactttgctggtgaggggggcacacggggagcctaagaaaggcctaaagaggtagtgggtgtgagccagcctcgggcgcgttaaaaagggggcgccggagggaggcaaggagaggaagttgggtgtaggaagaagcgagaggaaactgttgcctggacagagcgtgccgtgccaaagcgcggaaacgggatcaaggagggggcatcaggaatcgcctggggaccccccggagagtggcggaagcggtgcccttgggcgcagcaaagagagaagggagcacaggctgagatagagacagtcctgggcgctggagagcaggagcccccggagcggcagggaaaggaacgtagagcctgcatgctcgggaaaagagggttgagaagccccgggcaagtgcctaggaaggtcagaggagtcagcaaagtccacggaagaacttccccgggttggagaggaaacgcaccctgggagctggaaagaagaggaaagctagcctgggggaagcttgatcagggctctgagtaccacgaggagtgcagaggaggtgctgatgattgcggggagagctctgagagcccgagaaagatggggaaactgaagccctagaggaaaagaagactaaatgtattaccatctgacccacttcctggccagcctgttcacctgtctgctgttcttcattgaacaagagaaggaatcacaattggtccatgacagtcacggtcatctcattcctcttgccagtggcaggtgtatgtgtgagtttgcagctcaatcctggccaaggggatccaaggactgctgaagaggcatgtctgcacatgtcacctagaacatctccagccatcatgtgatctctgggggaggcattcccaactctctgagagaagcagaccagaaagatggaaagaaagcacctggctccaggatgatgacattgagccgatgaattaaccacctttgtgctgctctaaccttcagagttcaccttaacatgagaaaataaaacccttattgcttaaa

SEQ ID NO: 83510 - DNA, 551 bp, Homo sapiens
ggcaggcggccagcccgggtctacctcgctccgtgcagggccgggagagggatccgccatattggagctggggccgaaggtgccttggagccgcggcgcgaggcgggtggaggtggcggccctggcctggatcgggaaggagtcggctctgccctggcccgcaaggctggggagctaatgagcctctctggctagtctcctccccgtccactccctccactttctgccgccgggacccggctgggagccggctgtggcagtggcagtggcagtggcagcgacaggatgttctccaagaagccgcacggggacgtgaagaagtccacccagaaggtgctagacaccaagaaggacgcactgactcgcctcaagcacctgcgcatcgtcatcgagaatgcagaatctattgatcttaaacagtttttcgagcaacatttttcacatatatactaatgtgttctttgaaaattatgagactattgaagctagccttaaacagagaggtcacaagttttcaaagagaggaaacggatgctatacctttttatttt

SEQ ID NO: 83511 - DNA, 481 bp, Homo sapiens
  misc_feature (1)...(481): n = a,t,c or g
gtgtcctccatcagtttgtcatcgcgagagcncccggnccggaannnccgggaatcgaggtcgtggccttcggacctgggcttggccgggccacagtctattgggtcccctgcgccggactgaggggaaacccggccgggggcggccggaagctgggtgaggccggccagaaggacgaagaagggcgtggaggggctgtcaggggagggcgaaaccgcggacgccgctctccagaagtcatctccccgggggcgcggggaggcctgaatggctctctttggcgtccccgttgggcccaccctctcccagcgtcacggctatgctgggcgaggtgacccccggggtcgtagctgggggcgtcggcggtgcagacaggggatgccggcagagattggagcccggcttggctgttgcccgggctgttggcattgaccggggctctgcccttcctctaatgcccttatctctataggaagcgcct

SEQ ID NO: 83512 - DNA, 601 bp, Homo sapiens
agctagaggctggcctggggagcaggtttggggtgccctcccacactgccctccctgccccggcccatgccccccagggctgcctgggcctggttattgtgtggggcctcctgacccagccaagggcacgaagctctgggaaggggatgcccccgagggtgccagtccagctagctgccccacccctcaggcccagcctggcccccaagctccccactctggtgccccgagcagccctgtgggcaagcagccgccgccatggccgagcacctggagctgctggcagagatgcccatggtgggcaggatgagcacacaggagcggctgaagcatgcccagaagcggcgcgcccagcaggtgaagatgtgggcccaggctgagaaggaggcccagggcaagaagggtcctggggagcgtccccggaaggaggcagccagccaagggctcctgaagcaggtcctcttccctcccagtgttgtccttctggaggccgctgcccgaaatgacctgtgccccacgcttgcagccccagctgtgtgggttccacttctggtgctctggagtcttgggggaagaggcactgtggtggcccttgagactc

SEQ ID NO: 83513 - DNA, 441 bp, Homo sapiens
  misc_feature (1)...(441): n = a,t,c or g
tttcgtgacaatgcccatctggctgctgctgacttccgcaccaaagtcctggcaaaatgaaggcaggtgagcagccaggacctggacctgcaattccaagcagcctgggctgaagtccctgattcccatggcaggtttgagacagagcaggccctgtgcctgagtgtggaggccgacatcaatggcccgtgcagggtgctggatgagctgaccctggccagagccgacccggagatgcacattgagaacctcaaggaggagctggcctacctgaagaagaaccacgaggagatgaacgccccgcgaggccaggtgggcggtgagatcaattgggagatgggcgctggcccaggtgtggacctgagccgcatccttgacgagatgcgtgagcagtatgagaaaatggcagaaaagaaccgcaacgatggccgntaattggtt

SEQ ID NO: 83514 - DNA, 483 bp, Homo sapiens
  misc_feature (1)...(483): n = a,t,c or g
cgatggcannnaattgaagccatcgaatgcggcaccggaccggaantcccggnnngnaatggtggtgcggaggcagggcgccaagcgccgaggtttttacggtctcgtcagcaagcagggccgacctccgctttatcggacaggaccaacgcaggatccggggcgcggcggcgacagggccccgaggcagatgcccgagctagaactctggcgcctacttactcctcggccggcccggctgctccgaaaaacgacctcacaggaatggctgcaagagcgccgccgccggcaggggctgaggagaacgagcctggggctccgggcccagagatgagacgctctggctgggaagcaaggagcatcggcaccgacggatagaggccggtggccctcaggttgagcaggcggcttcggggcggggagagaagggaccaaggcccaccgcaggcctcagatcctcccacgcctccccgctgctaccca

SEQ ID NO: 83515 - DNA, 396 bp, Homo sapiens
tttcgtatttgctccttccccctctcctctctccccttctctcctccattttctcctttccccttcctcccctccccggcccgccctctcctcttccacctgtccttcctccctgctcctgtggagccaccgttttggattagttgggagccaccaccggcggcgggggagggggccctgtggactgccctctccccccgcccagccccaccaccacccagcgccagagcacctcccgctgtcggtcttcgggcctcgagggagcccagccctccgtcccaccaggatccgtggcgagtgggggccgcggcagctgcgtccccatgaggaggggaggaagatgccggctgagctgctgctgctgctgattgttgccttcgccagccccagctgcca

SEQ ID NO: 83516 - DNA, 935 bp, Homo sapiens
tagcagtgaccgctctcaggagagtgtgggcgccgtggatagcagtgacggctctcaggagagtgtgggcgccatgggtagcagtgacggctctcaggagagtgtgggcaccatgggagagtgtgggcgcaccatgagtagcagtgaccgctctcaggagagtgtgggcgccgtgagtagcagtgaccgctctcaggagagtgtgggcgccgtgggtagcagtgaccgctctcaggagggtgtgggcgccgtggatagcagtgacggctctcaggagagtgtgggcaccgtaagtagcagtgaccgctctcaggagagtgtgggcaccgtgggtagcagtgaccgctctcaggagagtgtgggcgcaccgtaagtagcagtgaccgctctcaggagagtgtgggcgccgtggatagcagtgacggctctcaggagagtgtgggcgccatgggtagcagtgacggctctcaggagagtgtgggtgcaccatgggtagcactgaccgctctcaggagagtgtgggcgcaccatgagtagcagtgaccgctctcaggagagagagtgtgggcgccgtgagtagcagtgaccgctctcaggagagtgtgggcgccgtgggtagcagtgaccgctctcaggagagtgtgggcaccgtgggtagcagtgaccgctctcaggagagtgtgggcgccatgggtagcagtgaccgctctcaggagagtgtgggcgccgtgggagagtgtgggcacaccatgggtagcagtgacagctctcaggagagtgtgggcgccgtgggtagcagtgacagctctcaggagagtgtgggcgccgtggggagcagtgaccgttctcaggagagtgtgggcgccgtgggtagcagtgaccgctctcaggagagtgtgggcgccgtgggtagcagtgactgctctcaggagagt

SEQ ID NO: 83517 - DNA, 407 bp, Homo sapiens
tttcgtagcaggtgccggggagaggactgtgcttgccctccaggtgggagaggcctggaagcgtgtctctgtggctcagtgagcagtgcaggcgtgggtggcaggaagcacccccagggagagccctgggagagctctgggggacggcagtggggtccagccaggctctgagcaaggagaggggttcctggtggacgaggtgggccgagttccccagcaggagacctgagtgttgcaggacttggaaacaggaggctgagtcagcggctggggggtcagtgggttctggggactaaggaggcattgtgaggggaggggtgacttcagaggtgagcctgaaaaatcaggcagctggggcagcgatgaagtccctgcatgccttaatgagagcttggagctttcctata

SEQ ID NO: 83518 - DNA, 403 bp, Homo sapiens
tttcgtcaaaggtgtctggaagcagcttctggagccaggccaggagagccctggggctagtggctgccactggccatccagccgccctgtccgctgcatcccgggagcccgagagcctggtcctggcctcgtacctgctctcagcaccgcccagccgggcctgcggctgccacagcttctccactaccacgggcgcctccactgcctgcagggccttatcttgccaaaccaaggccaaaaccagttctgagagaccctccaagcccggaaggtatgaagcacctccctccaactgaatccatcagctaagagttgaaagcagcaggttctcagggcaccgctgggtgactttgctgtgatgcctgcccagcccgcccctgcgcccacactcctctccagccac

SEQ ID NO: 83519 - DNA, 526 bp, Homo sapiens
tttcgtatggaaacggagtcaagtttgggccttgattccacctgcagctgggcgggcgactttgtgaagaatgtcccgatgaaccacggcgtgtacacgtggccggacggcagcatgtatgaaggcgaagtggtcaacggcatgaggaacggattcgggatgttcaagtgcagcacccagcctgtgtcctacatcggccactggtgcaatggcaagcggcacgggaagttataaatctggaaatatatacgaaggccagtgggaagacaacatgcgccacggggaggggaggatgaggtggctgaccaccaacgaatagtacaccgggcggtgggagaggggcatccagaatggctttggaacacacacatggtttctaaagagaatccgcagttcccagtatcctttgagaaatgaatacataggggagtttgtaaatggatatcgtcacggacgtggcaagttttattatgccagtggagccatgtatgatggagaatgggtttccaataagaaacatggcatg

SEQ ID NO: 83520 - DNA, 420 bp, Homo sapiens
  misc_feature (1)...(420): n = a,t,c or g
tttcgtccagtgccggtggtccatgtgctgccggatgatggtgtgcggggccaccgtcccatacttggccacctcgggcatgttcatgttnnttttagtagacgagcttcttagtgcctggcggcccgtagttcctccccgatttcttctccagcggcttctccagcacccctagagagggcagagggtcagctgcccgcctgcgcctcctgagccagagcctgttaggtagggaggggcgctacctgcttccccggaggacagaaggtgggacctggctgggatccaagtttaccaaaggtacctgccctgggagtggcccttgagggggcaccgggtacagccccaggaataaacagagcgatcagaggcgaggggggcaggaaccttgctctccgtcaccttttgggccgccttagc

SEQ ID NO: 83521 - DNA, 417 bp, Homo sapiens
tttcgtggactcacggtctgtttttcttacacgttccctgggaacacatctctgaaactctagcagaagttagtagagagacatgattcagcaagctgatatgcctccagccagtctgaggaacactgcaatgataaagcaaggttgagcctcccttgcaagggctgagccagcttctttctgtccttccagaatgtcacggctaatcaccgggccaatgatgtgattgctgctgaagatggcccccaggtcctggtggggcggttcatgtacgggcccctcgacatggtggctctgactggagagaaggtacctggggctgggcctcccctcctcagccactccacctgcaccaggtgcctcatggagccacatagcgtgtggggtgagggtgtcaagagggccgagcttgctggg

SEQ ID NO: 83522 - DNA, 530 bp, Homo sapiens
tttcgtgtcccccaggcaccagctgactcgagtggctgtggacgtgggagccggcccctggggcaaccagaccgttgtcttcctgggttctgaggcggggacggtcctcaagttcctcgtccggcccaatgccagcacctcagggacgtctgggctcagtgtcttcctggaggagtttgagacctaccggccggacaggtaagtctgggcaaaggtgggaaggggtcgccagcaggaggggagatgggctgagatgcgctcagcctcaccactctgcttgtccccaggtgtggacggcccggcggtggcgagacagggcagcggctgctgagcttggagctggacgcagcttcggggggcctgctggctgccttcccccgctgcgtggtccgagtgcctgtggctcgctgccagcagtactcggggtgtatgaagaactgtatcggcagtcaggacccctactgcgggtgggcccccgacggctcctgcatcttcctcagcccgggcaccaggtactgcgggagagggag

SEQ ID NO: 83523 - DNA, 416 bp, Homo sapiens
tttcgtttttcaaccagtgatgctggaactattgaatatgcatgtgcaaaaagaaaaagagagcctcgatctatacccggaccacatataaaaataactcaaaatgtactgcagacgtaaatgtcacacctaagactacacagttgctagaagtaaacctaagcgaacatttctgtgatcttgagtggacaaagattttttagctgtgatttcaaaagcatcatctataaaaacaataaaccagccttcatcagcattaaaagcatctgctcttgggaagacactgttaacagaataaaaaggcaattcatagactggaagaaagtattttaaaatcacatatctgataaaggatttatgtctggaatatataaagaacaaaatgcattacagcaccccccaccacacgcttgtct

SEQ ID NO: 83524 - DNA, 391 bp, Homo sapiens
tttcgtctggcctggaggctagactggtgaggcctgacctggagccttggggccctggggccctggggcagacctggaaactgggtccacagaggtgggcctggaccctaggtccactggaatgtcatgctccaggtccttgcctggtgcccagggccacaaggactagcctaaagctggagtcagcaggtgctaacctggggctgaggtggtcctgaagcctggggctctggggactggcctggcactggggctaggtcttaagccttaagtggacctaaaacatgaggctgcaggggcttgccttgggcctgggcctactggggcctgcctggctttggggtaaaccaaaagcctgggaccacagatcctggcctgaaacctggatctg

SEQ ID NO: 83525 - DNA, 397 bp, Homo sapiens
  misc_feature (1)...(397): n = a,t,c or g
tttcgtcagaggccaggatggagaccgtggggcatgggggctgtgccatgaccggggggagcacgaggctgctgaactgggggtggcagtggtggggagccgagagtagggaaggaggaaaagaggtggccttggcccagagcctanaagtgaggggaggagcctggcggaggagctcatctgccagttggagacctcccttgcggagctgcggcccacctggccgcctgtctggtgagtgcatggcagaggctgggaggtgtggggctgtcttgctccaaggtgtccgcggacagctgagaggaggaagtgaggagggtgcagcctcctgtggacaggagacacccgtcaccggtgcctgccactgtctgggggcggaggacaatggggcaaggan

SEQ ID NO: 83526 - DNA, 497 bp, Homo sapiens
  misc_feature (1)...(497): n = a,t,c or g
aggcggtnnacncncaatagagtgcactgccgcatagacggccntgaattcccggcccgacccacgcgtccggacgatggctttccctgggctagagacgatggctttccctgggctagagacgatggctttccctgggccggagacgatggctttccctaggctacagacgatggctttccctaaggctagagacgatggctttccctgggccggagacgatggctttccctgggccggagacgaggtctttacctaggctagagacgaaggctttccctgggccagagacgatggctttccctgggccggagacgagggctttccctaggctagagacgatggctttccctgggccggagacgaagggtttccctaggctagagacgatgactttccctaggctcgagacgatggctttccctgggcctgaaacgaaggctttccctgggcccgagacgatagaatatcctaggccagagacgatggctttccct

SEQ ID NO: 83527 - DNA, 397 bp, Homo sapiens
atcccggagaagccggcgggagccccggggagaggtctcttttcttctttcctttctgtcttccttttcttttttcctctcttccttcctcccttctttactctttcttttcttccctcctccatttactcctcctctgcattctctccctgcatttcttcttttcctcctttctttttttcatctttcttttctcattatttaagggtctttgaaaatatttttttcttggatgcaatatctgtacgtatttttctgccactattaattattgcttcacttacagtgattcctgcaaactttcaatcttctctaaggtggggctttgtttatttattttatttgcatcttccaggtgacatggttttctggtgccttggcaactgctcacgatgca

SEQ ID NO: 83528 - DNA, 398 bp, Homo sapiens
  misc_feature (1)...(398): n = a,t,c or g
aactttagagtggggggcacgtangggcttggggtgttttagattgcctcttgaggtgacgacacggagtagctagaggggtccgggagggcttgaaaggggaggaagccagtgaggtcccggggatgggagcatagaggtgtcccctgggaaagactgaaaagctgggggatcttacaaacgatggggttagagggattcccaatgtagagaagaagtgaaagaagtgtatggcgggggtgccctgtggagcgatggaatgggaagaggccagaggggacctggaggaagtggaatgccggaagcctaatgaagcanggcttgaggacctgggatagggggtgtcatacaggggaaaggggttagataggtcaccgaggctccctgccagtggtata

SEQ ID NO: 83529 - DNA, 393 bp, Homo sapiens
aaaaaaaatcagaaaaagaacacatattcaaagtaagcagaataaagaagataataaaggtaaaagcagaaatcatgagacttcagaaaacaaaaacaacagaaaaaaaccagtaagtccaaaagctgtttctttgaaaatatcagtaaaattaagaaacctctactagactaattgggaacaatagagaaaagaaacaagttaacaatgccaggaataagataggtgactataaacacattaaaagaatgataagaaaatattatgaacaactttatgcttaaacatttcacaacttggatcaaataaatttcttgaaagacacaactaccaaagctcactcaagaagaaataagtggcctgaatagcctaacatctactttttaaaaataa

SEQ ID NO: 83530 - DNA, 429 bp, Homo sapiens
gatgccacaactgtacacccagatcagctgaagacaagagcaaagctttcaatggaaatttaaacaagtgtgatcaagaccctaaaggatttctttgaaaaattgtaacaagagatagaacatggctttactagtacacttttgaagacaaagcacagtcaaagcaatggctaccaagagggggaagtggtccagtcaaagcaaaagcaggctggtcaagagcaaaggtcaaggcaaaacaggtttttggaatgctcaaatcgttttgcttgttgactttctggagggccaaagaacgataacatctgcttatgagagtattttgttgaaaaaaattagccaaagctttagcagaaaaacgcctgagagagctttaccaaaacgtactctaccccaacaatgcaggcaaggtccttcatcaaactaggg

SEQ ID NO: 83531 - DNA, 641 bp, Homo sapiens
atcatgtggcttttgttcttcattctgttgatatgatatgtctcattgattgatttgcatatgcccaaccatccttgcatctctgggataaatcccatttggtcaagaatgattgtttcagtttcatttatttctgctctgatctttattcttctcttttactaattttgggtttgatttgctctagttttgtggttctttaagatgcatcattaggtcatttatttgaagtttttctacttttttgatgtagacacttactgctataaacttctctgtcagtactgctttcactgtatcccataggttttggtatgttgtgtttccatgatcgtttgtttcaagaaatttttttaatttccttcttaatttcttcattgatccattggtatttaaggaacatattatttaatttccatgtgtttgtatagtttctaaaatttatcttgttactgatttcttgttttatttcattgtggtctgagaagatacttgaggctgagtacagtggcacataccttgtggtcctagctactcaggaggctgaggtgggaggatcacttgagcctgggaggcagagtctgcagtgagctgaggtcacaccactgcactccagcctggacaagagtgagaccctctct

SEQ ID NO: 83532 - DNA, 834 bp, Homo sapiens
aggtggtgtctgagagtggacagggcgggccacccagggcctcgtggtgcacagtgagcagtttggaactgattctgggagtgacagagccattggaggcttttaaagaggggaatcactaggtcagctgctggctggggaatgggccccgggctgggaggggtggaagcctgggcccagcggggaggccccagtgggtgaggaagtcgatggcttgaacaggatggggcagctgctatcaggagggaacggaagtggggaagagctccagccctgggcttcagacctccagaagcagcaggaagaggggtgataacagtgtccctccttgcttcggggtcatttatttattcattcatgcattcactgcaaggccctttgcacaggtcaggagatgcagaaatgaccagaacatgagatctgcagcaaagatgggcaaggcaggcctttaggcaagttactacagtcacacgaaggacaggagagctgtgatcacagagctcaaggggcagtggagatggacgagcggctgccatggcaggggaagggatgctgcccactggcagggcatcaggaaaggctgtttttggatgcatggaccagaaagccactctctgaggtggcccccacctgcatcatcctagggccacaggccgagggcttctgaagggcccttggggcttgccccgctgctctgctggtcttggctcctctgcagcacctgcttcctttagcactggtgaatgattcttcctcttcccctgtctcagggaaggcttgcctgcttccatgcttgcatgctgggtgacaataaagcattcctggttcttcaaa

SEQ ID NO: 83533 - DNA, 396 bp, Homo sapiens
aaaaaagggataaacatcttaaaaagattttagtcagagcttctggaattgaaaaacttacttaaggaatttcaaaatacaactgaaagctttatcaataaactggaccaagcagaataaataatttcaaagtttaagattgatcttttaaactaacacagacagaaatttaaaaatgagcaaaatcttcaagtaatataaaattatgtaaagtagccaaatgtatgaattattgacattcctgagagacaaggagaaaaagtaaacaacatggaaacatatttgaaggaatagttctagaaaatatccgtatttttgccagagagataaacatccagatacaagaaatccagagaacacttgctagatactttacaaaatgagcataacaaaggg

SEQ ID NO: 83534 - DNA, 429 bp, Homo sapiens
  misc_feature (1)...(429): n = a,t,c or g
cccacgcgtncgaaaaatatatcatgtaaatattaatcaaaagaaaacaggagttgctatattaatattagagcaagtaggttttagagtaaaaaaaattaccagagaagtacattatgaacacatacatgataaaagggtcagtcctttaagacataaatgtatatgcaccgaaagacagctgcaaaatatgtaaagcaaaaactaatagaactggaggaagaaatagacaaagtcacaattatagttggagactctgacacctctctctcaataattgatagaacaattagacagaaaatcaacaagaatatagaagaactaaacaccaccatcactcaacaagatctaatcaacatttatacaacataccgctcaacaacagcagactacaaattcttttcaagtgcccacagaacacacaggaag

SEQ ID NO: 83535 - DNA, 388 bp, Homo sapiens
  misc_feature (1)...(388): n = a,t,c or g
tgcagggggtgagggggacagtggggccagtgaagagggcctagggtctggtatctgcagcaggcactcacagaggacagactgtttgcaaggtaggtcaggtgacagggagccaggggggctgaggaggctcagggcctgactccagggagagcagttgccatcccccaggtccagaggggccctgggaggagtccaggcagggctgaagctggaagaagtaagaggggctggcactcaaggactgcagccactggccaggtggggccaggtcggactggctgccttccctggtctcagccccagccttctgtggctgcctcccccatcggagccatcaaaaagcangatgtggaaggggcaggtgaaggacagcctctgtgatagt

SEQ ID NO: 83536 - DNA, 402 bp, Homo sapiens
acgcttagattaaatgtgtttttgattaaaatattgtaaaataacctaattttccagaaattaagaattagttattggccacttatacattttaattttgtaataaaatttattttatttttaatgtgcaaaatcgttacctggaatctttcaggcatttagtaagaagaagattgatgacagaaaagaatggttaacaaattttatggaagaccggagacagcgtaggctacatggcttaccagaggttagtcttaaagagtggtgacctggggaaagaaggagagagagactataattcatgcagtaataatgataatattgctatataacttttctcttatcaatttttatatggtactgcaacaaagcatttgacttataatgatttcatcaacaagg

SEQ ID NO: 83537 - DNA, 471 bp, Homo sapiens
  misc_feature (1)...(471): n = a,t,c or g
cgagttctcaaaacggaaaaaaactgagacccccgctgangacctnngnaaaancnnnnnnnnnannnangcntncgcagnanctttatgtaatatcaaagtgagtttagagtccgcatatgcagatgtgaaggcaactgaagaatttttggaaactctagataagctgattatgaaggaagattacttgccagacaaattttcaatacgcatgaaacctccctattctggaaataaatggctgaaaggactttcatccataaagaagccaagtcaatgctagatttcaaggcttttaaggacaagataacagtcttgcttggggccatattgcaggctacaaattgaaaccctttgtgatctggcacagtgagaactccagagccttcaagcatgtcagcaagcacacactgcccgtgtactacaggagcaataagaagtcatcgatgacccagcttttcttccaggatg

SEQ ID NO: 83538 - DNA, 842 bp, Homo sapiens
  misc_feature (1)...(842): n = a,t,c or g
gtataagactgaaattcatgtcacctcttgaagatcaaacagtaaaagaaggtgaaacagcaacttttgtttgtgaactttctcatgaaaaaatgcatgtagtctggttcaaaaatgatgccaaactccatacaagcagaacagtactcatctcttctgagggcaagactcacaaattggaaatgaaagaagtgacattggatgatatatctcagataaaagctcaagtcaaggagctgagctccacagcacagctgaaggtcttagaggccgatccctacttcactgtgaaattacatgacaaaactgcagtggagaaggatgagattactttgaagtgtgaagtgagcaaagatgtaccagtgaaatggttcaaagatggtgaagagattgtcccttcacccaaatattctatcaaggcagatggcctgcgccgcatcttaaaaatcaaaaaggcggaccttaaagataaaggcgaatatgtgtgtgactgtggcacagacaagaccaaggcaaatgttactgttgagggtgagttgctcaacaatgtaaaatttaccctatctgaatctgcagtttattagttcagtcatgctaacaaaactgtatcatttcagctcgactaataaaagtggaaaagcctctgtacggagtagaggtgtttgttggtgaaacagcccactttgaaattgaactttctgaacctgatgttcacggccagtggaagctgaaaggacagcctttgacagcttcccctgtaagtcaagattagctaattatataggacaggggttgcttggttgtgtagggtgaaaaaaggcataaaatatcnngatgatttg

SEQ ID NO: 83539 - DNA, 469 bp, Homo sapiens
  misc_feature (1)...(469): n = a,t,c or g
tgtgggttcagccgtccgacgtacgacgngcnnnnggnnngnaannnccgggncgacccacncntnaatcttcgagtgatggctgcgagctcttcatccccagcgccagcagagtcagctgtgccgggcggatgctgtaagtgcagccaggattgtatttcggtggggccgcggccgtcgcggagccagatcacctgagggaagcgggcatcacggccgtgctaacagtggactcggaggagcccagcttcaaggcggggcctggggtcgaggatctatggcgcctcttcgtgccagcgctggacaaacccgagacggacctactcagccatctggaccggtctctttttcagtcatgcaggagtcagtcgaagtgtggccataataactgcttttctcatgaagactgaccaacttccctttgaaaaagcctatgaaaagctccagattctcaaaccagaggctaaat

SEQ ID NO: 83540 - DNA, 460 bp, Homo sapiens
  misc_feature (1)...(460): n = a,t,c or g
tgttttctgcaacctgcacgacnnncnnnnnnntnnaannncgggncgagcatncgnnnaataatatcaaattattctacaaatttatatttaccaaagcagcatgttactggcataggaggggactctttcaccaatggaactgataaagaatccagaaataaacgtaagtacttacagccaagtgatttttgacaaaaactccaagaacacacattggggaaaggacactccaacaaacgaagctgggatttttttgtttttgtttttaatgggagaggtatgaagcttaaaaagtgccaggaacgagagtgaggttgaagatatatggaagagagaataaaactggaggcacatttctcacagcaatcaaaagatgagattcaggcagacattggcttcagagccagctgcaccacttaatggctgtgtgacttgcaatgacacttaatttctcaga

SEQ ID NO: 83541 - DNA, 429 bp, Homo sapiens
ctggaggaaagcgagccctcagctcagcccaggatccccagaatgcccttaggcccccaggtgggtgtctcccagcctcatggggaggaagaaagtgatggccgggggctcccccaccctcctggagcctgaggtcggggtagggaggacagcatcagttcccttctaaggaagggccctggacactgcagcaggcagcccagtccagactgcccatggcctcccaagtgatgccctggctcccctggacgacagcatgccctgggagggcaggaccacggcccagtggtcccttcacaggaagcgacacctggcacggacactgctggtgagtagggtgagaggtccccagcatcaagaccagccactggtcatcagaggccattgtggcttatggttgggtgctgggagggtggggagaatgaaaca

SEQ ID NO: 83542 - DNA, 485 bp, Homo sapiens
ccgcccgcccccccgaatcgagaccatattgagagcggtggaattcccaggacagagtttagtgtttctctgtctttttacatcaccgaccagagtctggttatttctccttgtctgtcaatttctgagggtaggaactgtgtgtctttagttctctattctccaggctctagtaaagtagccatcacatcacacaggtgctcgataagttttttaaaaacggaattgatttctttctcgctgagttccaggggcctgtgcagcccgtctgggccccaggctttgtggagagattgcttaggtgttgccttctcgcagcaggtgtgtgtctttcaatgctgtagcagactacgcagaaatggaaaaccctatatatttacttgtgaccctccaggtccccaggcctcttgcaatgcggaaagaggggatccaaaccagaaaacggaagcccaagaacctgaataaatctaagacaccagcaggtg

SEQ ID NO: 83543 - DNA, 759 bp, Homo sapiens
  misc_feature (1)...(759): n = a,t,c or g
ctgagacaacccacaccctccaccagccctaatgattgttctctctacccctccccacaatcttcctccaactcctcctctctgcatgcacctcacagccagtaccgagaactagcagtggccctgcactcaagctccgcaataatcagtcaactcagtgaaaacatcaattcactgaataatgagaacaagagtgcactgcagttggagcggcaagtaaaggagctgaagcttggtgagctgaaagagacggtaacctctgacccatctaataatggttgggaggcagtcaccagcctctgggaaggggagcgtcttcctgcacgtggagctgaagagccaagaggctcagagtcagcagcagcagcaagaccagtacctgtgtcacctgcagcagttcgtggttgcttagtagcaggtggctgcttgtcagcagctggcctctgagaaggaggcgctgcacaggcagttactgctgcagacctggctcatggaccagctgcagcaggaggaagctcggggcaaatcggtggctaagagggcccgccaaatgttgcaggagacccaggggagggagttgttgaggacagggctccaagagggacaacctggcaacctctgtaccttctcaccctctttcctggccccttaggagaacctggaagctaccagccagtagaaacagctctnngcccagttgagctcaggcttcctnnntntcncgcnttcntgtnaccagggttcaggnnnnggccatcc

SEQ ID NO: 83544 - DNA, 420 bp, Homo sapiens
gaaagaaagcaggagggaattttatcacacctggaggacatggtgcttggtgttttttgccagagatgaaaagacacacgctgtaagggggtacccatccccggtccccgggagacgaaaggacacaggccgtgaggttctacccatccccggtccccaggagacgaaaggacacaggccgtgaggttctacccatccccggtccccaggagacgaaaggacacaggccgtgaggttctacccatccccggtccccaggagacgaaaggacacaggccgtgaggttctacccatccccggtccccaggagacgaaaggacacaggccgtgaggttctacccatccccggtccccaggagacgaaaggacacaggccgtgaggttctacccatccccggaccccatgagacgaaaggaccg

SEQ ID NO: 83545 - DNA, 465 bp, Homo sapiens
  misc_feature (1)...(465): n = a,t,c or g
atgagctaaaacgagatcagacgcatttgcnnngcgcgnaannngaccnngnctctctggctctgtgtctgtctctgtttctctttgtgtttgtgtctctctctgtctctgtgtcttgggctgtctctctttgggtttgtgtctgtctctttccgtgactctgtctccctctgtgtctctgactctgtgtctctgtctctctgtgtctctgactctgtgtctgtctgtgtctctgactctgtgtctctgtctctctgtgtctctgactctgtgtctctgtctctctgactccgtgtctcttctctgtgtctctgagtctgtctctgtgtctctgtctctctttctctgtctctgagtctgtctctgtctctttgtgtctctgacgctttctgtccctgtctctctctgtgtctctgtctctgtgtctctgtctctgactctgtatctctgactctctatgtctct

SEQ ID NO: 83546 - DNA, 419 bp, Homo sapiens
gtaaagagccatctgaaaggattaaaggaaacagtgcccaacactcaaataaaggaaatagtgccatttccactaccccaaatagaaatagttcataactcacatccacttctatttaacattgtactggaaattttagacaatgttgtcaagcaagaataagaaataaaagttatctagatttggaaaggaagaagaaggtaaatagtctttattcacagaacacatgattgtctatgaagaaaacttaatgaaatctgccaaaaacagctactataactaaaaatgtgagtttaacaatgtgcaggatataaggttaatatacaaaattccattgtatttctatatgcatacaacaatctgaaattgaaatttaaaattaccatttacaatatcatcaaaaataagaagtacttacg

SEQ ID NO: 83547 - DNA, 461 bp, Homo sapiens
  misc_feature (1)...(461): n = a,t,c or g
ntcgagaccctangtagagcgcccgtagtcctggaccccangccccttccttgaaaagcagaggccttgtaccccccagggttgccggtcgggacagtgattccagcccttcagctttcaggaccccaccttccttatcaccaggtcttctccactggcccctgagattgccatcacctccagctcctcctctcctgaagatggcagcccctcctgggttccagcctcctgagatgccagacccactggggcagtacccacaggccctgagcctacatcaaccaccccagtgacaccccaagcctgcagcattttccacccccagccccctggtcccaccttgccttccgcccaccttcccacctgctgcagggagggccctcggctgagccttcagacacacttgcaccccatccgctcccctcctgaatttcttctgaccctcccttggcttcacagca

SEQ ID NO: 83548 - DNA, 477 bp, Homo sapiens
  misc_feature (1)...(477): n = a,t,c or g
tgagggcncnattgagaatcgatgacctagcacangcggtggaattcgtcagtgtgagcctacacatctgtgtataagcaaacttcttgcatgcatacatctgttagtatccgtgtgtgtctgtgcatttctgcctgtatctgcaaatgtctgcttgtgcactgtccatgcaggtaggtccacactggtgtgtgtctgatgacctctgtcagtatctgcggacatgagtctgtgctttctgttagcatctgtgcaagtgtcatctacgtctatgagcatgtttgttctttccagtgcctctatgtgtcttgtacctgtatgtaaatctgtccatgcctgtcgtgagtgtctctgcagctgtgcctgtatgttggtgtattttgcagtgtgtacatctagtgagggtattggtattcacttcaagatgcaggcatggcttgctaaggtgagcaggatggaatcttccctgtgtctgcg

SEQ ID NO: 83549 - DNA, 448 bp, Homo sapiens
  misc_feature (1)...(448): n = a,t,c or g
ntcgtagattagtagtacagtgcggaggaactctgggattgaatctctagagcaatatggggactattgccatcttaatgatgctaaatcttccagtccatggacacagatttatttgggtcttttttctttttacttaggcgttctttaatttctttcaaaaatgttttgtagcttttggcattccagtcttgcacttattttgacaaatttattcctaaatattttattcttggtgatgctatcgcacatggaatcgttttcttaatttcattttcaggtttttcattgctaatgtatgggaatacaattgatatttgtgtattgctcttgcatcctgcaaccttgcagaaatcattagttctaatagattttttaatggattccttaaaatttttatgtatgcaaacatgtcatacacatagctttacttcttcctttccggatg

SEQ ID NO: 83550 - DNA, 443 bp, Homo sapiens
  misc_feature (1)...(443): n = a,t,c or g
attgaatagcactacnccagngcggnggaattctggaggacttcctgaggaatcaccattatgcagtcagcaggaagcactccagctctggggtggtggccagcgagtctctgaccaactacctggatgtctccaacattgtggacccccaccagactgtgggtctgagcacccaggaacctggcgacatcttcacctactccgagtttgatgggatcctggggctggcctatccctctcttgcctctgagtagtcagtgccagtgcttgacaacacgatgcagaggcacctggtggcccaagacctgttctcagtctacatgagcaggctccctgcactggatacccatgactgcaagaatactggcagttcactgtggacaggtgggtgagcggccacactgtgtgggcctcagccagaggctgatccagctgtggggatg

SEQ ID NO: 83551 - DNA, 484 bp, Homo sapiens
  misc_feature (1)...(484): n = a,t,c or g
nttggtttgacantcctatnccagngngcgggaattcgattcgataaccattagcgtgtggaaccataagaaaattnnaataaacagggagctggcttcctgggctgtgtgcggctgctctccaatgccatcagcagattaaaagataccggatgtaagaaccaaacactttcctgcctcttaatgcaaccaaagaaagcttaggaggcatcgttttttgttttgatcgctgaatactgaattcctgccttcctccctagttcacgttccttgggttaagttttgaattgtttgtttacagaccagcgtttggatctatgcaaactaaacccctcagatactgatgcagttccggccagatagtgggtaagaactttcttgtctgtgtaaagagatgcttttccagaacttacattcaacccttcatcgccgagaactcacatacaggcactgacgatgctgacgggcctcagaggacagaccc

SEQ ID NO: 83552 - DNA, 678 bp, Homo sapiens
gtgtggtggaattcggcgcatcttcgctctgttggccgtggctttagtaagcacacacctgcctgctactctggttatcgtggcgacggcaggtctggattgccagacaggtttttctttttacctcgaggctttctctgaagggagtcggagcatttaaaaggcggcctcaaggtggattgagtcgggggaggattagcagtatttgcttaggttgtaaaaccgcgactttatctaataaatcgccattcaaggtgcaaatacaaacttggaacagaggtgcgtgacatgtaccccttttgtcctaaagtcaagaatcaataatgtgacttagccctattatcttgcctctaattaagcgattctcacttattctttctctattgctaattctcacgttacatttccccttttctgcgtccacctttctcttttgcgcattgatataggaagtgttttgtaataggctgtagctttttctcttactgttataaaaaccaggacatatagcattactacaaaatgagatactccgtaaacactttaaaagtgccagctatttaatgacccaagaaaatactcgtgatataaaagttgactaagtcaggatattagagtagtgtaccgactatagaagtacaatatagagcggcactaaaaagggaagaagggaactta

SEQ ID NO: 83553 - DNA, 468 bp, Homo sapiens
  misc_feature (1)...(468): n = a,t,c or g
cgcccccccgcngnnnnnnnntttgagaccatagagagccgtcggaantcgcggggctgcgggtcctggaagctgcctggggcaagcaagcacccgcaggtatttagagctgtgccacagcccctgcccagactcctacggaggacagcggggggcggggggcagagaccttagagctttcagaaaagtgacacacacccccgcctcctgcggggaaccacggggggccgggggcagctttaggtttgcgtgacgggtacacctgcctccggatggggcacagggataaagggggtggaggcttaggacttggcgaccccccgcatgggcggggctttgggactgtgccaccagcggctgggaagggcgcgcactcccttggtggcgctcggggcgccagagtccagtgcagcccttaggcctcccagtggtcggggacggtaggtgggggtcgcctcttctctcctg

SEQ ID NO: 83554 - DNA, 499 bp, Homo sapiens
  misc_feature (1)...(499): n = a,t,c or g
cgggaggggncnnngatcgagnccccatgggagacattagacagngcggtggaattcgagacagagagacacacagagagacacagacagagagagacagagacagagagacagagacataggggaacacaggcagagagagacagagacagagagacagagacataggggaacacaggcagagagagacagagctacagagagagacagagacagacagagacataggggaacacaggcagagagagacagagctacagagagagacagaggcacacagagagagacagaagcacacaaagagagacagagaccaacagagcattgacacaggtccacagagacagagctagagacagagagagcgtgcacggcgcacatgtatataaagcctgtggggcgccttttcttttcacatagtgtgatccagtcctatcaattactaggatattggcatttgtgatcattgcgtcgtctggaatttttttctggaaaaaag

SEQ ID NO: 83555 - DNA, 408 bp, Homo sapiens
cggacgcgtgggccactgatctttaattttatgtcagtactacactgttttgattactgcagctttgtaataagttttgaaattagaaagtttgaatcctccaacttcattcttccttgtcaagattgatttggctgtcaagattccttgcatttccatgtgaatttttcagggatcaacttgcccatttctgcaaaagaaggcagttggaatttacataggggcattgcatctgtagatcaatttaggagtattgcaatgttaacagtacaaagtcttccatccatgaacggggatgtcatatcatttatttaggtcctctttaatttccttcaacaacgttttgtagttttcagtgtgcttgcaatccttttgttaaacttattcctaagtattttattttttgag

SEQ ID NO: 83556 - DNA, 380 bp, Homo sapiens
  misc_feature (1)...(380): n = a,t,c or g
cccacgcgtnctcccacgcgtaagagaaatgcctggtcacatcctttgcccattattaaaacagatttctttgtgttgaattgcgggagccccctatatattttgaatattacccccttatcagatcgacggcttgcacatattttatcccaatctagggtgtatcttcactctgataactgtttcctttgttgcgcaaaggaaacactttttagttggaagcaatcctgtttttctgattttgctatcattgcctgcgcttttggaatgctatccaataaatcatttcccagactggtgtcctggagcatttcccttgttttcttctacttatagtttcaagttttatgttagatttctttattcttttgagtaaattt

SEQ ID NO: 83557 - DNA, 396 bp, Homo sapiens
cggacgcgtgggtgaccacactggtttcccagcaatggttcttaacctgactgaaatggctgaaatgacagacatagaattcagaatatggataggaaagaagataactgagattcaggagaatgttgaaacccaatccaagggagctaagaaataaagtaaaatgatacagaagctgaaagatgaagtggccattttaagaaagaatcaaaatgatttgatagagctaaaaaactcacttcaagaatttcagaatacaactacaagtattaaccgcagaatagaccaagctgaggaaagaatcacagagcttaaaaactgattctctgaattaactcagtcagacaaaaataaaggagaagagaacaaaaaagaaggcgtagtacctcagagaaa

SEQ ID NO: 83558 - DNA, 407 bp, Homo sapiens
gagaaaacctgaaaagatacccaaccacaaggaaataccatttcacacccaccagatgaacaaaaatgtaaaagtctggcaatattacaattcttatacattgctggttggagtatgaattgatataatcaatttgggaaacaatatggtattatctagtagctgaagatgcacatcttctgtgacccaggaaaaatgtatagcaggagacatgagcaagaaaattcataatggcatttataacagtaaaacgtggaagaaaatccactgtccatcaacagtagagtgattaaatacattgtatatgctcatacagcagaatatagtggtggaaaaaataaattacaagttcatggacatagataaatctctaacaaaatgttgagcaaataaaaattcacaaaaga

SEQ ID NO: 83559 - DNA, 401 bp, Homo sapiens
ccttgatctaatatggaacactcctaacagcagaatatacattttttcagccatatatggagtattcatcaagacagatcacgttctcaagcattaaacaaacctcaacaaacttaaaagaaccaaaaatatgttttcagatcacagtggatttaactagaaatcaactgcagaaagatatttggaaaattcccaagtatttggaaatcaaacatatctaaataactgatttaagaggaatccataagaaaattctgtggaacaaaatgaaggcacagcatatcaaaatttgtggaaagtggcttaagcagtactgagaaggaaatgtataacattaattgtttattttagaaaagaatgacctcaacacaataatctaagcttccacttacgaaactaca

SEQ ID NO: 83560 - DNA, 402 bp, Homo sapiens
cggacgcgtggcaaaatcccactttaaatgtaaacacgcatatagataaaaagtaaatgaatggagaaaaatacatcatgctaacaccaataaaaaaaagtaggattagctattttaatttcagacagagcagacttcaaaacaaggaaagtttgtggaataaagaagagcattatgtaatgataaggggtcaattctccaataagacagaacaatgcttaatgtgtacgtgcttaacaacagagcgtcaaattatataaggcaaaaaactgatggaactacaaggaaaaatatatgaatccattattatagtggaagatttcaacacccttgtatcagatatgaacagaaccaggcatggcagagatattggaattatcagaccaggaatttaaaacaatg

SEQ ID NO: 83561 - DNA, 1488 bp, Homo sapiens; identical to SEQ ID NO: 68613

SEQ ID NO: 83562 - DNA, 382 bp, Homo sapiens
  misc_feature (1)...(382): n = a,t,c or g
tgagactatggtcagattcacggaggcatctgcctggtgagatgagacaatggtcggattcactgaggctcctgcgtgtcccggatttcctgctgggggaggatgtgctgctcancggttcccacacctgcttctatgggagaagcaagaagaagtcagaagggtgggcgaagaagtcacaagcttctgttattggttcggggagatgctgtgtcgggggcaccaattatacggggaacaaaccggttgccaactcctgacccttggagttgaccccacaccgcttaaacctctgcgctggttccccaggggcccacagtgaggtctgtaactcagggagaggcgctggagcggggtgtgggagagcggtgtgcangacggn

SEQ ID NO: 83563 - DNA, 492 bp, Homo sapiens
  misc_feature (1)...(492): n = a,t,c or g
agcagggccgggtcccgtgttccgattgactgccagtctctncnnannnncntnnnngnntaagggnccacccacgcgtccgcagacgcgagtagtatttttatattcacatttgtgattcacttcgattttttttgatatttggggttaattttgtgtgaggctttaggttgaggttaatttttttgtctgtgaatatccagttggtccagtgccatttgttgcaaagtctattcttcattgaattacttttacaaaaatccactttggggtatttgtgttgatctctttctgggttttcggttctcttctattgatctgagtgtctattcttccatagataccctgtctcaagtattgtggtgatcaaatagtaagtttaatatcaggtagcgcgagctctcttactttgttcttctagtttctttgccttatcatatatattaggataagntgtctatatctacaaaaaaatctggttgggattttgag

SEQ ID NO: 83564 - DNA, 514 bp, Homo sapiens
atgttgccatacaaactgctctgtcaattgggtcacataatctagcagatccaatggtgcttaaagtatcagtgatagatgaggttgatatttggcgcctttggcaagcttcattaggtaaatcacagcacagacctttaggattttggtgcaaagctacaccatcctctgtggataactactctccttttgagaaacagcttttggcctattactgggccttagtaaagacaaacacttgatcatgggccattgagttaccctgctacctgaacttcccatcatgaactgggtgttgtctgacaagacataatgttgagtgtgaacagctgtactctgttatcaaagggaggcagtatatatgagatcagacttgaggaggcccttaaggcacaaggaagttacatgagggattggccagtatgtccatggtccctatttcccctacattaccttctctctttcaatccatacctaagtcttcctgcctaagacaagttgactgaggaaggga

SEQ ID NO: 83565 - DNA, 392 bp, Homo sapiens
cccacgcgtacggattcaggcagaaaatctttattctcattgttgaactcaacagcaccatcaatcaactggatataattgaaatttatagactacttcatccaacaacagcagattacgtattcttctcaagctcacatggaacattaaccaggatagaccacatttggggtcataaaacatgccttaacaaatttttaaagataaatatcataaaacatctacttccagactacagtgaaattaaacttgaaatcagtaacagaaagacagctgcaaaatcccaagataattgaagattaaactgcacttctaaataacacatgcctcaaaaaagaaatctcaattttttaatttggaactaaatgaaaatacaacttatcaaaatttgg

SEQ ID NO: 83566 - DNA, 389 bp, Homo sapiens
  misc_feature (1)...(389): n = a,t,c or g
ttgtgtgtgtgcatgtacatgtatggacattgtgtgagtgtgcaagtgtgcatgcatatacatgtgtgcgatatttgctgcccgtgtgtgtgcatgtatatatagacatacatgcctatgttgtgtgtggtgtgcatatgtgtgaacacacacgtgtatacatgcatgcacatgtgctcgtacaatgggtgtccacatgcacgtgtatatgtatatctgtgagtgtatatacatgcatgcaattgtgtgtatgtgtgttctgtgtgtgcgtttgcaagtatatatgcacatgtgtatatgtacatgtatgcctgtgtgacgtgtgtatatgtgagcatgtgtacgtgtgtgtatacgtgtgttgtgtatatgtgtgtgtctgtacctgn

SEQ ID NO: 83567 - DNA, 403 bp, Homo sapiens
gagaaattaagtcatttccagagacaaagaaggacattatattttaataaaaggttcaactcatcaagaagatataataaacatctgcatctagcaacagaaccccaaaatatttgaagggagaattgacagactttaagggagaatagttctacagtaatggttggacatttcaataccccatttttaatcatggatagaaccagatagaagatcaataagaaaatagaggccatgaacaacactataaaccaattagtcctaacaaacacatatggaacaccccacttagcagcatacacattcttctcaatgcatatggaacagtctccaatattcaaacaagtctgaataaatttaaaaatattaaagccatatgaaatattttttctgattaggatgg

SEQ ID NO: 83568 - DNA, 395 bp, Homo sapiens
agaaaattgaaattatatcaagcactctctcacaccacagcgaaataaaactggaaatcaactccaaaaggagccttgaaaaccatgcaaatacatggaaattaaataacttactcctgaatgatcactgggtcagaaatgaaatcaagatggaaattaaaaaattcttcttactgaacgacgatagtgacacacctttcaaaacctctgggatagcaaaggcagtgctaagaggaaagttaataacctaacttttaacttaaaagtcaacttaagagttaaaagttgatgcctacatcaaagactgtgaaagagcacagaccatttaagggcacctcaagaaacgagaaaaagaagaacaaaccaaacccaaactcggcagaagaaaggaaata

SEQ ID NO: 83569 - DNA, 366 bp, Homo sapiens
  misc_feature (1)...(366): n = a,t,c or g
aattaacgtttatagaacactctgcacaacaactgaatacacattttttttcaagagcacatagaacatttaacaggacataccgcattctggactattaaaaagtcttaaaagttttgaaagaattcaagtcatacaacatatattctgtcagcatagtaaaattaaattagaattcaatagcagaaagaaatctggaaaatctgcaaatacttggaaaataaattatatacttcttaataacacatggatcaaagaaggaagccagagagaaattagaaagtatttgaactacatgaaaataaaaacacttcctataaaaatgtgtgggataagaaaaaantttcnttttggggggggtttggg

SEQ ID NO: 83570 - DNA, 413 bp, Homo sapiens
acgctcaaatcaataatctaagctccaacttttagaatctagcaaaaaaaaagagcaatatgtgggcaaaccaagcagaagcaaggaaataattatagaagtaaatgaaattgaaaacataaagggaaagattattgaaacagagctggttctttgaacagatcaataaaatcgacaaacgtttagcaagactgacccaaaaaaaaagagagagagagagagggcccaaattaccaatatcgggggtaatgaaaggggatatccctacaagtatcaaagggataaaaaaatattatgcctaattctacccaaataaattgggcaacataaactaattctctaaaaaagacaaaccacaagacactcaatatgaaagaggcctgtaactattaaggaaacaatttgtgttttac

SEQ ID NO: 83571 - DNA, 405 bp, Homo sapiens
ggggaatgctgacgaagagttgttccaagaccaagatgacgatgaactctggctcggtgacagtggtataactaattgggacaacgtagactatatgtgggacgaggaggaagaagaagaagaggaagatcaggactattacctaggaggcttgagacctgacctgagaattgatgtctaccgagaagaagaaatactggaagcatacgatgaggacgaagatgaagagctgtatcctgacatccacccgcctccttccttgccccttccagggcagttcacctgcccccagtgccgaaagagctttacacgtcgcagctttcgtcccaacttgcagctggccaacatggtccagataattcgccagatgtgccccactccttatcggggaaaccggagtaatga

SEQ ID NO: 83572 - DNA, 499 bp, Homo sapiens
  misc_feature (1)...(499): n = a,t,c or g
tttgtatggaaaggcaaatgacagaacagccaaaataattttgaaaaggaagaacagaattgatggactcccactacccaattttaaggcttaatgctaaagctgttgtaatcaagacagtgtggtggtggccaaactatagacaaagtatagattaatgcgacggggaagggaatccagaaattgacccgcagaaatgtggtcagttgatttttgacaaagctgcaaaggcaatacagctaagaagaatagtcctttccacagacaaccatctgtgctatggagacagttggacatctatatgttaaaaaatgaacctcaaactagacctcacgccttttacaaaaatcagctcanaatagatcatttacgtanaatgtgaaaactaagggtnttggaagaanacatangagaaactcttacaactttgattangcaaagaactctatggatatgataccaaattatacccataaagacaaaagtgataattagatgt

SEQ ID NO: 83573 - DNA, 379 bp, Homo sapiens
ttttaagattccatagaatttgctagctagacaatcatgtcattttcagattaggaaagtttaacttcctttccatttagatgccttttatttatttttcttgcctttattgaactcaatagaacctctattactatgctccatagaagtgctaagagtagacatccttaccttattcctgattttaaggggaaagcattccgtttttaccattaaatatgacgttagctgtagttttttcatagattttctttttcggattgagaaagtcctcttctattcctggcgtgttgagtgttttatcaggaatggatgttagattttgccaaatgctctttctgggttatccagataaatacatatacttttaaaaatttta

SEQ ID NO: 83574 - DNA, 388 bp, Homo sapiens
tttgtttttccccactccctgccttccctacaattgtttctttcacctgtccctcgcctactatcggctgcccttgctttctctgtgcctgtttataacctactgctcccctccctaccttaccttactctttcttcttccccttacctctcgctgcccctatccctgccttgcccttccctctctttctctcctccccttcttcccctcacctctcggtccctattgccttctctactggtctcctcccctctctttctctccccttctccttccgtcccctctccctttctatctccctcctcctgctctctttgagtgggtacagcaaaccaaacagcccagcagcccagcagcccagccatgcggcgcctcacagtcgatgact

SEQ ID NO: 83575 - DNA, 423 bp, Homo sapiens
ttctccccaaattgatgtacagatttaaggcaactcctatcaaaattccagcaagaatttctatagctataaacagaattattctaacgcttatatggaaaggcaaaggaattaaaacagctacaattttcaaaatgaagaataaaatgggaggaatcattctgatttcaaaacttattatatagctacagtaatcaagcctatgtagttttggtggagggatagacatagagattgatagaataaaaagaacccagaatagcccccacaaaactataggcaactgattttttataatggtgtaaaagcaattcaacaaaggaggaaaaattcctttcaacgaattattctagcataattggatatcttcaggccaaacaaacaaaacaaacctcaaactcaaaatgggtgcatatttaaaag

SEQ ID NO: 83576 - DNA, 388 bp, Homo sapiens
attttgttccactgatctatttgttctttcactaataccatattgtcttgataactctagctttttaggaagtcttgaggtcaagtagggcaaatcctttcactttgttctctccttcaaaaaaacttcatataaacttaagacttaagtttgttgatatccacaaaatttgctgggattttgattgagattgtgttgaatttgtagatcaagttgggaagaaatgacatcttgacagtattgagtcttctatccaaggaaatggagtatttctccatttatttagttctttgatttatttcatcagactttcttcatatagatcttatccatattgttagatttgtgcctgagaatataaatgggtttgtgtttttcacttcaaatg

SEQ ID NO: 83577 - DNA, 382 bp, Homo sapiens
taatcccttattcctctgtatatagcatgtattttccttctggctgcttttgagagtttctcttttattgatctgagtaatctgattattattttccttggtatacttttcatgttgctggagtttagggttccttgagcttcttgaacttgcgggtttatagtttcattaagttttgacatttccagccattatttcttcatatatttctccatctctcctttactctcttcttcagggactccaattactcatacggtaggctacctgatgctatccacagcttactcaagttcttttcattttttttctgggttctttttttctctctgcatttcattttggatatgtttactgctatgccttcaagatcacccaactt

SEQ ID NO: 83578 - DNA, 4597 bp, Homo sapiens
cagggataaaaattcagcctttaatccaatggcaagtgatcctaacaactcttggacatcatcagctcccactgtggaaggagaaaatgacacaatgtcgaatgcccagagaagcacgcttaagtgggagaaagaggaggctctgggtgaaatggcaactgttgccccagttctctacaccaatattaatttccccaacttaaaggaagaattccctgattggactactagagtgaagcaaattgccaaattgtggagaaaagcaagctcacaagaaagagcaccatatgtgcaaaaagccagagataacagagctgctttacgcattaataaagtacagatgtcaaatgattccatgaaaaggcagcaacagcaagatagcattgatcccagctctcgtattgattcggagctttttaaagatcctttaaagcaaagagaatcagaacatgaacaggaatggaaatttagacagcaaatgcgtcagaaaagtaagcagcaagctaaaattgaagccacacagaaacttgaacaggtgaaaaatgagcagcagcagcagcaacaacagcagtttggttctcagcatcttctggtgcagtctggttcagatacaccaagtagtgggatacagagtcccttgccacctcagcctgccaatgaaaatatgtctcctgcacagtcattccataaagaactgtttacaaaacagccacccagtacccctacgtctacatcttcagatgatgtgtttgtaaagccacaagctccacctcctcctccagccccatcccggattcccatccaggatagtctttctcaggctcagacttctcagccaccctcaccgcaagtgttttcacctgggtcctctaactcacgaccaccatctccaatggatccatatgcaaaaatggttggtacccctcgaccacctcctgtgggccatagtttttccagaagaaattctgctgcaccagtggaaaactgtacacctttatcatcggtatctaggccccttcaaatgaatgagacaacagcaaataggccatcccctgtcagagatttatgttcttcttccacgacaaataatgacccctatgcaaaacctccagacacacctaggcctgtgatgacagatcaatttcccaaatccttgggcctatcccggtctcctgtagtttcagaacaaactgcaaaaggccctatagcagctggaaccagtgatcactttactaaaccatctcctagggcagatgtgtttcaaagacaaaggatacctgactcatatgcacgacccttgttgacacctgcacctcttgatagtggtcctggaccttttaagactccaatgcaacctcctccatcctctcaggatccttatggatcagtgtcacaggcatcaaggcgattgtctgttgacccttatgaaaggcctgctttgacaccaagacctatagataatttttctcataatcagtcaaatgatccatatagtcagcctccccttaccccacatccagcagtgaatgaatcttttgcccatccttcaagggctttttcccagcctggaaccatatcaaggccaacatctcaggacccatactcccaacccccaggaactccacgacctgttgtagattcttattcccaatcttcaggaacagctaggtccaatacagacccttactctcaacctcctggaactccccggcctactactgttgacccatatagtcagcagccccaaaccccaagaccatctacacaaactgacttgtttgttacacctgtaacaaatcagaggcattctgatccatatgctcatcctcctggaacaccaagacctggaatttctgtcccttactctcagccaccagcaacaccaaggccaaggatttcagagggttttactaggtcctcaatgacaagaccagtcctcatgccaaatcaggatcctttcctgcaagcagcacaaaaccgaggaccagctttacctggcccgttggtaaggccacctgatacatgttcccagacacctaggccccctggacctggtctttcagacacatttagccgtgtttccccatctgctgcccgtgatccctatgatcagtctccaatgactccaagatctcagtctgactcttttggaacaagtcaaactgcccatgatgttgctgatcagccaaggcctggatcagaggggagcttctgtgcatcttcaaactctccaatgcactcccaaggccagcagttctctggtgtctcccaacttcctggacctgtgccaacttcaggagtaactgatacacagaatactgtaaatatggcccaagcagatacagagaaattgagacagcggcagaagttacgtgaaatcattctccagcagcaacagcagaagaagattgcaggtcgacaggagaaggggtcacaggactcacccgcagtgcctcatccagggcctcttcaacactggcaaccagagaatgttaaccaggctttcaccagacccccacctccctatcctgggaacattaggtctcctgttgcccctcctttaggacctagatatgctgttttcccaaaagatcagcgtggaccctatcctcctgatgttgctagtatggggatgagacctcatggatttagatttggatttccaggaggtagtcatggtaccatgccgagtcaagagcgcttccttgtgcctcctcagcaaatacagggatctggagtttctccacagctaagaagatcagtatctgtagatatgcctaggcctttaaataactcacaaatgaataatccagttggacttcctcagcatttttcaccacagagcttgccagttcagcagcacaacatacgtgggccaagcatatattgaactgagacatagggctcctgacggaaggcaacggctgcctttcagtgctccacctggcagcgttgtagaggcatcttctaatctgagacatggaaacttcattcccccggccagactttccgggccctagacactacagaccccatgcgacgacctccccagggtctacctaatcagctacctgtgcacccagatttgggaacaagtgccaccatctcaacaagagcaaggtcattctgtccatttcatcttctatgggtcatgagggactctggaaccatccactaggtggtgaaattttccagaaagcccctttgtcaacatctgtaccgtctgaaacaacgtctgataatttacagataaccacccagccttctgatggtcttagaggaaaaacttgattctgatgacccttctgtgaaggaactggatgttaaagaccttgagggggttgaagtcaaagacttagatgatgaagatcttgaaaacttaaatttagatacagaggatggcaaggtagttgaattggatactttagataatttggaaactaatgatcccaacctggatgacctcttaaggtcagggagagtttgatatcattgcatatacagatccagaacttgacatgggagataagaaaagcatgtttaatgaggaactagaccttccaattgatgataagttagataatcagtgtgtatctgttgaaccaaaaaaaaaggaacaagaaaacaaaactctggttctctctgataaacattcaccacagaaaaaatccactgttaccaatgaggtaaaaacggaagtactgtctccaaattctaaggtggaatccaaatgtgaaactgaaaaaaatgatgagaataaagataatgttgacactccttgctcacaggcttctgctcactcagacctaaatgatggagaaaagacttctttgcatccttgtgatccagatctatttgagaaaagaaccaatcgagaaactgctggccccagtgcaaatgtcattcaggcatccactcaactacctgctcaagatgtaataaactcttgtggcataactggatcaactccagttctctcaagtttacttgctaatgagaaatctgataattcagacattaggccatcggggtctccaccaccaccaactctgccggcctccccatccaatcatgtgtcaagtttgcctcctttcatagcaccgcctggccgtgttttggataatgccatgaattctaatgtgacagtagtctctagggtaaaccatgttttttctcagggtgtgcaggtaaacccagggctcattccaggtcaatcaacagttaaccacagtctggggacaggaaaacctgcaactcaaactgggcctcaaacaagtcagtctggtaccagtagcatgtctggaccccaacagctaatgattcctcaaacattagcacagcagaatagagagaggccccttcttctagaagaacagcctctacttctacaggatcttttggatcaagaaaggcaagaacagcagcagcaaagacagatgcaagccatgattcgtcagcgatcagaaccgttcttccctaatattgattttgatgcaattacagatcctataatgaaagccaaaatggtggcccttaaaggtataaataaagtgatggcacaaaacaatctgggcatgccaccaatggtgatgagcag

SEQ ID NO: 83579 - DNA, 420 bp, Homo sapiens
ttggaggactcacacttttccatagcaaaacttattgtaaagcttcaataatcaaggcaatgtgggatggcataaggatagacttatagatcaatgaaatagacttgagaatccacaaataagcccttacatttatggttaattgatattttcaaaaagaatgtcaagacaatcaatgggagaactaatagtcttccacagatggtgcctaggcaagtgaatatccacatgcaaagaatgaatttggacccctacttcacatcatactcaaaaactaatttaaaatggatcattaatgtaaatgtcagagttgagactgtaaaactcttagaagaaaacctaggagtagatatgacaccaaattccaaagtgataaaagaacaaataaagatgctatcaagaaagtacaaataatgagag

SEQ ID NO: 83580 - DNA, 375 bp, Homo sapiens
  misc_feature (1)...(375): n = a,t,c or g
gggaaaatggcagagattagttcaacccttaaagacttaaaggttgtagaggtgttgtctccattatagtcacattcagtttcagctgtttgacctgtgcaaaaactagatggcctatggtgaataacaatggaatactacaaacttaagcaagtagtagtccaattgcagtgctgtgttggatatgctttctttactagacaaagtaacagcctcttttataggtatatagctgctaatctagcacagggatcagcaaactacagcccacaggccaaatctggttcattacctgtttttgcaaataaagttttattaacatgcaactatcatttatttacatattgnctgcggatgcttttgtgctacaatggc

SEQ ID NO: 83581 - DNA, 405 bp, Homo sapiens
tcgaaataacttaagacaaatgaaaatggaaacaccacagacaaaaacttatggcatggagcaacagcaattctaatagggaagtttttaagtaagtaaatcaaaaaagaagaaagatcccaaataaacaacctaacattacacctctaggaactggaaaaaaaagaataaaccaatcccagagtcagtagaaggaagaaaataataaagataagagcagtaataaatgaaatggagactagaaagacaaaggaaaagaacaatgaaactaagtgtttgttgtttgaaaagataaaccaagttgatatacctttagccagactaagaaaaaaatatagagagagaaaggactgaaataaataaaattataagtgagaaaggagatactacaactgaaaccacagg

SEQ ID NO: 83582 - DNA, 385 bp, Homo sapiens
cccacgcgttcggagagctacagtacatttcctgttaaggccatcatacctattgatcggaagtcagaccatcacatttgctctgggccggtggttctgactctaaccactgcggcgatgaaaatatttggaaccagcctggatgctggggccactcctattgatctaaagctttacgactatgtaatggacactcattgcattttcaggcaactggatgtggtgtataacaagaaaacttagaaggcttaatctctttcctctctgaaacatcacacatgtaatattcacgagctttccgacctaactcgggttgaaactcttgcctttcgggggaaagccctgatctcactttgtgcactgagtgatgtcaccatctctaccg

SEQ ID NO: 83583 - DNA, 463 bp, Homo sapiens
ttcagaagagattctgctgtctacatcaatacacctgaatagttggacagaaaattgaaatcttttaactaattctaactatgaagcacagtgaaatagaaagttaggctgtaagaagtaaggctcttctgtgtgtcatcagcttggttccatttgcccaattgatacatttacatggacaatctcatatgtgtcttctgtcatcacaggtgcagagtccagtggtgacatggatgttctcctgacccatcccagcttcacttcagaatcaaccaaacaggtgcctcagagtttataatcaatggtgatcagtcttacacaacagtgaatttcactttttaagtgatagttgggtattttcagaataagttttgttttcgccttcctgaaaagtctgaagagctttgtactgattgaattctgcgaaaggcaaatttctcgaaaaggatacctattattcttc

SEQ ID NO: 83584 - DNA, 378 bp, Homo sapiens
  misc_feature (1)...(378): n = a,t,c or g
gaatctatnggagcgaagaacccaagcggcgcgacagcatttactgcagcttggacttgctacagaggcctttcttgtacagggctccactcacaactagaagccttctatgtcactcaataaatggggtattacagtacttctaagtgaacaacatattgcttccctacccagagtcccacctttggactctttcttaaaggtgggagggtaaaggcgcaataatttgtccatcactttggagtgaatgtcccagcattccctagaccctagaccactggatccctaaaaacttcactcatgtagctcatccctgaatctttgcagtggttatcttttactttctagaatgtacatcttattaggacacccagggtg

SEQ ID NO: 83585 - DNA, 380 bp, Homo sapiens
caatttctaactgttcatcgttagcatacagaatttacaaataaaagtgcctatatgaagaagacatgatgctctatgtagaaaatcccaaagaatctatagaaaagcaaagccacaggatacatggtcaatatctaaaaattaattgtatattctgtatgctaacgatgaacagttagaaattgaaatgaacaaaattgtaccattacaatggcagtaaaaacaaaatagcttttacaaatctaacaaaataccagaatatacagaatcgacatgctgagaattacaaaatactggtgaacaaaatcgaagatctaaataagtgtagaaatgtactgctttcatggattggaagacggaatattatcaacacgatgact

SEQ ID NO: 83586 - DNA, 411 bp, Homo sapiens
  misc_feature (1)...(411): n = a,t,c or g
attgttggtaatttaatacgtggtctcgctgccggttctccaaatgttagaaggataataaggggttcttaccaacaagtgtacctcatttttttaacaatgtagaagaaatgaggcgatttgtgaagagccccattctaccaaanctcactcaaggtaaaacagagaatgggaatagtcccctcctattaacgaaattgaatttgttgttaaaaaacctttcaagaggaaatctcaaggcctagataatttctccagataattcttaccaaagatttaaaacagaaaaaacaccaattctacacaattgtttccagaaaatagggaaatgaacacttccaaaattgttgtataaagccaacattacctttacatcaaaactagactatggtagtacaaaaacagaagtct

SEQ ID NO: 83587 - DNA, 427 bp, Homo sapiens
gaaaatactgtgaacaatttgcaccaacaaattcaataacctagatgaaataaagtcctagaaagacacaaactatccaaactgactcaagaagaagtagaaaatctaattacacttaaaacaagtagagagactgaattagtaataaataaataagtaattccccacaaagaaaagccaggcccagatagtttcactggtgaattctaccaaacatttaaagaagagttaacatcaacttcacaaactcttccaaacaataaaatatggaagaatacttcccaattcagtctatgaaaccagtattaccctgaagccaaaaccagaaaaagatctcacaggaaaactacagaccactacctctttcaaatatagatgcaaaatctcaacaagacactagcaaaccgaatttagtaacacataagaa

SEQ ID NO: 83588 - DNA, 589 bp, Homo sapiens
tttttctgagttataagtgttgtaatagggggtagtaacaagacgttgtaggactacacaaaataaaacaaggaggccaaatcgcaagcgtttgtgggtttcacaggggacatctgacagcaaacattccagggcaccgagagatggtgaggagagatgatggcattgaattggagagatgagctgagatggactgcgcagaggacgagggaaagccggtgcactggagacggaaggaacgcgaggagcgcctcatcaccaggcgggtgtatctaggggcgaaggctgcagatctggggcgcaggctggaaagtggggtgcagccggttgacgtgaggtctgggagttggatggaccgaatgaggatggagacacctagggatgtgtccgaaggatctggcgctgcacaaatgagggcggtttgggggacggaggcccgggcgggggcggagtgttgtccaagagtaaggagggggttcctggagacgtggcactcggagcggggctgggttccgctccggccgcctgggctgcagccgtatggcctagaacccgactgaccccgctagcctcgcacccagcctctggg

SEQ ID NO: 83589 - DNA, 409 bp, Homo sapiens
aaaaagatgcagaaaaatggaataacccgagggatctgggacaccatcgagtgtaccagcatacacctcacaggagtcccgaaaggagaggagaaatagaaaagggaagaaaaaattaaacttgaaggaatagtatccccaaattccccaaatttgatgaaataaatgaatctacatatcccagaatctcaacaaactgcaagccagataaactcagagatccacagtgacaaacactgttgtcaaactgtcaaaaaaacaatgacaaagcagcaagagagaagcaactggtctcgtacaaaggagcctcaataagatttttagcagatttctcatcagaagccttggagaccagagggcagtcgtataagtaaaggtaactacacaggaaaatagaaaatcaaggatt

SEQ ID NO: 83590 - DNA, 401 bp, Homo sapiens
gttttcccagcctcccaccaaatcttagcatacatatagccccttcctattaatgataagcggcctctaccctcccctgcccagaaggaaacaagcaaatcaatctccaagggagcacaacctctcccccacccctgctatcggttatgtccttttcaagctgtatggggaggggaatttggcccaacccgggtacatgtccccttctccttctctgatttaaagcagatcaaggtagacctgggtaagttttcagatatatcctgataggtatatagatgtcccacagggtccagggcaaaccttcaatctcacctggagagatgtcatgctattgctagatcacaccctggcctttaatgaaaagaatgcggctttagctgcagcccgagagtttggag

SEQ ID NO: 83591 - DNA, 402 bp, Homo sapiens
aaactttccccttgacatgtgatgctttctgggagttatcttttacaaaaccctgtatttcaggctgaggaagttaccttcaatcactaatttgctaaatgtttctttttaaaaaactgttgaattttattaaatacttatttcatatctgtgaggtgatcatatgattcttctcttttaacctgttaatgtgctaatttttgttcattgattttctaatattaaaccaaccttgcattcctgagataaatctaacttggtccttgatatattagtgtttttacacattgcaagactctcgtttataatttgtgtaggactttttgcattcttttcatgagtgatattggcctaaatgtttttttctcatatacgcctggtcagatttggtttcaagattat

SEQ ID NO: 83592 - DNA, 995 bp, Homo sapiens
gcacggaatataactgtgtgcattgaattcaaaaattcagatgaagaaagtgccaagcccctgaaggtgagccaagtcagcaaagggacccagcataaagtgggaaggcagaacaccccagccggccctcgtatggtctacgcagaactgccgcatactggcccaatagctaatgtgggggaccgtgggatgctcacattatggaaggtgcacgtggccaagtgcctgaggaactggaaaaatggctctgggaagtcagtcccggttgctgatcacatgatttatgtatttatggaaaacctggagggcccctcttcacctcagccgcctacacagcagttctgcaccactctcagaatccggatttctcagatgagtaattccaagaagttggcactattattacctccctatttgatggatgagaaaactgtggctcagagaagtcaagtgaaaattgagctaccaacacaactccatgagaaacaccatattttgttttctttttatcacgtcacctgtgacatcaatgcaaaagctaatgccaaaaagaaggaggctctggaaacgtcagttggatatgcttggcttcctctgatgaaacacgatcagatagcttctcaagagtacaacatcccaatagcaacaagtctgcctcctaattatttaagctttcaagattctgcaagcggaaagcatggtgggagtgacattaaatgggttgatggtggcaaaccacttttcaaagtgtcgacatttgttgtatcaacagtaaatactcaggatccacatgtgaatgcatttttccaagagtgccaaaaaagagagaaagatatgtctcagtcacctacctcaaatttcatccgctcttgtaagaacttattgaatgtggaaaagattcatgcaatcatgagttttctgcctataattttgaatcagctcttcaaagttctggtacagaatgaggaagatgaaataactacaactgtcaccag

SEQ ID NO: 83593 - DNA, 414 bp, Homo sapiens
  misc_feature (1)...(414): n = a,t,c or g
cccacgcgtccgcgagcccaaaaataaacccttatgtatataatcaaataattttccacacgggtaccaagaccattcaatggggaaaagatggtctcttcaaaaagaggggttagggaaactgtatattcatatgcaaaagaatgaagttggacccttaccttatatcataggcaaaagttaactcaaaatggtccaaagacctaagtgtaagacctaaaactgtacaactcttggaagaaaacagaggaaaaaagcattaacacaatatatgtatttcttggatatgacaccaaaagcacaggcaacaaatgtaaaaatagacaaagtggactatattaaagtttaaaacttctgggcatcagaggacacaattaacagagtgaaaagacagcctacagactaggagaaaan

SEQ ID NO: 83594 - DNA, 419 bp, Homo sapiens
taaaataatacagtttaccaaaagtgaaataattctgtgactaattctgtatatactaaatgcattgaatctaaatttaaatttttttcacatatctccaggctcaggtggcttccctggaattcttctagatgtttaaggaaaaaataatgctagtcttactctcccagaaaacagaaagagaggaagcacttttcagtttgttttatgaaaccatcataacttgacccaaaccccaagaaagaaatgacaggaaaagaaaattgcagacctatttctgtcttatcaacatgggtttaagagttctatgtagagtattaactgtcagatccagcagtatttaaatataatttatcatgacaacatcaacttttcaagtatcaaaactggcttaatattcacatatcagcaaatcaaat

SEQ ID NO: 83595 - DNA, 425 bp, Homo sapiens
  misc_feature (1)...(425): n = a,t,c or g
ctttcagttgtactgtttcaggttttatatttaagtccttaatccattctgagttgatccttatcttataccatacataaaaatcaactcagaatggattaaggatccaatttcatgatttctgttttttaaaaaatttgttaaggtgttttaagagcccagaatatggtctgtgttggtgagtatttcacatgaacttgagaataatgtgtatcctgctgttgttggatgaattagtctataaatacccattatatttagttgattgatggtggtgttgaattcaagtgtgttcttactgaatttctgcctgctggatctgtcaatttctgatagaagggctttgaagcgtccgctataataggggattcttctatttctctttgcgnttctattgggttttgcctcacataatttgatattcn

SEQ ID NO: 83596 - DNA, 391 bp, Homo sapiens
gggagcatgaccttgggtttagcatcttttggggagggagcatgaccttgggggggcgaagcacttgggaggggagcataagcttggggggagcatcacctgggggggagcatcacctggggggggagcataaccttggggggagcatcacctgggggggaccatggcctaggggggagcaacacctggggggagcatcacctggtagggagcatggcctagtggggagcatctcctggggggagcaccacctgctgggggagcctcatctggggggggagcatcatgaggggggggaacatcacctggggggtaccattatcttggggggagcttcgcctgggggggaccactccttggtgaggcacaatcacttggggggaacattacg

SEQ ID NO: 83597 - DNA, 563 bp, Homo sapiens
gggatcaacaggatgactgcccttccttccagcgggcctggtactggggtgccccaggagagggtgtaccagggtgtggccagccagtaaatgcccacgactgtgatgccacagccctcggtccccctctgtcgcgtgtaagatgggagcaggagccccaaaggagccagggctctcgagcacgaatgtctgttgccggagttaggaaagggcccactctcacaaagacgtccaggccaagactcaccagtggagcccaccaaacactaatggaggaaaagcaacccgctacacagacacttccaggacacagaggaagacgggccatgtcccagctcctctgtgaaactgtcatcaccctggtgccaaaaccatgcaaggacatgacaagaaaattaaagtccactcaggagcctagacacaaaaatcccttaacaaaacatcaaatcaattccagcaatatataaagagaacacatatgaccttgtggagcgtacccgggaatgcaaagttagtttaacatttcaaaatcaattgtcattcactattagcagacttgtatt

SEQ ID NO: 83598 - DNA, 687 bp, Homo sapiens
gaactagaatagctgaaacaattttgaaaaagaaaactaaagtgggaggaaccattttatctgattttaagatgaataaagctagagttctagagatagtgtggtatttgtggagtaacagatgcatgaatcaatggaacagaatagaggacccagaaacagatccacaaacaaatggtgctctagcgattggacatccacagaccaaacaaataaaattaacaaatcgaccccaaagcctcaacctaaacctcagacctgatatgaaaatgaattcaaaatggatcgtagacttaaatgtaaaatgtgaagctattaaaacttttagaagaaaacaagagaaaatcttcaccaccaaaaacataatctagaagataatatatataagttgaactttaaaatttgctctgcaaaaagtgctgttagagaattaagaaaaaactacagcctgagaaaaaatatttgcaaaccgtctatccaacataggactcatatctagagaatataaacaactcttaaagcttagcagctaaaaaacagtttaattagaaaatggtggcctggcatggtggctcacacctgtaatcccatcacttcgggaggctaaggtggatgaaccacttgaggccaggggttcaagaccagcctacccaacatggtgaaaccctatctctactaaaaaaaaaa

SEQ ID NO: 83599 - DNA, 385 bp, Homo sapiens
cgaaatctggcagggatggcaagcaggagggacccccaaaggtcatctgaatccccaggctctgtggcagccagggttgggcctgcccagaccacaaggcgtgggattaggagattaaatccagggtgaggaggctttagagaggcagcagcccctcctactctttccggcgaccccagcctctgagtcccacatccaagtcccatatccacacatccggatcaatctctacaatgcactaggcctgcaggaggccaaagctggcaggatgggctggcaaggagcaggagaggtcaggaggctcagtctccacctgctgttggccttgactgtgccctctgccccacagcacccccaactgcagcacgtgggccaagcccagcca

SEQ ID NO: 83600 - DNA, 501 bp, Homo sapiens
aagaatgaagaaaaatgaagagagcttcagagacctttgagacactatcaagtgtaccaaaatgccaagtataccaatcataatgagaatcccagaagagagagagagagaaaggagcagaaagactatttgaagaaatagtagcccaaaacttcccaaattttatgaaaacattaatcttcgtatccaagaaattgaacaaactccaagtagggtaaactcaaagggattcacatttagatgcatcatggtcaaattgttgaaaaagagatctcaaacgaaagaagcaagtaaagctaagaagtgacttctcttaagaaacaatgcaggcctgaaagcagtgagatgacatattcaaagtgctgaatgaaaaagactatcaaccaagaattatttttgcagtggtgcaatcatagctcactgtagcttcaaactcctgggctcaagcaattctctttcctcagcctctcaaataggactaccagcatgtgccaccacact

SEQ ID NO: 83601 - DNA, 405 bp, Homo sapiens
  misc_feature (1)...(405): n = a,t,c or g
gcgctctacgcaggggatctccgcatagtacctgggagtcttataatgttagtgtgtggatgtggactggggccttcagtgcaggctgagggtgtggccagagggctgagggtgtgtggacaaaggggtgctgagggtcagggcgccttgataaagggctgcgggtattggagggggtgagtggctgaggctatggtcaggggtctcaggaagggatgcaggtttgtggccaggggcctcagccccagggctgcgggtgtggggatggagaaggctgctgtgtangctcagggtgtggccaggggtctgcagcggatggctgtgggtgtggggggcactctaatgctggactgcggtattactgtggtggcgccggcttgtagataatatcagtgggcagcctga

SEQ ID NO: 83602 - DNA, 421 bp, Homo sapiens
gcgaattactataattgagtggaatgtggcaaagcttttttccgtccttaaggcttactacatataagacaactcatactggagagaaaccgtgcgtgtgtgaagaatgtgggaaagcctctaacagatcctcaattcttaagaaacataggctaattcatacatgagagactctacaaacctgaaagatgtgacaatgcttttggcaacacctcagacttttctgaatataaaagaaatcatatgaatgagaaatcctagaaatgtgaagaatgtgacaaagcctttaaatggctgtcacacttgattgtaggcaagaaaatatactggagaaaactactagaataaacaatgtggcacacatttaaccaatactcatgccttattgcaaaggaaagcatttatatactagcctgggcag

SEQ ID NO: 83603 - DNA, 1223 bp, Homo sapiens; identical to SEQ ID NO: 68667

SEQ ID NO: 83604 - DNA, 398 bp, Homo sapiens
cgccttgccccaagagaactttgttttggacccaggagaccaaacacaaacttgcagatgggccgagaggcgcgtgggagttgtcctcgcccccacatcaaggaaggccggggccacctgagccgaaccatcccctccctgaggccccgaaaccccctcctatttgaccggcgggggaaaccctgtcaccccctcttcgccgagaaaagcgcgtcttccctccgcccagatcggcggagccccgaactctgcgcagtttcaagactagagaaactgcctcagatgtttccaggaacagatcccccccacaccccctccccgcgagggctgcaacagcgcaggggagggccggatctctttacgtcttggaaatctgcagcaaaaaggagccactaatc

SEQ ID NO: 83605 - DNA, 398 bp, Homo sapiens
gtgatcccagtctgaggctcccggggatgagataatagtctggagacgggcatgggttcttggagagtggcatgagctggctctgccctgggagcccggtctgagggggacgttgttggagcccctactgttgggggtggttatgggagggggtggggtgagggaaacgggagaatgaaggagaaaactgagccctaccttcaccgtgttcatttggaaggacgagccgggtccttagggggaggttccaggactctgcccttggcgtttagggttggggggcggtgggactctcttgtttctgtaaacccccttccgcaagggctgtgctatcatgctcctagcctcccaccttcgcttaagacaatgtataaactatgcttttatgtgaaaatgac

SEQ ID NO: 83606 - DNA, 382 bp, Homo sapiens
atacattgaaagattatttattacttttttgtgagatgtcatgcactcactcacacagaaatagaacacgatggagcttctggcttggagtcctcctaattcaagaagatgtctggagtgcagacggtggggacgggagtggcagaaccacgggcatggggaggcggctgccatggtggggacgggagtggcacaaccacgggcatggggaggcggctgccacggtggggacggaagtggcacaaccacgggcatggggaggtggctgccatggtggggatgggagtggcataaccacaggtgtggggaggcggctgacgcgcctggctggggcatggtgaggctaactggctcagggctagacacactggtttcaattcag

SEQ ID NO: 83607 - DNA, 405 bp, Homo sapiens
ggactctgagcacccatgacacccacatagcccccagtagcatcgactgcatgggcctttcccctcagacgaacagagctgcagccctgggaaccacctgcccaaagaccaggcatgaacccagaacacattcccacatctgcccaaagaccaggcatgaacccagaacacattcccacatctgcccaaagaccaggcatgaacccagaacacattctcacacgtgcccaaagaccaggcatgaacccagaacacattcccacgtctgcccaaagaccaggcatgaacccagaacacattcccacgtctgcccaaagaccaggcatgaacccagaacacattcccacatctgcccaaagaccaggcatgaacccagaacacattcccacgtctgtccaaagaccc

SEQ ID NO: 83608 - DNA, 401 bp, Homo sapiens
ccccgcccggagtcaggcggacaagccggtgctggctacccgagtcctgcctgggcactgccaaacggttcaacgtccggagtggttacggattcaccaacaggaatgacgccaaggaagatgtcttcgttcactggacagctgttaaaagaaacaaccccaggaagtttctgcgcagcgttagagatggggagactgtggaatttgatgtcgtggaaggagagaagggcgcagaagccactaatgtaactgggcccagggcggcgggggtgcccatgaagggcagccgttatgcccccaaccgacgtaggttccgctgattcatccccggcctccctcagttgccccaccacccatggtggcagagatcccctctcgggggacagaacctggcggcgaag

SEQ ID NO: 83609 - DNA, 576 bp, Homo sapiens
tttgcccctgcacacaaaggaagcatggaaattatggggcaaggtgatctcactgaccaccctgaccagcctcctgggcagcctctgctgttcaggacacaaccatagcctgctgcagaagctacattcccatccatgaaaaggtggtgcacataccccaataaaaatctggttttagtgggtttaaacaaacagaatcttgcgtaccaggtataaacagctccagatttggtaagggcaacagaaaactgggatccgcattccactttaactactccaagaccagtaagagaatcaatcttcataggcactttacagccatcgctgcctccccggccgagcttgccgtagtccccgtccccccaggaccagacagtgtcgtcatctgtgaggcagagggtctgggcatctccactgccacaggcgatgtcaaccacacggtgggccctgcagcgccttccaccagctttcggctttcagctgggtccttcactgttcgctgtgccccagccgggccgtagcggctttttggccccatgtgtaagaggttccccgggttgttgttgacaaaggggg

SEQ ID NO: 83610 - DNA, 352 bp, Homo sapiens
cccaaatgaatgaccatactattctatggtgttgtgtctgcagtaggtaaaacacgtggtctggaagctaaggggtgaaagtaacagagccatcactcactgtcatcctcagtgactcatttaggaaattcatttcctgtccctgaaactttaagctttgtgcgtctgaagatctgctctgggttccagatggggaacgcttcaccagggtatagagtaagagctcccccaaactttaacccacatctgccacctggtcatttcaaattccttggaccaaaaggccatgggacgagggaaggagtcactgtactggcaggaattactgtccctgagcaactggcaggagaag

SEQ ID NO: 83611 - DNA, 401 bp, Homo sapiens
  misc_feature (1)...(401): n = a,t,c or g
ctgacttcagagcacttaactgttttgctatataccaacccatatcatagtgtgacagaaagctggggtcttaagacacattggggtgggtgggggttggctgtnnnntttcatctctcttctcttctcgtctacccccccctcttcttgctttccccttagccctggcctttcccacccctctccctgtccgtgaccttttctatctcctctccttatacaccttccctgcccctgaaccctttcgcccccatcctgttcccctttcctcctcctccttantaaccctctcctcctttttttgcccttcctcacttcacccccacacctgccttgttcgcccttccccctcttcctttctttctttcatttctttgccatacacgtcgcctgtcctccct

SEQ ID NO: 83612 - DNA, 1910 bp, Homo sapiens
cgaatatttttaaaaagatcatggagccccttgggaagcagattgtaaccttttctttgccctgtgcgtaattctacacctctcatcgctgtagttcaagagccgcaaagaagaccgagagaggaaaggctccattccattccaccacacaggcaagaggaggccacggagaatgggagtgcccttcctgcttcacgaggaccacctggatgtgtcccccacgcgcagcacattctcctttggaagtttctctgggctgggagaagacaggcgaggaattgagaaaggaggctggcaaaccaccattttagggaaattgacccggcgaggcagttcagatgcagccactgagatggagagtctgagcgccaggcattcccactcccatcacaccctggtaagcgacctgccggacccctccaacagccatggagaaaacaccgtcaaggaagtgcgatctcagatctccaccatcacagttgcgaccttcaataccactttggcgtcattcaacgtaggctatgcagactttttcaatgagcatatgaggaaactctgcaaccaggtgcctatcccggagatgccacatgaacctctggcatgtgctaacctacctcgaagcctcacagactcctgcataaactacagctacctagaggacacagaacatattgacgggaccaataactttgtccacaagaatggaatgcttgatctttctgtagttctgaaggctgtttatcttgtccttaatcatgacatcagctctcgtatctgtgacgtggcgctaaacattgtggaatgcttgcttcaacttggtgtggtgccctgtgtagaaaagaatagaaagaagagtgaaaacaaggaaaatgagaccttggaaaagaggccaagtgagggagctttccaattcaaaggagtatctggaagttccacctgtggattcggaggccctgctgttagtggagctggagatggtggaggagaagaaggaggaggtggagatggaggaggtggaggaggtgatggaggaggaggtggaggaggtggaggcggcccttatgagaagaatgataagaaccaagagaaggatgaaagtacacctgtaagcaaccataggcttgctctaacaatgctcatcaaaatagtgaagtctttgggatgtgcctatggttgtggtgaaggacaccgagggctctctggagatcgtctgagacaccaggtattccgagagaatgcccagaactgcctcactaagctatacaagctagataagatgcagttccgacaaaccatgagggactatgtgaacaaggactctctaaataatgtagtggacttcttgcatgctttgctaggattttgtatggagccgttcactgacaacaaggctgggtttggaaataacttcaccacagtggacaacaaatccacagcccaaaatgtggaaggcattatcgtcagcgccatgtttaaatccctcatcacacgctgcgcttcaaccacacatgaattgcacagccctgagaatctgagactgtattgtgacattcgtcagctggtccagtttatcaaagaggctcatgggaatgtcttcaggagagtggccctcagcgctctgcttgacagtgccgagaagttagcaccagggaaaaaggtggaggagaatgaacaggaatctaagcctgcaggcagtaaaagcgatgaacaaatgcaaggagccaacttggggcggaaagatttctggcgtaagatgttcaagtcccagagtgcagcaagtgacaccagcagccagtctgaacaggacacttcagaatgcacgactgcccactcagggaccacctctgaccgacgtgcccgctcacgatcccgcagaatttccctccgaaagaagcttaaactccccatag

SEQ ID NO: 83613 - DNA, 413 bp, Homo sapiens
agaatctttgcctagccctaggctctgatgcttctaagaggtctcaagttttaggtattattttagcccatgacccattttgagtttgttgttgttgttgtttgggttacggatgctcggtgctctattgccattgtctgaaaaagctatccttcctccactcagtggcttctgcacctttgtcaagaattaagcgtttttgtttggatctatttctaggttctccagtctgttccattcaactatatggctgtccttctataatatccaactctcttgatcactgtaggtttatagtataccttgacatcgggtacagcgattcctctcactttattctttttcaaaatttagttattaagcctttgcctttccatgcacattttagaataaatttatatctacaacaattt

SEQ ID NO: 83614 - DNA, 410 bp, Homo sapiens
  misc_feature (1)...(410): n = a,t,c or g
aactgtggggctttaaatatatctatctatctatctatatacatagtatatttatatatatacgtagagagagagaattttctacatacaagattatgccttctgtaaatacagatagttttacttcttccttttcaattaaaataccctttatttctttttcttggctaattgcccttgcttgaacttactggataaggcgggataaaaggggagaaaggcgcatccttgtgttattactgagcatggagggaatgctttcagtctttcaccggggagtatattttagccatgggtttttcataaatatactttattatgacgaggatggtccattttcttgctggtttatcatgcgattttaccatgagagcgtgttgactattgtcaaatgtagtttcagcttcacn

SEQ ID NO: 83615 - DNA, 407 bp, Homo sapiens
tgctacaaacccttatggacagacatatagactaatggaacagacctgacagcccagaaataaacctcacatctatggtcaactgatttctgagaagggcaccaagaccacttaatggggaaaggacagtcttttcaacaaatggtgctggaaaaaaaattgatattcatatgcaaaataaagtcggacccttactttgtatcacacataaaaatttaaatggatcaaagctctaaatctgacagctaaaaatataataaactcttaaaggaaaatataagagcaaatatttatgacctttgaaacgtgacaatactttcttaaatcaccaaaagcacaggcaacaaacgagataaaatagatgtcgttaaattaaaaacttttggctgtgcgtggtgactcacgcc

SEQ ID NO: 83616 - DNA, 421 bp, Homo sapiens
  misc_feature (1)...(421): n = a,t,c or g
tttcattgatcttttgtattgctttcttcatcagaaattcatttatgtctgctctgatctttattatttcttctactaattttgggtttggtttgctgttacttttctagtttttttgttgcttcattaggttatttatgtgaaatttttcttcttttttgatgcaggcacttgtagctatgaagtttcctcttagtactgtttttgctgtatcccataggttttggtatattgcgttttcattattatttctttcatgaattttttcagttcccttcttaatttcttcattgactgattggtcattcaggagcatattttttaatttccatgtgtttgcatagtttccaaaattccttttgttattgatttggggttttatttcattngctgcagggaagatgcttgatattatttcagn

SEQ ID NO: 83617 - DNA, 414 bp, Homo sapiens
aataggacactaacactgatatacctttacaaaaacatgaaatacatatggataaatctaacaaaatatgtgtaagatttatatgatggaaactacaaatcagtgaagagagaaatcaagaagacctaagtaaatagagatacttctgtgttcatggattgtgaggcttcgtactgagatgtcattctctccacaactgatctataaattcaatacaatcccaatcaatttctacaaaaagccttgtgaaacattgattctaaaatttatatagaaaaataaaggaagcagaataatcaaaataattttgaaaaagaacaaagtttaaggatttaccctatctaattccaatacttactctaaagctacagtgatcaaaacagtgtggtgctggcaaaacaagagacataaatc

SEQ ID NO: 83618 - DNA, 392 bp, Homo sapiens
  misc_feature (1)...(392): n = a,t,c or g
ttttatttccttttcttgcttcattttcctggctataatttcttgtactatgttgagtatgagtggggagggtggtcatccctaccttgttcctaatcttatggagaaagaatttgtctttcaatgagtaagtctgatgttacctctgggattttttggtagatgctctttatgtgtttgaggtaaatcttgtctagttctagtttttttgaggggttttaccttgaataggggttggatactttgtagatattaaaaatactatgaagggagactggattattcttttttagctggaaatagagtagtatgtgaattataatgataaagnctgactgttgtctcaggctacaatacttaaggcaccaagacattactgctctgatcaactg

SEQ ID NO: 83619 - DNA, 394 bp, Homo sapiens
cacaaagcaaagttttaattttgacaaattggactttgtcaaaattaaaactttgctttgtgaaagagcctgctgagaagaggaaaagttttaattttgacaaagtccaatttgtcaatttttccttttatggataacacttttcaagtcttttgctcctaagatgttttcaagtctaggaactctttgcctagccatacgtcctgagattttctccaacattttttcttaaagttttatgttctatatttaaatgtgtgatccattatgagttaatatttgcgtaagatataagacttaagttgagggcatttttgcctatggatatccaattacttgatggccatttgttgaaaattctattttttcttgcttttgcgtatgtgacaaaaaa

SEQ ID NO: 83620 - DNA, 417 bp, Homo sapiens
acgggaagctcccggcccggcgaactaactggagcacggagctgcagccggttgggccggtgtactttcccggtaactccttcccggcgtgacgcgcggaaccgcggacgcggcggggccaggccgactcagggatttcccctcagttccttctcgtttccagtcactgctggccccggggggagccgggagccaacagggccgggccctgggctctcggagggcggcgggggagggggctgtctcctgcagggttgcgacctccggcaggagcgcgaggcggggcttaaacctggagcttgtctctgggagcttcttcctggtcctggatatgctgcccagagagctggcagcctacctgttgggcaggtgtttgctgctccgaggtcggcgccgtctatctcgcatgtcagctaa

SEQ ID NO: 83621 - DNA, 419 bp, Homo sapiens
  misc_feature (1)...(419): n = a,t,c or g
taaatgtaagtgcaaggcagatatgattttgattgaccatataattaaagctaaggacctaggatagataatatgtgaagggtataagagagagtgaaaaaatggcagattcccaaaaactaataaaagagatcagcaaacttgcaggatacgggatcaataaataaaatcaatggtatgtctattttttaacaatcagcaattgaatatgaaaggaagaaaggaagtccatttatagtattatcaaaaaggataaaatacttaggcataaattttaaaaagaagtgtaagaattatataccgacactgtaacagtgttgaaagaaattaaagatataaataaacagaaagacttctcatcgtcgtggatcagaagacttaatattgttaagatggcagtactcttcagattgatctcn

SEQ ID NO: 83622 - DNA, 391 bp, Homo sapiens
atttcatttatttctgctatgatctttattatttcttttcttctactaattttgggtttggtttgctcttttctagttctttaagagacatcattagattattttgaagtttttctacttacttgatgtaggtgcttataggtacaactttcctcttagtacttctttccctgtatctcacaggttttgatatgttgtgtttccattatcatttgtttcaggatgtttttaaatttccttcttaatttcttcattgaccattcaagagcatattatttcatttccatgtgttcgtatggtgtgcaaaataccttgtttttgatttgtagttttatttcattgcgatcacagaagatacttgatatgatttcaaatttaaaaagtaatttgg

SEQ ID NO: 83623 - DNA, 411 bp, Homo sapiens
tattttctctgaccacaacagaatgaagctaaaaatcagtaacagaaggaaactgggaaattcataaatatgtggaaatgaaacaagatgctttcaaacaaccagtgggtcaaagaataaatcacaagggaaattagaaaatgtcttgagacaaatgaaaacacaacataccaaaacttatggaatgcagcgaaagcagtgctaagaaggattattcaccatgaccaaggaaacttatggctgtaaatctttatattaaaaagaaggttaaaaatgaacaacttacattatacctgaaggaattaggaaaaaaagaacaaactaaacccaaagctaacagaagtaagaaaataaatactatagcagaggaaataaaagacaaatgacaaaaatcagtgaagctaagagttg

SEQ ID NO: 83624 - DNA, 452 bp, Homo sapiens
gaggctggagagtgttagtggcttcatacagtggtgtcataaagggcttcacatttgaaaaaagctcttaaacaactgatggataaaagaataaatcatgaaggaagttagaaaatattttgagatgaatgaaagcaaaaatacaacgtacgaaaacttatgcattgcagcaaaagctgtgcttatagggaaagttatagctgtaaatgcctacattaaaagatcttgaattaataaccaagttaactttccacctcaagcaattagaagagaagaacaaacttaaaaggaaggaaacaaaaagattagaacagagataaatgaaatagaaaacagaaaaacaacacgaataatctacgaaaccagaagttgtgttttttaaagattaacaaatagacaaagtttgctaaactgactaagataaaagaaagacagtataaacaactaaaatc

SEQ ID NO: 83625 - DNA, 391 bp, Homo sapiens
accttcctctacctggatatttttctcatattttggaaaggtttctgttattatttattgaggaagctttttcctacccctcactcttgctcaactttctcttgaacaccaataattcttagatttggtcttttaaggtaattttctatatcttggaggcaatctttgcataatatatttccattcattttactttttctcctctatgtaattccaaagagcctgtctttgggctgactgaatctttcctctgcttgacgcattctgctgttgagagcctccaataaatttttcagttagcaaatatatttttcaatttcaagattcgtttgattttttatcacttcaatctctgttaaattcctctgataagattctgaattgctttttg

SEQ ID NO: 83626 - DNA, 385 bp, Homo sapiens
cagagaaatacaaaatcactaatcagatttgtaaaaaatcaaaaagactgctaagatccagtgttttgagggagtgagtaaatgagtactccttcgtcttaccaggagattctaaaaccgtagagtcttggaaaaacataaagattccaccaaaaaactattataactgaaaaacaacttcagtaacattgcaggatacaaaataaatatacaaaaatcagtagcatttctatatgccaacagtgaatgatctggaaaagaaatcaggaaagtaatcccatttacaatagctacaaatgaaatacctaagaataaacttcaccaaagaagtgaaagatttctgcaatgaaaactgtaaaacactgatgcaagaatttgaagagga

SEQ ID NO: 83627 - DNA, 466 bp, Homo sapiens
  misc_feature (1)...(466): n = a,t,c or g
cccacgcgtccgtgattacatccttgaacatttcaataaaattttattaataactagaaagacttatcaaaaataaaagaaagaagccaatagttactattagggaagaaaaggttttatcaccatactccctaaagaaattagaagtataatgaatcatattttgtacaactctatgacaataaacttaacacctaagatgaactttttaaaatcttgaaaaatacacttaccaaaactgacacaagaaataattgaaaaatctaaataatttatatatattaaagaaattaaatcctcaagtaaaaactttcccataaagacttcaggaagagatggcctcactgatgaattctccaaaacttttaaagaagaaaatatatcaggcttagaacaactttttcagagaccaaataaagaggtaatacttcttggtttatgagaccaacataatcctaacatcaan

SEQ ID NO: 83628 - DNA, 508 bp, Homo sapiens
  misc_feature (1)...(508): n = a,t,c or g
agagatcccagctggccnccactgaaaccncctaagggtctngccagagcaccggccggaatnccggtcgacccacgcgtccggaaagaaaaactttcctcccagtagcaggaacaagataaatgatgtctactgttgccacttctgttcaacattgtactggaaattctagccagaagaattgggcaagaaaaataaaaggcatccagatggcaaaggaagaagtaagactatctctgtttacacatgacatgttaatcacaaaaaatcctaaaaaatccatgaaataattgttaaagctaatagacaaattttagcaaagttgcaagatacaagctcaccacacaaaaatcagttgcatttctatacactagcagngaacaacccaaaaaggtaactatgaaaacaattcagtttacaatagcatcaaaaaatagaatacttatgaataaatttaaccgcagtagtgcaagacttgtatgctgaaaactacaaaacgttgctgaaa

SEQ ID NO: 83629 - DNA, 424 bp, Homo sapiens
gaaattaatttttctgtcctctgtacccttcataccatttttttagaaaatgactttatcagagaatagaaaaacaacagggtcaaaataaaaacaaaagataattctttgaagaattcaacaaagtgacaaatctttagctaaacaaactaaaaaaagaagagaagatacaaataaataaaatcagaaattaaagtgggaacatttctacttacctaacagaaataaaaatgattacaagaaaatagtgtggacaattgtaggccaccaaattaaataggctggatgaaatggacaaattgctaaaaacacagaatctaccaaaactgactcagaaaaaattaaaattctgaacatatctgtaacaactaaagagattgaattagtaatcaaagttgtttcttttcaacaaagaaagtccagg

SEQ ID NO: 83630 - DNA, 413 bp, Homo sapiens
cccggatttggctcggtccgccagcaacccagctccttgctaaattcccagccctaagcgcaggggcctttacccagccttcccagtgggtcctgcttttccatagccgacacccttcttggaaacaaactcgctagacaccgctggttagggcggcgggtgcctatgtcccagcccaagacctcagatggtgcccccctgccactccccggcctttgacctggcctaaacccctaactcagccggggggccggatgccttcccaccgggagggtacctagccctccctaccaccgcgcgccagggaaaacggatgaaagcggggaggcccacctcgggactgggatcccactggccgaccccctcgtggaagccgcggccggccacactcacctcggggaagcagtccttgg

SEQ ID NO: 83631 - DNA, 404 bp, Homo sapiens
cttaaatatgaagaaacatacagattatacaaaattgaatgggagaggatatgtcatgataacactaatcaaagtaagacagaattggctatagtaatatcaaagtagatttcagagaatgttaccagtggtaaagaagggcatttcctaatgataaaagggtcaatttatcaaaaggatctaccaaataacatagtttcaaaacacaacagggtaaaaactgcaaggagaagtaaatccacagttatattcagggatttcaatatccctttttgaacaatgatagaagtagtagtcagaaaatcagtaaggatatggaagatttgaacactatcaaccaaattcacgtaatgaccatttatgtaacactctaccagcagcagcagtgctttttaagtgcacac

SEQ ID NO: 83632 - DNA, 399 bp, Homo sapiens
ccacgcgtccggcacttaacaagagacccctaaaatatatgaagcaaaaacatacagaactaaagggagaaataaataattcaaatatgttacttggagactttagtatcccattttgaataatggatagaacacctagactgaaacaacagtatatgtcacctagacctcccagccgtctatagaatatgtcatttaacagtagcaggcacatgttcttcacaagtgcacatgaaacattctgtaggacagaccatatgtggccaaaaaacaattctcagtaagtttaaaaaggttgaaagcatgcattttatcttctccaaccacaatggattggaatttgaaatcagtaagagaaggaaatttgaaagattcacaaatgtgtggaagttaaacagg

SEQ ID NO: 83633 - DNA, 389 bp, Homo sapiens
cccacgcgtccgatttttggaatttgaatctgtcaatatccacaaaataacttactgagattttgattggaattatgttgaatctatagatcaagttggaaataactgacatcttgataatattgagtctttctacccatgaatataggatatctccccatttatttagttctttgatttcttttaccagagttttgtagttttatttgtatagatcttggacatattttcttagatttatacctaagtatttcatttttagaggtgctaatctaaatattatttttttgtttcagattttgtttattgctgatataaaggaaaatgattgacatttgtgtattgactttgcatcttgcaaccatgttataatcactcattagctccag

SEQ ID NO: 83634 - DNA, 228 bp, Homo sapiens
ttttttttttgagacagagtctcactctgtcacccaggctggagtgcagtggtgcaatcctgggtttaagcgattctcctgcttcggcctctcgagtagctgggattacaggtatgcaccaccacgccccagctaatttttgtatttttagtagagacagggttttactatgttgcacaggctggtctcaaactcctgagcccaggtgatctgcccgccttggcctcc

SEQ ID NO: 83635 - DNA, 408 bp, Homo sapiens
aacaaatttagaaaatttttactactcaatatcaaaacattttgtaatactataataatggagacggggtggtatttgtataaagataggtatacagataaatggaacagaattaagagtttgcaataatcgcttatgatttttgacaaaggtattaaaacaatataagagtgaaaagctagtcttttcaacaagtagtactgggacaagtggatattcggattaaaaaaaaataaatttagatcattacctcagaccacacacgaagtttagctcaaaatggaccatagacataatgtaccaggtaaaactataaatcttctacaataaaagataggagaaagttctcatgttcttggtgtgggcaaagagttcttagacataaccataacagctagggccatgaga

SEQ ID NO: 83636 - DNA, 467 bp, Homo sapiens
ttagcttaattccactatggtgagaacacatactgtaaatgatttaaatgtgttaaaatttaactgaggcttaatttatgactcaggttatgatcaagatggtaaatgttccatgtggctttttaaaaatgagtagtttgtcacagttgatatcaacattatagaaatatcagttaggtcaagtttgctttttagtaagatgatttatatttttactgatttttttgtctgcttaattctatcacctattgagaggtatgtaaaattccactaagactgcagatttatgtttaatatttgttatagaacttaaaactatgctattagttacatataaatttacaactttctatatccctagtgatcattttatcattatgaaatgtctgtctttaactgtagtaatgcttcttaccttaaattccatattatctgatattagtataactacaccaacttccttttta

SEQ ID NO: 83637 - DNA, 1686 bp, Homo sapiens
  misc_feature (1)...(1686): n = a,t,c or g
atggaggccaaggtccgcccgagccggcgctcgcgcgcgcagcgggaccgtggccggcgccgggaggccgcccgcgacgcccgcgcccagagtccgtcgtcgggcgacgagcccgagcccagccccggcaaggagaacgcgggcctccgcggcgcgcccccccgaggcgccgcccccgcgccccgcaccgcgcgtcccccgcgccgccgccgccgcgagtccagctcgcaggaggaggaggtcatcgacggcttcgccatcgccagcttcagcaccctggaggccctggagaaggatatggccctgaagccacatgagcggaaggagaagtgggagcgtcgtctcatcaagaagccccgggagtcggaaacctgcccccctgcggagcccagtgagaacaggcggcccctggaggcaggcagccccgggcaggacctcgaacccgcctgcgatggggcgagaaaggtcccactgcagccctccaagcagccctgccagccctcccagcggccactcctgggtcagcgcagctggccccagcggtcacttctgggcctgaaacagccctgccagccccggcggtcacttctgggccccggtcagccctgccggccccagcggctccttccatccccagatcagctctgccagccccagcggtcacgcccggcccagccctgccggccgcattgggcactcccaggccccaggcagtgctgcaggcgcctgcggtccctgctgaccccgtgtcaccactgccggcgcctgcggtccctcctggccccacggtccctcctggtcccctgcctctactgccggcgcctgcggttcctcctggccccaaggcaccgctgcaggcgcctgcggtccctgctgaccctgtggcaccgctgccgacccctgcggccgtgggccagcccgtgtcactgtggccagcccggtagggcatcctcaggacagcgcagccggcccctgtggtcgctgctagcccagtgccagcggtaccagcccccgcggccactcctcaccctccgaccacgccgacggcccgccagcttcctcccaggacagtgctgctgcccccggcgggccttcctagccccgtgtcagtacggccagccccgaaggtccctgctgggccagcccagccgcccccggcggtcgctgctgcgccccaggcagccccagcggttagtggaagccccagagcagcccggcccactcacgccttcactcctgggcccgggacggccgaggcagcagaagcagccgctcatgggcccggagcagccctgcccacccaagcggccgctcatgggcccagagcagccctgccagcccctgcggccgctcatgggccccaacaagccctgcaaaccccagccgttgctccccattcccgatcgcccttcactcctggggcagccgggcccaccctgccggcctctcctggggctcctgtgccagccgcggcggntccctattggatctggtgccggcccgtcagccccggctctcgctcctgggcccttgggcatccctgccggcccctgcggtcccggtggacccgatcctgtgcccccgggatggcccgtcaggccccatctgtgagccctggagcctgatgcctgcaggcacctccccatatgggttttccagcccactccagtgtgatctgcaccctgg

SEQ ID NO: 83638 - DNA, 383 bp, Homo sapiens
attttgcctttgtcagttctttcagattttctatatagacagttttgtcatctggaaataaagttttatttcttctttcccaagctatgcaccttttgtttattttctttctcttgccgcattagccaggatttccagtgtgatgtgaaaaaggagtggttgagaatagcatcctagcttttttcctggtttaaccggaaaagctttgagtttctctccattacatgtgatgttagctgcagcgtttggagatactctttatcgagttgagaatgttcccctatatttctcatttactgagagtatttattatgaatgggtgttggattttgtcaagtgcttttcctttgtcttttggtatgatcatgtagtttttctttttt

SEQ ID NO: 83639 - DNA, 409 bp, Homo sapiens
accggtgaaaagccgtactcctgccccgagtgtgaccatcgcttcggccctatgcctgtgcctagtgtggtaagactttcagcgtcagctccaacctgatccagcaccagcgcgctcacaccgctaaaagccttaccgctgaggggactgcggcaagagtctcagccttggctccaccctgttgcagcacctgcgctccacatgggtgagaaggcctctaagtgccttgtttgtagtaagagttttgtgcacagttggaatctgctgcggcaccagcacagtcacaaagtccggaaacctgatgcttggtggtgagtgtggacagaccttcggccacagctcccacctgcccatccactaggcggcccacagcagcacccctgcgtctgcctgcagtgtggcagggccc

SEQ ID NO: 83640 - DNA, 423 bp, Homo sapiens
cggacgcgtgggttgaaatggaagtaagagtttggagattaactatcatgaagatgagatttaactcatctcaatgggtgcagaaaaagcactttataaaatttaacactcatacatcgtaatacttacagcaggcaggaatagagaagaatttcttcagacataaagattatctagaaaagccaaaagcaatcatattcaatggtgaaatgttgacagctttctttctgagattaggaacaatacagggatcactgctattcaagactgtattggaattcctagctaacacaatacacctagataaataaagtttaaagatataaaaaaagatgtaaaactgtctatttgcagataacatgattgtgtatatagaaaataaaaaagaatctataaataagctattagaaataagtgggccag

SEQ ID NO: 83641 - DNA, 392 bp, Homo sapiens
agtttgcaaatattttctctcattcaagaggttgtctcttcactctgttgttttctttgcttgctgtgcttttttatttttagtttaatgtatcttgtttgccttttttatttgtttgtttttgttgactgtgcttttgatgtcttggctataaattatttgcctagaccagtgtcctgaattgtttttcctgtgttttcttctactagttttataggttcaggtcttacagttaagtctttatcttgagttgatttttatataacgtgagagataggggttcagattcattcttctgcatatggatatccagtttttccagtatcatttagtgaagggaggtgtccatcccgcagtgtatattcttgacacctttgtcaaacatcagttgg

SEQ ID NO: 83642 - DNA, 406 bp, Homo sapiens
acagattcagcagacagaaaaccaataaggatatacctgaataaaacagcaccaccaagtaactggatctaattgccacttataggatatttcacctaacgatagcagaatatacattctgaagctaacctggaaccactcaccaagatagaccaaatttgggatcataaaacacagtttaaaaaaatttacaagaatagaaatcatacaaagtatggtcttagaccacagtagacttaaactagaaatcagtaacaaaaagatagctgaaacatctcaaagtatttggaaattaaatgacacacttttaaataacacatgggtcaaataaggaatctcaaaagaaattttaaaatattttcaaccaatgaaagtgaagctggcatcttcagaagagtatttggtc

SEQ ID NO: 83643 - DNA, 418 bp, Homo sapiens
ttttttcatacagctatccaatcatttcaatattatttattgaaaaggcattccttgttctcattgagttgccttgcacctttataaaaaacagtttataaagtgtgaatatatttctagattttgtattttgttgtacatgtacatagaacaaaattataaaaattgcacattgtctttataaaaattgcacattgttacttgattactgtaactttatattaaattttaaaatcctccacctttgactttctttttcaaaattattttaactattctaggtttttgtcattccatataaaatttagaattagcttattaatttttacaataatttttgctgggattttgacagagattctgttgaatttgtagatcaacctgaggagaatgacatcttaacgatattgagtcttgt

SEQ ID NO: 83644 - DNA, 424 bp, Homo sapiens
  misc_feature (1)...(424): n = a,t,c or g
ggtggaagtccgcggcgtcctccctccccgctacctccgctttccctctcgcccccctcgcgggggtggggcccctcgcggcgaggaggaggaggaggaggagggaggggccggccgcgctccgggtctgggttccgtgccgcgcctcctcctgcgccggtgaccttggccgagcaggtgcgttaagggactgggccccggcccgtgggggctcaggactcagcaacacctccccaccccgagacgtgaggtgggggcggggctctctggcgcctctccccgacggccctgggagctggagctctttgttttcttttctcactcctccgccgctgggattctaccaggggctggtgacgccaaagcttctccaggggcagggctcctacccccactgtgggggggcggtcggnctgtactggcg

SEQ ID NO: 83645 - DNA, 490 bp, Homo sapiens
  misc_feature (1)...(490): n = a,t,c or g
agtgcgtagnnnntaatgagngcctaatagcaggccntaagnaccggcccgacccacgcgtgcgctcactttaaatccaaatgttgctggtgaaaggatagataaagatattccatgcaaatagtaatgaaaagggatcggggtggctattctactatcagacaaaaagagttacagaattgcaggaagaaatagacagttctacaataaaagttggaagctttaatatcccactatcaataatggatagaaaaataaagaaactttacatgataaaccaactagatttaacagacatttatagaacactctacccaataacaatagcatacattttctcaaatgtagatgggatgttttccaggatagactatatgttaagccacaaattagtgtcaatagattttaaaagatatacaaagtatgttcttattgcaaccacaacaggataaagttagaaatcagtaacagaaggaaaattggagaatct

SEQ ID NO: 83646 - DNA, 375 bp, Homo sapiens
cacactttaggccaaatgaatctgatagatatttactgaacatttcatccaagagctgtggaatatacattcttttcctcagcacatggattattctcaaggatagaccatatgttaggtcacaaaacaagtattaaaacattcaaaaaattgaaataatatcaagcaccttttctgaccacaatggaataaaactagaattttggaagctatacaaatacaagaaaattgaacaatatgctcataaatgaccagtggtcactgaagaaatttagaaggtaattgaaaaatttcttgaaaaaaatgataatggaaacacaacataccaaaacctatggaatacagcacaagtagtactcagaggaaagtttatag

SEQ ID NO: 83647 - DNA, 413 bp, Homo sapiens
ggagcgcctggcttaaattgaatataaacaatccctttactttgccctttcttgctgactaatctgatctccgccgcatgttcaaacacttcttttaatttaggctgcgacgactttgtaagggagatttttaaccaaaaggggaatcgcatctcgctctttcttactgacttttgcttttgggctctctagaccaatttcgttggccaagactttcaaaccaaagagaaaaaactctttatccaggacttaaccagattctaaatccacatcttctaagttcctacccataccatttctgacatgcacaacagcaagaccatttttagcaaaaacatcgctgataccagtgtttaattccggagcagatttgataaagtttacgtttccatcaaatagattgggagcctgag

SEQ ID NO: 83648 - DNA, 407 bp, Homo sapiens
acgagggcattttgaatatgtcatgccactctctcctggcctgtaagggttccactgaaaagtttgctgccagacatattggagctccatagtattttgtttctttctcttgctgcttttaaaaagctttctttatccttgacctttgggagtttcattataaaatgcctcgatgtactcttgtttgggttaaatctgcttggtgtttaaccttcttgtaccgggatactgatattttcctctaagtttcgaaaggtctcattattatccttttgaataaactttctacccctatctttttctctaactcctctttaaggccaataactgttagatattcccttttgaggctattttctagatcctgtaggagagcctcattggtttttattcttttgttttgactt

SEQ ID NO: 83649 - DNA, 391 bp, Homo sapiens
gggtagctttctgttgataccttttatcagattgagaaagttcccccttccactcctagtttattgagttttcattatgaaaaggtgttggattttgtctactgctttttctgtatctgagatgattatgtggtttttggtctttatactattgataattgtctattacattgattgatttttagatgttaaaccaactttgcattcctgagatgaatccacatcttttttgggtggctgtatttcactagattgtgagctccaccactgttagggccagtgtccccagggggcaggtaggggtggatgtccctaaagtctgtctttattctgctccttcactcccctgagtgtcccctcttctattctgtctgcaaaggcaaggatggga

SEQ ID NO: 83650 - DNA, 335 bp, Homo sapiens; identical to SEQ ID NO: 68518

SEQ ID NO: 83651 - DNA, 471 bp, Homo sapiens
  misc_feature (1)...(471): n = a,t,c or g
agtattaggctgatttcatcttgatagtccaggtcaatcaccccagccaacactgtatctccctccttagactgttgacttaaaggtgggaggtgcccaaagggtacagctggcaatcttaacttccagtttaatggaatcgttgttgtgtctcctggcagcatttctccctctggaactaacatctctatctggaactaacacctctaggccagcagaacgtaatgtcacaggaaaaggaagcaaaattttgctagtgggtcactaggggtgagggtgaatggtgccatttccacttccaccccttgattcctggacctgtgaatcctggctatgggacaaacagtcccatatattggacactgattcagaaaatacacgaaattctggagaactttgcgtcagccctgtaaagtgctcgttccaancangcgngagangnntnctngctaacctggnncccagcacagg

SEQ ID NO: 83652 - DNA, 478 bp, Homo sapiens
  misc_feature (1)...(478): n = a,t,c or g
gtggggcatgagccttgcatgacacctcaggacatgcttacgccaagcttggcacgaggaaaccttcaaatagttgggcgctaaacaacacacttgtaggtgattcgtgggtcaaagaagacctaagataaataaaaattgacattgagctgaattaacatacatatgacaacctacacatatacatacataacatatacatacatattactacaatataccacaatttgtgggaaacagataaagcagtgctaaaagggaaatttgcagtagtaaacaaatacattggagaagaaaagtctcacataaataatctaagcttctaccacaaaaacctggcaaaaaagaagagcaaaataaacccaaagtaagcagaaggaagatacaataaagagcagaaatcaatgaaattaaaaatccgttagganggtcttaaatgttgtgtaaaatttagccaagggaagggaaggagtataag

SEQ ID NO: 83653 - DNA, 471 bp, Homo sapiens
cgcgggacatgatatcatgagaacctttgacgccaaccttggcacgaggcaactctgatctaagcacaagagagacatcagtgaatgccatcatcaaaaagtctccctgtcctcatcttattaggtaaaaccatatgaaattgctgtttttctagttaaaccaattgaatataaataacacctactatctgatccagccattccactctcaggtatttaactaaaagaaataaaagcatacaccctcggatttgtacaccaatgtttgcagcacctgtatctgtaatagcccaaactagaaacagtccaaatgcaaaaacagtgatatgtccatagaatggaatactacacaacaataaaaaggagtgagatactgatatgtactacaacatgggtggacttcagaaacactattctacgtgaaacagatcgaatacataagaccacatatgatgtgatttcacttataca

SEQ ID NO: 83654 - DNA, 455 bp, Homo sapiens
  misc_feature (1)...(455): n = a,t,c or g
aattgagaactcgagnacactagtccgtgtggtggaattccctccttcagctccccaagtgacaccggatctaggaaagtttgtgccttttgctgaaactctggggttgacaggagctcatctaacaggctggagaaaacgagagcgaaactacagagaaaaacgtcccgtgcatcacggcctgaccacagattcctgtttcctgcaacaagggaagtctccactgtggcctgtttggaaactggaaaggagagcgaagacaggatgctgcttttccacgcttcgctggaggtttctgggtccccacagagctcgggaaacaaatagtcaacatggtcacgcttttgggggccggagacatgtgaacaacaagcccccttgcagaaggcaaaggagtggccctgaatgtgactcctgtgtggacgggactatccgcctcgcgctctgttgcaggg

SEQ ID NO: 83655 - DNA, 552 bp, Homo sapiens
  misc_feature (1)...(552): n = a,t,c or g
accgtaccctcgttcgtgtggtggaattccaccggctggaggagaccaaggtgccgcatgcaggagggctggcgggtgggtatggttgggggtgctacgtgttccagcaccccatctccccagagaaggggctgcatgggctctgggccctgacatgtccctgtgccacaggatggcagctgtgtctccatgcccccctacttccgcttcctgacactcatggccttccacgtcttcctccaagagaaggtgtgtgccctctccctagaaccctgcatctgaggccttgggaacgagaacctcagcaggcctgggggctccctgcttccatgcggcctctgggcaccctcatatcccctgccatgccctctggtctttgacaggtggacctggcagtggtggaggtgggcattggcggggcttatgactgcaccaacatcatcaggaagcctgtggtgtgcggagtctcctctcttggcatcgaccacaccancctccngggggatacgttggagaagatcgcatggcagaaagggggcatctttaagcaag

SEQ ID NO: 83656 - DNA, 440 bp, Homo sapiens
  misc_feature (1)...(440): n = a,t,c or g
gacatcagttaatctttttcgtattctaattgcaggagaccgatgattaacatcaaaaacaatagccaacgccatagacatttcagctggttcattttacacaattctgactctgctcagngggtgccaaaactgttgctcccagatcaattgcagacaagagcagagctttcactggaaatttcaaacaggtgggatcaacattctgaaggatttctttgaagaattttaacaataaatgaacatggttttaccagtacatcctgaagacaaagtacaatcaaatcactggctaccaagagttggaagtgagagcagaagcagactgatcaagaacaaaggtcatggcaacactttttttgggatacgcaaggcattttgctcgttgacttttgggagggccaatgaatgccaacatctgcttattgtaagagtatttt

SEQ ID NO: 83657 - DNA, 480 bp, Homo sapiens
  misc_feature (1)...(480): n = a,t,c or g
natcgagnccatcgtagacactaggcagngcggnggaattcgcctgtttaagtttcttggctaaacttagtcagttgtctatctttttcctgttggtttcaaagaattctttttatattctatgtatcagccctgtgtttggttatacatgatgtaaatatctcccaccactttataccttgccctttactcttttaatagtaccttttgatgaacagaagttattaattttaatgtggtcacagttatctttttctttatagtgttgcttttttgtgtcctggataggaatcattgcctaccccaaggtcttgaagatatttcctatgttatattctagtagctttattgttttactttttccatttagatctactttcctgaagntggtatttgtatgtgttgtgaggtaggggtcaaatttcattttttttccatgtgaatatccagttgacttcttagtgtttattgagatgactg

SEQ ID NO: 83658 - DNA, 473 bp, Homo sapiens
  misc_feature (1)...(473): n = a,t,c or g
tagggggagcgttttgaganctgaatcacagtcgaggaanncccagaaaattgcaatggaacatctgcactttgtgtacttgatgtgaaagctcctgatttaggatactgcaataataagactagctattgctttaaaggagtatgtagagatagggatagacagtgtgcacagttatttggaaaattttctaggtctgctaatcttctgtgtacagaagaagtgaattttctaaatgacaaatttggaaaatgtggttcctgttgtcatttttatgatatcatttatggaaagattgtctgtcactggacacattcagaaccagtatcaatgacagactttgatatacaatatacttactttggaggtcacgtatgtttgtcggcacatgcaagaaatggttcaaaacatgagggacatatacagaacctgtgactacttgtggtcagcacaaggtatgtagattccaagga

SEQ ID NO: 83659 - DNA, 462 bp, Homo sapiens
  misc_feature (1)...(462): n = a,t,c or g
nctgtcgcctnctnnacccagggttacanngagtaacngccanngnngaaagctggctgcctaaaagcctggctcaaaagctgcctggttgagaggctggcttataggcttgctgagaagctggctgtattaaaggcttgcctagagcatggttgtcaggctggctggctgtcaggctgagcaagggtttatctggaaggctggtcaagatgcagtctgggtggctgcctggctgagaggctggttgcctgggaagctggctgagaggctgcctgcctgcaagtctggcttagagggttactgagaggctggctggattagaggcttgcctggaggccagctagtaggtgggctggctgagaggctagctgcttgaaagggcagttgagaggctggctgagaggctggctgggaggctgtttgagaggctggctgcctgagagactggctcagaggctgcct

SEQ ID NO: 83660 - DNA, 485 bp, Homo sapiens
  misc_feature (1)...(485): n = a,t,c or g
aggcccatgccggccttgnngnnncccagcnnatagaagcagngtcgnggacnnngggaaagngagngcctctccggggccgggctctggcgtccggtgtgggacgggggtcggggacgcacgggctctgggatcctgggtttcatggcggctgggagttgggggccgggctgggcgtccgagcacctgaccctcgagggggcgggcggggacgggttcccagctggacgcccctgctctccggtgccagaacagaacaaaattggggggccggactccggggacccaaaggggacgggtagagtgtggcggaggctggggcccggactcctgggcctcctagggtgcctgccgggggaggagggcacagctggatgcccacactctaggatctcttaagccgggcaaagttcaggggctggattcttggggcctcctagggctctggtcagcgaccctaggtgctgtgagcgctcaagggacgt

SEQ ID NO: 83661 - DNA, 505 bp, Homo sapiens
  misc_feature (1)...(505): n = a,t,c or g
cgcgcccccccnntttgtaagatntccctaggacagngncgnggaanncctggaagaggntttggagtcggggcccgagcagtcaccggaggtggcaccagatttggtgatagagctgcctctgtttctggagtangtggtagagctggtgcggcagctggagtgagatctggagttgtgctggctgtggccatagttcttgagctggtacaggaacccgcactggtgtgagccgcggtgctgaagctgggcctgtagctgatgctggccctggctctttttctgaacctgatgctgatatttggccctaaccatgcaaatggttttggaactggtcctggctagagggcggatgctggagctatagtggagccggcacagaagtgaccagagctgcccctgtctctgggtgtgctgctggagctgttgctggagctggctctgatcctggaactagcacccgagttgtagccggagctggctctaccttctgagctggagcagg

SEQ ID NO: 83662 - DNA, 410 bp, Homo sapiens
tttcgtggagaatgaactaccggcccttaggctgggatgagctgggagaatgaactaccggcccagaggctgggatgagctcgggagaatgaactaccggcccagaggctgggatgagctcgggagaatgaactaccggcccagaggctgggatgagctcgggagaatgaactaccggcccagaggctgggatgagctcgggagaatgaactaccggcccagaggctgggatgagctcgggagaatgaattactggcccagagtgggccggctgggcggtgggggcgctcagtgtccgagagggtgggtggaggtcattaggatcggccgggccttgtgagctaggggtaagccagcctatggacccacagcccttctgaaccacgtgaaagtcaaaaggacaggccccc

SEQ ID NO: 83663 - DNA, 403 bp, Homo sapiens
tttcgtggcccgacgatgacgaggaggatgttgagtgtagaggaggaagaggaggaggaggaagaggaggaggaggaggaagaggaggaggaagcgccgcccccgcctcgggtagtgagcgaggagcatctgcggagatatgctcccgaccctgtattagtgcggggtgccggccacatcactgtgtttggcttgagcaacaagtttgatactgaatttccctccgttctaacagggaaggtggccccagaagaatttaaaaccagcattggccgtgtgaatgcatgtttgaaaaaggctctcccggtcaatgtgaaatggctgctgtgtggttgtctctgctgctgttgcacactgggttgcacactatggcctgttatttgtctcaacaaaaagaccaaaa

SEQ ID NO: 83664 - DNA, 424 bp, Homo sapiens
tttcgtgttcatgtccagggaggagagagacagcgcgcgcgttgcggagacctggaggagaggagctgcggagaggggttaggcggggagagagagagagagccaagttcaggtccagggaggagagagacagcgcgcgcgaggcggagacctggaggagaggagctgcggagaggggttatgcggggagagagagagagagccacgttcatgtccagggaggagagatacagcgcgcgcgatgctgatacctgcaggagaggagcggataggggtttggcggtgagagagagagagagccacgttcatgctcagggaggagagatacagcgcgcgcgaggcggacacctggaagagaagatctcccgagaggtgttaggtggcgggaggcccgagagcgttatatgtgtgtggtctctgagag

SEQ ID NO: 83665 - DNA, 397 bp, Homo sapiens
tttcgtgccaggcggcagcatggaccgggctggggcagacatgtgttccagcaccttcaccctggccatgggcgagaggaagccccggacgtctgggttctgctacctgagcacagcctggcccgggatgcctggacggcggtggtgtccagtacctgctggtggggctctcgaggctccagtgcggtcactgtccggggacctgggactcggcccatgtgcacgtcctcttccacctgtggtgggacagggccagccaccgggggctggtgaagatgcgcatctggggccagcggtgcaggctgtgccccgcacccgggggactgccaggtgaggcccccgggcgagcagcccttcctcagcaggctggtcttgcacatcctgcaggactgctacg

SEQ ID NO: 83666 - DNA, 413 bp, Homo sapiens
  misc_feature (1)...(413): n = a,t,c or g
cccatatggggcggtctctctcccattccggggtcctctctccacagagaagctccctctcccctctttcatgcacctccaaccctcctctctcctttctcttccctttctctctccttctacctcttcttcctcctctccctctgtcgcctcctcaccctcttctttctccttccagcagcctcctctctctcgctctgcttctctctcccacctcaatctccccctttcctccccacccccgcttttcgctcgctctctctccccgcttcctcctagctcccctgggcagcggttcctaccctgcctggacctgcagtcccgggaacccgcagcctgtcttcctccgcggcagcttctttctctccggcctcactgctctctccttgccctcgctcctcanaaaaaaaaaa

SEQ ID NO: 83667 - DNA, 1823 bp, Homo sapiens
tttcgtccggagccctaggccggtgggtgagtgcaccgcgttctcgcacgcgtcatggcggtcctcggagtacagctggtggtgaccctgctcactgccaccctcatgcacaggctggcgccacactgctccttcgcgcgctggctgctctgtaacggcagtttgttccgatacaagcacccgtctgaggaggagcttcgggccctggcggggaagccgaggcccagaggcaggaaagagcggtgggccaatggccttagtgaggagaagccactgtctgtgccccgagatgccccgttccagctggagacctgccccctcacgaccgtggatgccctggtcctgcgcttcttcctggagtaccagtggtttgtggactttgctgtgtactcgggcggcgtgtacctcttcacagaggcctactactacatgctgggaccagccaaggagactaacattgctgtgttctggtgcctgctcacggtgaccttctccatcaagatgttcctgacagtgacacggctgtacttcagcgccgaggaggggggtgagcgctctgtctgcctcacctttgccttcctcttcctgctgctggccatgctggtgcaagtggtgcgggaggagaccctcgagctgggcctggagcctggtctggccagcatgacccagaacttagagccacttctgaagaagcagggctgggactgggcgcttcctgtggccaagctggctatccgcgtgggactggcagtggtgggctctgtgctgggtgccttcctcaccttcccaggcctgcggctggcccagacccaccgggacgcactgaccatgtcggaggacagacccatgctgcagttaagtgggtcgcttggtgggttcctcctgcacaccagcttcctgtttcccctgttcatcctgtggctctggacaaagcccattgcacgggacttcctgcaccagccgccgtttggggagacgcgtttctccctgctgtccgattctgccttcgactctgggcgcctctggttgctggtggtgctgtgcctgctgcggctggcggtgacccggccccacctgcaggcctacctgtgcctggccaaggcccgggtggagcagctgcgaagggaggctggccgcatcgaagcccgtgaaatccagcagagggtggtccgagtctactgctatgtgaccgtggtgagcttgcagtacctgacgccgctcatcctcaccctcaactgcacacttctgctcaagacgctgggaggctattcctggggcctgggcccagctcctctactatcccccgacccatcctcagccagcgctgcccccatcggctctggggaggacgaagtccagcagactgcagcgcggattgccggggctctgggtggcctgcttactcccctcttcctccgtggcgtcctggcctacctcatctggtggacggctgcctgccagctgctcgccagccttttcggcctctacttccaccagcacttggcaggctcctagctgcctgcagaccctcctggggccctgaggtctgttcctggggcagcgggacactagcctgccccctctgtttgcgcccccgtgtccccagctgcaaggtggggccggactccccggcgttcccttcaccacagtgcctgacccgcggccccccttggacgccgagtttctgcctcagaactgtctctcctgggcccagcagcatgagggtcccgaggccattgtctccgaagcgtatgtgccaggtttgagtggcgagggtgatgctggctgctcttctgaacaaataaaggagcatgccgattttt

SEQ ID NO: 83668 - DNA, 422 bp, Homo sapiens
ccccgggtcgacgatttcgtgctgagggctcgctggtagggtggcggctcctgggactggctctgcaggttccgtgggactggagcccgcgtcccccgcgcccgctactcgaactcgaggaggagcggggcggccgggagtggagggctgtgggtagttgtctgaggagggctgctgggggttctgaggccgctgggggcggcgtgacccgtgcggcgcagagcaagtacttcttgcggctgtggggacgcccattgttaaccagcgcgagtgggggtctctctttcctcaacccttattgccggggtggagttgaggaggagcggcctgcgggcctcttagctccctggagtctgctctcaggtgagggcactggaggcatttgaaagtctggggtttcttcttgacgtaatccctgccta

SEQ ID NO: 83669 - DNA, 512 bp, Homo sapiens
aagactgatgcccttgcaaggtatagccggctggcccgggctccctcgggactggggcgactgcgcatgctcgctggccgcgctgggccagtagccgagccgcggtgacgaaccggctccgcggttgcggtgtttgcggttgctgtgatggcgatgtgagggggcccggggcgggatggtgctgacccgggtcgggccgtcttcttgcagctggacaacgagctcctccgttcgacaggcgggggaagaggccgagccgggcgagagggttgaagatcaactggattatgtatttggttctggaatctcaaagcagtccacaaacaaattcttccttatgttgtctgtgtcagggggaacggtgtatttttaacaacgggaatcagtaactggaagtacaagattggttatttaataatgttaaaaatgaggctttgaaaggcagaggtgctgttatcagaatagtcttctgggtataaattaaaaatgactgaagttcaagcaatggtaga

SEQ ID NO: 83670 - DNA, 432 bp, Homo sapiens
  misc_feature (1)...(432): n = a,t,c or g
tgtcgtggcgctcccggggacctggggctgctgctcccctagccgtggtgagggggcgtcggctcggccttgagaggggcgcgggcaccgaagtgggagggtgctcgcggcgagggtgagggcgacttttgaggggcgggtcagcggggttggggggctttttgaaggagagcaatgcgagcctggctgtcagtagggtcgggggctctgaggggacagctgggttgcggggatccagagggagagcagcagggttaggtgggcgttttgtggggttaacggaagcctgggtgattagcgcggctggggagggagtcctgaggaggacagcggtttggagaatctcaaggggggtacagcacagttagggggaccctgagggaggacagcggtgttggnggacccccagggaggacagcggggttggtgggg

SEQ ID NO: 83671 - DNA, 422 bp, Homo sapiens
tttcgtttgtgtgtgtggggccgtgtatactgtggctgtttgtgttgggccgtgcacgctggggctgagtgcggggggccgtgtacgctggggctgtgtgtgtgggtccgtgcacgctgggactgtgtgtgttggccgtgtgcgctggggctgtgtgtgttgggggccgtgtgcgctggggctgtgtgtgttgggggccgtgtacgctggacctgtgtgtgtgtggggccgtgtacgctggggctgtgtgtgttgggggccgtatattcttggggctgtgtgtgtgtggggccgcgcacgctggggctgtgtgtgtgtgtggggcccgtcatcctggatatatgtttgttgggggccgtgtacgttggggctgtgtgtgtatggcgccgcgcacactggtgctgtgtgtgtttggggccgtt

SEQ ID NO: 83672 - DNA, 376 bp, Homo sapiens
cccaaatataagggattatagaactcagatgattaatggaattttagctcaggtccatctcacagtggatccaatgggccccaaaacccatccagtgcttatttccctcagttcagaatgcattactggaatagacatactcaggtcctgacaaaatcccacaagggtctcttgacctgtgaagcaagggctattactgtaggagaagccaaacggaagccactagaattgcttctgcccaggaaaaccataaataaaaagcaatattgcatttgcagaaaaaattacaaatgttggtgtcactatcaaggacttgaagagtggagggatgatgattcccgccatactcccattcaactagattatttggactgag

SEQ ID NO: 83673 - DNA, 385 bp, Homo sapiens
cccacgcgtccgctatgtggaacacataatgagaatttgaatatatgttgatctgttgtcctgctgctagagtgagagctcgagtgagggcgatgagttcagcttcttgggaggtggtgcctagcgggaggagattggcttcaatagtgtgcatgtggggtggtgacactacagcatagccagcattctggtgtccttgatgtaggaaggagctgccattcaaaaccaagtaaaggaggcatctggaaggggttggtctgttaggtttggaaaaggtataaggaaggtttgaacagtgtttacacagaaatgtgtagggtcttgggcagttgcagcttcaagtaagagcgtggccgggtttaaatgggagatggttagaccgggg

SEQ ID NO: 83674 - DNA, 355 bp, Homo sapiens
ctccttctccctccttctccctccttttgcctccctccttctccctcctcttccctccctccttctccctcctcctccctccttctccctccttctccctccttccgtctccctccttctccctccttctgcctccctccttgtccctccttttacgtgcctccttctccctcctcgtccctcctccgaccttctttcccctacacctttattcgtccttatccctcacactatacccctccttgttcttgggccccacatccccccgctgatacatagaccccggtcctttactaaactttatgcctttctcttcatgggatgaaaagcctcgataaacaaacttgaccagggc

SEQ ID NO: 83675 - DNA, 428 bp, Homo sapiens
  misc_feature (1)...(428): n = a,t,c or g
ccacttctngnnccggaattctcggccgcgtcgacggagctttgagtgaagctcttcttggagacattatgggcttcaatggtatgaatgtgtctgtcaaagatgttcgttgggggagtgttgctgttgacagcaaaaatgacccacgaatgaaggcagttggcctcactggtcagggattattctgaaccattcaggctaaatcagggctggctatgcccttgtactgaattgccacacagcccatgttgcatccaggtttgctgagctgaaggtaaaaatttattgccattttggtaataagctggaagatggccctaaattcttgaagtctggtgatgccgccattgttgatatagttcctggcaagcccatgtgtgctgagagcttctcagaccatcctcttctgagttgttttggctgagggg

SEQ ID NO: 83676 - DNA, 421 bp, Homo sapiens
ggcacagagcccccggaactggcatctgcagggcgtgagcttttgccgccgcgatgccgcacttcctggactgggtcgtgccggtctacttggtcatctcggtcctcattctggggggcttcggcgcctgcatctactacttcgagccgggcctgcaggaggcgcacaagtggcgcatgcagcgccccctggtggaccgcgacctccgcaagacgctaatggtgcgcgacaacctggccttcggcggcccggaggtctgagccgacttgcaaaggggataggcgggcggcaccgggcgcccttccccagcccgccccgcccgcccagcccggagacccccaaggcagagggaggccggcctgttggccctccacgctatccctctgcagcctgggccctcccgacagaggccccaggggcg

SEQ ID NO: 83677 - DNA, 578 bp, Homo sapiens
acgccaagcttggggcgagggggagacgctgggggccctcaacgcggccctggggccaggcggtccggtgtggatcaaggagacgcgcacccgccacctgcgttcccgagactttctggcaccgcaccgcgcgctgcaggcgcgcttcgatgacggccaggttccggagcatttgctccatgccctcgcctgcctgcagggccccggtgtggccccggtgctgcgctgcgcgccgacccccgcgggtctgtctctccaactgcagcggtccgccgtcttcgagcgcgtcctcagcgccgtggccgcctatgccacgcccgcctcgcctgcctcgctgggccagcgcgtcttactacactgcccagcactgcgcagctccccctgcgcactccgcttgagccagctgcgtacggtgctcgtggccgatcacctggcgcgagccctgcgcgctcacgggtgagcggggccgcggggccggaatggagaaagtgggactgccgggtacctagaaagcgagcggcgccgcccgtggggactgcggctggaggtgggaagtcgtggcgagctggaccaggtgc

SEQ ID NO: 83678 - DNA, 414 bp, Homo sapiens
ggtggcacgaggacctcgtctacgtggaggccttctcccagcatgccatcaccggccgggcactgctgcggctgaatgcggagaagctgcagcggatggggctggcccaggaggcccagaggcaggaggtgctgcagcaggtgctccgcctgcaggtgcgtgaggaggggcggagcctgcagctgctcagccaagcttccttcgggaaaatgtcctaactgctgctgaggcttgaacccagaccccagcactgtgatgggagtccacggctagggaggaggccaagctggccccgcagcgcctcttggaccctgcgggatgccggggcggccaggctggcccaacggacagacaggaccaggatcacacctccaggcgcctctggttggacattccaggtcgtgccctggggct

SEQ ID NO: 83679 - DNA, 518 bp, Homo sapiens
  misc_feature (1)...(518): n = a,t,c or g
ctttgaactttttganccttattacgccagcttggcacgagggtttaagccnnnnccacaatttttgcattctctaaattttacagnggatgctgttattaaaatattgaaaagttatgaaaacatgaaaatgaaatagctgagaaaatccctttaaattggctgattctctctctagggaattcctggtcctgctggtcccttaggtccacctggtcctccaggcttaccagtaagtacaagacaaaataaccttataagggagggttaagttacaaatataacagagacacaaatgctccagatttttatctgtgcttttgcatttgcattttgtagggtcctcaaggcccaaagggtaacaaaggctctactgtaagtacttttccctttgacaatttaattttgcattgaaacctatttaattgcctcttctttatttatgacctctctcttctttctaacagggacccgctggccaaaaaggagacagtggtcttccagggcctcctgggcct

SEQ ID NO: 83680 - DNA, 491 bp, Homo sapiens
ccaaattttaaaacataccacaatatttggcacttcattttctttattaaacaaggagactcagaaaatcatagtggcctgggcccatgtgaacctctgtgaaagcctcccacagggagagaggactgggatgccatggtcctaggtgggaatgggggagcagtgtaggcctcggtgcggacccaatgctggggccctaaggctctctcctcttttcttccaggtggaaaatgagcttatatatgaagaagtcagcgagtggacaaagccaggcgcaatggatagcaaagatgtggaagtctcctcgattcaagttagaagaaaaccgcagcatggagtctgctctcagctgttggggaattaccgatgcctttgactaagtcaagactgacttttccagaatatcacccaagagatagagccgtccctgtccaagtttgtgcgctagcccttcatggaggtcagagaggaaggaacaaaggcagctgtgg

SEQ ID NO: 83681 - DNA, 835 bp, Homo sapiens
cgcgcggcccccattgacacaccttgtcgatgatcactccaagcttggcacgagggtgagaggaagcacctgggcaccatgaccttggactatgggatggacctgaacaaggcagatatcgggggcatgcttcccgggctgacggtaaggagcgtggtggtcggaggcgcctctgaagacaaggtctccgtgcgccgtggattccgaggctgcatgcagggagtgaggatgggggggacgcccaccaacgtcgccaccctgaacatgaacaacgcactcaaggtcagggtgaaggacggctgtgatgtggacgacccctgtacctcgagcccctgtccccccaatagccgctgccacgacgcctgggaggactacagctgcgtctgtgacaaagggtaccttggaataaactgtgtggatgcctgtcacctgaacccctgcgagaacatgggggcctgcgtgcgctcccccggctccccgcagggctacgtgtgcgagtgtgggcccagtcactacgggccgtactgtgagaacaagtaagagcagcccctggtgcctccctgcaccttcagagtccatgtggctgtgttccctcgtgccgtcagcaaaggctttgatcccgactgtaataagaccaacggccagtgccaatgcaaggtgaggccccgcccccatgatccctgcatgctgtgtttgctcacacacatgcacaggatacatcacctccttcaggatcttcgtgtacaccacggccatggcgctcacagtgacttgaaacccaaatgttaggtctgagggtaacaggagcctgggcgagggacgtgagcttcctgca

SEQ ID NO: 83682 - DNA, 468 bp, Homo sapiens
  misc_feature (1)...(468): n = a,t,c or g
gtggccccnnnnngggtagacatctgtaggacacgccagcnnggacgaggcgangaatgggaaagatggaaccggttctcatctggtgacagtgccttttttttccagtttggctgatgctctcatcagttctccgagtttggctggtgaaggtggggcgcatgctgggtcttggagccagtgactttgaatttggagtagatcccagtgctgatcctgagctggccttggtgagcaaatgttgaccccaggtacaggccaaaggtccctctttgttcttttttggcacacacatcacagagcttctatcaggctggatagtcctagacactaccaatcactcattttccaagaccttcttttgccacctctttcctataatgctgtctgatctctaggggcaccagggtcagatgctttcttgttcacttctgatgaaaaccgaggcttcttccaagtccttacttt

SEQ ID NO: 83683 - DNA, 855 bp, Homo sapiens
cgagggggaacgccatctttctgccagatcacgtcaggtggtggtgagccctgagtagtgacaggagatggcacaactggtcacacagatgatatttgggggcaggccttcctccattgtcgaggagtttcctgccaggctgtcgcactaggggtctggtgaggggcagagtcagagtcagagtcagagactgtgatggctacaatagccatcttggttatgtggacagtgtatggaggtcagggtcagggacaactcacagagaaggctgcatggatgcagagggctgtcccagcgcgaaccaccatgtgactcttcagccgggcactgaggtcaaacttgggtgcagctgagatggaggagacagaggtggaggcatggatctgtctttcaagaagactctgctttaagcctcctcatcaaagccttcccaacctctcctcctttatgcccccactacaggccatacagacatctagctgccctgcaaccctgtgaagcatttatttgttttctcatctgtctccttctactagtacgcaagaccctggaaggcaagcccttgggtcttgtttctataaccctaacacctccttttgaaattgccattgcaaccaattataacagcgagaaaatttttacagtggaccgaaatttgatttaaccacccccctattggcttttaccttccaaatggcccttaaacattcctgggttcagaccaagcttaaggtggggagagacaatttaatttataacttaaaagaaaacaggattttccccaaaataaaaacacttttgcgaaattaaggaaaggcccccccccttttaaagaaatttaggaagccccaattt

SEQ ID NO: 83684 - DNA, 452 bp, Homo sapiens
tggatgctttttgccattctgatggtaaatgatgagacaggctaccatggatttcagcaccccttctgtgtttgatcagcaaagaggtgactcatctgaggaagttgacctgaccatggtttatcaagcagcctctaatggagatgtcaatgctctgactgcagtgattcgggaagacccttctatcctagaatgctgtgacagtgaaggatgcacgcccttgatgcatgcggtttctggacgtcaagcggacacagtgaagctgctgttgaagatgggagccaatattaacatgcaggatgcttatggccgcacaagtttatgcctggccacctacctgggctggcttgaaggcttgtgtgagtctacttcagaaacggtgccaagcacaatatcccagataaaaatggccgcctgccactgcatgctgccactgctgagcccgatatgag

SEQ ID NO: 83685 - DNA, 2627 bp, Homo sapiens
atggagatggacgcccccaggccccccagtcttgctgtccctggagcagcatcgaggcccgggagggacagtgtccaggatgaaagccacgtttcgtctgaatggggcctgagcagggatgccagatcagatacaggacacttggtcaaatgtgaatttcaaataatccatttctttgccccgctcgggtcccgtggttctcaactctggttagaaccaccggaggagcttaaactagatccacgtgggggcccttgccagaccaatcaaatctctgggtggctgctggatggggggcacggcaggcagcaggttcaggccctctcttcacagctcctggaggtgatccccgactccatgaggaagcaagaggtgcggacgggcagggaggccggccagggccacggtacgggctccccagccgagcaggtgaaagccctcatggatctgctggctgggaagggcagtcaaggctcccaggccccgcaggccctggataggacaccggatgccccgctggggccctgcagcaatgactcaaggatacagaggcaccgcaaggccctgctgagcaaggtgggaggtggcccggagctgggcggaccctggcacaggctggcctccctcctgctggtggagggcctgacggacctgcagctgagggaacacgacttcacacaggtggaggccacccgcgggggcgggcaccccgccaggaccgtcgccctggaccggctcttcctgcctctctcccgggtgtctgtcccaccccgggtctccatcactatcggggtggccggcatgggcaagaccaccctggtgaggcacttcgtccgcctctgggcccatgggcaggtcggcaaggacttctcgctggtgctgcctctgaccttccgggatctcaacacccacgagaagctgtgtgccgaccgactcatctgctcggtcttcccgcacgtcggggagcccagcctggcggtggcagtcccagccagggccctcctgatcctggacggcttggatgagtgcaggacgcctctggacttctccaacaccgtggcctgcacggacccaaagaaggagatcccggtggaccacctgatcaccaacatcatccgtggcaacctctttccggaagtttccatctggatcacctcccgtcccagtgcatctggccagatcccagggggcctggtggaccggatgacggagatccggggctttaacgaggaggagatcaaggtgtgtttggagcagatgttccccgaggaccaggcccttctgggctggatgctgagccaagtgcaggctgacagggccctgtacctgatgtgcaccgtcccagccttctagcagagctcggcgggatggcgctaggccacctgagcggcagtaggacggggccccaggatgcagagctgtggcccccgaggaccctgtgcgagctctactcatggtactttaggatggccctcagcggggaggggcaggagaagggcaaggcaagccctcgcatcgagcaggtggcccatggtggccgcaagatggtggggacattgggccgtctggccttccatgggctgctcaagaagaaatacgtgttttacgagcaagacatgaaggcgtttggtgtagacctcgctctgtttgcagggcgccccgtgcagctgcttcctgcagagagaggagacgttggcatcgtcagaggcctactgcttcacccacctgtccctgcaggagtttgtggcagccgcgtattactatggcgcatccaggagggccatcttcgacctcttcactgagagcggcgtatcctggcccaggctgggcttcctcacgcatttcaggagcgcagcccagcgggccatgcaggcagaggacgggaggctggacgtgttcctgcgcttcctctccggcctcttgtctccgagggtcaatgccctcctggccggctccctgctggcccaaggcgagcaccaggcctaccggacccaggtggctgagctcctgcagggctgcctgcgccccgatgccgcagtctgtgcacgggccatcaacgtgttgcactgcctgcatgagctgcagcacaccgagctggcccgcagcgtggaggaggccatggagagcggggccctggccaggctgaccggtcccgcgcaccgcgctgccctggcctacctcctgcaggtgtccgacgcctgtgcccaggaggccaacctgtccctgagcctcagccagggcgtccttcagagcctgctgccccagctgctctactgccggaagctcaggctggacaccaaccagttccaggaccccgtgatggagctgctgggcagcgtgctgagtgggaaggactgtcgcattcagaagatcagcttggcggagaaccagatcagtaacaaaggggccaaagctctggccagatccctcttggtcaacagaagtctgacctctctggacctccgcggtaactccattggaccacaaggggccaaggcgctggcagacgctttgaagatcaaccgcaccctgacctccctgagcctccagggcaacaccgttagggatgatggtgccaggtccatggctgaggccttggcctccaaccggaccctctccatgctgca

SEQ ID NO: 83686 - DNA, 791 bp, Homo sapiens
ttttttttttttactgcaagggtttttctgggacggggagaggaagaggctgctctggcctgggacacccccactgctctcaaggagctggcatctcagtggcctctgagcccagcctgagccctgtgggagtgcgggggcagtgactggaatgtgctgctgggcaggctgcagcagccgaggtggccccagggcagaggagtgcagcgcagcctcatgggtgccctatgccacccctggtgctcactgggctgctgatgccgtcctgggtcactgcaccggtgaggtggagcggcccaggccaccaccttgactgggaagggggtggggggacgaggacacagctcactgtcagggtgggggagcgcagggctggctgggcagaggctgcagtggggtcaggctcaaagggtgggatccagggtcaacaggagtgcggctgtgctcgggagctggctgttcccagaggaccagctggctggtccgagaggatgacggctgctggccaggagctccctcgtggatgccttcctgggctcccaggaggatggctgtcagagggggcacgggcagccgcgggcctcaggcccacgtctctgtctggaagcgccgtgtctgctggagcctggctagatacgcggctgcgtccgggctgcagagtccaccctcctcctggaagatggacatcagggcttccgagacgtccgctggcatggacttggcgttgcctgccaggtagaagtatgcaccctggcggtccagcagttcccacacaagcgaccccagctccc

SEQ ID NO: 83687 - DNA, 464 bp, Homo sapiens
  misc_feature (1)...(464): n = a,t,c or g
agggcnnnnnnattgaacctgatgaccttagtccgtgcggtggaattccccccacgtctgcctttggggcttgagacctgctctgggggtcccggtcgccgcccaggtgggtccccacgtctagccttgggggcttgagtccagccctggggggcccggatgccgcccgggggttctcctcgtctgccttgggggttgggtccagccccaggcgtcctgaccaccgcccaggggcccccacgtctgcctgggggcctcaaattcagtcctgggggtcccggacgcctcccaggggtcttcatgtctgccgtgggcctcgagtccagccgtgagggtcccgaatgctgccttggagggtggagtccagctctgagggtcctgaagtcagctttgggggttcgaacccatccatcccaggggtccctgagtctacattaggggctggagtccagccttgagggtcn

SEQ ID NO: 83688 - DNA, 475 bp, Homo sapiens
  misc_feature (1)...(475): n = a,t,c or g
cagaacgnggaanaaacaccgggnnngancggaggcgggcgcaccgaggcggaggaacttcttcaaaatctggtttagcagtccctgtttgggccccaggcctcagtggggcttgagctggggggcggattgacggtctccagcgggcagggnatcccaccccctacccgggggaatagcaagccgctttcctgcttcgtggccccggactccggccgcctgccatccatccctgagaacaggaacctaacggagctggtggtggccgtgactgacgagaacatcgtggggctgttcgcggcgctcctggccgagagaagagtcctgctcaccgccagcaaactcagcaccctgacctcgtgcgaccacgcgttctgcgcgctcctgtaccccatgcgctgggagcacgtgctgatccccacgctgcccccacacctgctggactactgctgatgccctcctctgccaaggactn

SEQ ID NO: 83689 - DNA, 366 bp, Homo sapiens
  misc_feature (1)...(366): n = a,t,c or g
agcctggggaccagtgggcaccnnnattttagcccgcgccggcacgatcagaggtcggagcctggagcccagcgagcacagacattataaccggggctggcccgttcagaggtcggagcctggggaccagtgagcacagacattagagccggggctggcaggttcagaggacgtagcctggggaccggtgggctcaggtgttggagcaggggccggcaggttcagaggtcggagcctggggaccagtgggctcaggtgttggagctggggctggcaggtgcagaggttggagcctgggggaccggtgggctcatagggtggagcaagggccggcggggtcagaggttggatccctgggaccggggg

SEQ ID NO: 83690 - DNA, 855 bp, Homo sapiens
ttttcacagtaatcatacaaagtctttattcccatcccactattataaacatttctattaaaactaaaactgggctctatgtaaaaaccccaaagatacacacacaaaaaaaatctgtttgttagaactcaagtgaattcagtaaagttgcagaatacaaaatcaacatacaaaaagcattagcatttttatacataaataatgaaaataatgacctaactgaaaaattaagatgccatttatgatagcataaaaaaaatacttacttaggaataaatttaacaccaaggcagtaaaagatctgtatgtacactgaaaactatgaaacactgatgaaagaaagacacaaataaatggaaaggtatcccgtgctcatggatcagaataatactgttaaaatggtcacactacccaaagcaattcagaatcaatgcaatcctatcaaaattccaatggcattatttacacaaacagaaaaaaatcctaaaattcatatgtaacgataaaagaccctgaataggcaaaagaatactgaggaaaaaatgttggagacatcacatttcctaattataaattatactacaaaactatagtaatcaagacagtatggtactggtataaaaacacatacacaggccagtgggacagaagaaagagtccagatataaatccaaacatacacagtcaactaatttttgacaaagacaccaagaagacacatcggggaaagaacagtcttcattaagtgttcttaataaagatgctgggaaaactgcacttccacatgcaaaacaatgaaatcagacccttatcttagacctacacaacaatcaattcaaaatggataaaagacct

SEQ ID NO: 83691 - DNA, 1709 bp, Homo sapiens
ttttttttttttccttcgtatgccacctttattgtgtttccccaactcctgggccccatggtagactggccacatggctactgggctcctggccttcctagggctagcagctggtgggcaaacactctgccctgctggagagctgccaggccatgcccgggcacaggctagtggggctcctggctcagtcctgatagcagtgccagggaggcgtagagtgcacacatgcggccctgggcctgcggctcccagcacacgtggggagtgtcctcccccagctctaggccacactcgtccagcaagacccaggccggtgctccttcgccccagctgttccccaggagcccggggggcagggacatggtgctgcgctcctgccacggggcactctgctccaagaggctgcccaccagctcgagcggccccaacagggtctgcgactccagcgcctccgccagcagcttgtgctgcgtttcactcagcatggtcagtgcccccagcaggtagacaacagggatagcgagttccggcaccagcattccggaggacaacaccaggcactccaggacagcacctgctggaccgtccaggggctccaccggcccaaggctctggccctgctccagcgcctcctccaaggctcgcagggccagctggtcccgcagcaccccctccaggccctccagcagccagctggcacagctctctgtccaaaagctccagttccttggagatggtctccacctctgcccgtaggccctggaagtcttcagtgaacgccccctccgcagggaccccatctgtcaggaagttgtggaggcacctcatcatggagaggccagagggcagctgtggccaggcgccttcgctcgtggaacgcttgtggcctgtcgcgggtggctggaaggtcctctgcttcttatccgggaagagaaggacgtccaagtcagagtcaataaccagctgggccacccggaatgcgagggtgctgcctgaggggatggtgaccgtcttcttctggctcagatggccctggccctcaccctgcaagcacgtggctccgggcagggaaaaccggcccgagccctcccgcttgtgggtgcgcgtgacttccacctccttctgtgtctgcagcacctcagtcaccacgtacacgttgtccccgcggctgcgcagctgctgcaggactttgtgttctggctgccgcaggtgcctctcatggagcagagtctgccaggtgttagggtccacactcagcgagtacacattcattgaggtgctggagctgtcagacaccgcggccccgcctgcgatctttgcctgtcctggggctgccagctccacgctgccctgtatctgcccatccatggcatcgtagaagtggaagctcctgccacgctgcacgtctggttccgcggcatccggctccaggatgtccttgatagacaggttgacacacttataacggggtttccagaaccatgagcttgagggcttcctaaccaccaggcagtagggctggaagccagtggagctctgcaggctggtcacagggatgaactccccaccatggtccagctcctggaccactctccggactacccgctcaaaggccgaccccatgctccgtgaccgtcggcgccccgagggtggcgcgtctggcgcgtctgctctccctggaaaacgaaacggcgagcaggagctgaagg

SEQ ID NO: 83692 - DNA, 488 bp, Homo sapiens
  misc_feature (1)...(488): n = a,t,c or g
ggtgtagggggnggnncctgatagactgatggcgtccgaangagcnaccggnccggaattgccgggtcgagccacgcgtccgctcagatcaggtgggaacctgcgggtgccccaggtgggggtcttgcggggtgcccagggctagaggggcccgctgggagcccgcagcggggctgggatgggcggccaggagttccagacaggagctgggcagcagcaggaagacggggggcacccctcctggcgtcctggccgccgggacacccctctccgggagaggacactcggtgcccctccgtgaagccggtaacctcggttgggccaccttccccacccgcgcgcccgcgccgggaaagccagcgtggccccagtctccgaatttctcggaatgaacaacagcaaattgaatccagggctccggcgggggccgcctttgctggccactggttctgcagcctggcgagactgcgcttagtccccgcctggag

SEQ ID NO: 83693 - DNA, 468 bp, Homo sapiens
  misc_feature (1)...(468): n = a,t,c or g
gggcgccnaaggaagccattgatcgtcgtctccacggccggaanncccgggacgacgggaggcaggagaggaggggtgggctatgtgtgggagggatctgggccttgtggatggagctacttcacgggtgacatggagaggagggctgggccatgtgtgggagggatctgggccctgtggatggagctacttcatgggtgacatggagaggagggctgggccatgtgtgggagggatctgggccctgtggatggagctacttcatgggtgacatggagaggtgggctgggccatgtgtgggagggatctgggccctgtggatggagctacttcctgggtgacatggagaggagggctgggccatgtgtgggaaggatctgggccctgtggatggaagctcttttttggcgacatggagaggagggctgggccatgtgtgggagggatctgggccctgtggatggagcn

SEQ ID NO: 83694 - DNA, 399 bp, Homo sapiens
cgggcccctctgtaattcctgtttgagcctcccaccctctgggagttgcttctttgactcccacttcctgctcttgtgcctcacttcctggaccccacagagcacaccctctgtggaccctccccaaccctcacctccctcttcacccaactcagagtcaggttctgtccttgtaatctctcccctcgaaccctgacccactccctctccctcctactcacctggactctcccatctaactaaatccagtgcttcctctgctgtgggcctgcccgcagcatcaccacctgtcctccctcagtggacagccgtaccatgcctcctcctccaccaagagaagtgcagccttgtggcagctctgcatcgcctggatgctgaccggctgcctctcttgccccc

SEQ ID NO: 83695 - DNA, 442 bp, Homo sapiens
  misc_feature (1)...(442): n = a,t,c or g
ggaggcaggaggcgacagtgcangagcccaggtgccaatgtcgggcctggaccangaggtggagaggaggtgagaggtgcgtggacacggggcaggtcaagaggagtggacaggccagcccacgaccggtgagggcagggtggcgtggggtcctggaggtcccttccttggcctgggactaacagggagaccccaggtcagtccagaaggaccctaagttatcangagagaaggtggcagggctggagggacacctggggttctggggccccactgaggagggattccgagctgcgggatatgcaacaccaccaagggaggggaggaggtcagagaggaaaagaggctggagtagatggatgacnaaccancaccaacgaaaaccatggccctggagagcatgagatggatgaggaaccagcaccagtgaatgggaggggcg

SEQ ID NO: 83696 - DNA, 408 bp, Homo sapiens
gcgccggggcaggggagacctcgccggggctcgtcacctgctgggtgccttggaaagtttgggtcaccgggaaggttagggtcacgtgcctttcaggttgcgggcccttcccccacatccatgaccccacacgccacaggcagcacaggtaacgtctcgcttccctcaagacataccccacctgctccctgcccggcccacgtctccccggacagcagcctccgagttggttgagggggcactcagtgggtgccaagcagggcccttgagaacccacaggagaccccacccccccaggtcccagtgcccctggtccaatgaccgagctccctcctggggcggcaggagccacccctcccttagccacgacgcctgtgccccgtccccacctgcaggggagtcggacgg

SEQ ID NO: 83697 - DNA, 458 bp, Homo sapiens
  misc_feature (1)...(458): n = a,t,c or g
tttagaggaagaggagggcttaaagtcaggaggcggctgggagggggtgggttttgcagggaagtgggtgtgacctgtgaatgtgctgggcccatctagggcccaactcttggtgttgctaaggtattgttggacagttctgggaagcagcagcaaatgctctctttgggtggtgtcttgggagatggatctgtgcaggtgtcggagggctggagtctgtggaggttctctgggtgtggagggcatcagtgagaggggagaggctccggaggtgttggagggagtgggcttcacgaccaacctgcagtggtccggagtcacctccccctgtgtcctccgcccgtggccaaagcggaaccaggagaattacctgatgaggagctgcattgggagagagtggggtcatggggtcaagagcctttggggggggatggcangcggggggagcctatcagtca

SEQ ID NO: 83698 - DNA, 388 bp, Homo sapiens
gcgccggggcaggtgtttcagggcacacatgtgttttattgacacacggagtgcaggtatttcagggcacacacgtgtgtttcagggcacgccggatgcaggtgttttggggcacacgtatttcatgacacacagcgtgcaggtgttttggggcacacgcgtttcagggcacgccgggtgcaggtgtttcggggcacacgtgtttcaggacacacggaatgcaggtatttcggggcacacgcatgtgtttcagggcacgccgggtgcaggtgttttggggcacacacgtatttcaggacacacagcgtgcaggtgttttggggcacacgcatgtttcggggcacgccgggtgcaggtgtttcggggcacacgtgttttaggacacacg

SEQ ID NO: 83699 - DNA, 466 bp, Homo sapiens
  misc_feature (1)...(466): n = a,t,c or g
ntttgagagcgtttcgacagcacgcaccggnncggaantcccgggncgacgggaggcaggagggtggaggacatggacgagggccccacttagctgccgcctctggagtcgccgctgccactgcgggccgcggaagccatggctacccccagccctgcagggggttgtggaggtggcctgttggaggcccaagcgctgagtgccaccgggcagagctgcgcagagccctctgagtgtccagactttgtggaggggcctgaaccacgggtggattccccgggccggacagaaccctgcaccgccgccctggacctgggggtgcagctgacacccgagacactggtggaggccaaggaagagccggtggaggtgcctgtggcggtgcccgtggtggaggcagtgcccgaggaaagcctggcgcaggtggcaccgagcgagtccccacccaccctataaatgtcagacg

SEQ ID NO: 83700 - DNA, 385 bp, Homo sapiens
  misc_feature (1)...(385): n = a,t,c or g
cgggccttccccatctcctgccctcctgtttgttcctccagctgccctcctgccatgtccctccacctgccctcctgccctcgtgccatgaccctccacttgccctcctgccctcatgccatgaccctccacttgccatcctgccctgctgccatgaatgtccacttgccctcctggcaagcccctacacctgccctcctggtgtgacgctccacctgcactcctgccatgaccctccacctgccctcctgccatgcccgtccacctgccatactgacatgctgccatgaccgtccaactgccctactgccatgtccctacactaggactactgccctcctgccatgactgtcaaattgccctcctgccctacatgaatgacacn

SEQ ID NO: 83701 - DNA, 425 bp, Homo sapiens
ggaggcaggaggggtggtcctgagtttgcgctttgcttttctgagaggggaggtccttattgcaggggtgaggctgaaagggggaggtcccaattttgtgcacgggtgaggccgaggggaggttgcaagtttgtgcaggggtgaggccaagaggggaggtcctgagttagtgcgggggtgaggccgagaggggaggtcctgagtttgtgcaaaggcgaggctgagaggggaggtccctaattgcaggggtgaggccgagaggggaggttgcaaatttgttcacgggtgaggccaagaggggaggccctgagttaatgcgggggtgaagccgagaggggaggtcctttttttgtgcacatgcgaagctgagaggagaggttcttattgcacaggtgaggctgttagggagatagctcatagttgtg

SEQ ID NO: 83702 - DNA, 440 bp, Homo sapiens
  misc_feature (1)...(440): n = a,t,c or g
tgtatcctctagagcggccgcccgggtcccccgcaccaggaacctcacagcctgggtcccctcctgccaccacctccaccctgccctggcccacttggccttcctgtctgaggcaacctcctcctcagcccacacccccaacttcctctcctgaggtaactgccgcacccactcccacggaggcctccaacccagggatgcccccgccgccagccctgccctgttgcctggagccacagggcccctctgttctggccacacagttctccccagaccaggctggggtcccggcggtggaggcctaggctagcgcagcagcccatgctcaggtaccacagtgactccggaaagaaagcatttgcccagcgctgaggggcatgtagacgtggcaaggggcccatgacttggtcagggctgtgtcctgagcccactgggcggcn

SEQ ID NO: 83703 - DNA, 922 bp, Homo sapiens
cctctgtgtgctctcggcgtctggagctgcttctggcccccagcacttcctgctttccgaccacggatgacaccaaagttaccaaagttacagggtcaaaccgtctctgcatttcatgcacggaaataaaaccatcctccacagcccagcagactcctggggcattgcgtcccggatcccgatggagggcccgtcattgtgggcccaagaagcccacaccctgcctggcaccccttggtcttgactgtcctcggcctgcccgtttgctcctctgtggcctctctgtcctgggcactgtgttgcccgcgtcctctgagtcctgccacatggacggggtttacttccctgccctgaccagcctgctgtcgcagaaggtgcgggagagtgagcgagccttcacctacagcatcgtgggcgccggctcccagtttgggcgttcacgccttctcagacaccgcaggcggcacagggcccccgctgcagccaggacgcccctgtctgagagcaacgcggctggggcagcttccaggggccctcgggacccgggccagcctcctgtgcagcttgggatgtgtggaaggggaagtcggcgagacccagctcaagacgtccaggtctccgccccatacaatgctgtgtccagtcagggctcagaaagcatggccctgcgccgtgctcccctcactcctccccgcctgcgcccacatcatctggaatcatccacactgcagaaggacccaccacctgcacccacgtcgtctggacccatccacactgcagagagacctaccgcctgcgcccacatcatctggaatcatccacactgcagaaggacccaccacctgcacccacgtcgtctggacccatccacactgcagagagacctaccgcctgcacccacatcgtctggaaccatccgggc

SEQ ID NO: 83704 - DNA, 419 bp, Homo sapiens
ggaggcaggaggcggccatagaaggctggagaaggctggaggaggctagagaaggctggaggaggctggaggaggccggagaaggctggagaaggctggagaaggctggaggaggctgggctagagaaggccggaggaggctggaggaggccacagaaggctggagaaggctggaggaggctacagaaggctggaggaggctggaggaggccggagaaggctggaggaggctggaggaggctgggctaaataaggccggaggaggctatagaaggctggagaaggctggagaaggctgggctagaggttagagaaggctagataaggttagagaaggccacagaaggctgggctatagaaggctggaggaggccacggaaggtcaaaggaggctggagaacgctcgaggaggctgttaa

SEQ ID NO: 83705 - DNA, 429 bp, Homo sapiens
ggaggcaggagattagaggcgcggggctggagagggagtgtggctagaggagagaagcagggctggagagggagtgtggccagaggagaggagaggcgcggggctggagagggagtgtggccagaggagaggacaggcgctgggctggaaatggagtgtgtccagaggagaggagatgcgctgggctggtcagggattgaggccagaggagaggagaggcccttggcttgacccgaattgtggccagaggagaggatctgcccttggctagatagggagttagggcagagggcaggagctgggctgggctggacatggagtttgggcagaggagaggagatgcgctaggttggagatggagtgtgccctccggagataaccttggcttgagagggagtgaggcctgaggagaggagaggctcagggctt

SEQ ID NO: 83706 - DNA, 426 bp, Homo sapiens
  misc_feature (1)...(426): n = a,t,c or g
ggaggcaggagagagtgaggagggcagtgtgggtggagtggagagtgaggagggcagtgtgaggacagtggagagtgagaagggcagtgtgaggacagtggagagtgttgagggcagtgtgaggacagtggagagtgaggaggacagtgtggggacagtggagagtgttgagggcagtgtgggtgcagtgtatagtgtggcgggtagtgtgggtggagtggagagtgtggcggctagtgcgggtggagtggagagtgaggagggcagtgtgggtggagtggagagtgaggagggcagtgtgaggacagtggagagtgagaagggcaatgtgaggacagtggagagtgttgagggcagtgtgaggacagtggatagtgaggaggacagtgttgtgacagtggagagtgttgagggcagtgtgtgttn

SEQ ID NO: 83707 - DNA, 438 bp, Homo sapiens
  misc_feature (1)...(438): n = a,t,c or g
nagctccatgatgagggggtgcagggccntgcctttcccattcntgcaccccacaccatgaggtccgtgggctgccagactgatgaggacccgctcttcctcccgatgcaggcaggccttaaaggagcccctccctttctgtcccctgtcttaatgcntgagccatcccccactctgcacacacacacgtgcacacacacatacacagataccctccatccctccatctacaagccccagcacagtaaccacagtcctgccgtaaaccttgaccccggtcttcccccactcagaaggtccgctgccctcttgcttttctgtgggtccacccatgtctgctccttcctcgactggtcctcagtactgccccgggctcccatcgaggaaagaagccactccagaagggagaccagaaacctgtctcctcctcctgcctcc

SEQ ID NO: 83708 - DNA, 426 bp, Homo sapiens
aagaagagaggtgtgtaggatatggtaatcctggatgctgtcattgaagccaaatcgttgccccagggcacttcagcccgcaagaccaaactcattgctttaattctggcctttgagctaagtgaaggtaagactgtaaacatttacactgactcttggtatgcctttttaactctccaactgcgtggggcattctacaaggaaaaagccctgttgaacgctgggagaaaagacataaagtatcagcaagagatcctgcaattattagaggcagtgtggaagccccaaaaggtggctcatgcactgcagaggacaccagcgagcttctacctcgattgccttggggaacccccaagctgactcagaggctcgaaaagcagcatccaccccctaccaggcatcagtcacagccccctgctccttagg

SEQ ID NO: 83709 - DNA, 408 bp, Homo sapiens
tcgaagcagtggcgaagggaatttaaggcttttccctgaccattttctactgtccctgcgcgaggggagggccccggctcggcctctgcaaaactttggggcgctggcgcggaggaggagacaggatttctcccgtgacttttgtaactgcgtcagggcaagatggcgctgggtctccttggggcgcggggggagaggcacgtccaccgccgcagcgcatgtgaccgggctgcattcctgtggggtttggctccgacccaggccggggcgggggaggggacagggcttgggcggaggagactgtggtgcggtcggcgttggcggcctgaagaggaagagatgactgttggaaagcgttcccctcccccatacggcaaaacagctgctgcttccaagggaaagcccccc

SEQ ID NO: 83710 - DNA, 630 bp, Homo sapiens
tttcaaatgcagtggataggtcatttacatcttttcttgttatttggctaggttctgaagccagacacaagatgaaaaagctaactccaaaacagaaattttctgaagatttagagtcatataagatatcagtggtaatgcaggaatcagctgagaaactttcagaaaagttacataagtgtaaagaatttgtggacagttgcaggcttactttccctactagtggtgatgaatacagcaggggcttccttcaaaaccttaaccttattcaagatcagaatgcgcaaacaaggtggaagcagggcagatatgatgaggatggcaaacccttcaatcaaagatctttgcttttggggcatgagcgaattctcacaagagcaaagtcttatgaatgcagtgaatgtggaaaagtcattaggcgtaaggcatggtttgatcaacatcaaagaattcactttttagagaatccttttgagtgtaaggtctgtgggcaagccttcagacagcggtcagctcttacggtccataaacagtgtcacctgcaaaacaagccatacagatgtcatgactgtggaaagtgttttcggcagctcgcgtatcttgttgaacataagaggattcacaccaaag

SEQ ID NO: 83711 - DNA, 407 bp, Homo sapiens
  misc_feature (1)...(407): n = a,t,c or g
aataaagtctattaaaacaaatcaattaatatattttgccatattaagaaaactgaaaaaggaagagcacatgatcatcatagcagagataagaaaaatatttgacaaaatttatcatccggtccttataaaaattcttagtaacatacaaatagaaaagaacttccacaacttaagatagaacatccatgtaaaacctacagctaacgtcataataatggtgaaaaacagaatgctttccccctgaatatcaaaagcaagatatgcaattattaggaaactattgtattagaagttaacaacacaatctttaatctatcagttagtagttcacatctgacagttgaaaacagaataacagccatgccatagttaagagaaaacacgtaaatattactaatcatgan

SEQ ID NO: 83712 - DNA, 418 bp, Homo sapiens
gaagcccaagacttggtgactttactgctttattctagcttacatttaaagaaaaactagtacagattgttctcataattttatgagaaatttaagaagagggagtaatttcaaactcattttgggagatgagcattacctagataccaaagccagacaagaactctccaggaaaagaaaattacagacccgtattcttaatttatatgcagaaattctgaagaaaataataactaaattcaacagtgtattagaaggatcatttactgtgatcatatgggatttacctcaagggtacaaggattatccaacagacctgaatccataaaatgtgatatacaacattaggagaacaaaggccaaaaccatgttatcatttcaatagataatttgagataattgagaaaaagcatttgcg

SEQ ID NO: 83713 - DNA, 414 bp, Homo sapiens
tttcgtcggctgctctcgaggaggccggagcccccggagacgatgcgccccgcgcagccgcctgcgcctgcgggagccggctgcccttgagatggagttgctgcctctttggctctgcctgggttttcacttcctgaccgtgggctggaggaacagaagcggaacagccacagcagcctcccaaggagtctgcaagttggtgggtggagccgctgactgccgagggcagagcctcgcttcggtgcccagcagcctcccgccccacgcccggatgctcaccctggatgccaaccctctcaagaccctgtggaatcactccctccagccttaccctctcctggagagcctcagcctgcacagctgccacctggagcgcatcagccgcgcgccttccaggagcaaggtcacctgcgc

SEQ ID NO: 83714 - DNA, 530 bp, Homo sapiens
tttttcagaatgagactgggcctatattttaactatcttttttgggggagggggtgtgaaatgtaatcactcgggaaaggtgggttagggcatcagggaggtgacatctgtgcaaaatgcatccagagatccagagatccagactcggtggctctcaggacgcaacggcctgcaaaggacatcttgcggacgcgaccctccgactccactcaaggtacttgctccgccaaagcagcttctagacagccccgacccccttgccaccagctgcctccaccagaggcctgaagggggtcggggtcatagactgcccgcgggtaaagagtctggggacccaggacgtggagcggggctcaggccggcgccccgaggcccgttagaaggctctgccagctgcgattccaggggccaaggtcgccctgggcccccaggacgccagcctcgaacgcactcaccagcttgctgccgcgcagcaaccgcactgccaggccctccatcctcgccccagccttttccgttttgcgccacgt

SEQ ID NO: 83715 - DNA, 409 bp, Homo sapiens
  misc_feature (1)...(409): n = a,t,c or g
ttnccctgaggggcgggtgttagggctgagagccgggtgatggttacaggtgagggaagttgttagggctgagagccgggtgatggttacaggtgagggaagttgttagggctgagagccgggtgatggttacaggtgagggaagttgttagggctgagagccgggtgatggttacaggtgagggaagttgttggggttgagagccaggcgatggttaacggtgaggggaggtgttagggctgaaagccaagcgatggttggaggggaagggtggtgctaggggctgagagtcgggtgatggttttgagggtaagggtggtgttaggaatttacagtcacgtgatgcgtagaggcaaacgggggttttagggggctaccttgtctcctcccataattttcttattggaa

SEQ ID NO: 83716 - DNA, 407 bp, Homo sapiens
  misc_feature (1)...(407): n = a,t,c or g
tttcgtcgggcagggatttggggttgggatccaagcaggagctggtgcctgggtttgaggctagggctgggggataagtgtatactggcgaccgatactaggattaaggttttgccagggcttaaggctggactttggagctggccaaggggtggggtttgtggctagggctggggtttgtggctggggctgggttttgtggcagggatccaagcaggagctggtgcccctgactgatgctaaggctggacatggagctggtgatggtgctagcactggctgaggttgggtgcaaggcctgtatttggggatggtgcacgttttgggggccgagttggattgaggctaaggttggagctggattggtgtcttgggttgacttaacgttgcgcaagatgctgangttn

SEQ ID NO: 83717 - DNA, 408 bp, Homo sapiens
tttcgttgtttgtatacatagaaaatcccaaggaatctacaaaaagtgaattaaagaggttgctggatgcacgatctatatataaaaattgtattgttatatattcgcagcgaacaattgggaaataaaattttaaaatactaattgccacaaaacataaaacacttagtgaaaaatctaacaaaatatatgcaaaatatttataccacaaccatgaaatgctgctgagcaaattgaaaaagactgaaatagttggagagatataccatgtttatggcttagaatatttggtactattaagatgtcagttctccccaaattaacttacatgtttaaaccaatcccagttgaaatctagaacacttgcttttttgttataaattgacaagatgattctaaaatttattt

SEQ ID NO: 83718 - DNA, 401 bp, Homo sapiens
tttcgttcttaaaggaaatcttgatggggagcggagccctcagctgagggagcgctctgaaataatacaccattgcggccggggaaagcagagcggggcaaaagagctctggccgggtccgcctgctccctctacgcttcgcttctatggtcttctttacccttctgctctctcctcctctgatgctctctcctctcctccgctcttctctgtcctcctctcctgctctctcctcttaccttagcgccgcgaattttcttgtcctcttcgtccctctcctcgcctctgccctgctcctcttatgtgggtcccctaccctaccgcctgtgtctcccctctgactctcacactcaccccgctcgctcgatcgatgacgcacagactcaccgtgccttgtccaa

SEQ ID NO: 83719 - DNA, 407 bp, Homo sapiens
cggctgcggaggcgatctccctgatttagggttttagttgcccggagcctgccaccgctctcagccagcccgcatccttctctgttcttccctccccccgcctgccacggcgcgggtatccgcagccacagcccggggccggtgaggcggcgaagggggaggggaggaatcaagggatgagcgccggaagggcgtcgggggccctgagccgcactaggacgcccctggagccggaaccccagcagaagccggaaccagaaccaaatcaccggtaccgggtcggccaggtggtcagggtgggagaaaccaaaaagggagaggggtgcgggagtactgataggaaggggctgcagaggcctggctcaagccggcgtggaggaggtgcgggcgctgactcaggcaggatt

SEQ ID NO: 83720 - DNA, 509 bp, Homo sapiens
cggacgcgtgggcggacgcgtgggcagaacaatgactgcgccgccgggtacccgggagcgcgtcggaggactgtgagcagccgccgccgggagagctgcgggcggcgcagtgtcaacgctgggctcgggagcctccagcgcagatcctgcccagcgcccgcagcccgcgcgaagccgctgggctccggcactgcagcgctgctcggggactgtgcattgttgtgagccggagaaggggcgcggggattacaaagcctgaagaccccggagcccctttagccatgtggatacctacggagcacgagaaatacggcgtggttattgccagtttccgaggaaccgttccatatggcctgtcattggaaattggagatacagttcagatcctggagaagtgtgatgtgcaaagggcatcatatgctctgaccaaggaagagaaaagagagaatgctgtgctagcaaagatgatgtcaagcatctctccacttaatcaaagtctatccctcaaa

SEQ ID NO: 83721 - DNA, 411 bp, Homo sapiens
tttcgtgtgagcctagagctggagactagctttaaccgttggggcggccggagagagggctggcagggctttggctttggggaggcttggggaggacgagggactggcggcgtgaggggactggctcgggctggcaggaattcgacaggagagaggtgtcgatactggagggggaggggaacagtgcaaggggccggagggcggccgggggcagcggaggctccgtgttggaggttaagtgggcagcgccgtacgagtgtctttcatgagactggggcctgagtggctggcgagggtcgtccccaggagacagggcccttatagggcactgcttgcgtcactgtgggtcgagaaagcaataatgttatgagaatgagagggctgaagggctgcatgtgcagatatcctctg

SEQ ID NO: 83722 - DNA, 482 bp, Homo sapiens
aacgatttcgtggctgggggtgaagacgtgagagagactgtcgttgatctcactgaggtctgtgagtttgtaggtgtttctggggtgtggggtacagactcccgctgaaatctgggcgtagttggagagtagctgggacagacaggagagtcatgggtggctgggggtgagctgctggatgatggcagtaagaacatatggtatattattgatgactgggggtgagctgctgggtgatggcagtaggaacatgtggtatattactgatgaacgtggtgactctgaagaatcctcagaggaggacacgggagagcccaatggcttcattgattgcccatcacggacaggacagggaaatgggagattgtgggatactggtgatgacagaggtgagtgtggtgaagccctaggggatggtgaatggtagttccggatccctggtgaggwgcttccccttaagcctgagtttctgagaggggaga

SEQ ID NO: 83723 - DNA, 420 bp, Homo sapiens
gcaatacattccatataaatagtaattaataagacagtgggagtagctatcctagtatcagaaaaaatagactttaagacaaaaactgttacaagagcatagaaggacattatacatcagtaacagggagactccatcagtaagatataattataaacataaatgcacctaacaagagtccaaaatacataaggcaaaaactgacagaattgaagggagaaataaacaattcaactataaaagttggagacgatagtagtccactataataatgaacagaactagacagatcaccaaggaaaacagagactttgaacactaaaaaccgactagaccaaacaaacacacagaacactctatctaacaacagcacaatatacattctctttaaatgcacatgtaacattctggaggaaacac

SEQ ID NO: 83724 - DNA, 972 bp, Homo sapiens
gcctgggtcccccaacgctcacagcactgccatcctcagccacaagagaggactgggcttggcagacagatccgtccgctacaggagttggcccccagccttcccgggagacagcactgctcaccaccgccgcctgggccgcggggaagaaaagtgggcggctgcgactggtgggcggcccgggtccgtgccgcggccgcgtggaggtgttgcacgccgggggctggggcaccgtgtgcgacgatgactgggactttgcggacgcgcgcgtggcctgccgcgaagcgggctgcgggcctgcgctgggcgctacgggactgggccacttcggctacggccgcggccccgtgctgctggacaacgtgggctgcgccggcaccgaggctcgcctgagcgactgcttccacctgggctggggccagcacaactgcggccaccacgaggacgcgggagcgctctgcgcaggcccagaggagctgggactgcaagtccagcaggatggttctgagaccacgcgggtgcccactcctcggcccagggacgggcatctacgtctggtcaatggagcccaccgatgcgagggacgtgtagagctctacctagggcaacggtggggcactgtctgtgatgatgcttgggacctgcgggcagccggtgtcctgtgccgccagctgggctgtggccaggccctcgcagcccctggcgaggctcactttggcccaggccgaggccccattctcctggacaatgtcaagtgccgtggggaagaaagtgctctgctgctctgctctcatatccgctgggatgcccacaactgtgaccacagcgaggatgccagtgtcctgtgccagccttcatgacccagcccgctctgcagaccacctcttcttctgggagctgtgacctcccttcctcctccaggaagccctcctcttgtgatgactacagttcactttgcccctccttcccttg

SEQ ID NO: 83725 - DNA, 1432 bp, Homo sapiens
  misc_feature (1)...(1432): n = a,t,c or g
gtgtcactataatcatagattaccacccactggaagctaaatctaacaatagagtattagtccattttcatgctgctgataaagacatacctgagactcagcaatttacaaaaggaagaggtttattggacttacagttccacgtggctggggaggcctcacaatcatggcagaaggtgaaaggcacaactcatatggcggcagacgagaagagggcttgtgcagggaaactcccatttttaaaaccactagatcttgttttcatctccacttctccagtgacacagctcttgtcatcatcaccaatgactccccaggttgctaaatccaatgagcaactctcagtcttcaccctgcttgacttctcagcaacatactttacacttacacgggtggaccgcagctgtccatacctgacagtgcctggccctcccggagccgaatccggtgctcctgttcgcctggggctccgccagcgcgccactaggcactttccgggacgcggggcagaccctgcgctcgggtcccttcccgcagccgggctgtccggcctctgcgcgcgcacaacaggcggcacggcgcagcccccgggagcgcgggactcgggtgctagtcccggcgcccagccacagcgacacagacctggagtgagcgacctccgactcacggagaagcgaccttaccaccggtgcccgacacccagagctaagggagcgagaagaaggcgaagaaagaggcggagagcggtgcactgccttcgctgggactcgcgacttccagaaaccctcccgaaacccagtcccgccgccgccccgccggcagggggcacagcgggcgtccggggcgcggcggctgagcgatggggcgagcggaaagggcccagacgcctggttcttgttcatacctcggagaaagtcttgagcaccaggcgttgggctctctgcgtcccgcggaggggtgcggccacttgggggcaggagaaagcggagtacgccacccctctagggacccaggaagcgaggcgagcctcaggtggacgcggtggtgtggaccacggcgatcagggcctttccccctgctgtggagacggaggtgcgaggggacgccggcggctccccaccttctggccgagtggccttctccgcctccggctggactccctcggggcgctccctccagagccgagtcgggctggccgggggcggctgtttggcctgagtgtcgtcttactaaagcggaacgccggaggggaggccactccgagagaaggcggtccccggcggaggtggcttcgtgaatcctgcagccccctgcccgcccgccaatcgagacgccgcgcctcgtgggtttcacgctggatggagggggcgccgccgaggatgcccancctccccctctaattctacctctccagttcctcaggtagacacag

SEQ ID NO: 83726 - DNA, 625 bp, Homo sapiens
ccacgcgtgcgcatgagctgagatttgagaagaaatgttgaaggaattgcgcctctttcagctccaaatgtgtgaatatctcattaaagttaatgaaatcaagaccaaaaagggtgtggatctgctgcacaatcttataaagtattaccatgcacagtgcaatttctttcaagatggcttgaaaacagctgataagttgaaacagtacattgaaaaactgtctgctgatttatataatataaaacagacccaggatgaagaaaagaaacagctaactgcactccgagacttaataaaatcctctcttcaactggatcagaaagaagattctcagagcccggcaaggaggatacagcatgcatcagctccagggcaataaggaatatggcagtgaaaagaaggggtacctgcctaaagaaaagtgacgggatccggaaagtatggcagaggaggaagtgttcagtcaagaatgggattctgaccatctcacatgccacagtaagtatgtttcttaatttaccctgcctcatgggccagaaagcaaacacgattatgtactcagcagtaaaaattggcgcaaatatatttatgcatttgggtcagatcattttagatattcctttac

SEQ ID NO: 83727 - DNA, 396 bp, Homo sapiens
  misc_feature (1)...(396): n = a,t,c or g
tgcacatagccatcctgaagattggcactgaatagctctgttttttctattagtttcccaaaattatagtttaaaatcttggtccctgacagctccatttttagccttttgatcctttttgagaaggaacagattanaaaagaaggtgagttgttttttggttgttaagacacacactgtaaacttttttaatttcaggggttttgttttggggatttttgtgtttatttagtgcaagcctaataagctagccagattaattctctggagaccgctagagtattttctttgttgacttggcagacactgcatatgcgaagaacaaactgaatgggaaatggtattactttgatgatagcaacgtgtccctggcctctgaggatcaaaatagtgggg

SEQ ID NO: 83728 - DNA, 430 bp, Homo sapiens
  misc_feature (1)...(430): n = a,t,c or g
attctccttgcttggtccctacaaacaaaggctttcccttctcttgctacaagccttggtttagatatggtatagatacatagtcttattacgctgggcgagtggacctccgtttggttcaataacaaaatctgaactgaggagagttgtgattacactattgcatttcatcataaatattttccttgttgaatccaagcacacaaagtacagaatgatcctcttcctcagtacagtttttccctctgttataatagtaccatgatatcctcagctgaagaaaaggtgctagatgctntgtaccatctgatctttttgcaggtgcttttctgatgcaaatattctctgaatcttatctctcccttcactctgaccataatcttgctatgtcctgagctattgcgttttcccaaaccagtgagtttcaggg

SEQ ID NO: 83729 - DNA, 399 bp, Homo sapiens
  misc_feature (1)...(399): n = a,t,c or g
tttagctgcatccaataagttttgggatgccatgtttttgttttcattcatctcaaggtattagaaaatactttgccttttaatttctttttgatgcaatggttatttaggagtacattgtttaatttccacatatttatgaattcccaaatttgttattgatttataatttttttctgttgtgatcagaaaacatactttatatgatctcagtcttaaatttatcgaggtttgctttctggcttagcatatggtttatcctgcagaataatccatgtgtacttaagagtatgtattgtactgttgttggatgctgtgttctataaatagatggctgttaggtctatagtggtggcctgttgtgttgntcaagtcttctatttccttggtgatatgcct

SEQ ID NO: 83730 - DNA, 406 bp, Homo sapiens
ccagggtgtaggctgtagggatgggaccccagggttgtctggatgggcaggaatagcagcgggggagaaagggctggaggcacggttgggcctccccagggtgtggggtgcacggaggggctgcacaggctgttcccctgaaggagggaggagggagggagcacagaggtgctgggagcaaatggagagggaagtggcagcggcccgagtgccaggcggtcccggtttggggttgatctttgtggaacagctccctggcccgtgtgtaagtggtcgggggaggcacggaggtctggagctacaagcggtggcaggaaggcaggtcccagtcttgggggtctggagcttatcttcttcctgtgaactgagtgtgggcagcacctatgggcggtgccctggacctgtg

SEQ ID NO: 83731 - DNA, 283 bp, Homo sapiens
  misc_feature (1)...(283): n = a,t,c or g
ttttttttttttccagggagggggggccccatgccacccccaaaccggggggttttctttgtggtatggccaaaaccagggcctggcccctccaccaaaacctttggcccaagttttacccccccccaatatttccaataaaaaggccccaaaaacccgcgaagggataaaccctcccgaaaggcaaaaatcacccccccccccgcggaaccttaaacaatggctaatggaaaacntaaaacccccccgcccggggcccgggccaaaaccccaatataaaaaa

SEQ ID NO: 83732 - DNA, 1778 bp, Homo sapiens
acatgtactgcacagagcccttccggatcccctttgctggcaaggtcgaaggttgggttgctttgacaaagacgggaccgttgaccagggacagctgggtggtgcgcggtgtatcccggcctattagcgggaaggaggtgaccgcagtgtccagcatccctgtagaaacaccccgggccctggcctagtgccactcgctcatgcagctggacgacggcaccctcgtgggtgaccctctagagaaggccatgctgacggccgtggactggacgctgaccaaagatgagaaagtattcccccgaagtattaaaactcaggggctgaaaattcaccagcgctttcattttgccagtgccctgaagcgaatgtccgtgcttgcctcgtatgaaaagctgggctccaccgacctctgctacatcgcggccgtgaagggggcccccgaaactctgcactccatgttctcccagtgcccgcccgactaccaccacatccacaccgagatctcccgggaaggagcccgcgtcctggcgctggggtacaaggagctgggacacctcactcaccagcaggcccgggaggtcaagcgggaggccctggagtgcagcctcaagttcgtcggcttcattgtggtctcctgcccgctcaaggctgactccaaggccgtgatccgggagatccagaatgcgtcccaccgggtggtcatgatcacgggagacaacccgctcactgcatgccacgtggcccaggagctgcacttcattgaaaaggcccacacgctgatcctgcagcctccctccgagaaaggccggcagtgcgagtggcgctccattgacggcagcatcgtgctgcccctggcccggggctccccaaaggcactggccctggagtacgcactgtgcctcacaggcgacggcttggcccacctgcaggccaccgacccccagcagctgctccgcctcatcccccatgtgcaggtgttcgcccgtgtggctcccaagcagaaggagtttgtcatcaccagcctgaaggagctgggctacgtgaccctcatgtgtggggatggcaccaacgacgtgggcgccctgaagcatgctgacgtgggtgtggcgctcttggccaatgcccctgagcgggttgtcgagcggcgacggcggccccgggacagcccaaccctgagcaacagtggcatcagagccacctccaggacagccaagcagcggtcggggctccctccctccgaggagcagccaacctcccagagggaccgcctgagccaggtgctgcgagacctcgaggacgagagtacgcccattgtgaaactgggggatgccagcatcgcagcacccttcacctccaagctctcatccatccagtgcatctgccacgtgatcaagcagggccgctgcacgctggtgaccacgctacagatgttcaagatcctggcgctcaatgccctcatcctggcctacagccagagcgtcctctacctggagggagtcaagttcagtgacttccaggccaccctacaggggctgctgctggccggctgcttcctcttcatctcccgttccaagcccctcaagaccctctcccgagaacggcccctgcccaacatcttcaacctgtacaccatcctcaccgtcatgctccagttctttgtgcacttcctgagccttgtctacctgtaccgtgaggcccaggcccggagccccgagaagcaggagcagttcgtggacttgtacaaggagtttgagccaatcctggtcaacagcaccggg

SEQ ID NO: 83733 - DNA, 437 bp, Homo sapiens
  misc_feature (1)...(437): n = a,t,c or g
tttcgtggcgagcgctctagtgagcgcggacggatgcttaggcagtagtcctggcagcggcagtagtggtggcagcaaaagagaggaagggggagggccccgagggctacacacgctcacactttcaagttcccttggagggagaggaggtggggctgcaaaaagaggaggccaggagcggtcccatccgtcccgtcccgtcccgtctccccctcttcctcttgctccttgccccccggctctgcgagagttgagggttcaagtggccgtacgcggcagtgagggcaagacggccgggagagtggggagcggaggcaggagtgcgggggaagatgcccatcctgctgttcctcatagacacgtccgcctctatgaaccagagcactgacctgggcacctgttatttggacattgccaaaggcgctgtggagttattn

SEQ ID NO: 83734 - DNA, 411 bp, Homo sapiens
tttcgtctcttctgcgtggaagggaaagaggccactctgagttcagtgtgggtcctgccatgtctcctgcaagccagagggttccttcctcttgatgctgacaaattgtggggatatgggttcctggattagtctgaccttgatgaaggtgggggaggcatggatcggtggagacgggtctgaccctgatgaactggggggtgtgtgagtccctggggcgtggtctgaccctgatgaattggggggtgtgtgagtctctggagtgtggtctgaccctgatgaattggggggcgtgtggggccccagagcatggtctgaccctgatgaattggggtgtggggggtccctggggtgtgacctgaccctgatgaattgcagggcatcttggggtctgggtttgccctgaaggat

SEQ ID NO: 83735 - DNA, 373 bp, Homo sapiens
gaccagccagcagtgccagagcccgggccggacacgcccccctcccctttctcccaagcccctttcctcccaatcttcttcccgagcccctggcctctttgctccgtctcctcccttcccagccttcaaggacgcggcctgtctcgctcctatttcttccctacctcttcctcacccttcctcctggccccaggccctgagctcttcccctccaaccctgccaggggcttttgcaggcctagagcagagacaggaccctcttgtttctgggggttgggggtacgcccagctgaaaaggacagcggccttcagtgaaggggaacccagggccgcaggccgcccagactcacccaggctgtctctctccctctcc

SEQ ID NO: 83736 - DNA, 948 bp, Homo sapiens
ttttttttttttgagcttcatcccttgaggagtttattaggcgaccttggtctacactctcaggagaggagtgcaccagaaataaagccaggtgccctggagtccacctggagccaggcgcggggcgctgcacttaggttggcagaagcccgttagcgcgcagctccagcagcggggacagcgtgtagcgcaggcggcgcagcgtcgtctccgaggtgaggctccagagccacgcggagacggcgccggggtccaacagcacccgtccagagcagcgacagccccaggaagaggagcggcagcgtcagcagcacctgcagcgcgcccagcacgcaccgccctgatggccagcgcgcgagggccgccgaacagccgccgtctctcggttccgcccctggccatctcctccatgagcgactcggtgctgtactgcactctgcgaagctgcccgtcacaccgccccaggtctgggggaggagaggcgggaggcaccttggcgtctgagtggggccgcacctgcaggactacggtctgctcctggaatatggcccaggcctccgctgtctgcagcgcgtcctgctgcagcttctcctcctgcaaggcgcatttggtctccgccagctccagttcattctgcagcgtcaccaattgggctgcgagttgctgctccgtgctcttctggctctgcagttcccctccgtagtagaagagctaggggcggggcttgtaaggacggggtttaccgggcttctggaggaacgagtgtcaggggagacagggacggggaggcaacaagggcgaggacaagggcaggacttccgagaggaaccaagagacaggccctcccatctcctgcacgtacctgactcgacagctcctcccactgctcctgcagctgcctgctgtgctgctcctgcggacggggtcctggggcggtgccggaattcc

SEQ ID NO: 83737 - DNA, 398 bp, Homo sapiens
cacacggattggaaaggaagaaataaaatgatctctgtttatcaaggacattattattcacatggaccatcccaacaaatgtacaaaaaacaaaaaactaattagtgagttcagtgcaatcacaggatacaagatcgacattcaaaaaatcaatcacatttccatagactaacaatgaaaatgtggaaacaaaattttaaaatgtattatcatttacaagcactccaagaataatgaaatgcttagacataaacttgataaaatatgtctagtacttggaggctgaaaattacaaaatgctgatgaaaggaccaaaaaagacctaaacaaatgaagaaagatataccatgttcatggattggaagactcaacataggggcacctaccatgagactgat

SEQ ID NO: 83738 - DNA, 397 bp, Homo sapiens
aaaaattctctccactgggaggaaaaaacaaaagctgctttccaggaagccctcggggcaggcccacaggagcagagctgcacgaggccaggtgctggccccactgcggcggctgttctcagtctcactgggcttccaggccggggtcagcatggttctgaggaatctcagttctcatctcgccccgtgaatctgctcccccacctgcccatgttgacaggggggtattaatcttttttaaaaccttttataggaaaaaaatttaccaccgatgattccatttgggggctgggaataagcaaaagaaacggtatttttcaacccgtggcagagctgaaaaagccaacgggattttgagcacaagattcccaaatgaacagggggtggctcaaggcta

SEQ ID NO: 83739 - DNA, 518 bp, Homo sapiens
agcggccgcggcgctttaagtgggaagtctgtctaatgagcccagtcattaaaacatcaaaaactgttatccggggtttctattttagttagacattacattattttaataagggggccgcatttcttgtcacagggtttggtaatggaggctgaagcaaccccctggggaatgggggagggggaggcaggcttgcctttggaaaacaaggtcgcaaatcaagccggagcctgggaagggggatgcagatgagcctctctgggaacctaagagggaggagggccctgcctgtaggggcggtaggggactggtgggggggctggaaacactgtgccctagtggggaacggggaaggcaggttgtaggctgttctgggctcctcgtgcatcactacacagctttctgatctgtcgccacactactgggcacagtagccttgtcctcagccctctctgactcctccttgctccctggggaaggagccagcccacaggcccagcccagtccctggcctcttc

SEQ ID NO: 83740 - DNA, 452 bp, Homo sapiens
agcttggcacgagggtttaagcacttattttggattaattcatgggaacagtacaaaattccagtccttaaaaggatatgaaataagaccattgtgcacccagtagactggcaaaaaccttaagtctcaagtgttagggaagatttggagtaatgggaggatatactttgctgatggaatgtaagctggtaccaaccatcttggaaaatagtttggtaggttgtggtaaagttgaaggtgacacactttccaacccagcagttactctcctagcaaatatataccctggagaaacttccacgtacatgcaaaagacatgtatgagaatgttcacagcagtgctgtttgtaatagcataaatgtggaaacaaatatccagcaactggagaatggacagattgtggcatagttgttccagttacctaatgcatcactaatcaccccaaaactta

SEQ ID NO: 83741 - DNA, 1804 bp, Homo sapiens
cagcttggcacgaggcgttgctgctccgccggctcaccttggctgcccagcaccctgctctgcctccgcccacccatctcttttaccttcactgcgtcctgagcttccctgagaactggccgctgggccctgaaggtgaggaggctgccccactgctgctagggccccagctatgccgtggtctcctgcccagtctcctgcatgacccaatggccctcctggcccgcctgcatttactgtgcctgctctgtgccgaggaggaagaagaggagaaaggccagcttccaagcccacggcactacctggaagagctgctggctggcttgcggcagcgggcagccctggatgggggcccccgggccttggccactctctgcttccaggcctcgtatctggtggcctgctgcctggctgggcaacctacggtgctgacccccttgatccacggactggcccagctgtaccaagcccggcccatgctggctccccactttgtggacctcttggatcaggccgggcaggatgaagctctttgctggcacctgcaaatgctggcaaaggtggcagatggagatgcccagagtgctaccctcaactttctacaggccgcggctgcccactgcacgaactgggacctacagcagggcctgctgcgggtctgccgggcgctgctgcgggcaggggtgaggggcggcctggtcgacttgctgcaggtgctggccaggcagctggaggaccctgatgggcgtgaccacgcccgcctctactacatcctgctggcacacctggcagcacccaagttgggggtggccctgggcccctcgcttgccgcacctgcactggcctcttcactggtggccgagaaccagggctttgtggcagcactgatggtgcaggaggcaccggccctggtacggctgagcctggggtcccatcgggtcaagggcccactcccagtgttgaagctccagccggaggcgctggagcccatctactctctggagctgcgcttccgtgtggaaggacagctgtatgcacccctggaggctgtccatgtgccctgcctgtgtcctggccgccctgcccgccctctgctcctgcctctgcagccccgatgcccggcccccgcacggctggatgtccatgccctttacaccacatccactggtctcacgtgccatgcccacttgccacccctgttcgtgaactttgccgacctctttctgcctttcccgcagcctccagagggggccgggctgggcttctttgaggagctctgggattcctgcctgccagagggtgctgagagtcgtgtgtggtgtccacttgggccacagggcctggagggcttggtgtcccgccacctggagccttttgtggtggtggcccagcctcctaccagctactgtgtagcaatccacctgcccccggactcaaagctgctgctgcggctggaggcggccctggcagatggagtgcctgtggccctgcggaccgatgactgggccgtgctgcccctggcgggggactacctccgtgggctggcggctgctgtctgagccccgggagaccaggtgggggcaggactgtggcccttgtgggggccaaggcacactcctgtagctctgtcgccaaaaccctgcattccgcagtgccctcgctggcttgttttcttttgggccccggttgggagcaggctcctgggggtgagggtctgtctgagtctgtttttgctgctctagcaagatccctgagacggggtaagttataataaacagaaatgtattggctcagaaaaaaaaaa

SEQ ID NO: 83742 - DNA, 412 bp, Homo sapiens
ggataccacccaatgatgacactgtggatatttggggagtgattcttcctatgatcattttatttctgattacacactgcctctttcacttatattttcattttatacatttataagtatttctgatggatatgtaatatttcactaggtatgtgggataatccctttggcattaaagtagtttccagtattttagaaccataaataaaacatgatgccctcaaaaagagtaagatagctagaaatgaaggtatcatggagagaaaagacttgcacactgcaaactatgaaatgttgctgaaagaaatggaagaatacaccaatcaatggaaaaacatctctcgtttatggtttggaagacttaatgttgttaagatgtcagtactgcccaaagcaatctacaaattcagtg

SEQ ID NO: 83743 - DNA, 406 bp, Homo sapiens
ccgcggacgcgtgagtgatgttttgcctacatcttttacagttgcttttccagggggccatggaggatctgcaagccaatgaaatcattgtttaggtttgtcaaaaaggagttcatatgaacttcgaaataaccacaaaaattatatacataatacctatgggatcctttattaagattggttcagatgatttgcttgggtttccagggccagcaagattttcagccaacacacggaatctgtattttttcttattagtgagacctttcactctgaattaggaacaaagtgcatgtgtatcatcatggtaagacgcagaagaagcctatgtttattttacacagaagagactaatttatttaaattgtgaaaaggtgatttggaatttaactgaaagcacttaatg

SEQ ID NO: 83744 - DNA, 401 bp, Homo sapiens
acggggcgcaggagaacacacagggcacagaacacagtgcacagaacacacggtgcacaggagaacacatggtgcacaggagaacacacggtgtacagaacacacggggcacaggagaacacgcagtgcacaggagaacatgcaatgcacgggagaacacagtgcagagaacacacacgcactgcacagaacatgcagtggtgcacaggagaacagtacacaacaacacattctatgcacaggagaacacacgcaattcacaggacacaacagaacacacgcagtgcacaggacacaacagaacacacgtgcacaggagaacacagtacacacacagcgcactggagaacacgcacagtgcatcaggagaacagagtgctcagaacacagttcacaggaag

SEQ ID NO: 83745 - DNA, 366 bp, Homo sapiens
gtctgtaactgctcctgctgctgctgcaaccgctgttgctcttgcacttgctgtggctgtaactgttgctgctggtgcattaactgcagttctggtttcagttcctgatggtgcacggattggtgtttttcctgttgtagttgagatagctgttgttgcccatcttgctgcggctgctgttgcagttctaggtgtggctgcggctgttgcagctgctcgtgttgcggctgttgctgcggctcgggctgctgttctaactgctgcagttgcaactctcgttgtcccggccgggtttcctcagcgatttcactggcccccactggggccgagactgctggccgctgtggactgctgttcctctcctga

SEQ ID NO: 83746 - DNA, 1175 bp, Homo sapiens; identical to SEQ ID NO: 68479

SEQ ID NO: 83747 - DNA, 353 bp, Homo sapiens
ggagaggggagcgtccagggagagtggaatgtcacgggacgggggagtgtcccgggaggggggagtgtcccggtagcggggagtgtgtcccgggagggggtagtgtcccaggagtggggagtgtcccgggaaaggggagcgtcccaggaagtaggagtgtgtcctgggagcggggagcgtcctgggagatgggagcatcccaggagtggggagtgtgttccgggaagggggagtgtcccgggaggtaggagtgtgtcccacgagagggaagtgtcccgggaggtaggagtgggtccctgaggggggagtgtcccaggacaggggagtgtcccgggatactccgcactactttt

SEQ ID NO: 83748 - DNA, 280 bp, Homo sapiens
ccgctctttgatttctttcttcaatggtttagttttaattgtagagatctttcacttcttaattcttacatattttattttatttgcagctattgtaaatgggattactttcttgatttttcaggttgttccctgttggcatacagaaatgatactgattttttaatgttgattttgtaccctgcaactttactgaatttatcagtttgaatagttttttggtggagtctttaggtttttccaaatatatcatcatattatcagcaaacaaaaaaaaaaa

SEQ ID NO: 83749 - DNA, 404 bp, Homo sapiens
  misc_feature (1)...(404): n = a,t,c or g
aattgagtgaggctgctcttgagttctgtcagtcagcaactatgttttgactgattctctgcctgctggagctgttcatttctgattgcgagcccttgaagacttccattgattcatcggtttctccttgcacagatctatcagcttttgccctacaaagtttgatactctgttattagcggcacacacattgagaattgttacgtcgtcttggagaaatgaccctttttcattatgtaatgctccttactaccactggtaacttcccttgctctaaagactgctctgcctgaaattaatatagctcctctagctttcttttggntagagctagcatgngatatcttccttcattgcttactttttgaaaagatttattatagtaaaatatgcactaacataca

SEQ ID NO: 83750 - DNA, 1133 bp, Homo sapiens
acgaaataaaggctaaatctaagagtgcagggatgacagcagggcctatgaaggggtctgggtttgaagagaggttgaggtctgctggggagaaggtagggaccagtggagaggacttgagatccaatggatataaactgggacaggatgagaaggggttgaggtctagtgtagacaagatgagatcaagtgtagagaagctgaggtctactagtgagaagctggtgtgcaggggagagaagcaggggtccagtggagtgaagctgaggtccagtggcagaaagctgagatcaagtggagagaatttgagatcaagtagagagaagctgagatggagtggagagaagctgggaactagtggagagaagctgggaaccagtggagagaagctgaggttgagtggagagatgctgagatcaatcagagagaagctgaggttgagtggagagaagctgggaaccagtgatgagaagctgaggttgagtggagagaagctgaggttgagtggagagaagctgagatcaagcagagagaagctgaggttgagtggagagaagctgggaaccagtgatgagaagctgaggttgagtggagagaagctaagatcaagcagagagaagctgaggttgagtggagagaagctaagatcaagcagagagaagctgagattgagtggagagaagctgggaacaagtgatgagaagctgaggttgagtggagagaagctgagatcaagcagagagaagctgggaaccagtggagagaagctgagatcaagcagagagaagctgaggttgagtggagagaagctggggtcaagtgcggagaagctgagatctagtgaggagaagttagggaccagcggggagaaattggagggttcaagaatggggagcataaatgagaagaacattgaaaaagtggtagaagttactggcgatgaaagagtgatggcatttactcatgatgagatggaaattccttttgaaagtgtcaaagggagtgaggaactacaagggactgagaaaggagtgggagttgaggggggcatcttgagtgaagtgaaagatatcactgatgaatctgtttctatggaaaaaaaagatattataggtgaaggtaccagtgaatga

SEQ ID NO: 83751 - DNA, 403 bp, Homo sapiens
aaaaaaagtgatatttttaaaatggaactaagttggtactaaagttcatatgaaacaacaacatgcaagtttagtaccaacttagttccattttaaaaaaagtgatatttttattgagattgcattgaatttataaattagcttagagagaatagacatctttatgctgttgagtcattctgtcttatagtaggagatgtctttccatttgttcaagtctactcttggggctttcagaagtctttaaaaattttcctcacttaggttttgccatttctttttatgtttatctatattttattatctttgttgctattaaaaggaagttttccggttattatgtgtgtacagtatttgaaggctatcagcttctgaatataattttatatcctgctacctcact

SEQ ID NO: 83752 - DNA, 390 bp, Homo sapiens
  misc_feature (1)...(390): n = a,t,c or g
cgcgtccgtgtgtctgnnnncgtctgctctttcacctttcttccctgtgtctgtctgtctgtctgcgtctcccacctggcttccctgtgtctgtctgtctgctctctcacctggcttccctgtgtctgtctgtctgtccctgtgtctgtctgtctgtccctgtatctgtctgtctgtctgctctcccacctggcttccctgtgactgtctgtctgtccccgtgtctgtctgtctgtccctgtgtctgtctgtctgtctgtctgctctcccacctggcttccctgtgtctgtctgtccatgtgactgtctagctcgccctgtgtctgtctgtctgtccctgtgactggctgtctgctctctcacctgcgctcctctatgcagaccagcgcg

SEQ ID NO: 83753 - DNA, 227 bp, Homo sapiens
ttcatgtttgtttatgaatttccattattttactaatttacttgaaaaacatgattcaaagattgttttgttgttggtaagtacaattttatcctagctgatttttagaaaacagtgttggtgttactttacaaattgttactttgaggcattaaagtagtaggtagaaaattttcttagtgcatccactgattttttttaagtctcttttttggtgtgcacaaatt

SEQ ID NO: 83754 - DNA, 1127 bp, Homo sapiens
atcggcagacctgtcccctccaccctgcgcccctgcaaaaagcccagccccggagctgggcccaggcctgcccccctagcctgctcctgatggtgcctggggcggggtgggcaggtgggtggggctggaacctcctttcctgttttcctgagtgatccctccccactggggaagagaagagaaaggaggaagaagaggaggaggaggaggaggaagagaaaaacaagaaactgagttggaagagggccctggagcaatcaggacgtcaaaagtttgcattccgactagctataggaaatagtttttttctctttttattatttcaagttttcataaaaatccataattattgaaacccaagttacagagaaagttcgtaacttttttattgaattattgactctgccgcgtgtcggttcgtcggctttcaactccagtctgtcaatgcccctgtgtaggtggggtccccaggtctgggcttctgaggtcctggtagaaggagggcaggtggtgaggggtggcggggggcagcaggggacggaggcgggagggagaaagagaacgtgtgtagaagggtagggaggaggtgggaaggactggagagtgagcaggtggcggccaggccccttcccctgcccggccgcccgggggtccctgccccccgccccggcctcatatcatcttcatgttgaacttgcggggcgcgtcggcggagctgatgcctgcgtccgactttcggggcacatactcgatctcgatgttgtgctttgtgttgcccttgccccggctccagagaaacagcagcaccaggcagaagaggacgacgcccaggaaagagatgaagcccatggtggtggcgatgatgagggtcttgatgtcgaaggggaaaggcacagtggcgcgggtgctgttggcctctccctcgcccggctggttggagatgaaagcgaaggtcttgttgggctgatggggccagtcgggcgagtagctgcgcacatgcaggtgggcgggcatggagtcgttgccgcccgcgttggccgcgatgcacaggtacgtgccgttgtcctgtacctgggcgtagcgcacctccagcgtgccatcagggaagactgtgagccgccggacgc

SEQ ID NO: 83755 - DNA, 376 bp, Homo sapiens
  misc_feature (1)...(376): n = a,t,c or g
cagtaaatgggtcagaacagcatatccaagtattgaaactcactatttgttttacctctttctcagtggaagtggtgcaaggtgtanttatttctctcacttgaggggggatatcctgggtcagaccagggaaatcctagaagccatcagtgtagtgaatccctgaactttcatgagtttttttccatcctctggcttgtgtatgtgtcttacacaggtgtccaaggtgcttgctagtttttgttcaccaggtccagttaagataatggtatccatgtgatggaccagtgtggtgatctgtgggctgtcaagatgatcaaggactctccagactatattatggcaattcagacatagccctcaggtgagacaatga

SEQ ID NO: 83756 - DNA, 408 bp, Homo sapiens
taaattttggttgatccactcaatatgtgactctttgaagtcatgttacctacactaatcaagatagtgtggtgctggcatgagaacgggcatatacatcaatggaataaaatagggagtccggaaataaaccctcacatgtatggtcattgatttttgacaaaagggccaagtcaattcgatgggggaaagaatagttttttcaacaaatagtgtggggtaactggatatccacatgcagaagaatgaatttggacccttaccttacattgaatgtaaaaataaactcaaagtgatcacagacctaaatctgtaagttttagttacaaaccacttaggagaaacgcaggagtaaatcacaatcttgggttaggcgatgacttactaaatatgacaccaaaaacgtag

SEQ ID NO: 83757 - DNA, 376 bp, Homo sapiens
agatgctgaatgtgagaggcaggggccccagggggcctgggagtggctgcagtgggggaattgcaagtggattcagccaccccctcccacccacctgagccagcctggacccctggagcgggatcttttcctcctgagcctcagccgccctgctgctgaaaaccacagcaggtgtggcaggtgggggctcacccccccagccctactgggaccccagcaccaacgccctccctggtctcccatctccagtcggctgtgcacgccagcacaacagccagctctgtgcctcggaccccaactcttcaaagcacagcccagcaccccaacctagcccagcagcctccctccagcctccactccagcctgaggcaacctg

SEQ ID NO: 83758 - DNA, 381 bp, Homo sapiens
catattgaactacagaattaacaccaatttgtattttaatctcagctggctttcttgcaaaaattggcaagctggctctaagattcatatggacattcaagggcttcagaatagcctaaacaaccttgaaaaagaacaaagttggaggacttgcacttctcaatttcaaaacttaacttcaaaccaataggaggcaaggcatacagatcaatggaatagaattaagggtgtagaaataaaccacattcaattgacatggggtgccaagacaattcaaggggggaaagaatagtcttttcaaaaagtcatgctggacaactgaataacaacatggagaagaatgaagttggaacactactccacctcatataaaaaattaat

SEQ ID NO: 83759 - DNA, 384 bp, Homo sapiens
  misc_feature (1)...(384): n = a,t,c or g
gaacatgggagtcttttcccatttatcgaggtcttcttttctttctttctacggttttctgtagttttcagtgtataattcttgtattttgggggataaacttattcctaaatattttattctttttgattttttttaaacgaaattgttttcttaatctcatttttaggttaaatgagattaatccaaaaactgaattttattcagtcatatgttacttaatgacagggatatgttctgacactttgctcaattagtttattggatctaatagttgtttagtagattttaaataatttctatatacaagagcatgtcatctgtgagcagaggtggttttaattcttcctttgcaatctatatgccttttattttttcttgccn

SEQ ID NO: 83760 - DNA, 707 bp, Homo sapiens
tttttcctatttgaaagaaacaaaattttatttatttatggatgacatactgtatatatggaaaatcccagggaggctataaaaaaaggatagtagaagtagtaagcttagcaaggtctcaggatacaaggtcaatataaaatatcaattgtattttacattttaataacaaaagattggaaattgaaataaaataccattgtttaaatacaatagcatcaaaaaatgtgaaagaagtagggataattttaacaaaatatgtgcaagaactgtacattgaaaactacaaaatattactgagtaaaattaaagcagatctaaataaatggagagatatgccatgtttatggattggaggactcaacattgttaaagatatcaattatttccaggctgatctattaagccaatgctatctcaataaaaattaacgcagactttttacttcttttggtgcagattaaaaagttctttagaaatgcgaagaagctagaatggccaaatagttttaacatacgtgaataaagttagaggacttacactacctgatttcaagatttactataaaactacaaaaatcaagagagtgcaatattgaaattaggttagacaaaaattcatgaacagaatagagggtccagaaaccagcccatacacataatcagttaattttatacaaaggtactgatgtgaaagggaaaagacag

SEQ ID NO: 83761 - DNA, 372 bp, Homo sapiens
ctatcaacagttggtggacatgtggacgtactgggactctcatatactgctagtgagaacgtaaaacggtacaatcattctggaaaacagctcgtccgatgtgcaaaaagaaacacatgtgatctacctattccacctctagctataccacacgaatcaaaatgtgtccatccgcacaaagccctgaatgaatgtctatagcccctttgtaataacccaaaactacaaacattcttagctgttcatcaccaggtgaatggataaactgtggcatatttattactcagcaaaaaaacagaatgaactgttgctacacaaagcaatgtggatgagcttttaaataattattctgagtgaaagaacccaagcaag

SEQ ID NO: 83762 - DNA, 388 bp, Homo sapiens
  misc_feature (1)...(388): n = a,t,c or g
tgtttcaagaaaagagggaaagcttttcttttgattttaatatctaaatcaggcaaagataatacaagaaagaaaaattataggacagtctcacatggaaacttcaatgcagaaaccctaaataaaatattgataaatcaaagtgagtatttgtgttggtatctcctgaccacgtaggctttatttgaggaattcaaaagtagttctatgtttttctttttaaaaatctatcagtgtaatctgtaacattgaacaaattaaaggagaaaaaccatatggtcatcccaatagatacattaaaagcattcaataaaattgaacaataattataagaaaaactcttggcacattaggaataggaggacaatttcttaatatgataaaaagn

SEQ ID NO: 83763 - DNA, 411 bp, Homo sapiens
acccacgcgtccggcttgcagaatgtccatattggctttctgaaccatggaatgaaggatattgtggtagaaggggacaagtggaaagccctggaactgttctcccatccaggagagcaaatcaaaagcagtaaattcactagagaaatgtcagagattaccgctgctattaaatacttaaaaattttaaaagagatttttagcacatactcattttactcacctacttgccttgcgcaaaggagaataggcgttagaaaccataatgctctgttttaaatttaatcaggttgcaattctgattggagatactcttctagatgtgttcttttttactagagccagtcattcttgtctctggcacttggtatacggctattgatcttgcaaatccttcccccattcctatat

SEQ ID NO: 83764 - DNA, 403 bp, Homo sapiens
ccacgcgtccgggtatacagaaacacaactgatttttatatattcttgtattctgcgtaacatgtttattctcagatttttagcggtttccttaggattttctcttaggatttacttcttcctttccaatctggatgcctgttgtttatttttcttgcctaactgccctgactagaattcctagtacagtggtgagtagaaattggatagcagacatccttgtctcattcctgatgtagggggggaagctgcccagtccttcaccattaagtgtgatgttagctgtgggtttttgttggtgctccttatcaagtggaggaagttttttttattcctacttcattgagtgtttgcattatgaaagagtattgaatttttgtcttttctgaattttgccttttct

SEQ ID NO: 83765 - DNA, 238 bp, Homo sapiens
tttgcccatggatttgataacctaggtgaaatggaccaattccttgaaggacacaatctgccaaaactcacacaagaagaaattcacacgagacttcaaacctatattttttaaataaattgaatcaattgctcataaccttctaaaagagaaagtaccagacccaatgggtttactggtaaattctaccaaacatttaaggaaaaaatactaagactctacagtctctttcagaaga

SEQ ID NO: 83766 - DNA, 402 bp, Homo sapiens
  misc_feature (1)...(402): n = a,t,c or g
actcgcccgacatgatataggccaaanatgaaaatattatcagccaattttttactgaacacggaaaagggcaaattttgtcctctaagatgtggaacaagacaagcatgcccactttcaacactttcatctacccagagcaattacgaaagagaaagaaataaagggtatccaaatggaaaaggaggaactcaaactgtccctgttttcatataacataattttatatattaaaaaaaccctaaagactccaccataatactattagaactaataaacaaatttagtaaagttgcaggatacaaaatcaacatacaaaaatcagtagcacttctatgtgccaataaaaaactatctgaataataaaccaaaaaagcaatcccacttacaacaggtacaaat

SEQ ID NO: 83767 - DNA, 401 bp, Homo sapiens
  misc_feature (1)...(401): n = a,t,c or g
cgctggaaaatggttcttcggccggtgggtttnttgtgtattctggtactattggatggaatgttctgtaaatgtcttttaaggccatttgatctagagtgtagcttaactctgatgtttattgactttctgtctgcatgatctgtccattgctgaaggtggcatgtttaagctccccactatattgtattgcagcgaatctcccttttaaatgtattaatatttgacttatatatttggatgctctggtgttgggtgcacatatatttaaaattgttatattggttgggtgtattgactcctttatatcattatgtaatggtgttttttgtcttttttcacaatcattcggtttttattttttattttattttttcacacatttatttcagcaaaacatn

SEQ ID NO: 83768 - DNA, 427 bp, Homo sapiens
  misc_feature (1)...(427): n = a,t,c or g
ctaccgtcctgagcaagccccaggacttntctacatactctagattctatttaacatggatctttatatttcttgcagatatcctctccaagttgagggcttgtctattcaatttctttctgatatttttagcaatcagactttttaaattttattgtattggagtcagctttatcagactttccttttatggctagcatttttctgtcttgtttaagcataaccatttgaaccagcaccatttattgcatagtccttccttttttctctgatccgcagggcatctgtcgtatattcataggtctctctctgggttctctattctgttctggtggncaataccacactctcttaattatagtagctttataatgagtcctgatatcatgtagggctaattgaatagttttagttttcaaatatttag

SEQ ID NO: 83769 - DNA, 399 bp, Homo sapiens
  misc_feature (1)...(399): n = a,t,c or g
aaaagttgataaatttgtgtactttattattcaaacttatgtttgcatgtcatattactgttaaatgactccatataaatcaagaaagtcatcaaaggacatgaacaggcaaatcacagatgaggatccctgagtagtcattcagatgaaaaaatgctcactcttacgagtaatgaaagagttgtacattaaaacaacactgagataccatttcgctgtcatcagatagacaacaatgaaataaagtaaaacaacttgacatgtgtgcatgttgctgaatttatagcattgggctcttctatactttgctggnggcagngaaatttatgcttttactttggagagtggtttggcaacatttagttgatttgaagttgctgatatactaacccaggctcn

SEQ ID NO: 83770 - DNA, 388 bp, Homo sapiens
aacaatcctaaatatgtatgcacccaacactgcaacacccagatccataacacagatactactagacctaagaaaagagatagacagcaatacaacaatagcaggggacttcaccactccattgacagcactagacagatcactgggacagaaatcaacaaagaaactctggacttaaattggactctacaccaaatggacccaacagacatctgaagaacattctacccaacaaccacagaatatatactcttctcttctgtgcatggaacattctcaaaaataggtcatatactggaccacaaagcaagtatcaataaattttaaaaaaacaaaatcatatctaacatcttctctgaccatagtggaataaaactagatatcaatc

SEQ ID NO: 83771 - DNA, 925 bp, Homo sapiens
gggtgctggggagggggacgggtgcatcttagccggccggtctccagctgagcctgaggctgagttcaccactaggcagggcaggagggagcaaaccctgagccccacccaccttccctgcagtggtgtgagaagcacaagcgctctgggaggcagatgctctgtgacttgcttatcaagccccaccagcgcatcaccaagtacccactgctgctccatgctgtgctcaagaggagccccgaggcacgagcccaagaggccctgaatgccatttgaagccgtggagtcattcctgcgacatatcaatgggcaggtccgccagggcgaagagcaagagagcttggcggctgcagcacaacgcatcgggccctacgaggtgctggagccacccagtgatgaggtggagaagaacctgcgcccattctccaccctggacctgacgtcccccatgctgggggttgcatctgagcacaccagacagctgctgctggaggggcctgtgcgagtgaaggagggacgagaagggaagctggacgtgtacctgttcctcttctctgatgtgctccttgtgaccaagccccagcgcaaggcggacaaagccaaggtcatccgaccccctctcatgctggagaagctcgtgtgccaacccctgcgagaccccaacagcttcctgctgatccacctcactgaattccagtgtgtctccagcgccctccttgtgcactgtcccagtcctacagaccgtgcccagtggctggagaagacccagcaggcccaggccgccctacagaagctgaaggcagaggagtatgttcaacagaagagggagctcctgaccctctatcgggaccagggacagggagtcccccagcaccaggccctccacgccttccctggagggctctcagagcagcgcagaggggag

SEQ ID NO: 83772 - DNA, 419 bp, Homo sapiens
  misc_feature (1)...(419): n = a,t,c or g
aatcaacaaggaaacatcaaacttaatctgtgttatagaccaaatggacctataaatatttacagaacattntacccaatggctacaaaatacacattcttatccttagcacatggataataagggaaagaccataaggtaggtcacaaacaagtcttagaacattcaaaaatagaatatcaagcattttatctgacaacgtagaatataactagaaatcaataacaagagaaatttagaaaactataccaaccatggaaattaaacaatatgctcctaaatgaccagtgggtcaatgaagaaattaaaaaggaaattgaaacatttcttgaaacaaataatgatgaacacacaacataccaaaatatatgtgatacagtgaaaactgtaagattatattatctataatatatattact

SEQ ID NO: 83773 - DNA, 393 bp, Homo sapiens
  misc_feature (1)...(393): n = a,t,c or g
cggacgcgtgggagggacacctttattttccccattgagcaaactggcctgcgggggagggtggcacacagagcagccttgcccagctctcccagcataacacgccgggaccaaggggtccacgggggctaggacttggacatgcctaggattacacaataccacctagggagaaagcacttgtgaaaacaaacattcagacagtccttccttctgggtgttagaaaagagtagngccacatctggcttggctgaaaaacactttactgatgtaggagctggcatcataagatgaagattatagaggaagtgttggtgttgtacaattcaattttggcaaagaaaagtttggtgtcaaaaatggtgatcaaattgcatagctcatttgggaag

SEQ ID NO: 83774 - DNA, 394 bp, Homo sapiens
  misc_feature (1)...(394): n = a,t,c or g
atgacttttcctctccatttctaaagggcagctttgctggtacagtctttttgattggaaggttttttccttcagcacactgaatagatcatttcactttttcatggcctgtaaggtctctgctgagaaatctgctgctagccttattagaactcctgtacctgttatttgcttcttttctcttcctgctttcaaggatcctctgcttgtccttgatttttgacagtttgattctatgtttctgtatagtcttgtttgcattcaatttgattggagaactttgacctatgcctggatattttgtatctttctccaaacttggaaagctttctgctattactttttaaagnaagctttctgttcctttgtctttttcttctccttcatgaactct

SEQ ID NO: 83775 - DNA, 404 bp, Homo sapiens
  misc_feature (1)...(404): n = a,t,c or g
cacgcgtccggttaagagatcaatttcatttacaatagcatcaaaagtcataaaacacttaagaataaatttagccaaggagctgcaagatttgtatgctgaaaactgtaaaacattgctgaaagaaatcaaagtaaacctacacacattgaaagatattccaggttcatagaatggaatactaaatactgttaagatgtaggtatcacccaaagcaatatgtagattcagtgcaatccctatcaaaatgtcagtggtctttgttgtaaagagggaaaaggttatcctaaaattaatatggaattacaagaggctctgaatagccaaaacagtctgaaaaagaacaaagttgtaagactcagactttccaattttaaaaataaattggactacatcaaaaacan

SEQ ID NO: 83776 - DNA, 426 bp, Homo sapiens
  misc_feature (1)...(426): n = a,t,c or g
tagtgccggaattcccgggtatgaccacgcggccgctttccttttctgacctgactctcacaggtgtcgtgcttatgtgcgatgtangaggaggagagaggtaaagtggaggaataggagctgtaggggaggaggagagaaaaaaagaggagaaggagggggaagagagggtgcgggttcaaggagggaaggaggaggagaaagagaggaggaggagatgagaccaaggagaagaggtgaaggaggagaggaggacacacaaaagagaagaaagaggagaggagacggagaataggaggaggagtaacataggaggaagaagaggaagaggactagaagagcaagtaaggaggaggaggtgggagtaggaagagaggagaaagacaaaacgtgaaggagaggcacatgttgatgataggaggtggt

SEQ ID NO: 83777 - DNA, 401 bp, Homo sapiens
ggagaaatacacttaaagaaataatgaacaaaactttccaaaatctgaggaaatacataaatatatacatccaagaggctcaatgaactccaaaagggtaaacttaaagagatctacattgagacaaaatatagtcaagttgacaaaatccacagagagaattttgaaagcagccagaatgaagcaactcatcatttacataagaccctgaataaaattaatagctgattttctctgagaaaccatggagatcagaaggtagtggaatggcatatttaaatgtctgaaagaaaaaataaaactgccaaccatgaattctatgtatagcaaagttgtccttcaagaatgaaggaaaaagtaacacattttcagataaccaatgagttaaaggaaactagaca

SEQ ID NO: 83778 - DNA, 377 bp, Homo sapiens
cagggacccttggtttgtcacaagaggaagggggcctctctcccggccagccacgccccacctggctcctggggctcccggcgtctccacggctctctcatggggactgttgctctgtgaagtttgggtcgaggggatgcgttctgggtgacatgagggggctcgggggacggtcgatgtggggggctggctgaaccaggctgacccttggggcctggctggggggtttgtatactgagccgcaatccctgggggccctgtccacgggcctggagggcccgaaccccctgccacttccgaccgggaagcgtgtcccttggctgttgtgtttgtggtcacctgccaccggggccccgtggatgggcggccacatgctg

SEQ ID NO: 83779 - DNA, 444 bp, Homo sapiens
gagcctcggaagccctccggatggggcaacggccacccacgcgtccgcgcctgggtctgggggacctgttcctccttttcctgggctgccccgactgggtctgggggacctgaatctcctcaccctgggctgccccagctgggtctggggacctgaacctcctcgccctgggctgccccagctgggtctgggggacctgaacctcctcgccctgggctgccccgactgggtctgggggacctggggcccagctgcagctgcagcagccttggtctttctccagaaggatgtcaggcttgcccaggaaaggggctgtgctgccgccctggcgtcagaagaaaagaggatgcctgcaggctgggactgctgctggggacgttcgggttggaaggaacgcgcgcactacacttgtcctgccccccctctgctggcggaggcccttcc

SEQ ID NO: 83780 - DNA, 646 bp, Homo sapiens
ttgtggcacacggctttcctctaacatcagagactgcatgctggagagaaacttgaagaatgtgagaaaaccttcagcaaggatgaggagcttagaaaagagcagagaactcaccaggaaaagaaagtttattggtgtaatcagtgtagtaggaccttccagggcagctcagatctcatcagacatcaggtaactcatacaagagagaaaccatatgaatgtaaagaatgtgggaaaactcaatcagagctcagaccttctgagacatcatagaattcacagtggagaaaaaccttacgtatgcaataaatgtggggaatcttttaggagcagctcagatcttattaaacaccatcgtgttcatactggagagaaacctcatgaatgtagtgaatgtgggaaagtctttagccagaggtcccaccttgtcacacaccagaaaatccacactggagagaagccctatcagtgcactgaatgtgaaaaagccttcaggcggcgttcactccttattcaacgtcggagaattcatagtggtgagaaaccctatgaatgtaaggaatgtgggaaactcttcatgtggcacacagctttcctcacacatcagagactgcatgctggagagaaacttgaagaatgtgagaaa

SEQ ID NO: 83781 - DNA, 397 bp, Homo sapiens
  misc_feature (1)...(397): n = a,t,c or g
ctctccttttttctctcctccttttgtcttcttcagccccactttactccctctttccatcctccccctgttctccttccccctcctcctctttctccctgtctctccatccctgctgcccttaccccatctcctttcattctttcctcctcctattctctcaccccttcccccctccataagcctggagcgctgtaccctccttcactcttcattcttttctagactcctttctcttacctctctccctactcaaccctgtcttccttttgggtcactcctctcttctccctcctccatctacccctcacaagatccccatgggaccccccttctctccccagccccaagctgccctggaagcctaaaggctaggggctggcagagggcctttccn

SEQ ID NO: 83782 - DNA, 395 bp, Homo sapiens
aaaatatgtagaataaatctattttaatatgtgcaagatgtgtacatgaagaactagaaaacattgccaagaaaaattaaagattaaataaattgagaaataaactttgtttgtggttggaatcctcaatgttaatatgtcagttctccccaaattgttctgcagattcagtgcagtcagtatcaagacttccagtggacatttatctagtagttgacaaactgattctaaaagttatactgaaaggtaaaagatctagaatagacaaaacaattttcaaaaaagaacaaggatggaagatttaatagtatttggtttttaagacttagtataaagttacagtaatcaagatagtgtcatcttgacctaagggtaaacatgtaggtaaatgtact

SEQ ID NO: 83783 - DNA, 403 bp, Homo sapiens
aagaggagaaaaggagagaagaaggaggatgagtggatgaggaagaggaaacgagagtagaaaaagaacaaaagaggaggataggcggaggagaggaaaaagggaaggagaggaggaggaggagagaagtgaagaggagagaagaaggaagaggataaaaggaggaggaggaaaatgagaaggaggagaggaggaggagtaaaagatgaataggaggaggagaagatgtttacgaggaaaaggaggagagcacaatgaggagactaggaaaaacggaccggagaacgtgctgatgacgacaacaggagaggagaaaatggccgacaggcggaggaggaaaattccttccaggatttggtggagaggaggaagagttacagacttgtagtatgacagggcgcgg

SEQ ID NO: 83784 - DNA, 396 bp, Homo sapiens
aacaattaaaatttaaaaatacatctaccatttacaaacaactttctctaaaaatgaaattttttatttaggtataaatcaataagacttgtgcaggatgtgtatgctgaatactgtaaaacattaatgaaagaaatcaaagacctaaataaatggagagatatactgagttcatggattagaaaactcaacctaataatgatgtcagttctctccaaattggcctacagatttaacacaattccaattcaatctctgcaggattttgtttatagctataaacaagccaactctaaaatttatatgggaagataaatgaactaaatgaaccaaaataatttttaaaagaagaataaagttggagaaatcatgctacctaattttaagatttactat

SEQ ID NO: 83785 - DNA, 447 bp, Homo sapiens
tttcgtgttggttgcggcgggcaccggccgacatggcggcagcggtggcggctgcgctggcgcggcttttggcggcctttctgctcctcgcggcccaggtggcctgtgagtacggcatggtgcacgtggtctcccaggccgggggccccgaaggcaaagactactgcatcctctacaacccgcagtgggcccatcttccgcacgacctcagcaaggcatctttcctgcagctgcgcaactggacggcctccctgctctgctccgcagccgacctccccgcccgtggcttcagcaaccagatcccgctggtggcgcgggggaactgcaccttctatgagaaagtgaggctggcccagggcagcggagcacgcgggctgctcatcgtcagcagggagaggctggtccccccggggggtaataagacgcagtatgatgagattggcattc

SEQ ID NO: 83786 - DNA, 505 bp, Homo sapiens
ctcgcctggggctttgtgcaaagaatcccttcagccctcgggacgccgccttgctcccgcctctcctccctatctgctggcgccaccgcagcccccacgccttaggtgggcccccacgtcgccccacaaggttcgggttccacccgcctcggctgccgccttctcctcctcacgaccctcccaagatgctacctggtttacgagaggttccgggaccaccaacacaccggctaccgcctttccagaccaccctcgccagctcccgtctgtagtttccgcggccgaaggagaagaaaacccctcttcatctagcactttgcctcccccaaagacagcaccgccgcctacctgtcaccctgctgtctccggcttcctaccgccgccgcctcccgcagcagcctgccaactgcagcgcaacaaccaaccctctcattgggaatctctaacccagtatcggaacgttaagcggcttctccgctttcctgccgtgagaaactcgaggtga

SEQ ID NO: 83787 - DNA, 752 bp, Homo sapiens
  misc_feature (1)...(752): n = a,t,c or g
agattcgatacgcctagcttggaacgaggcgcgagctgggccggcgggcgtggttcgagagcgcgcagagtccagactggcggcagggcccgaggggccgacccgcagcgtccctggtctctccagccctcactcggaaccgcacgtgagggcaaatccgccccggtggctggcttagcacgcggggacagcccctccgaggcctccctagcggtgtgggcgagagggcgtccgggtcgggggaagcacggaaaggtggcttcgcgaggctgttgtggggggcgggacgggcagcctggcgatgcctggacatggttggtggccaaaaacatttatcgaaagatagcttacccacttagatggcaaggacacggacaagcaagtcttcgcccgtaagcggtggctcacgcctnnnnnnnnnnnnnnnnnnnnnnnnnnnnnnnnnnnnnnnnnnnnnnnnnnnnnnnnnnnnnnnnnnnnnnnnnnnnnnnnnnnnnnnnnnnnnnnnnnnnnnnnnnnnnnnnnnnnnnnnnnnnnnnnnnnngtcttcaagcatggagccatgaagctggatttggctttctgtcgctctctctacagggtacaggtgaaagggggcagacccctcatcatgctttccaggcatctgccacttcccaggaattgtctccctggataaacaaggcgaagtccctggctgtgcagaagcagtagctgtgtggtggcacagtcaggaaaactcgggggccctg

SEQ ID NO: 83788 - DNA, 644 bp, Homo sapiens
gcggccgccacccctgtacagccacagaatgaggatcttgaggcagggcctgagagagcacgctgcgccgtacttccagcagctgcggcagaccacggctccacgcctgctgcagttccctgagctgaggctggtgcagttcgactcaggtatgcggcagttgggggcgtggcccgtgcgggagctgcaccggccctggatgatgaggcgctcttgatgtgattcgcttcccagggaagttggaagctttagctatcttgcttcagaaattgaaatctgaaggacgtcgggtgctgattttatcacagatgattcttatgttggacattttagagatgttcttgaacttccattacctcacctatgtaagaatcgatgaaaatgccagcagtgagcaacggcaggaactgatgaggagtttcaacagagaaaggcggattttttgtgccattctctccactcacagccgtaccacaggtataaaccttgtagaggcggacaccgtcgtgttttatgacaatgacctgaatccagtgatggatgccaaagctcaggagtggtgcgataggatcgggagatgcaaagacatccacatatacaggcttgtgagtggcaattccattgaagagaaattgttgaaaaat

SEQ ID NO: 83789 - DNA, 1480 bp, Homo sapiens
accgctttggagttcccgggacgacgacttcgtggcccgcggtacctcccgcactctgacctgcggcccgtaggtccgagccggggacggcggcgtcggtgggtcatgctccggcactccccctcgctgtgggagctggtggaggagcacgttccgctccgggagcgacgcgaagtgaagaggattctgggggaggcggcggtggacctgagcctggagctgcgggcggaggtggcgatgttacgggcactgctccaagaggctcgatcctctcaagcccccagctcccgccccatctctgacccctcttctcttctggcaccaccgcctctcctaaaggacctcttgcgccaggagctccggcagttgctccagggtctccgccacaaagccatctgtgagggcagggaccaggcccaagcttgggtccagtatagccccagggtcctgcactttgccttggaggagcccaggtgtgatttgccagaacaggagatattccagatgagaggtggtgggcccagttgcctagaagtgatatttgggtcctgaaggcctggggtgagcaacatgcggtgagtgatagtgacttcattgccagcagcggtcacagagatctcagcatcatcaaggaccaactgaacgtgtccaacattgaccaggtggccagacacctgaggggccttctggaggaggagtgtcacaccttggagagggagatcctcatcctgcagcgctgcctggaagaggagtatttgaggccttgccacccctctgaggcagccctggagcccaccctggcagagctaaaggaacagaagaaggccatggagcaggagctgcaggcatctgtggggccttcttgtgtctctcccaaccacaggcagcggcccttggggtcctccacacagggcctcagacccccgcttcccctctgcggggttgcacctctccagtgctgcctgcctgcacctcctctggagccctaccttcgacctcgaggccagtcggctacccaccgctggggacggcagcttcagtgcagccccagggaagggccagcttccacacccatgtccagtgcagcaccccaagtcccagcctgaagggctggtcaccgagtaggctctggcttctgccacagcgcacctgtctgccgctgccgcctcagctgctttggcccagccagcttcagatctggtcttggcgagctctcgccaggaccccaaggctgttggtctgtctggcccttgccccacccccttgccagatccctggtgtctggagctgagtggccgggcatcggtcccaagcatcaaagcctttggcctttctcctcccaggcctccacaaaggcctggcagacagaggtctcattccagcctgactcttgtcccctgggggacccagacaaagcacagcagccgctcagagacaggaatagaaatttcattaaaatctatggactttaaaaaaaaaa

SEQ ID NO: 83790 - DNA, 406 bp, Homo sapiens
tttcgtctcctagcacactttgtattgttcgaagttgatagagaaggagccggagtctccgaggtggcgttgggtgggggcgctactagctcccgttctctcagcgtctctagagggaagggcgccggtgggagcaggagagtctgcaccgggcaggcctccttaggtgccgggttgcgcgcagggccctgtgcttgtctcgcctccggttggctcaggcctcggagcatgagtgcgccggcaactgctgggcccgggacagtgaagcataggaggaggtgggggaggcgagcccaggtcggggaagggcagcacctgaatcacccttggggcccagacccccaagagtctccggggagccgaggcctggcgaggcagtcccgggattcgccccctccccgctggc

SEQ ID NO: 83791 - DNA, 402 bp, Homo sapiens
atttcgtgtgtcactggaccaccgaggcccggagcccctagctcgcccaggcgggcccaagtgacctgggggcactgggcttggagtctgcccaccttgctggactcctgatggggactttctggctggccacctgagaccacaaggcggggaggtgccagaaagacctgagcaacccgctgggcccctctctttttctcctctgtcttccaagtaagaccaagggacggggttgaccaggttcgaccaggcttacccaggagcaaggtcgggatcagaacctggctccagccctctgtttcctgaaaaggtccctgtgcttccaggtctttcctggggctgctgggctcccggctccccacctcggtgtcacagaaggcacttgggagcaggggtgggcgg

SEQ ID NO: 83792 - DNA, 458 bp, Homo sapiens
catgcctccgtcagcgcaaggccctcttcccccctgccaaatcaggccgcctttccccgaggcgaggaggacatggagccagaccctgatcaccatcctttaggccccaaaatctgaggctgcttcaccctcagcagcctcctgtgcaatatcaatatgaacctccaagtgccccttccaccactttctcaaactatccagaccacaattttctccctccacgaccagactttgtacccttccccccacccatgcctccgtgagcgcaaggacctcttcccccctgcccaataaggccgcctttacccaaccaccagatgaggcaccccttcccagttccttcttgttttccttccatgccaccaccaatgccttgtcctaataacccaccagtccctggggcacctcctggacgaggcactttcccctatatgatgcccgctccctccatgcctcat

SEQ ID NO: 83793 - DNA, 455 bp, Homo sapiens
tttcgtggacgctgtggcgctgctgccagcgcgtcgttggctgggtgccggtgctcttcatcaccttcgtggtcgtctggtcctactacgcgtacgtggtggagctctgcgtgtattaatgtggaaaccaaggtcattgatttgagccctttcttagttactatttttggaaatgaagaaaatgttctacttgtccaattctgaaaaggaacgttatgaaaaagaattcagccaagaaagacaacaagaaattttgagaagagcagcaagagctttacctatctataccacatcagcttcaaaaactatcagatattgtgaaaaatgtcagctgattaaacctgatcgggcgcatcactgctcagcctgtgactcatgtattcttaagatggatcatcactgtccttgggtgaataactgtgtggggattttctaattacaaattcttcctgctg

SEQ ID NO: 83794 - DNA, 1345 bp, Homo sapiens
atgctctccctggatccatcgggtcccgagtgggattgcccactgggctccaaggacctggaggaagagggcccctggggagggggctctggcctgccgcccacaggctgcttccctggctcctggcgccaggacgtgggcctggactgcaagggatcccccgagggggccgaggcccgggcttggactgtctactactacagcctcctgcagagctgtctgcagcaagctggccttccggagactcaggaccgcggccaggtgccccgcacaggctgtcctggggcggaggtgaccttgtgcgttctgggctcccccagcacctttctgcctgtgctgctggagggtggggtccagagcccgggaaacatgctcctttgcctgtcccctgcttggctgatgaaggtgccagcacccgggcagccgggtgaggcagccctgctagtctccaaggctgtgagcttccaccctgggggcctgacattcctggatgactttgtccccccgcgccgtgccacctactttttggcaggcctgggcctggggcctggccggggccgagaggcagcagaactcgcccgtgacctgacctgccccacaggagcttcggctgagctggcccggctgctggaggaccggctgctgacaaggcagttgctggcccagcagggtggtgtggctgtgccagcaaccctggctttcacctacaagccgccggggctgctgcggggaggggatgccagcctagggctacggctggtggagctgagtggcaaagagggccaggagacgctggtgaaagaggaagtggaggcttttctgcgctccgaggccctgggtgatatcctgcaggtagctgtgaagctcagtggctggcgctggcgggggcggcaggcatggcgtctgcacccgcgggcagagctgggtgcagtggtggacacagtgctggcgctgctggagaagctggaggaggaggagagtgtcctggtggaggctgtgtacccacctgcccagctgccctgctcagatggtccttcacccggccccggcctggccgtgcgaatctgtgctgtggtgtgtcggacacagggtgataggccactgctgagcaaggtggtgtgcggcgtgggccgcggggaccgccctctacggcaccacaactccctgccgaggacgctggaggtggcgctggcccagtgcggcctgggcgaggaggcgcaggtggcggctgtgcggcagcgcgtcaaggcggcggccgaggccgcgctggccgccgtgctggctctggaggccggcctgagtgccgagcagcgcggcgggcgccgggcgcacacggacttcctgg

SEQ ID NO: 83795 - DNA, 428 bp, Homo sapiens
  misc_feature (1)...(428): n = a,t,c or g
tttcgtcctcaatggaggagaacattctgctatgggtgtctcccagtcaccccaaattaatcatttcaaagtgaacactcaatctgcccagcccctagcttcctcccctgacatgcccatgaatatgacagtccctctacatgcccaagatcctcccctcctcatccactccccatgatccccaagatgagtcactgtgctcaaatccatcctctctcctccagccctctgcctccatgacctccctccagccctctgcctccatgacctccgcctccctgcatgtccggatctcctcactgtctcccctctgagcatacacacacatacagcctgttcattctctacatgcagcgaggggactttccagaacacacatctgaccaagttccactcctgcctgtcacccttccaagagccccactgan

SEQ ID NO: 83796 - DNA, 422 bp, Homo sapiens
tttcgtagaggagcgagtgggggaaacccgcgtagccgagggagatgcagcgcgcggcgatggtgagagcccaggcgcgggccgggggcgctggagagtcgggacgggggttcgggaccgggtgacgagggggaagaggcaggggcgaaagaaggggctgggtgaggggagattgcctgggggagaggactgggaggaatgggagccggaggtagtagtaaaagaatggtggcttggggaggggtcttggaggtggggtgggagtggagctttggaattgattgtaaaggggctcagagctggggaagtgggccccgagttggagactgggctggacatccaggtagaggccctgaaggggtcgatttcgatgggggcttaacctgcggcgagggtatgaggatcagggttaggatgagtga

SEQ ID NO: 83797 - DNA, 431 bp, Homo sapiens
tttcgtgcgcggacgcctccctcagccagggcaagactaatgagctgggtgagggaccggaagggctggaaggggtgggcacctgggggctgcggcgagtggcgatgggcgagccggacttgcacgtggagaaagcgtgagaatgtgcccctgggtttggggagggtggggagccaaggagtgggatgagaggtggtcacggaatggggggcgctgctgtcctccccgggggctgcaggccgagaccgggtgaggggcgggggtgatgctggcactctggacggaagggcgtcgtcttcgcagccgaacaggttgtggacgcccaatcgtttttctgcccgtagtcccaatccgaagctaagctgtgtggttttcccttgaaagctccccagccaggcttgctgcctccacccctttcgcatctgaagcat

SEQ ID NO: 83798 - DNA, 433 bp, Homo sapiens
tttcgtgccgggaatggggtgtggcagggcagaaaagatgcgtgacagtggcagggaaaggggcggggccgggaatggggtgtggcagggcaaaaaagaggcgtgacagcggcagggaaaggggcggggccgggaatggggtgtggcagggcagaaaagaggcgtgacagcggcagggaaaggggcggggtcgggaatggggtgtggcagggcaaaaaagaggcgtgacagcggcagggaaaggggcggggccggaaatggggtgtggcagggcagaaaagaggcgtgacagcggcagggaaaggggcggggccggaaatggggtgtggcagggcagaatagaggcgtgacagcggcagggaaaggggcggtgcaggagcaggaaagagggcctagcgggagcagcgggacaaggggctacgggaaggcgggg

SEQ ID NO: 83799 - DNA, 828 bp, Homo sapiens
aagtggtggaattccacgggccacacggtgactgctgcggctctgagtgaagctgccagattccttttcagtggcacgctccgtgaagaagtagtacaccttgtcatcatcacccactgcactggccttgctctcccgcacgaggacggagaacacaaactccgcatctgtgggtcaggcagtttgagaggcttttgagacaggctggggattcctttcccccactctgaggctgacccctcacttgacaacacacaggaatggaatggacaggctcacctggggatttgggggtggggtggtcagctggccaagggagtaaaaatgaagaaatagtcccctaccccccatcatcctgtgcctcatcctcctaaccattgagccaatgcattggtgtctcctcagttctcagggagtgtgggtggcggctccggcggatgtcaggaatgctccggaattcatacctagtggctgtgtagaggcctccatcaatgatgaggcctgtgaagccacgggctgggtcataaggacacttctccttcccctcctcgaagctggttggcaaggtgaaggcctcagcatcaatggctgcacagaggggctggaaggcgtgagtcccacatgcatagaggtgggtagaattgagccgctgcaggaaccgcacatggttaaagcactccgtctggttgtttttccctttttgatgacatttgctttgcatctctggggaggcttcccagtggatctttgcgctcggatccggggccatagagacagcgacgcgcggctccgcggccccacagcaccagctgcgagaggaagacgaaa

SEQ ID NO: 83800 - DNA, 428 bp, Homo sapiens
tatgatagcatcaacatgaataaaataactatttaatcaaggaaatgaaagatctgtacactgagaatcagaaaacactgatgaaagaaagaagatacaaataaataaaaagatatattatatttgtggagtggaagaattagtagtgtcaaaatatccttaatacctaaagtgatgtgcagattcagtgcaaatccctatcaaaatttccatggcacttttcacagaaatagaaaaaaataataattctaaaatttatatgggactacagtagaccctgaatagacaaacaaccttgagaaagaaaaacaaagttggaggcttcacactaatttcaaattatattgatatcctgttctatacttattcccttggtatcatagacagggttcctcaaaggaatagacctaataaggacatatatacat

SEQ ID NO: 83801 - DNA, 419 bp, Homo sapiens
  misc_feature (1)...(419): n = a,t,c or g
aaaaaaaatgaatggactgtatttngatgggtctatttcttggctctctattctgttccattgatttatttgtttattatttgcaaataccacactgtcttgattactgtagcttttatagtaagtcttgaagtcaggtggtatcaatcttctgactttgttctcctccttccatgttttcttggctattctgggtcttgtgcttctccacataaactgtggaaacagtttgtcgatattcacaaaataatttgctggggttttgactaggattgcattgaatctgttgatcaagttgggaagaactgacatcttgacaatattgagtcttcttatcctatccatgaacatggactatctctttatttagttctttgatttctttcatcatagntttatgggtttcctcatatagattg

SEQ ID NO: 83802 - DNA, 375 bp, Homo sapiens
ataatcctcaccgttacactcaggccccccggataatcctcaccgttacactcagggcccccctggataatcctcactgttacactcaggcctcccggataatcctcaccgttacactcagggccccccggataatcctcactgttacactcaggccccccggataatcctcaccgttacactcagggcccccctggataatcctcactgttacactcaggcccccctggataatcctcactgttacactcaggccccccggataatcctcactgttacactcacggcccccctggataatcctcaccgttacactcaggcccccctggataatcctcaccgatacactcagggcccccctgtataatcctttct

SEQ ID NO: 83803 - DNA, 418 bp, Homo sapiens
  misc_feature (1)...(418): n = a,t,c or g
caaacattccgtgtacccagagggcagagcgcactggtaccaccaagacggcagctctcgttgcccccaagagcctcccactggggaggtctggctggaaacccagggaggggaccagaactctatggaggcaggaggcttagtgaggggtgctcagggaggcagccagaggcagaggagctcagggaggggatgacaggtcaggtccgtggaggggacagaggctagggagggacttgggccctggtgagcagctcgggctgggaagcaacttctctcaaggcagggtggggacaggcctgggcaacgatggtaagcgggtggctggtgactcanggatgagagggccttgcggccccatgacccctgcccgggacccagggagtgggcagcagctgtgagcagggaggagccctat

SEQ ID NO: 83804 - DNA, 404 bp, Homo sapiens
ttttacgaactcttgatctgtgaacacagtttcatttcttcctttctgatatgtatttttaatttcctttttcttgctttatcacattggctaggacctctagtactatattgaatagaagtgacaatggtgcacatccttaccttgttcttgattttagggggaaagcattatctttcaccattaatgttaactgtagatttctggtagatatcctttcaggttaaataatttttccttcttccccacatttgctgaatggtttttgtcattaatgcaagttgaatatggacaaatactctctggaagttgttgctattacttttattttcaggaagagttttcagaatgctttagaactcaaaacgtttctgttactgctttcttaaatgattggtagcatt

SEQ ID NO: 83805 - DNA, 415 bp, Homo sapiens
tggggctagggaggggacgaatttttttggcggaaagtccatggtttcagggctgggggcggcaccggggcggggttggggctctgaatcctcgctctccacgcagaggttctgcacaagtggccggtcctgccggacgggcccatctcccgagtgattgtgttcaacctctcggccgccactgagaccaaggacaggccactacaagatgagtacagcgtgctcgtggtcatcatgctggagccagccgtggggcatcggtgagggggcctgagacacatgggtgtgagctaaccttctttctttgcactgaggcctaaccttagcattctctacagtaagttcctctgggtggattacccagagctggaccaggacagatactcgtggaccaggggtgggggctgtgaatatt

SEQ ID NO: 83806 - DNA, 848 bp, Homo sapiens
ctcgataggcacattcttggggcagtgtgtgaaattcactgctgcccctgtgccagtccttggggccagggctgcccatacaacttcctctgggctgagaaacattccctgtgcccatttgggtatgtgggtttctagacagggggggtttgaggcctccttcctcgtctacttgggcagccccttcccagatccacccctactcacaatcacaggaaggagactttgtcccctaccgacccactcatttagacatactgaacagtgtcacccagtgacccaggcccagcttggagtctcctccggtcccctggcatccattttttctcatagtcagatagggatgtgtgtgtacagagttatttcagtctcgtcccccttccccttcccttcaccgtgactcacattttcctcttgggctcctggcgccaggaagggaagttgcctggcctgccccccttcccttttcccccactgggggctattcttaaaaaccccccacggagatagtgtgtccttctcttcccccctgttgcttggagggggaccccactctagtttatcctggcccggcacctggagtggaaagggaagccagggagcccattccttcagcctggatgcggaaatgtcttaggaacccccctgcctccccggggcggctcccccttccaccaattctgatggtccctagctgtatcgagcccgtcctctttttgtgctcctgagtcttagccttacgcgcgcacaccctggaaaactccgccccctcagcccagcgctccctgcgaggtgcttgaatgtccggagcccgtgccccactctacacctcgcgatctacgccaccc

SEQ ID NO: 83807 - DNA, 423 bp, Homo sapiens
tggaagtcgcgaccgcgcaccatgacagggccagagatcaactcacctgtaataaagatcgagctcatgggcagcataccaccagcaccggaaacagaaaagaggcctcacgaggccaagaacactatgatccttgatatccgtaccaagtaaaaagctgggacagcggggatcagcttgagccatccctctatctctagcaagaattcttgcaaataatatccatgatattcagtactttccaagtacactgtgtatctgatactgttctaagtatccaccatgaggtagacaacacagacagtccttgctttgcatgttaatgtgagaccacagcaatgaccacgtaagctgagactgtcaaagcatcttagtaatcaatggaggaaagtacacaatcattccacgacctcttaaggtttc

SEQ ID NO: 83808 - DNA, 403 bp, Homo sapiens
tcacgcgtccgtcgagattctactttcatagttaacaaaacaatcacagttgagggtctggccatagatgaatacacgggtaaaacttctacaggcacggtatatgttaaagaacccgatttaaatgactttcgaccaacagttgtcctttaaaaagatgcaaggtgcagctcttcaccttccgtgggtgcctccgatagaacactgaataaaaaatacgctggcccttatacatttgcactggaagatcaacctgtatagttgcctgccgtatggagtatcacaacccttaatggtacctctgacctgctcagagcccaggaacagataccttctggagatagcacatctacctggacgtactgtctgcagaacaatcggtgagagatgccacgcagcttga

SEQ ID NO: 83809 - DNA, 1241 bp, Homo sapiens
cccggtcgccccggccacggccgcccgaggcggcgactttagggcagaagacggggctgggttggaggcgcgggaggagaaggtggtgtactcgcggtcgcaactgtcgctggctgacagcaccaaggcgctgggcgacgccttcaagctcttcatgccccgcagcacggagttcatgagctcggacgcggagctctggagcttcctctgcagcctcaagcaccagttctccccgcacatcctgcgcagcaaggacgtctacggctactcctcctgccgggccctggtacccgaccccccccgaggagagctgcccggccaagcccgtggcccccgggccctgcttcgggggccgcaccttggaggagatctggagggcggccaccccgacgctgaccaccttccccaccatccgcgtcggccgcgacgtgtaggggcgagcgcacgctggcggcagcgcggcggcagggcgcgccaggtcctgcgagtgaacctggaacccatggtgaggctacgccgcttcccggtgccccgggcatgaggtgcggcctccagggcgcctcctgccggccccgaccttgggacaggccttccgcccggaggaatgaacaagtgtcagtcgagtgtttacagatccggccaggaccccggcccccaatgcactttacgcgcgaagaagttgccggatggttgtccctgtcccgggccgcggcgcggtcgtcttggacgctggggcaggtgtgccctctgctgcctcccgtacccggcctgcggagggaggggacagctggacccgcaggggaggtccctttcttcctgaccaccgattgagacgtctccaggaccttaggggcagatccgttttctcactgttggactctacctcactggtctggaagtcctccgaagacattatttttccaaaggaatttggtttcgtgcttgtgtaataaagccagaatttacttgttctttatctccccctttttctatttcactgtcacccctctttgtggacagaattgcgaaaatgtggtgttgcaatagtttgtgctcagggtaatactgagcccacttcgtttccaatgttctaactgaatccaaagctttaatcgagggaatattttaaagaggttaaaccttgtgaccgtttagtagtgcagagatttgaatgggctcaggtgattaaaagcaagaacttggaaaaatcacccgtttaaagcattttcaagggagttcta

SEQ ID NO: 83810 - DNA, 825 bp, Homo sapiens
ggcgcaagaacctggacctggcggcgcccacggttgaggaagcgcagcgctgggtgcgcggtctgaccaagctccgcgcgcgcctggacgccatgagccagcgcgagcggctagaccactggatccactcctatctgcaccgggctgactccaaccaggacagcaagatgagcttcaaggagatcaagagcctgctgagaatagggcaacgtggacatgaacgacatgtacgcctacctcctcttcaaggagtgtgaccactccaacaacgaccgtctagagggggctgagatcgaggagttcctgcggcggctgctgaagcggccggagctggaggagatcttccatcagtactcgggcgaggaccgcgtgctgagtgcccctgagctgctggagttcctggaggaccagggcgaggagggcgccacactggcccgcgcccagcagctcattcagacctatgagctcaacgagacagccaagcagcatgagctgatgacactggatggcttcatgatgtacctgttgtcgccggagggggctgccttggacaacacccacacgtgtgtgttccaggacatgaaccagccccttgcccactacttcatctcttcctcccacaacacctatctgactgactcccagatcggggggcccagcagcaccgaggcctatgttagggcctttgcccagggatgccgctgcgtggagctggactgctgggaggggccaggaggggagcccgtcatctatcatggccataccctcacctccaagattctcttccgggacgtggtccaagccgtgcgcgaccatgccttcacg

SEQ ID NO: 83811 - DNA, 421 bp, Homo sapiens
ggagacaattccaggtcacttcgatctgcctaatggactctttgagatttggccagtgaatttcatccagctacctccctatcaaggttataaaccatggtttgtgttttccgtttgggtagacgcactctcttgttgacaggccactacctcagcggtttcaaagctgttgttagaaaaggttatcctacatggggcaaaccctcagacttatatggtgactgagaaatgcacctcactggccatgagaaagagcaaatttgccaagattggcccatatttcaaccctttccttgtgcttatctccaatcttccttattggcagaaagaacaaatggcattctcaaaacccaactggtgaaatttgaggaggcattacagctgccctgggacaaaggtacttggctctggtccttttgag

SEQ ID NO: 83812 - DNA, 395 bp, Homo sapiens
gggtagaagacctgtccagccttccttgtggctggcagctcctgtgtagtgcagatggtgataggattagtggaacccacagccgtggaaacactgaaactttccctgcaaagtgggtccttcaggcagataatgggctaggagcactgcctagcctgcagaccaggaatgtcaacagcacccaaagagtggtgctggctgtgtctgagagcaggacaggaaaacccacccatagaatcggtacctaaccctgtgaagatgaaactctggcccttccaggttggaagtagctaaatgtagtcaacttgttacttagtgggtagtcatgtaaagaaatagtgccccactagggcacatcatgggcctcaattgctgatgagttggacattcagagg

SEQ ID NO: 83813 - DNA, 380 bp, Homo sapiens
atggccctgctgacaacggttcacggtgtctcagcctgaggtgaggtggctgtgggtctaagtgggagacacaccctgctctggcgtctgaggagggaggcaggctctgccctggcgtctgagggggaagcttggacctgcctggggtctgaggggggagggttggccttgccctaagttctgagaggggaggcatgaccttaccctggggtctgagcggagaggctcagccttgtcctggggtctgaggagggatgcgaggccctgtgctgtggtctgagaggggagacacaccctgccctgggtctgaggagggaggtatgccctgccctgaggtttgagcggggaggcttgaacctgcctggggtctaggggtgagg

SEQ ID NO: 83814 - DNA, 438 bp, Homo sapiens
gtggtggaattccaccaagcccagggccaggtacccaggcaaaattaacaaatggacttcactcacatgctggccaataaacggctccactatcttctagtctttatctgtactttctccaggtagataaaagcattcccaacaacttcagaaggtataaatgtcatcacacaaactctcttcatgcatataattctccgttttggacttccaacattcatccagtccaacaacggaccctccttcatcagccaaattatccaaggcatctctacatccttaggtataaaatgggttctccacacaccctataggcctcaattctcaggcaaagttgaaaaattacgtctgtccttaaagcccaactcaccaagctggctctaaaaactcaccagtcgtaaacaaaaaatctccctttcacccttataagactccaca

SEQ ID NO: 83815 - DNA, 424 bp, Homo sapiens
  misc_feature (1)...(424): n = a,t,c or g
agtgtggngaaattcgccggcttggctagcgcgcggcggccgtggctaaagctgctacgaagcgagcttgggaggagcagcggcctgcggggcagaggagcatcccgtctaccaagtcccaagcggcgtggcccgcgggtcatggccaaaggagaaggcgccgagagcggctccgcggcggggctgctacccaccagcatcctccaaagcactgaacgcccggcccaggtgaaggtgagggcccggcaccccgcgtggagggcgaggggagggaggaggcggaaatgggggatcaggggcgtcccggggtcggcctggtcaggggaccattgggatagccagggacaggaagcctacgagccagagaggacctgggggtgccctgggacagggggtgacggagaaaagctgtgggcgccctcgc

SEQ ID NO: 83816 - DNA, 404 bp, Homo sapiens
  misc_feature (1)...(404): n = a,t,c or g
acatatttgaatttatacatgcacaaagtatctcttaaggattataagacagttctacaataatagttggagtcttcaataccctactttcatactgtacagaaattctagacagaagatcaataaggaaatagagaacccaaactttataaaacaactaaatctaataaaattatacagaacactccacttaacatcagcagaatatatattcttctcaaatgcacacagaacgttctccaggacagaccataagttaggcataggtaattcttagtaaatttaaaagatcaaagtcatataaaatatttctctgactacaacagaatgaaattaagaatcagtaacacaagagaaatggaacattcacaaatatgtggctattanacaacatgctcttaaag

SEQ ID NO: 83817 - DNA, 443 bp, Homo sapiens
  misc_feature (1)...(443): n = a,t,c or g
ggtgccgtccagagaaacaaggtcacagccgacccccagaaccctgtgaactccctcccaggcaccagagccgcaggtgctctagggagtggctcatgctgtagtggcacctgatcaccactctgggaccactgtagccactgcgccagccacaccccagccacccagccacccccagccactgcctcagccactgcctgagccatccccagccactaccccagccacccttagccattgccccagccacccccaaccactgccccagccaccctcagccactgccccagccacccccagccctgttgcccccaaagctgctgagtggagccacagggagccacagcgagccacagcaagtccagactgagggtgtcaaggccgctgtggctgctgcccctcaaagccctctgctcagacagacttgggggcccagctcagcn

SEQ ID NO: 83818 - DNA, 373 bp, Homo sapiens
tttttttttgatgtaggagcttatagctataaacttccctcttagttctgctttcgctgtatcccacaggatttggtatattgtgtttccattatgtttgtttcaagatatttttcaatttccttcttaatctcttcatcgacccactagtgactcaggagcatattgtttaatttccatgtgtttgtatagttcccaaaatgcctcttgttattgatttataattttattccattgtggttcagagaagatacttgatataacgtcaattttttgaatgttttaagacttgtttggtggtctaacatatggcctctacccttgagaatgatgcatgtactgaggagaagaatgtgtattccggacgcgtggg

SEQ ID NO: 83819 - DNA, 454 bp, Homo sapiens
gcagtgcggtggaattcggcggatgagctgcagctgcaggtgttccagtgtgaggcgcagctactggccgtggagggcaggctcaggcggcagcagctggagacgctcgtcctgagctccgacctggaagatggctcacccaggaggtcccaggagctctcactcccccaggacctggaggacacccagctctcatacaaaggctgccttgccggcggggggagcccgaaacagccctttgcagctctgcaccaggagcaggttttgcggaacccccatgtaaggcttccccggggtggggtcctcccagccgtgggcctcagggtgaccgatcacagggagagtggctccctgccctgggcaccccctgcggtggccccgacgacagctgaggagtgaccacaaggtctctgcccacagtgctcggggtgcggtgtctgggctgcgaagtgga

SEQ ID NO: 83820 - DNA, 453 bp, Homo sapiens
cggtggaattcggcccccttggagccggccggttatccccctcccgtccccaggcccagggcggagcactgcgcttaaagccaaggagggaatgggacgtcgctcagcctgctatctgggttgtggactgatttcgggggtcggcggggagacccgagggtgggccctggagggaggcctgggcctggagaggaaggcggggcttgcagctggtccgaggcttggggaaggggctggcagagtgcgcggctggccgggtgcggagcccgggctccatcattactctggggacaggggtgagggcggatcccaggaactgcggagagcagctttcgctagcaggcttagacttcccgggcaatcggtctcgcggctttgcagtaaagtggggttcgtctggagcccggccagaagcggagagaaggccggccccattggctctgaggtcgccct

SEQ ID NO: 83821 - DNA, 850 bp, Homo sapiens
ttttcttcctactgtaaaaatagaaagtccatcccattaatccagagttaattaatatccagagctggtttacaggatattgacatgttctggcatacattaggaatttacacagaatagtaatgactattcaaaaatggggtagttatttaggcagacgactttatcaactaattgtgaaggtagcatattatactatgaagatgaatctctacaatgcagtggctatcaggattgcattaatcatgcaagtatgggcctgattcttatggagaacatttccaaagtgaaaatcctcagaaatagatccgtgacaaggaacaagacaaggatgcccattctcaccacttctattcaatatagtattggaggtccttgctagagcaattgggtaagacaaataaatggcatccaaattggaaaagaagaagtaacattgtctctgcagatgacatgatcgtatattaaaagaaaccccaaagactccaccaaaaagctgttagagctaataaatttagttaaattatggaatacaaaatcatcataccaaaagtagtaacatttctatacactaacaacaaactatcccccaaagaaatcaaaacaataatcccatttataatagcatcagcaaaaataatatacttaggaataaatttaatcaaggaggtgaaggacttgtacatagaaaactataaaatattgatgaaataaattaaagaagacacaaataaatggaatggatatttgtggtcatgaattggaagaattaatatgtttaaattaattatttacctgacggtacctacagagcaatgcaatctccatcaaaattctgatgacatttttt

SEQ ID NO: 83822 - DNA, 391 bp, Homo sapiens
aggcgcaggagcaggctcctcagtgggctcctggacaggctgcctgctctggtggggaggagcgaggctcaaagcaagcaggggcctgggttgcttcccacactcagtggcagttgctcactggcagtcatgtgacctggggagctggcgagggcgtgggggtaggaatgggaacgggagacagaggccctttgggaggaattgccacagatgcagtgggagttggggcaaagatttgaactttggagaattaaaggtggcagtcagaaagtgaagggagttcccaagtttctgggatgggcacttggtgctgggagatgaagacacgaagagcttttcttgatgtatccctgctggctgctcaggcagggtcgggcaatgccattaagac

SEQ ID NO: 83823 - DNA, 388 bp, Homo sapiens
cagatctgttaggcagagactttaaaacagctgtcttaaaggtgctgaggcaactgaaggaagagacatggagacagtcaagaaaacaatgtatgaataaaaagatagaaaacctaaaaggaaaccaaaaagaaattctggagatgaaaagtacgctagagtgattcaaaggcagatttgaacaggtagaggaaagaatcagtgaatctgaagataggacagtggaaatttttgagcctgaggaacagaaaaacagaagaaaaatgaacagagactgagggacctttgggacactatcaaatggaccaacatacacactctgggagtctgagaaggagaagagatagagaatgggtcagagaatatttcaagcggtgatgactgagaa

SEQ ID NO: 83824 - DNA, 383 bp, Homo sapiens
caaatttaaaagaattgaaatcatacagagtgtatgaccaaaatggactcaaacttagaattaataacacaaagacaatctccaggaagatcttcaaacacttgaaaactaaataacacatttctaagtaatctatgaaccaaagagcaatcctcaagagaaatacaaaattcattaacctgaatgaaaatgaaaatacaatgtatcaaaatttgtaagatacagctaaatcacaactaggaaggaaattaatagcactaaatgcttacattagaaaagaggaaaaaaacctcaaatcaataatacaagcttccacctcaggaaattagaaaagaacaaaataaacccttaacaaacagaaagaaggaaaagaagagaaatct

SEQ ID NO: 83825 - DNA, 409 bp, Homo sapiens
acaggctctgcaggtgggggaccagggggtcgcttttcctttcgggagctccaggggctgctgtgggaaggcactggagagtcttctctggcagggtcctccggctgggggtggccggtccagggcagtgctggtggaggaggggtgtgtccagagaccttccagagtgtctcgtgggcgggcagctgggcagtttgggttctgggtgaggggtcctgtctggaacaagcagaggccagggctggacattggcctgggaggggagggcctgtggacgaggccaatcctgggtgtagagggggtccctatgatgagggtgggacagatgagggtggagcattgggtgcttaagggacacatggagacagggtctagcaaaggagctggtgggcacagctgggcagttggg

SEQ ID NO: 83826 - DNA, 416 bp, Homo sapiens
tttcgtgagggagctcggggtgcagccccacggttcgtatcctcatccccccaccaacacccagtgcggtgggcagccccgcaggtgatctgacgcaccagcaggtgctgccccctgtgccccctctggtggggtgtgagcaccactggaacaggggactgctgtgcctgggttgctgcctggcacccagcggtcgctcaggaccccgaggagggcagggtgggcccaggagctggacgcaccaggtcggggtccctgggtgggcaaagtgggcgctggtgctgcttgaggggagtggctcctgcccagcatagcagttctggctttaggggtggggcagggtccccttccttctctttagctatacatgggtttggggattgaggaagggccacccacaagctggcctctagaac

SEQ ID NO: 83827 - DNA, 400 bp, Homo sapiens
  misc_feature (1)...(400): n = a,t,c or g
tttcgtctgggtgagtggacgcaatgaggcggaggcccgggagaaggcagccaaggagttcggagtggcccctgacaagatcagtctccagcaaggcaaggcggggctttgagggtctggagggagttgtggggggcagagctccactccctctgacctctgacctttggcctctctcagatgaggatgtattggatacctggttctcctctggcctcttccccttatccattttgggctggcccaaccaggtgtgttcctggggccggggcttggcgggacaggggactggagggtgggtgttggctccccttcacaccctggtctgccctcagtcagaagacctgagtgtgttctaccccgggacactgctggagaccggtcatgacatcctcttctn

SEQ ID NO: 83828 - DNA, 386 bp, Homo sapiens
tttcgtttcaaaatttttagggaagccagatcaattaggcaaggaagaaataaagggtgtcaaagttggaaaggaaaaagtcaaattgtgcctgcaaacatgatcttatatcaagaaaaacctacagactccaccaaaaacctcttagaaccaaaaaatgaattcagtaatgttgcaggatacaaaatcaacatgcaaaaatcagtagcatttctacacactaacagtaaactagctgaaaaggagatcaagaaggcaatcctatttacaatagctataaaacatataggaataaacttaaccaaggaggtgaaagacctacaaggaaaactacaaaacactgatgagggaaactgaagagaataccagcaactagaaggacatcc

SEQ ID NO: 83829 - DNA, 441 bp, Homo sapiens
  misc_feature (1)...(441): n = a,t,c or g
aagccgtattgatgccgtacggannnnnnattcccgggtcgacgatttcgtaagaggaggaggaagaagaaataatgaagcaaggatatcagatttatagggcactattacaccaagaaatattcatattatgggtgttccagaggcagaggacatgggaaaaggtgagaaaaacacatttaataaaagaatagcagaaaacttcgcaagttttgagagaaaggtggacatccaggtctaggaagctcaaagaattccaaatagattcaacccaaacaggtcctctccaaggtacataacagtccaattgtcaacagtcaaagacaaagaattctaaaatcagcaagtgaaaagtgtcaagtcaaacttaagggaatccccattagactaagagcagatttctctacacaaacattacaggccaagagagaatggggcaag

SEQ ID NO: 83830 - DNA, 424 bp, Homo sapiens
tttcgtggaaaacccttaagattccaccaaaaacggttagaactaatgaatttaacaaagttgtatgatacaaaatcacacaaaaatcaatcgtgtgtctgttcactaacaatgtacaattcaaaaaggaaattaaaacaattccatttataaaacatcaaaaagaataaaatatttggggataaacgtaaccaaggaggtaaaagacttatgtacagcaactacaaaaaaaaattgctgaaagaaattaaagacaataaataaatggaaaggcatcccacatttatggattggaagacttaatattgttaaaatgacagtactacccaaaatgaactaacaagtgaatgccattcctattaaaaatctaaaattttgttaacagaaaggggaaaaattaattctccctttcatatggaatcta

SEQ ID NO: 83831 - DNA, 411 bp, Homo sapiens
tttcgtaaatggggctggaagcgtattccagagggagatacagacaggatcaaaggcttggagggctgggcagcctggagggtgtgggggccagaggccaggttggtgagaacatatggacagctaaggtgggaaggacattctgggcaggggctttgtgtggaccaacacagggaggtgggcagtgtgagcctttcccgggaaacggcttggctggtgtgcgaggggaggagtaggaggagaagtcagaggagccggaggtctcagtggaccaggtcagggcctgtatgggggaccacagcgggaaaagtgacagtgattccctaaccctcaggggcaggcggtgagggcattcccggaggcacagcttgggccttgggccaagaacacttggtcgggacattgttttta

SEQ ID NO: 83832 - DNA, 409 bp, Homo sapiens
tttcgtattaaatatagagataatcctaggatattctattaggagcctttctggcttttgcaattcctctttagggccaaaaccctgcgaccagggttcaagggcaggtagtcaaagccttagccactccaatgcttcttgaagtcctgttctacctaacttttgctggcctaatacattttcagagagtctctgataagaaaggaaagtagttacattgtatttaactagcattggggatgtgaagaatcttgttctcccaaactgatcaattcagtcaaactaaatactgtgtatttcacactcaaaccattggatattgagtttatgaagcggttgcatgaaaaagtgaatatcatcccacttattgcctaagcagacacactcacaccagaggaatgccacagtt

SEQ ID NO: 83833 - DNA, 418 bp, Homo sapiens
ctcaaatccccccactgcgtgcaacctcctcaaatccccccaatgtgagcaacctcctcaaatccccccactgcgtgcaacctcctcaaataccccactgcgtgcaacctcctcaaatccccccaatgtgaggaacctcctcaaatcctcccactatgtgcaacctcctcaaatctccccactgtgtgcaacccccccagatctcccccactgtgagcaaaagcacaaatcccccactgtgtgcaacattcctcaaatccccgcactgtgtgcaacccaaccaaatctcacccactgtgagcaaacccccacatccccccactgtgtgcaacctcctccaatccccccactgtgtgaaacctccccaaatccccccaatgtaggcaagagaaagccctaccacaagaagcggaagtat

SEQ ID NO: 83834 - DNA, 420 bp, Homo sapiens
ccagcatatacctggaggatgttctcaataaaaattacagcttgctggaccacatgcaggcaatgaggcggtacctgcttcttggacaaggagactttataaggcacttaatggacttgctaaaagctaaatgtatgtccttctccacaagttctggaccaaagcctgctgtgcttctaggtctagagacagtgcagaccccggcccaagcagcgtgagcctgggcatgagcatcccaggggtccacagcctgggcctggagattttcacccaagtgtttagaagaacgaaacttcttttctggtgttccttttaggacacttaaaaacttgtccgtccagctacgactttgtatcaacataacttgactggaattctacaaaccgctgtcagagccaccaacgcacagtttgacagtgc

SEQ ID NO: 83835 - DNA, 433 bp, Homo sapiens
gggcaaacatagaacagaggtgatatttgaagaaataatgagtgataatattctagaactgattaaaaacactagcctgcagtttcaagaagcctaacaaatcccaagcaggataaataaaatctctaatctagatacatcaaagacaaacttcagaccagagacaaagagaaaaatcataaagatagctagagaaacattagaataccttcaaagatacaatagttagattgacagttgacttctcaacaacagtggaagccagtagagtgctatcttgaatgttgatgaaggacaataactgcctacctaggattctaaacccagtgaaaatatatgtcagaatgagggctaattaaagacattttcaatcaaaagagagttttctgtcagcacatcttattgaaggaaattctaaataatgtatttcaga

SEQ ID NO: 83836 - DNA, 397 bp, Homo sapiens
cccacgcgtgcgagggagttaaaaaaggggtctaatactttatttgcttggttagctgaaacatggatcgaaagatggcccactgtgagtgagctggaaatgcctgatctcccttggtttaatgtagaggaaggatcccaaggcttatagagattggaatgttagagtggatttggatttgtcagtaaggacctactcatcccaactgggagggtccagaagacacacctttcaccagttccttgtgaaataaatttgtgaagggagcaccagcatccttgaagagctctttgattgctcttctctgtatgtcagatcttacagtgggaaccacagccactcaactggaaaacttaaatgcaatgggaataattggatcctgaggtggcagaggcct

SEQ ID NO: 83837 - DNA, 423 bp, Homo sapiens
tgagcaggggaggaggtgggcagggggaagggtgaacagaggaggggagaaagggaggagggtgagtggggaggaggtcatcatggtaggaggctcgccacaggagaaaggtgagcagaacatgtgagcactggacaaggtgataagggaggaaggtggccttaataggtgagcagtggaggagggttctcttacgacgttgtgataaagggcggtggtttgctggcaaagagggtaagctggggaggaggtgattgctgaggattgttaacacaggtggccgcgaacatattatcttgctagcgtgcgagcataatatgagtgcgtctcgggtatgaccgttatctggggagaatgtctttccatgatgaggtttttcttcaagttgctttggtggggacggggaccagacggtgtttcctt

SEQ ID NO: 83838 - DNA, 427 bp, Homo sapiens
tgcccagaccttcaccaccctgagaaagctgaggaagcaccaagaggcccacggtgggggctcccacagctcccgggccggacggaggccctccacccgctttacctgcccccactgcgccgaggggtgcaagaccgcagctgccctgagccgccacgggcagaggcatgctgctgagcggcccgggggcaccccaacccctgtcattgcctattacaagggcagcgctggcaccaggcccggggatgtcaaggaggaagccccccaagagatgcaagtctcctcatccagcggggaggcaggtggcgggagcactgctgctgaagaagcttccgagaccgcctcactccaggaccctatcatttcagggggtgaggagcccccagtagtggcaagcggcggcagctatgtatacccacctgtgcag

SEQ ID NO: 83839 - DNA, 413 bp, Homo sapiens
tcgcacacgcgttcgggtgtattgtgagctctgccatctgaaaccaaactgtttttggtgggctttactaacagacttcaagaagaaaagctgtctgccagatcagtatgtgcataccaggtaccaggggatgtattaattctactcaagctatgaaaccacttttggaacagcagctgtaattgatgtccccacctgattaagtttccgtaatttactctcattctgcatgatctatctgttttcttcacaggctaaataggggagtagaatgggaatgtgataaaaagtaccacctctgcatccttcaagtccttgatggtggtactaatttctgcaagctttacaagaatgcagtattgttgttggtttgctggttttctagatagaggccgggaagtggcttactcttt

SEQ ID NO: 83840 - DNA, 417 bp, Homo sapiens
  misc_feature (1)...(417): n = a,t,c or g
aacagagagagacccttcctcttaaaaataaataaataaagcttttaatttttatgaattcaaattattttttcttttgttgctcatgctatggngacatatctaagaatcttttgctaaatccgaggtcatggatacaatctgatagctcatcagtaaaattcaatcaattaatcaatcgaggtcatggaaaacattactgctatgttttcatctaagagatttttagctttagcttttacatttaggtctttgatctattttaacttttgtatggtgtaagactccaacttcattcttttgcatgttatccagctgccccctataccatttgttgaaaatactattctttccccagagaatggtcttggcacctttgtcatatatcagttgaccatggttgcatgggtttatttn

SEQ ID NO: 83841 - DNA, 470 bp, Homo sapiens
tgcggaactcccggggcgacccacgcgtgcgaaaatgattgatgacggtgacagaagataccataatctcaaatacagcaaaagcaatactaagagggaggtttatagtgccaaatgccttcatcagaaagacaggtcacaaattgacagtctaataatatcacacctcaaggaactaaaaaaacaggaagaaaccaaacccaaagctagcagaagaaaagaaataacaaagaacagaactaaacacagttgaaaccaaaaaatacaaaggatcaataaaattaaaagttgtttctttgaaacgataagcaaaaataatagaccattaggtagattagctgtgagaggattcaaataaacttagtcaaaaatgaaaatagagataccataactgataccacggaaatagaaaagatcatctgagactgctgtgaacacatatatgtatacaaaccagaaaacctagatgt

SEQ ID NO: 83842 - DNA, 741 bp, Homo sapiens
agacagatagaaacagagagagacagagatacaaagagacacagagaagggagacagagggaaaaagaaagaaaaacagaaacagacagagacaaagagacagagtaggtgatggacagagagagacagagatagaaacagacagggagagacggagatacaaagagacacagagaggggagacagagagggaaagagaaaaagagacagaaaaacagagagacatagacaaagacagacagagtgggtgatggacagagagagagacagaaacggagagacagaaagacatagatacaaagagagagagggaaagagaaaaacagaaaaacagaaacagaaacagacagagacaaagagacagagtaggtgatggacagagagagacagagatagaaacagacagggagagacggagatacaaagagacacagagaggggagacagagagggaaagagaaaaagagacagaaaaacagagagacatagacaaagacagacagagtgggtgatggacagagagagagacagaaacggagagacagaaagacatagatacaaagagagagggaaagagaaaaacagaaaaacagaaacagagagatacagagatacagagagactgggagagggggagatatagacaaggagagagatagagaaagagagggagaatgaaagagggagagacagagacacagatttggacagtgggagataaaggcaaagagagagagagaa

SEQ ID NO: 83843 - DNA, 573 bp, Homo sapiens
  misc_feature (1)...(573): n = a,t,c or g
ggaaattattttttataaagaatgaaaattatatactagaaaatacagtgattgaaattaaaacttgctggatataatcactagtaaagtggagatgacagaggattgaatcagtgaacttggggacagatgaatagaatgaactcaatctgaagaacaaagagaaaatagactgggagaaaaaaattaaaaagagtctaaaggacctaactgatatttatagaacaccccacccgacaacagtagaatacacatgctttcaagtgaccacaggatgtatctaccaagatagacaataacctgggccataaaacaaacctcaacaacaaatttaagagttgaaatcatacaaagcatgttctcaggtcacaatggagtcaaattaaacatcagtaacggagagataccaagaaacctccaaaggcctggaaactatgcaacccatgtctaaataatccatgggtcaaagaagagctctcaagagaaatacattgaatttaccatggaaattccntatgnccaaattttgngcccccatagctgggggcttttcgcggggttttttacccctat

SEQ ID NO: 83844 - DNA, 391 bp, Homo sapiens
tcggcgtggaggaataagcacgtagacaaatcgaacataatagagaacccagaaataaacccctacaaatatatacgcaactattttttaacaaagattcaaaagcaattcagtggagaaaaaatgaccttttcaacaaataatggtggagcagttgaacatctacagcaaaaacaaagctcaacttcaacctcacacctgatataaaacatgaataaaaaactatgaaacttttagaaaaataaataaataaaccttagggatctagggccaggcaacatgtttttatacttcacatcaagatccataaaataaaaattaatacattggacaataaattaaaaacctttgcactgcaaaagactgttaaaatcattcaaagttatagagc

SEQ ID NO: 83845 - DNA, 448 bp, Homo sapiens
ctcatggaatgccttatctaccatcatactattccacacagcattgcctctgaccaaggcactcactttattgctaaacaatggccgcagtggactcatgctcataaaattcactggtcttaccatgttccccatcatcctgaagcagctggattgatagaacagtagaatggccttttgaagtcatgattacaatgccaactaggcaatagtttgcagggctggggcaaagttctccagaaggccatgtatgctctgaatcagcatgcaatatgtggtactgtttttcccatagccaggattcacaggtccaggaatcaaaacacatggaagtggaagtgggcaccactcaccattgcccctaatgatcctcccgcaaaatttttggcatactgtttcccttggacattatgttctgctggcctaggaggtcttagtttcagaggga

SEQ ID NO: 83846 - DNA, 478 bp, Homo sapiens
attaaagatctaaataactggaaaaatatcccatgttcatgtgtcagaggatttaacatcattatatgacaaaattctccaccttgatctacaaattcaatgtcatccctatccaaatccctatcagaataacttctttgtagatattgacaaacgggttctaaaattcatatggaactgaaggggacccagaatagccaagacaatcttgtaaaagatcaagtaggaggactcaccagttttaaaacttactacaaagcaatggcaatcaaaacagtgtcgtactggcacaaggacagacatacacatcaatgtaatacaactgagagtccagatataaatccatacatccacggtcaactcatttttagcaaggggtgccaagactggtccaatgggaaagaatagtcttttcaacaaatggtgctggggaaactgggacagcccacataccaatggaatggaagctggaacttta

SEQ ID NO: 83847 - DNA, 696 bp, Homo sapiens
tttttttttttgcaaagtggcaaagtggctttatgcgcaggctctgggccgagtaccaggagaaggtgcctccggaggaggccgggatgcggctggggctgtctggcacggggaccttcgtggccagccacgtggccttgggacgcccgcgtccagccagggctgaggacccaggccagagcccctcccgcccagcacccgcgacgccagcctggatgctggggtcactaagtgaggtactcgttggttccctggatgggccaccctttctgccctgggaggaggctctggggtgtgcaggagggagccagctaacaggtcagtgttctgggcagaagtggggcacgaagtaacacaggccctgaggacacagggacacaggtgacacgggccttaaaagtggcttgtgacatgagcaaccccaggcccctgaaaaggggtgacctgaagacagaggttccccaggtggggtgagggacacccgacgatgcagcccccccccagggaaacgtgaggcttcaagagactcagtgtggggccctcgctctcctcctgggcgagcagggccgcggcgccccagcactggggctgccaggtatcgacccgcgggtcacacgcaggcccgcggccgggtgggcgccagggacttcggggcatgcggggcgtcgggccgggcggggtgacagctgcacggcc

SEQ ID NO: 83848 - DNA, 642 bp, Homo sapiens
ggaggaaagctgtaagatgaaaagacatcttgcagtccttgcagcgaagcatagctaaatgtgtgcatgcataagagaagctcttgaatccccaaaccacctcattctttcttcagcttttacagaagaagcaatggtatccaaaatctttcccctgttgtctgccttcccaagggcttttaccagcagcaagagtgcagaagtgtctgctagttttgagaaatgtgtctgggtctccttttcctttccttataggcttccctccaccaatcctggagctaaaagaatcatacccattgggcagggactgacattcaatgtgaacctgctcaggggcatgtattaacatcacccagccctactcttcgggcttcagggagccccagacctccctgctggggagcctgcctggcttctacttactgccagggaggaagatgatggctgaaatttctcctgctaggcctctttggtggtgcagggtcagcggttgatgaaaaccactgtgatccagctccatatcctatgtgagtggaggcctgatctttcttgtcaaaataaggattattattttcccatttctagagagcttcttggccagcagtgcttcattattacagttgccacatttttctcattaaa

SEQ ID NO: 83849 - DNA, 385 bp, Homo sapiens
cagaagaggaagaatgaaggaagcagaataaacattgaaaaagaaaaggcccaattcttcctaaattccaaagcctctgtcgtaatactacaaaatgtttctgagagaaattaaggaagacttaaataaagtatatactatgtttatggattggaagatgttatcgttaagatggcagttctccccaaattacactgtagactcaatgcagtgtctaccatgatcccagcagacatttttaaaaaaattgacaagacggttgtaaagtttacatggagatgcagaggaccttggaatggcttaatcagtcttgtagaagaacaaagctagatttacattacgtgatttcaagagtttctatgaaatgtatcaagacacagaagtg

SEQ ID NO: 83850 - DNA, 422 bp, Homo sapiens
  misc_feature (1)...(422): n = a,t,c or g
aaataaatctatttatttatagttaactgattttttacaaaggtaccaaaaatttacattgaagaaaggacagtctctttgacaaatggtgccaggaactcgatatccacattcagaagattgaaagtagacccctgtctctcatcatatacaaaaataaactctaagttcattaaagacttaaatgtaagaccccaaactatgaaagcatatttggcaacacagaaagaaaaactctcaaagaaagctatcagaaaatgtaaaacaattaaaaaatacaaatttgacctgatttttaaaaaatgaaaatatttcatcatattgtactgttaagaatcttacacaatcttttccagataatggaagaataaaaaattagctcctaaagcttctcatattctagcaaanaataagaagagtac

SEQ ID NO: 83851 - DNA, 409 bp, Homo sapiens
gaaagatataaagatatctttgccagcacatttgaaaatttagactaaatgaccaaatgccaggaaaaattgaacttagcaaagccagctaaatatgaaaaagaaaacctgagaaaaatgaggcagtaataaaaatttttcctacaaatttcaagcccagagatttatattggtaacttttggcaaatatacaaggagcaaataatttcaatcttacagacacaatttggaaatataaaagagagggaacaatcactcaacaacatatttaataaggttcacataactttatatcaaaactttacaagttaatacaggaaaagaaaagcttaggcctgtctcaatcctgaacatgtagaaaaattcctaaacataatcagaccaatccaaaattagtgtacacaaaaat

SEQ ID NO: 83852 - DNA, 435 bp, Homo sapiens
aaatactggaagaattaattatacattaaaaggattctctaccatgatcaaatgggatttatccctgagatacacaaaagactcaacatacacaaatcaataaatgtggtacatcacattaacaaaatgaagtataaaaaccatgtgatcatgtcactagatgcaggaaaagcatttgataaaattcaacattcttttattataaaaagtcaccaaattaggtatagaaggaatgtgcctcaacacaataaaaaccatgtaagaaaagcctacagctaataatatactcaatggtgaaaaagctgaaagctttttctcttaaaatctgaaacaagggaaggatgcccattctcaccacttctattcagatagcactagaattcctttccagagcagacagccaagagaaagaaataaaaggcacacaaataggat

SEQ ID NO: 83853 - DNA, 392 bp, Homo sapiens
atgggatttaaaatgaaaagcacaataccatttaaatcagcaccaaaagtgaaatacttagataaaaatctaacaaaatatgtacagctctatataagaaaaactataaaactctgatgaaataaatcaaagaactaaattaatggagagatactccatgttcatggataggaatactcaatattgtcaaaatgtcagttcttctaattcagcctgtagattcaatgcaatctcagtaaaaatcttatgaagttattttgtaaacatcaaccaattctaaagtttacatggagaggcagaagatccagaatagtcaacacaatattgaaggagaagaacgaagttggaggactgacactacctgacctcaagactttctataaagccacaat

SEQ ID NO: 83854 - DNA, 358 bp, Homo sapiens
  misc_feature (1)...(358): n = a,t,c or g
tgaagactgacactcaggccttggaacttttgttttataattgatgatttgcctctgtctggtcaacaagcaaaatgccttgggcatccctccaaaatactgtcatgacttttgctgttgacctttccactttttcttggactggaccacttccacctcttgtagtcattgctttcattgtgctttgccttcaggagcacactggtaaagccatgtttcatctcctgctacagatcttcaaagaaatgcttccaggatcttgatcccacttgtttaaaatttccattgaaagtcctgctgttgtctgcagcttagggccaacagttttgccacccatcccgtggaaagttcgctcaan

SEQ ID NO: 83855 - DNA, 390 bp, Homo sapiens
  misc_feature (1)...(390): n = a,t,c or g
gattatattggacttcttccatcatggaaagggcagaggtttctcctccctggaatggacactccagatatgagtttgcctatcctacacgcaatgcttctgctaagactaccatctgtggattcacggaatgccttatccaccgtcatgggattccacacagcattgcctttgaccaaggcactcactttacagctagtgtgacagtgggctcatgctcttggaattcactgatcccaccatgttccccaccatcccgaagcagctggattgatagaatggtggaatggccttttgaagtcacaattacaatgccgactaggtgataatactctgcggggctggggcaaatttctccagaaggccatgtctgctctgaatcagcatccn

SEQ ID NO: 83856 - DNA, 371 bp, Homo sapiens
aactggatgtctttgggcatgagagccaactctcttaccgtagatggcacacaaattagcatcttcaaaccaacccaccaggtacacttcactagcctccaggtacacttcactagcctcctgcagcaccccaatgactgtgctctgaaacctaaagttggttttgaaatcctggggtgatctctctcaccaacctctagaaaggcagcttccagatgagaagctaggtcaatttctggtaacgagaatctctagaagtgccacagtcccaggcccgtagcgatgaggtttcttcaccagaccggtagaggggacactttttttctggcagcgataataacctgctgttaggaagaagggctcccaccagg

SEQ ID NO: 83857 - DNA, 363 bp, Homo sapiens
gaaaaacagtaacctacccactcaggaagctcagtgaactccaatgaggatgaatatcagagatccacacctagatatttcataatcaaagtgtcaaatgacaaagaatcttgaaagcagcaagagatgagcaacttatcttgttcaaaggatctttgatcagattaacagctcatttctcctcagaaatcatgggagccaggagatagtgggatgaacactgttgaaggcaaaaccttcaactgtaattattggacttttgagtcttagatgggcctgacctctttgtcttcagggacagtttttcaatttaatccctaataacaattagtcaagcttccttgacctgtaggaaggcctgtc

SEQ ID NO: 83858 - DNA, 494 bp, Homo sapiens
  misc_feature (1)...(494): n = a,t,c or g
gtaaacaggtaacaggcagatgttaaaaaccttgccccattcctgtgttgagaggacttttttgtttttttctcccgctccccagagatgtgaactttgtccccataaggatggagctttaaaaagaacagataatgggggttgggcccatgaggtgtgtgctctgtatattccggaggtacaatttgccaatgattccacaatggaaccaattgttttacagtctgttccacatgatcattgtaataaggttgagactgagctaaagttaatctgcggcgatgttctggatgcactggacaaacacctcattccagcagctaccactggaaaggggtctaccacaggtattctgggcaggaattttgccacagggaaatngacagggagggaggtgggcagaggaacagcttgggtgggctttacaaaggtggctagtggattatttgncagttaaggnggaacttttcaccattgncttcccctttcattta

SEQ ID NO: 83859 - DNA, 345 bp, Homo sapiens
cagcaagcaaaataccttgagcatcccaaaaacctgcagccatgcccttgcttttgactgtctgcttttgctttaattggaccactgccactttgggggagccattgctttgattgtgctttaagatcatactcggaaagtcatgtttcatctcctgttacaattttttgaggaaatgggttaggatcttcatcccacttgtttaaagattccattgaaagctctgctcgcatctgcagctgatctgggtacaacagtttgggcagccatcaagtggaaagattgctcaactttaattttcagtcagaattgtataggctgaactagatgtctatggtggtcact

SEQ ID NO: 83860 - DNA, 348 bp, Homo sapiens
tgatattcatatgcagaagaatgaagctagattcctcttttgccatattaaagttaaaaaaattatgttaagtatcttctctgatcacaatggactataactaaaaatcaataacgaggaattttggaaactccaccaacacatgggaattaaacaatatgctcctgaatgaccaacaggtcagtgaagaaattaagaatgaaattaaacaatttcttgaagcaaatggcaatggcagcacagcatacgaaacctgtgggatatagtgaaagcaatactaagaggaaaatcaaaaaagtagaaaaacttcaaataaataacctaatgatacatcttaaagaactagag

SEQ ID NO: 83861 - DNA, 395 bp, Homo sapiens
cggcccttatcagggatatgattttcatatattttatctcattcttttggcacgcatctcactctcttgatggtgtcctttgaaacataatagtttttaaattttgatgaaggcccatttatctgattttcttactctctgcgcttttggggacatatctaagaaaccactgcctaatccaaggccatgatccattactactgcgttttcttctaagagatatataggtgtagctcttagatttacggccttgttccattttaaggtaatttttggggatggaatgaaagaagttccctaattaagatttttgcctttggatattcatttgtgccagcaccatttgatgaacagacaaatgctgcgaactcattatcttgcattgaattgtcgcg

SEQ ID NO: 83862 - DNA, 395 bp, Homo sapiens
ggtgactgtattgtggggacaggaagcacaaattcccatgtggatcactaggagagataataagtggggtcatttcaccccttggtcccctgcttccagacccaaagaggcctacatggcattgtgcttccttcttagttgtaggaggtgtgagatacaatcatttgcctctgactttgagggttggtcctagcatgcccctgaccagtagccccttaaatacttcattgatatggaaggtctctgaatcttcgtgggcttaatctaccactctctgaagttcttatgtctttcaaaggcctctaaaatctctgccatgtcttgctcatccagttgttagcatgatgtcattgatacagtggactttggaatctaagtggggagacactggtaag

SEQ ID NO: 83863 - DNA, 203 bp, Homo sapiens
ttttttttttttgaaacggagtctcactctgtcacccaggctggaaagcaatgacgtaatcttggctcactgaaacctccgcctcctgggttaaagcgtttttcctgcctgggagcccaactacttggaaggctgaggttgcagtgaccccaaatcgaaccattggactcctgggggaaagaccaagactttgtctccaaaaa

SEQ ID NO: 83864 - DNA, 385 bp, Homo sapiens
gccctcttaatgtagatatgaaaagacgttcttgattttaaggtagtcaaatatatcaatattttccagtgtaattagtgctttttgtgttcaattgaagaaatctttccctgccttaatatcatattcttctatacgttatcttctaaaagcgatgtgattttgcttttcacgtttatatctacatcctacctggaatttgtttttgtgtatagtgtggagtaggtttggaggttcatcttgtttttccatgtggatatttcatggttccaataacatagattgaaaagatattgtatctggcagggtttgatcaggagaaagaaaccacaccagttatttaaacagagtttaatatggaaaaaatgttaattaggcataaagt

SEQ ID NO: 83865 - DNA, 611 bp, Homo sapiens
cgttacgagcagaatttttttttaaaaaagctttcttgttctccaaggaaaatataggctttgtcacaataaagtcagttcctctcttacataggggaaaattaaaagaaatctcacaaaagaccagttgatttacctgcagtcacctgggagtttgcaagacccatgcttaggactgcagccttgtcggcaaatagctgtaaaaaacagagaagggcgtgtcagcacactgcctgttccttgcatcgccccggtcatgagaatggcccattgcattaaagtctgcaaattccacgattttaacaggtctcatatcaagtcccttgtaaggagaggaagatgggaggggcccaaataacaaaaccagctttaaacttcaaggccttgttagcagattctgaaaacatgatattgtttggggacaaaatgcagacaagttgacgagggaagggggaccttcgtccagcctctctaaaccacagctaccctggctccttgagcagagcttggtcagtttccattctgcccacacccttttcattagaagaaaaaaaggtatagataatccttccccatcccaccaggacacattcagatgagcctcagccttt

SEQ ID NO: 83866 - DNA, 365 bp, Homo sapiens
tttacgaggaataagtaagattaccattgtaagcagatgatatgaccttacatgtaggcaatctaagattccacaaaagaaaaaatatctgatagaactattaataataaatgaattcagcaaaggtgcaggatacaaaatcacacacaaaaatcagttgcattcctataaagtaacagcgaactatccaaaaaggaaattaagaaaacaattccatttacaatatcagcaaaaataaaatagtaataaattaaaccaaggaggtggaagaattgtacactgaaaattgtaagactttgctgaaataaagaggacataaataaatgaatagacattccatgtttatggattgatagacttaataa

SEQ ID NO: 83867 - DNA, 379 bp, Homo sapiens
ttcgaggtaaaatgtgaatgatttaccgcattttttacattcctaaggcttttctccactgtgagcccttgtatgcttatgaaggaaactggaagctgtaaaggctttaccacattctctacatctatagggtttctctccagtatgaatcatttcatgttctcgaagggcgtaggaagaagctaataatttatcacttttattgcatgcatagggtttctctccactatgagttatttcatgtttgtgacagtttctggaataattgaagtctttaccacaatgtttacatttatagggttgttttctccagtgtgagttttctggtgcatttgaaataaactggggaaaataaagttttccccacatactgtacatt
